United States Patent Application Publication US 2006/0024696 A1 - sequence listing, part 2

SEQ ID NO: 8739 - DNA, 1457619 bp, Lawsonia intracellularis
atgaagatctttttatagagatagtaataaaaaaatgtcagatagatatacattatagtatagtagagaatatataaaatgaccaagtgatattaaaagaaaaagttagaaaaatgtatagttattaattatagtctgttgaaaaaataaatatatatctgttaataacttcttagaattttgtttaaattatgtatctccaatatatctgagaaatcttagtaaaatgccataattaataaaaaattaaataaaacaatatattatgttatattttacttgggggaaatattctatagatgactcctagaaacacgataatccatctttgtttttttttataactctaggataattatgtcatatatgaatacaacatgggaaaaagtctgtgatagccttcaaaaaaggcttagtccaggaacgtttaaagtttggattgctccattagtagcttctgaacacgatggacaattatttctttatgctcctagtctatttgttatgaattggattcaggagcgtctttttgtagatattactgaagctgtgagtgaagtttcaggagggactatgaaagttcagattgaagtaaaatctagtgtcccagacaaaccacaagtttctttaactgattataataataaacaacatataccatataatggttttcctaatactaaagtttctatttcaagaagtcatatatcctctcaaacagaacagttacctttacctgtttcattagttaaagctccattttctagtcgttcatggcgttatagttttgattcatttgttgttggtccttgtaataacttagcccatgctgctgcacaaaatatgattaaagatacagcctcagtagatacgttatttttaagttctggtccaggtcttggaaaaacacatcttacacaggctgtagggcaagcactttgtaacatatctaacagagcaaatccaaaagtcgagtatctaactgcggaggagttttgttcttgttttgtgcagtcattacgaacaaaaaatgtcgattcttttaaaggaaggtttagagatacagatcttttccttttggaagatatacattttttacaaggtaaagagaagatgcaggatgaattgttagcaactattcgatcattacaaggacgaggaagtcgtgttgttttaacaagctcatttgctcctaaggagttaaaaaatgtcgataatcgcctggtatcacgattttgctctgggtttttagctggaattgaaaaacccaatgctgaaacacgtcggcgtattttaatagaaaaagcaaaagtacatgctgtcgtgttatcagaggctgtagctgattttttagctatgaagcttgtaggagatattcgtcagcttgaaagttctatttctaaccttgtacttaaagcaaagcttttggattgtatgatctctatggatatggctaaagatgttatagctcaatatacacaagatgatccatttatgaatatagactctattatccatgcagtatcaggaagctttggattacaagctgagaagctttattcacgtagtcgtaaacaagattttgttgttgctcgaaatacaattttttatcttgctagaaaacatacagatatgtctcttcaggagattggtgatcgttttcatagaagacattcaactgttttaaaaggaattgcttctattgaaagggaaattcaaagaaagtcacctactggccgtcagattgctaatacacttaatttacttgaacgtactaacattcatttaaattgaatagataactgtatataagatagcgatagttattaactagctatttgagttgcttgcatttttaatgcttctgtttgtgcatgagtactaagagcatctataaattcttgaatttcaccttccataacctttataaggctataaagtgttagattaatacgatgatcagtaactcgtccttgagggaaattatatgtacggattcgttctgaacgatcaccagatcctacaagagcacgtctagcatcagcttgttcaatttcttgttgttcctgttttatttgtaacaaccgggaagagagaacctttagtgcttttgctttatttttatgttgagatttttcatcttggcaggtgactacaatacctgttggtatatgggtaacacgtactgcagagtctgtagtattaacactttggcctccagggcctgatgagcgaaaaacatcaaatcgtaactcttcaggacgaatttcaatatctacatcttctgcttctggtaatacagcaacagttgctgcagaagtatggatacgtccctgagactctgttgtaggtactcgctggacacgatgtgttccagattcaaattttagacgactatatacgttgtctccttgaataagtgcaataatttctttaaatccaccagtatcagaatcactttgactcataatttctactttccaatgcattttttcagcatagcggcaatacattcgaaaaaggtcagctgcaaatagtgctgcttcttcacctcctgtaccagcacgaatttccagaagaatgtttttttcatctagtggatctttaggtaatagtaatatttttagctcatattcaagatgagttaactctaattcaagtttttttatttcttcaagtgccatttcttgaatatcaggatcaatatcactaataagttctttgttttcactaagctgttgttggagttttttaaactgttgaaaagtagtgactataggttttaagtcagaatgtgtttttgttagttttcgatattgttcttgatcattaaaaatattaggttgagcaagactacattcaatttctataaatttttgttctagattttcaagtttggcaaacataatttttcacatgttagaagaaagagatggttgtattaggtataattaatacagtgtgttgccatattaatttttattaatctatcgtattaatactcataattattaagataggaaatagttttacttgtagagaaatgggttattagaataggtaactatataaatttcctgccactctgtgtagtagcaggaatatactactgttaattgttttgtttattgtgttgagcatattttttacggaagcgatcaattctaccagctgtatcaataaaacgttgttttcctgtaaaaaaaggatggcaagaggaacaaatttcaacctgcacattttcacctttggtagaaagggcttctatactaaagccacaagcacaagtaatagttgctttataaacttgaggatgaatatcttttttcatagagtacacctttcagattttgaacaaatatacatatactattttgttatgactagcaagctaatatttatgtgttatattatcactatatatttttataaataataagatgagaagaaagaatggccaaacataaagtacgtgctgatgaacttgtttttttacaagggttagcagaaagtcgtgaacaagctaaacgacttattatggcaggtaaggttacattaactaataattctacaactataccattacgtttggaaaaaccaggacataaatatccattagaaagtatctgcagtttaataggggtagaacgttttgtgagtagaggagcatataagctattaactgctctagatttttttaaaattgatgtaaaaagttgtatttgtcttgatgcaggcgcatctactggtgggtttacagattgtcttttacaacatggagcatctaaagtatatgcgattgatgtaggcaaaggtcaattacatgagaaactgtatactaatgaacaagttataaatattgagggagtgaatttacgtacagcatctaaagatcttattcctgaagaagtagatattttaactattgatgtttcttttatatcgcttactttgattttaccgtcatgtatacgttggctaaaggcttccggaattattattgccttaataaagcctcaatttgaattatatccagataaaataaaaaaaggtgtagtaaaagaaactagcttgcaatatgaagcagtagaaaaaattattcatttttgtcaatcagaacttggacttatatttattggtgttgttccgtcggtaataaaaggtccaaaaggaaatcaagaatatcttatttacttgaaaaaacgttaataatacttattataatttgtattctatattatgtaggtatataaatataaagaggtatgattatttattcatttaaggaagagaaataggtctactcctcttccttttttacaacaataatttttaactagtttggtataacaccacaagctatacgagcaccaccaccgccaagaggaagaggtttatctgaatagttatcaccaccagcatggatcataactgtacgacccttaatttctttaactgttaatcttggagctaagagtgtttcttttgctattccatcagctttaactacaagtctaggtaagtctcccttgtgtccattaccaagaggtccttcatgttttcctgttttgtcaggatcataatgaccatgagcttggagtccagctgttagatgtccatcatgctcagcaggtccacatgatcctccttcatggatatgaaaaccatgttctcctgcaggaaggcctttaagatcagtttttatttgtagacctttatctgtatcagtaaaagttactgtgcctatactctgttttattccattgtcatcaatcatatggacttctgaagtaacagaacatgctaatactacactagtaatactagttaagagagaaatagttactattgaagtaacaaaaaatagttttattttcataataaggaattcctttttaataacaaattgtattatataattattacattaacatcctcatatcattgtataaaaaaagagaggtatctggcaagtattacttatttattttattgaaattttttgaaaaattatttttttcttacttattaatttttatagataaactcaagagaacagatttattttatattttaactactttttttgagaggtttatactttggttaattgaagttttttctataatgtataattatcttatgatacactatacccttttttatttcccatatattttggatcttcatgttattattcattttatattataatataatgttataaaattgattttttatcgatacttagtttagttaactatctaaaaaataaagacttaatttctagttaaaattaatatagatggcttcttgcaatattttttatgttaaatatagattacataaattaaatttaattattactatgaaattattcttttaagctaaaaatagctataactcattattttttaatgataatttttatttatttctataattaagaaaaaagtttttgttttaatggcacaaatagtatatacaacctaacgacatgtgtatgttatacatatggatacttttataataaaatggagaaaaagaaatgagtgataaaggcaagacaggtggatctatgccggaagaagattttacaggctggcgtgctatcctttggccagtatataattttgagttaaaaaagtttttgccaatgggtttaatgatgttatgtatcttatttatctacaggttagtccgtgatataaaagatacattaatggttagtcaggcaacaggcggtggtgctgaaactttaggttttcttaaactttggggtgtaactccttcagctattttatttatgataatctttgttaagcttgctaataaattaagtaaagcaaacttattttatacaatagtaagctttttccttggattttttgttctatttggcttggtaatttatccactgacagaatactttcatatgagttatgaaactatttctcaccttcagactacaatgccaagattatattgggtatggccaattataggtaattggagctatgcaattttttatattctttcagaactttggggtagtgtagtattatcagctctattttggcaatttgcaaatgaaattacaaaaattagtgaagcaaaaagattttatagtctttttggttttgttgggaactttggactattagcttctggttctataattattatttgtgctaatatagcaaaaaatagtgctgtagacggaacaatagatgtatttggagaaagtttaaagtatcaaatgttagctgttctgttttttggtcttctattactttatttgtatagatggatgaacaaaaatgttttaacagatccaaagctttatacacctggagctggttcaaagaaaaaatctaaaccaaaactagggttaattgaaagtacaaaatgtattttaacttcaagatatcttttaatgatatcggcactagtcattggttatggaatttctattaatcttgttgaaggagtctggaagggacaaataaaactactgtatcctgacccaaatgattttaatgtcttaatgggtaaactggctctaacaacaggttttgttacaattattatcatgttaattggagctaatattttaagacgtttttcatggagaacagcagctctcattactccaatatttttaatggcaacaagtgttattttctttggcgtcattatttatgagaataagatgggtcttgatgctaccttatggggatttggtgttttgctacttgctgttgtagttggtttaatgcagaatgctttttcgaaaggtgtaaagtattctctttttgatgctacaaaacaaatggcttatattcctcttgatcctgaattaaaagttaaaggtcaggcagctgttgaaattcttgctggaagacttgggaagtcaggtggagctgcaattcaatctattatgcttctaattataggtggaaatgtaactttagcaagtcaagtagagttcttaggatcagctgtactagtagtagttgctttttggattatttctgtatttggtttaagcaaacaatttgaaacattacagtctgagcaacaagctgaagaggctaatagtaaagaaaataaagaagttaaagatggtgagctctgcacaaactaagaatataaagaacatcaattaacttaatagaaggagttaggttaataacaggttataacataatgttatatgcttattctatgagttaatgattttttgattttgtaacctagcactctacctctacttagggtatggtgctaggttatttattatttaactattttattcaatatttttactataatactagttgaataaccgcttaaagaaattgctttattctttaagagcaaccatgggagatataggaagaagtccaaaaataactaagagcaattaatatgcaaggttaatattagctttgggtttcttctttatacagaaaaagtatagttagctagttattgtttaataaattactataatttttgatacatactctagtgaagtattatatgttacagtaaatatgaaaaaagtaaataaagttaaataattagttgtattatcttaacaagatgaggagaagatataaagtaactattcaacttgtatatttttatatattatttatttaagaaagcttaaactcttctaagctcataaccttagattttaatggtagatttaagacaaatgtatcattatcgttatagagagctaagtgataacgtagatgtttgtcttctattttatgatttagatatggaacaatatttgttaatttctcaaaaggtattgcaaaaatataatctttatccatcattgcaataataaaatacccttcatttgctgattgcaaaaagttttccatatagaaatggtaaacaacccagtatgcaagctttttttcatagtatctcctagaaaatgttataacagcacgtatacttttatctgacgattcaaattatgttcttctatacttaataaaaattgtatttttatttttagctaaaatagtaatagcttgctgacgtttctcttcaatcaactctataggtgtacgattggttattctttctttttttaatacagtatctattggattactagtagtttcagctggttgttgacaaggttcattaattaaatcagtatctgactgtgaattattaaattcttgttgtattatttcattttcaacacttttttctgcatcttcaatactaagaaagacaacatcaactaatctatcaagccttgtatattctataggttcaataagagctcgtattttttccaatgtatttatatcttgtgtcttctctttaataaaaacaaggctaagaagagcttctatactaataagacgagcatcccatgcatagcgagatcccctaatttgtgcttctaaactatttgaatcatccctaccaacgacaaatagtaccattgcatcttgtgatacattattagtagtaatacattgttttttatacgaaaaaacttgatcaagccgtatattataataatctgttgtttttacttcaataataatatcccgtgacccatctattttccaaattccatcaaaaccaatagcgtttttttttacctctataaagaccatttttgacattatatccaagtcgtcttccaagttcatttgtaatatcttgtaatacaaagcctgaattatcaaaggatgattctaaacagtctttaatataaagagagaaatattttgtttgaattttagataaaaattgtcgtagctctagtgatgttgtattgttatcctttaagttaccatctccagccatagtaacaatttgtttgatactcatagagagtacattactggaattaccttcataaagattgagtaatgccattcattaatacctctatttagttgtattttatacctaaatacgattaataataatctatgattatttctaataaatactatttaaattttaatagttctggaatttaaatacaattttgactatagttataaatactatgtagtgtggtttttgtatatgtattagtagttaactttgttaaatgtagtcatatttctatagctaattccttgtcatccctaaatatagtgataatttcaccactatgatattaatattaatatgtatatgaagaaagtatgggtgagggagtattataaatagatatctttttgagggagtatctttgacttattgatagaaaaaatactaatcaatgatagtggttagtaaaagaaatgtaaaataagaggataaaaagggtttgtataataaattgaagtaactggtgcggctgaagagattcgaactcctgacctacaggttcgtagcctgttgctctatccagctgagctacagccgcatctgaaatggcttctaccttgtgaaggacataacgtcaaccttttttatgatttttatccaccatttttacagcttttgtccaatttttatgttttttataattaaattcaataggttaatctagagtgtctattatattttattgtattctttttataagagatgttagtatttaatcaaaaccttataactgtaaggcattatgatatgcaaggtatatatgtgtaaccagtctatttaacacaagtgtagggttgaccataatatgtagagctgattcactttgtgaaagtatatcttgtaaattaagaaaatctacaggagataatatagataaacattctacaagttgattttttctttgtttttttagtgataaaacaattgtttttctgattaatgaaataatatgttgtactaatgaggcttcgactacatttttatttgtggtaaaattaaaccaatttttaccagttattaaaaaagtagtaagtttttcttcccattcttctattagctctgaggaggatgaagtcattactgacgtccatggaagtgttattgtccaagatctagaaacaagtgttggtaaaagttgttctctttgtggtacaagtagcaaacaacaagtttgtggatgtggttcctctagtgatttaagtagtgcattagcagcctcagtacggagatgttgagcttcagcaagtatgacaacttttttcccattactatgggcaggctctccaaaaactgttcgtaatttacggatgtcatcaatttttatacttccttctgctccatgtaataagaaaagatcatggaaaagctttgctccaatttgtaagcaagttggacaagttaaacaaggtgttccatatatacaatttagtcgagcagcataccaaagggcaatagaaaatcgttcatctaatgttccaccttcaataataagtgcctgtggaggattactagctatattatttagtaatattctaacattatgctgagtttgggctgttgctaaagtaaatgcttctgttgcttgttgttgtgttggtagatcagagtttattttctgtttggctgtggacatagtaaaatgattattccaatgtaatattatatgtcttatgctgaatagcagttacaatagagttaatatatgtttcatgagatgtaagataaaaagatagggcacgagcaaaatttttacccatgtatccatctataaagagttgactgacttcttggacaagcagaagcacattctgacctttagcaaggataattttttcttctcttgtcattgtattcagtatggaacgaaatgtttgttgtgcataaggttgatacatccaaaaatacataaagtctaatgcattaataatactttctctttgtaattcaggagcttcttttgaagtaattttgaatagttcataaggctttgaaagtagaaataatatatctagatcaggaaagcgtaattctaactttgtataccaattaaaaaaatgttctaatttggttttataatcccaagagcgaagtcgatagttattatttttatctgcaaatccttcaataacaccagcaacagtatcagaggcagatttagaaataattgcagcacctggttgaagaactgctaaaggatttgcaatattaaaaagtaacagtgattctataaggatatcattataaagaatggagagtggaactgcaaaaatacttctaaataaattaccaataatagcttctttaggaaagcctctaagaatattgtgtccagctatatataggctattacaaatagctatcactgtaaatacaatgatgtaatgattacttaacgtgaacccaaaagttttttgtaggattaagtcatgaataataagttcaagcaaaacaacagataagcctgtatacattaatgaatcacaaattctactccaacttataaagtttttccagcggagtaaagaagtttttgagaagcttccaccacctagtattgcttgggcgatattacgtattcctgttataacaaaccaaatagttgaaccaaaccatgcaagtacccaccactcttgagtatagaggaaagctagtgttgcaggaacaaaacctataataatttttaacagatttgcacattttgtattgagataggtgatatttggccatgaatttgtttgtttttttttatcaatttttctaaggtaaataccattatctggtaaagagcctattccacccattgcaatgatattaccatagggtttaatttttatattagcaagtgcttgccattcttcttttttttgtctgccaagcattctgaggccaggtagttttctaagaaaagaaagaattttataattaattccttcagtatttgtagtaactatccaagttttttggaaagctaatggtacatgaacaggaaggatcataggattgaataattgtttttttgctaaaactcttcttgaacttgcaggtaatgtttgtggtgctgcaagacccataccatgtcgtaaatttgagttacttgttgagtctgtaccaatacgactacgtagaggacttatcttataaggagcttgtaatattggtaagttacgcaaaataactataaattttttataacgcttgtaacttgcctctgtatttaacaattctaatcttcgaatcatacttacaagaagctgtttaagacgtaatatatttggatcattaattgctaattgaagttcattaattgcagctaaatgaataagatgtccttgttgccattctttaaggttaaaaagttctaaatgagtgatcattcctttacagtcccataagagttcaaggacatcttcagctgttaattttgcaagttgtagtgttatacgatatccacttcttaggctagatacatatttaagcaaattatagggggataattttaaaagttctggcagttgagtgggatggtcaggagtaaagaggttagcaatttcaggattgttatcaggtgtgatccaccgttcactaattgattcaatagttatcatattcattttatgaatatgatgcgtaatttgttctacctgctcaggagttgctattagcatttctttttttaaagctgatgttttttcatataaaagtggtaaaagttgtttatggatacactcagtaagatgtaatagagatgtctgtccttgtcctacaaatgcaaggaattcttgtggctgaatttcaggtataataatttctaattcattagcaagttctaagcgatattttgtgttccaaatatttagtacagttaatacgttttgttgcatccattgagaaacttgttttcctttttccatgagttcatacacaggtttttctgctaaaaacgtaagaaaactttcaggatctgaaaaaccacgaggagcccaaacaactcttataaaacgattgtggaaaggaatttgaaattctataccaatacggacgataatacctacaatacttgctgcttgtaatacttcccgagcgatttctggctccacataattatagtaaacaactgtgagtttacggatacctttaacccatgcatccataataagatgtgttgcattttttcgtccttttgtgtttgaatcatgcacatggtgatccatagttagttgattccacttttctggcatttctaataagtggtgtttagtaagcatttttcttactatatttggattcccttcagcagttcgtctaaagtcatgcacaagtttaagttggtgactttcatcatgtctagagcggacgatatctttcataatttggataagtacacgaccagtattatagcgaaaggttgtacgagcactatgtagaacttcatcgtgtaatgcttggagggcatatagcctatcttttgctttacctttttcaatattagttaagaggttaataacagcatgggctacacgaaattctcttgttgttgtaagttcaaggataccatgtggatgaaggttaatatcaattgttggctgttgttttatatcagagtggatattatcaagggtgtcgtttatcatccgaaggagttcacggtcttggcggtcaaaaaaaatagaagggatcatttatgctatcctaaataatattgtaactaactgatagattgtatcttatctaacaatatgtagatcgtctatatgtcaggataatatatagtttgatagtaggtttaattaaatattttttattttcttcttataaagaagaatttttattatagctgatataaaaaataattattttactttaaaataaagtagaaggaatatatgtaactattttttatagcaagataaaataatttttattcattacataataagttatatttctatctagtatatagtataactagttatcatttatttaattgtgataactaataattgttataaattatatcttaataataaaaaagaatagtttaactatagtatttcatttataaaatttttagcttagcttatagtttataatagttaataataaattgatagttagtagtatgtaatttatctatgtaatttgtttgctttttatagtatctaccttgtttttttattaaataatagtatgttataaaatttctgtattatttttctttttacattgacattactgttttagtaatgcatagttgtctttgaggtgccgtattatgttcaagtgtattgaactttcaatgatacgggaatgaggttttttttgagaggtttttttcatggctaagtctatttatgttggtaatcttccctggtctgctacagaagaacaagttcaaagtcttttttctgagtatggtcatgtaatggctgtaaaacttgtaagtgatcgtgaaacaggtcgtgcacgtggttttggttttgttgaaatggaggagcctggtgctacagctgctattgaagccctagataatgcaaattttggtgggcgtactttgcgtgtaaatgaggcaaaacctcgagcaccccgagcaccacgttactagtttttacataaaaaaagaacctctagaattctagcggttctttttttatgtaaaaactagtaacgtggtgctaacttagtagttagcctaacttagtttattattattattatataaaaataactgatagcagttaattaggttggagtagatggattaacttttcttcatatacttatatatcaaattattttatccaaaaactattcttatctaattttgctttttaaatttttcttctattgattacgtatgttttttgcttgtgaaaaacatgtttttatttaagataggttgtcaagtttattccactcatttattttttccttaataaatagaataattttttcgtgttcatttttccctgttcctgatacataaataggagcaccaaatgagaaatgaatagttttttgaggattgattggtccaaagtcctttatcaatttcccttcaccccaagcatctgttttaagagctaaagggataactggcactccagtacgtcgtgcaagttttacacctatgctattaaatttttcagggagaaaggtatgtgatcgagtactttgaggaaaaataataagagaggttccactgttgaggtgatttgaaccttcctcaagtacttttgagaaatctacccttgggttttggcgctttataataataggatttcttgaagataaaatttttccaaaaaatggataactaattaaactttttttcacaataaaagtaacaggtttgtatggctgaattattgaaggaagaacaaatgtttctagtgtactcatgtgattacctataataatgcaaggggagttattattatgtatatgttctaatccttcaatattgaattgacagccaaccttttctaaaacactaaaaacttctttacttgattgaacccatgattcagaagtatattttttaaaataagctttgataccacctttggtaatgatccataatattggaagataaccaatattagggaattgttgtataaattttggaatagacttttgaggagtcttatatgaagattggctaaatggtgtgagagatttaatcattttgggctctcttctggtatagagtatttcttctttatatggttatgccacatatttaacttaggttcttctccctgttcttttgggtagtaaaaactgcggttactaatggttgatgggaagtattcttgttcaacccaggcatttggatagttatgaggatatttatattctctaccatatccccattgcttttgtagttgagtagaaggattacgaaggtgtaatgggacaggttgtgccccatgaagtcgaacttctcttgcggcattactataagcagcataagttgagttactctttcgggctaatgctaagtatacaactgtttctgaaagaggtatgaatccttctggcataccaacaaactctacagcttgttggcaggatacagctaaggataatgcttgagggtctgctaatcctatatcttctgatgcagatataataagtcttctacagataaatcttggatcttccccaccttccaataaacatgcaaggtaatatagtgcagcatcaggattacttcctctaatagacttaataagagcagatgcatattcgtaatgactatctccatctttatcatgtctttcaaggatttcaggtaggtttatcttaatatattcaagtactcttttttcttcaggcagtattgatatatattcaataagattaaatagtgttcgtgcatcaccatgtgcggtagtggcaaggaaatttataacatcatctggtaatagtatgttgagaaaaagagttccttttttaacaagttcttttaattcattgtatcctaattgtcgtagttggagaacatttaagcgtgatagaagctgttttgttacactaaatgatggattttctgttgttgtagcaagcattgttagtttacctgattcaagtaaaggtaaaaagaagtcttgctgagctttagaaaaacgatgtatctcatctaaaataagaatatcaatatcagtaagcttctggcgtaattgttgtatccctgtttctggtgcgctaatacgaagaatatttgtactttttttatatgctaatagtaaggctaaagtagacttaccacaaccaggtggaccaaagaaaaggaggcttggcaaacgtggggcagatataatgtactgtaatcgttctaatagatgattttgtccaataaaagtatctaagttatttggtcgtaacttttcagataatggtgtaagagacataatagctccatattctaaaatagaaagaaaattaggttattctagtaacactgcatcttctccatcaatttcttttacaagtacattaatagtatgttggcttgttatattagtggtgtaacctatatagtcaggttgaataggaagttctctaccacctcgatcgataagtgtaaggagtttgacatgggtaggacgtccatagttgttaagtgcttctaaagcagctcgtattgtacggccagtatatattacgtcatctataagaataactgttttatcgtcaagaatagtaggaataaatgattctccgatgatgggatggagttgacgtgttgtccagtcatctctatagaaattaatgtctagggtgccaataagtggagattgttttgttttctctacaataactttttgtagacggttagctaaaattacaccacgacgttgaataccaataaatagtatattatcaaatgttatatagttgtctataagttcttgagacaggttaactatagctgtttcaaattgatttatagtaaaaattatttttctatccatggttatccttttttacatacaaatacacaaaattttttcttatgggaagttttacaatatacataactttggataaaaacagttgtagcaatttatagtctatttattatgtcagatagttactatctattataaatatattatcatttcttaaagtctgtaaagaaagattaatagtagtgagttatgataatatgtcaaatagtaaataaaatcctaatagtaaaaagtagtaataccttatgatagctaaaaaaaatacctcttttggagagatagaattaccttggtctaattataaaacattttatcttgctcatgaacattggcaagagccttatatattaaataaaaaagaatcgcatcatcttttgcatgtattgcggattcaaataggtacagagattcatgtattagatggaaggggaagagaaggattattttctgttaaagaagtaataaaagatagagtaagtctctcttacattaatgactggatgcatcctgaacccacaagaaaagttgttcttgcagcaggatggacaaaagcagcaagaagagggtggttatttgaaaaagctgctgaacttgaagcatgggctatttggttttggaaagctgagaggagtcaatttccattatctgaagctaaaaaagaatcttggcaaggtcagattattgcaggagcaaaacaatgtaacaatccgtggtttccttcattacaattatttccaaatggtatagaagaacttatttataatgtagatacaataggttgtgattttcggcatgtattagttgaaaatacttgtggaccagcacaacctcttacattagatatgcttaagcaaactggtttaactatttgtgtccttgggccagaaggtggttttacacataaagaaatcctaaaactaaaggaagcatcatttttgtcgttgacactaggagatagagtattaaggtgggaaactgcagctatcctttgtcttggattgcattggtggaaaaaagtatattcctaattaatactttgttacttgttagctttttctccaatgtaaaggtgtacaatacctgaagataagggagtataataagcttgatgaaagcctgctgcacggatttcatcaagtaattcatcaggatgagggaaatccataatactttgttttaaatagagatatgctgaagggtcactcgagagtttgccaataaatggtaatatttttgtaaggtaataattatataatcccatccaaatacgttgttttcctgttccaaattcaagtatagccatgcgtcctccagggagtaggactctcgcaatttcagagaaagcctttgtacgagggacaatattacggataccaaaggctaatgttactccatctatacaagaatcaggaaacggtaaaagttttgcgtctgctgttattggccatactcttgtaatattagctctatggagttttttcattccttgatatagcatagaaaagcagagatctacagcagaaatatgaagttgctcataccgattgtgtaatgcaatagccacatcaagtgttccagctgcaagatcaaggatacggcctgtttttccaggttccatagcttcaacaagacaatgacgccaataaatatctagtccaccacttaatattctattcataggatcataccatcttgatatgcgtccaaacatagaattaatagatctatcatgttgggttgtctctatatgtggattctgagacattttctttgtttcctatttaaaatattttagtaatagtaatctatagaaaaatatacataaacataattaaatcaggatagtaaatagctcagagtaattgaggaatattagagtttttggacaacatattagaaactatattaagtaatttcatctttagctagatagagaatgtactaggataagttattttaaactgactataccctgtattctaacatggcatgttgttattgtgatgttgaccatgtcgttttctaattttcgtatgtttcagtaccagtactaagagcacttacttcacatgtttcatcaaaaggttctgtaccaagatctccttcaagttttgagacaactaaagctccaacagcatcaccaaaggtgtttacagctgttcttatcatatctagtatccgatcaattccagcaataagtgttacagcttctaatgggattcctacttgtgtgaatacaagtgtaatcataataagtccagcaccagggacgcctgcagtacctatagaagcaagtagaccagtgagaacaaccataagttgtttttcaaaccctaggggtatgccatatatctcagaagcaaatatagctgcaactcccatgtaaatagctgtgccatccatgtttatagtatttcctaatggtatagaaaagctagatatgcctttagatgcaccaagagatcttacagcttgcaaatttgttggtaatactgctgcacttgagcaagttgtaaagccaataaatgtaggttccataagacgtttaaatacagccattactggtagacctgtagctttaataagaggaacataacataataatacatgtgcaatagatgctaagtaagctataagcataaatttacttaaaggtaacagaacatcaacaccatgtgtgctaattgtatatgaaattaagccaaagacaccaattggtgcatacatcatgacaatatttgtcatgcgaaccattgtatctccaataagctcaaaacttctcaatagaggtttcccaacttcaccaagagaactaagggcaaaaccaaacataactgcaaagaaaataacttgaagcatgttaccattggccaaagcttctattggattaagaggtacaatattaataattgtttgaataacacttggtggttcaaccatatctgattgtgtagtagctatagaaagattaaaaccaactcctggttgaaagaaatttgcaaatataagaccaatagtgatagcaatagccgtagttgcaaagtagtaaataagtgttttagtcgcaactcgaccaagtttattgatgtcgtgaataccagctgcgcctgcaacaatagtagcaagaacaagtggtacaactaccattcgaataagcgttatgaataattgaccaagtggacgtaaatagtttgatgtgatctcttcagataagaaaataccagccataataccaagaaaaaatccaataatcatttggacaggcaaacttattttcgacttagcacttgtcatatattctccataagcaatcttcgctaaccatattaatatgatagctactaaagctattttttacttttatttcattaagcagtgtaaattgttcttatttgaaggtcaagttttatgactgtactaagtagttatgtatatttttataataaaaatatgatgttgttataaaaataacaaatgttattttactatttaaaagttagtcgttgctatctactttttatttatacagttaataataaaccataaaataaattattatgggatgtatatagtatgttaagttctatatgtatgagataaagagttattatgtagaattagattttttattacgtattttttgtactaacccacttgttgaatgtccttcaagaaaaggaagacttaatacaagaccattattgcgctctacaaactctttacctataatttgttctacacaccaatcaccacctttaactagtacattaggttgaatagcttcaattaattgtaatggtgtatcttcttcaaaaccaataatgaaatctataagttcaagatgagctaatacaaaagcacgaatatggaaaggattaaatggtctatctggatcttttcctaaccgtttaacagagttatcagtatttaatccaagaaccagaatatctccatatgtttttgctctagtcagaagatcaagatgtccaggatgaagaatatcataacaaccgtttgtaaagataatttttttcccattacttttaagatattcaagttttggaagtaaatttgttagagtaacaattttgggatgtgttaatatttgattatacataatactttcactcatatttgcttgttactaacctactatttataaatagcttctcggacaagattcattgtatcttcagcttttatagttgctctttggttaccatcagttagcagatcatcaatgtagtttttgttctcataggttgcacgacgttcatgaaatggattaaggaattcttttaaactttgtaacaatatttttttacattctacgcatcctagtgttgctgttacacaaccttcacgaatttcatcttggatgtaaggagttgtaagaagttgatgataagggaaaaggttgcaaacatcagggttacctggatcactttttcttagtcttgctggatctgtatacatttttttgactttatgagtgacttcatcaaaagaatcattaagaaaaattgcatttccataacttttagacatcttacgtccatcaagtcctggacattttgcagtaggtgtgagctttgcttttggttcagcgaaaatagtgccatatagattattaaatcgtctagcaatttcacgtgtaagttcaaggtgaggaagctgatcttgaccaacaggtactaactgtgggcgataaagaaggatgtctgctgccatgagaactggatatccaagaaatccaaaatttcccaaatcttttgtagtgatttcttgctgttgctctttatatgtaggattacgttctaaccaacttaaaggagtgatcattccaagtagaagattaagttctgcatgttgtggaacttttgattgttgaaaaataatactttgatgtggatcaattccagatgcaagccagtcaataacaaggtcatatatgtattcttttaagtgggttgtattagcataatcacttgtaagtgcatgccaatctgctacaaaaaaaagtgcttctatttcttgctgcatagataaccaacttttgatagcaccaaaataatgacctaggtgtaacctccctgtgggacgcatcccagaaactgtacgtagtggcatagactgatgcattagagatggcctcctcaatcttaatttagtccaaataataaggtgcaaaggatgagcgatagattaataagtgggtataaaatatatcctagtaaaccagttaaaagaagagcaataaagataacaaaaccatatcgttctgctaacatatatttatagccaagttcattggggagtattgcccagaggattttactaccatcaagaggaggaatagggagtaaattaagccaagcaagagtaaaattgatgataataccacttgagaacataagaaaaaaataagtccatacagaagactgctgccattcataagcagggaaaaattctagaaagattcgtaacaacaatccaaaggtaaaggctagaagaaagttagctgcagggcctgcaaaggatactaacatagtatctttacggagatcataaaaatttctagggttaataggaactggcttagcccaaccaaagataaatggacttgttaggctagttatagtaaagaccatgagtcctagtggatcaatatgatgagttgggttaagagtaattcttcctaacattgctgctgttggatctcctcgtcgttgtgcaacccatccatgtgcaacttcatgtaatatgattcctaagacaagaggaacaaaagctactgctattcgcttaatagcatttgtaatatcaaattcaaacatagctattgtacctgtaaacgtaaaaatcgttttttaccaagtttgataatatagtcgccaggttcaaggggtaactcaacatcatgataacgtttatcattcactgtaagagaaccttgttttataaggcgttttgcttcactacgagaagtacataacttagagtcagtaagaaaagcaggtggcttacttgtttcaccatagttacatataaattcaggcgtatcatcaggaagagcaccattaacaaaaacagctgtaaattcttgcagtgcttcataagctttttctttgccatggtattgtgttacaatgtcaacagctaactgttcttttactttcttaggatggagatgtccttctttaacattttgttttaatttttctacttcagatagactactagtagagataagttcataatatcgccacataagttcatcagagatagacataactttactaaattgaacataaggttgttcgtcaattccaacatagttaccataagattttgacatcttacggactccatcaagcccttctaatagtggcattgtaagaatacattgaggttcaatattatagtgtgacataagtgtacgaccaactaataagttaaacttttgatctgtacctccaagctctatatcactttttagagccacagaatcatacccttgcatgagtgggtatagtaattcatgaagagctattggtgtattttctttatatctgttagaaaaatcatctcgttctaacatgcgtgcaagtgtataatgtgaagctagacgaataaagtctactgatgacatagacattagccatttagaattgaaaactacatttgttttaagaggatcaagaattttaaaaatttgttttttataagtttctgcattagcttgtacttgttcaactgttaatgctggtctagtagtggatcggccagaaggatctccaataagaccagtaaagtctccaataagaaaagtgacattatgtccaagttgttgaaagtgtcgtaatttgtgaataagtacagtatgaccaagatgaagatctggagcagtgggatcaaagcctgcttttacaacaagaggtttttcattactaagttttttgcgtaatgattcttcatttataagttcaacataaccacgttttataagttgtagttgatcatcaatagataccatgtattaccaatattatgtatttaaagctaaggttaaagatactgttaattatatacagttcagttgttattaaaatatttcctcataatagctgatactactatgattactctaggtaagcaatatatttgtttttgattggttaccttatatatatatattaagaaataatagacttattgttagagataagatgtccttcacgatgtaatagccatgcttttattgagagtccttttttccccttaaaaccagttagatgattattaatccctataactcgatggcatggtacaacaagtggccatggatttttagacataatatttcctactgcacgtgctgcacgagggttaccagctaatgctgctagatctctataactaatagttgttccatacttaattgttgtaagggtaagtaagacttttttttgaaaagagttttttggaatagaattccaatttagaggtaatagatcccattgaacaagctttccttgttcataagacaataaaagatttttaacctgtttcccaatagttgtagtagggttaaatggattttttaaccaatcaatgtctatttgattaatcaaattgtttactgaatagatagtgagggttagtatttctccagaaatatattcttgtataacttcatgttgtgatgatagtagcatatattttaactaacttgttgccaatggagtaaggtacaccttctccattgacttgtttttttattgtgttgtattgtattcagctattactttatttacttcttccatgaacacattaagtaatttatcttgtccatgtacgctacggataacttttcctttagcaaaaataattcctttatcacgtcctccagcaatgccaatatctgcttcttttgcctctccaggtccattaacaacacatcccataacagctattttgagtggagttttttcattaacaaggcatgcttcaacatctttggtaagtcttataagatcaatttctgctctaccacaagatgggcatgcaataatttctggacctcttcttcgtaacccaagagctcgaagtatctcccaagcaacagggacttcttctacaggatcttctgttaatgaaatacgaagagtatcaccaattccttctgaaagaagtattcctagtccaacagaagatttaacagtaccacgaataagacttcctgcctcagtaacaccaaggtgaagtggataatcacaagatttagaaagcattctataagcagcaatagtgtctaagacagaagaagatttgatggaaacttttatttcataaaatttttcatcttctaatatttttatgtgattaagagcactttcaaccatagcttcagggactggtcctccaaacttatcaataagatgtttttctacagatccactatttactccaattcgtatacttgctttatgggcttttgcagcatcaacaacagttacaactttttttcgttcaccaatatttccaggattgatacgaagtccttcaataccagattcaagtgctgttaaggctaggcgataatcaaaatgaatatctgcaataagtggcaatggagatgcgtcatgaatagcttttaatgcttttgctgcatttgcatctgggacagcaaggcgtacaatttcacatcctacagcatgtagttggtttatttgcttaagagtagcttctatgtcccttgtatcagtatttgtcatactttgaactataattggagcatcacccccaatagcaatatttccaatatagatcttacgtgttttttttcttatattcatagtgtcaaaacctttagttgtaatgtagttaaaagcaatatgagtaaggtagggtagtaaattaaaaaaggataaagaattcttacttgtaactgatagtattcataatatgttttctttgctgttcaagggcaaccttttgttcttcaaaagatctaaatccagcttgatataaagcatcattaacagtttcttcccatggccatgtggcatagataacagctttatggaagagtgtccggaattcttttaaagttttagcaatttttggcgcttgactagtcgttagatttttttgtagctgtgtgcataaggttgaaatgttcttattataccataattgaatatcttgatttgtaggattggtattgaatagattataaccatgttcttcaagtaattttttgagattgtttttatgttgtttggtgagccactggcccagttcagaaagagagatatttgaagcttcaatatcagcaatctcttgttttgtttgatagtatgtatcaggtacaacagatgcagaggtgataccactaatagttacaatacctcgtaaaatagcactgtttgcaacaccttgtccacagaatcctacttttttaccatatttttgacctgtaaaaatggtaaccaaaatagcccaaacaacagctggatcttcttcatcataaatatgagaaagagattgattatccctatctgtagcaagcaccatttgtgtcatgtcattggagccaatagagaatccgtcaaactcttgaatgaactgtcgagcgagaatagcattagaaggaagttcagacataagaaaaatttgtaaattatcttcaccacttctgagattatgcacctcactaagataagagcgcatagagcgagcttgttcaattgttcttacaaatggaagcataagctggagatttttagcaccatatagagaacgagctgccttgaaggcatcaatttcccagtcatgaatatcccgagcaactcctctgtagcctaacataggattatcttcaaagtcttcgaataatataccgccaagtaaatttctatattcatttgttttaaagtcagttgtgcgatagataataggctttccataaaaagccattgagaaaagcgcaagtccttgtgaaagtgtttggatataatgttcacgacctgttttatgtccacaagaacggataagggaaccaatagctagaggaatagattgtaattctttaatttttttattaataccacatcgctcacttacttctttccgaagttgctcaatttgacttattgtcttctgtactattggattttgagctatatcagcagtatacgtttctatttctttttcaaggtctatacgacgcttttttaactgaggagattcatcattaagcgatagaagctgcttttgataacccataataatttttacatgttcagagaggtcagaagaaactttaagggtatctagggaagatgctgctaattctgtaagttcatctagtcgtttttcaagttcttttatctgtctatatgttgctatgacggcttctggattatgtggatcatttcttttatgtagcctttcaagttcttctgtatatccagagatgtgtcctacatgttcacggaggtgtaaatctaagtttacaagtcctaaacaaagatgttcttgtatagttttacggagatgtacttcaagttcatctatttttttttggataatagattctaatgaaccattatcaaaagcttcaagtgctgaaggatgaacaccaacgtttcctaacataaattcagcacgtaaaagacctacttcaaagtcagggacattacgtagacgtgataaaaagagtgattgacctatatctgctagtacaaggccaacttttgtttttgtctttggtaactcattgatatttatttctccacctgtttggtatagtggaagcagtccatggtaaacatgaccacgtgtaccatcaacagttacttcaagaccatcaagagcttttaaagctgctgagttttgtatacctataatagcaggaatacctagttcacgtgatgtgatagcagcatggcttgtatctccacctacgtcagcaagaatggcagaagctacacgcataccagggaccatatcaggatcggtacgttctgctgctaggatatcacccttttgtattttatttagctcaagggctgaattaagaaagcgaactttaccttgtccggcacctcgagaagcaccatttccttcaagaacaatttttgctgttgcagcagcttgaggatcaacttcacaacgatgcataaagatagtgttaggatagagcataagctcatcgttccatcgtgtttcaggtcgagcctggacgaaccatatagtacctttagtatctatacagaattctgtatccatgatgatatctttataggctttactaatagcacggacacctttagctatttgttcagcttgagtaggagacaatgcccacattattgattctcgttcagatacaggaattttttttgttcctcctttttcatcatagataattttgagagttttgttacccataaagcgtatgataacttcattagcatcatctttttggtaaacatacattttatctggggtaaccatcccaccaacaatagcttcaccaaggccatagcttacatcaatactaacaagatcattacgtgttgttccacggcaacctgtagcagtgtcagcgctgaaggcagtaccagaaactacaggattgatcatacgcattatacatactgataatgatgtattttcaatagcccattcttgttttgcttgaatggcaaattgttcatctcctgtactttctgattttgttagagcatcaaggatagcttcacgtcgataaatcatggaacgtagattataggcagaagcacaatcccaatgatatgcaagaacaacggcatcttcccctaccatattaagatatgtatcttgtagtccagcaaatgcttttttacgagagtcttctccggctgctgacgaacgaactgctactgggacattattttcttctgcttcattacaaatttctttataagctatttttactgcttcaatgacttgtggaggaagagggactgatagaatagcacattgtacaagaatagaacgtttacgtaactgatctatattttcttgggaagaggcaaaaccatctacaacatgttcaataaatgtccgtaagcggataaggggtaatttatttgtatttccatctaattcatattgaataatagaggctatattacggacaaattttggtaagaattcatggtcttgtacgacttcaggattattccaattgatatgtgtataatgttcttcaacttttgagcgaataagtgcagcacaaactttagtttcatcaagaatttgatgaaatgcaagagaagaaatagctcgaaattgtggagtttttatttctttaatttgtccaagaagtgcagtattataatttttcccacctacaagtaattctgcatcttcacctatagtaataatatcagaacctgttaatactaattgtttacgtatagtttccactgagtttatactatcatggtgtgttgaaagggtctttttgctcattaggcttatccattatatcccataattaaagtaaaaattattctcaccatgtataatctttatataaaacttattctaaaaaaatagaaagattaaaagttgccaaggagaataagttataaagtatatataaaaataagagtcactagaaattatattattaattgatttttatcttaaaataaaaaatgtttttaattacgttacataaactacattttgtttactactcaaactctataactaaagagaaaaattatagcaaagggtataagcttccagataaaaatatttttttttgcttggaagtagataaaataagacctccattatcatgtatacctgctattattcctttatagtgttgatgttcatttaatccatctttgatgacaacactacaattttttaaacaaagatactgttctgcaagttttacccatgatgttttttggttaacatccctatgttctttatagcaaagatagacttgacttacaagggataaccataaaggaaggatagatccatatccagaaaacagtgggtgtggtggaagatttgatggttgtagtgaggcatcttcacgaattgtatattcattagaatttttattcatattaatacctactccagctaaaagaatatcatctctttcttcaagtaaaatgccacctactttacaccattgtttattagcaaatactacaatatcatttggccatttaagaaatacatggaatcctattttatttaatgcatgaataaaaaaggtactggcaattattgctgcttttgtctttgagaaaagttcacattggggtaatctaacagtagcatatacatttcctataggagaacaccatgttcttcctagttgacctctccctgctgtttgggaggtaacaataatacttccccatatagggagaagattttctttataaagagtatatgcaatatctaagcttgatgaacatgttgtatgtaaatagacaacttctggaaggtatattgtttttgaagaggacaaagaaggacatgataggcttgcttccatacagggaatagatgtattttttaatccatgaaggtttttatgaataaatgtgggagaattatcacgtagtaatagttcaggaataagctgaggattatgaataattatattttggttatttttttctttacttgattgtatatgaacaatccttaatgtcccattgatagattttagcatagtaattttgtataatgtgttatataaagtagagatgaaaaaggaaaaaagagttcttaataaattaaaaaagagttagcagtgtggttcttcttcttttataatttgatatgctttatttgattttactgttcctgcaatgccccaatacttagtaactccagctacagtacattcaaggagatcttctacatctgtgtcaagaacaagaacatccccaatttttaatcttaataattggtttcctgtaatctgtgtattacccattcttactttaagctctacaggtgtttctaaaagacgctctttaagtcgacctacccaagcatgatcaatttcaagtcgttctgtttgaaaacttgcatgaagttttgagcgaataggttcaattgttgcatatggtatacatatggtcatagatccaatagaagaatcaagttccacttcaaaattaatgacaataactacatcgcttggtggtacaatggcagcaaactgtggatttatttcagaacgtataagttctaattttacatcatgaacaggtctccatgattcttccatattatcaagagctatcttgattattctatcaacaataacttgctcaatacgagtaaactctcgaccttcgatttttggttgagagcctatacctccaaatacattttctactagtgcaaaaacaagccgagaatctacaacaataatagcatttcctcttagaggatccattttgaagatatttatgcttgtaggaactggtagtgagcgcataaaatctccaaattttgtcatatctatagaaataggattaagttctacacgtttacgtatagcatttgataaggcatttgtacaaagacgagcaaagcgatcatttacgatttctaaaacaggcatacgcccacgaataatacgatcttgattagctaaatcaaaaggaacaattccagaatcatcttcaggaatatcagtttcactttcaatttctccaccagaaagtcctctaagaagagcatcaacttcgtcttgagcaagtattttattcatagtattatttatagtgatctgaaatatttttatagttattgataaaagtattttttcaatctaatgtgaagttgtgcatccccagcttacttcatttcaacatagtcttcagattattattggtcaagttttactcattattttatgtcgattggttttctttttcttctataaggttgaagataaggagttttttatgttgtcaaaaataaatatattattttttttattagttataagttttttaagtatacatacgtcatctgttgctgttgaaagtgaaaagagtacttatagtgaccaacttacttctgagaataaggtttataacaaacaatattcaggtaatagttctacaaaagtatatcataataaggaatgtagatattttgattgtactgcatgtactataggctttgactctaaagaggaagctgaaaaagctggttatacaccatgtaggctttgtgaaaataaaaagccttcacagctatcacaggagacagagaaaaaccatcaagaatcgttggataatacaaaaaaagaacaaaacagtcagtaataatagtcgttagctactacttaaaaaataaacggttattagataacgttataaagagcctataataccttgtatgattataggctcttttgacagctttcaactattattatgaatattattttatagttgttttactaattttatattatttttgatgaaggatattgaagtattaggattaaaatagaggtattagacaactatagaataacaataactttttattattttttctttagttcttcagacattaagactggccctggaataacttgtcctataaaccctttttgtagagcatggtgtcctacaaatggggtctttcgttctacttgcatatctacaactttaacaacaggttttgcaccaacagctaaagggaattgatctttaggtatttgtaacataaaagatgtgcttcccacttgttgataaaaacctgtagtagtatctcttaaactaataccaaaatttcggattattaacacatatccttcctgattaaaaagcattgtgcgtgatgttcttgttcgtgcagtttttataagttgctctcgaagtgatagtggttttctagttacagatgatgttgaaggttcttcttcgcttgagctttcttcagcttcttcagctagttcgacttgttcacttgtggtaaatgctgtaggcttctcttctcgaggtaactcttgaagttgtcctcctccctcagctcctctaagcggtatttcttgaacttttagatcttcatctaattcttcgtctaaggtttcttctggtaaaggatctgtattactagttacaagtgtcatgattctagaaatatcttgactatttttttcacaatatgggttaagaggaaatggtgtatttacattcataatcatagctgaaaaatctgccattatagtttgtgacatacagatacctacaacagcagctatggatcgttcaggaaattcttttataagcatttctttatatttttctaatgcatcttcattgctatatttttcgtatgaaagtttgacattttgaaagtagggacgatctctaggagcatctcgagtaaagatgtcatatataccattttcatcaaattcatgttgatgtttgtcatcccacgtaagttctattgcacgtcctatcttttgttcaagatacaacatatgttcttgtaactctgtaggccctaagataaaaccataggcaagttgagataggggtttccctggatctttctttagttcagtaaggatatcttttactatagtttgtatttcatatatatcaataggtccttcaggatgttcttcttgccataatgcttgaagatatggaatgacaccttgtctaatggctttaggttcatcttttagttctttttctgcaacaaattcaatcattttgtttccaagagtcaatcgagctttgtgtagtgtttcttcatatgatttaccgccaagtggcataggatacggtaggttagctcttccgaaactagagcgtgcttcatattcaacaagttttgccatggaaagttgtacagcttctgattgttttgctgtaagttctggtgcaactctagcaggttgtggtttgagtcttgatcctagagttttttcttttgtctggagctctccctcatcgccaaggataatagtttttctatcaagcattgcagtaaaaagctctgtactatttcgaataagcataatggtatccacatgttatttagattttatattataaaaataaatataaaacatatttatataaatataaaacatatttaaactatatattataagatcatttaaaaaatattaagtatgctagatagaaataaattaaattaaaaaaatagagtgtaagagatattattccatttactaattatgatattctgacttcaattccttttttcctttgtagatttatatcagtaacttgaagcttaggttttgcacctaaaggaagaggaaactgatcttttggtagttgtactgatagctgaagatttcctaatttttgactttcacctgttactgtacttgttacctgaatatcataagagtatttaaatagaacattacttggtgtttgcataactattcttcttggattgtcaggagaaggtggttcattacttacattcattaaaaaattttctggcatttctaggctattagaaggaataaaagggcagagaggatatggtgtacccattcctctaataacctctgttataactggtgatatggtttgtgacatcataacacacacaactcttctcatagagatatcagggaattcttctttaattttatcctgatagagtgatacaagtgtttcattatcatactcattatgtccaaaacgccaaccacccaagaaaggtgtttctcttacacaatctttattaaaaacagtataaataccttcattatcaaaatcatttttatgttcttcgcagcatgtttctttgatggctgtctgtatattttctcctatgtatttcatgtgtggacctaactcatcagatgtaagatgataattacatgcaaggtggccaagagcatgaccagggctttctttgagagttttaatctgttcttcaacaaatgtttttattgtagggtagcaactgtcaccttcaggatgtttatttttccataatgattgtaggtatatttttactccatcctgaactgggcgaggttgatcgtgaagttcgttggttacacagtgtctaatcattgcctttccaacaatctttcgagcgcttgttttcaagtcttcaaatgaacgtccacagaaaggtaatggttctctaaggttgcaaggaccatgtttacttattgcatctttttcaacaagagttgccatagcaagtagtaaatcatcttgacttgtttggacaaacctactggctacaattgcagctctagctagatcataactataacctgcccatgtttgtgtatgaagctctccttctttatcaagtacaagagaatagccctcatccatgtacccaaataactctttactgttattaataagcattagaataatacctcgctacatttttacatgaattataggaaagtaattatttttaagctgaaatagttagtcatcatagaaaaaaagtttatactgctaacatcttttgtacgtcgaattctttagatgaggtgcaatcattgtcttcatgattgaatttattaatcttttcaatccactctcctgtcagtagaataacatttccaataaggtctgttagagaggaataagtaagattctcaaatggccatgcaacttgtaatgttattagtccattattgtaatctaatcctaatgttgcacctgatgtctctataaaaagattattagctgtgagaagctttttaaaaagcttaagttgatttttttcagggattatacctataggtgcttgaaaaagaataatttttctggactccagaagaccaatgttgatattaaagccgcctatagtaagggcacctgagtattctcctggtgctataactgtattaagtccttgatcatgggcaatagtattaagcataagaataatattttgtaacataacaatctcccatcctactaaatgtataggtatagtaagataataaattttagatatatcctattatgaatgtatataaataacaggaggataaattgaatgtgtcttaataaatttaactagttataaatatagctgaattactagtttgtaattatgtatagtgaatgtaaataactataagtagcaatagcagaactattatatatatatataatacttattatatattattgtagtattttttttttgaaaaaatttttatacatatagttaaatcaagctacaaaaccaactggcctgtttacttgcatatttttgacttgaatatttgggatattacttattggtaaaggaaattgccctttagggataacaatgtccacttgaacatttcccacagtttgttgaagatctaatatagggcaacaaagcttgataccatagttacaatgtataataatttcttcattattatgggtaagtgtcattcgtggttgaatactatcactattttcaataagtggcacaacgtctggtaccatatcattatcatctttattattaggtatgtagggattaagaggacagtatgtctttataccagaaaccatacatgaaaggttaggtaaagatttttgtgtcataattgtagtaactattgcagccatagaaaactcaggaaattcttctttgatcatcttaacgtatatatctttagcatttggtaagtctgattgaaggaatactctttcaccttgaattgaagggcggtctctgggtgcatctacagtaaaaaggttgaatattccatcgtcactatagttagtgagtttatcttctttccatgtttcatctatagcttctagtattccttgtttaaagaactgcatatgctctgtaagagcttcagagtctatagtatacccgtatgcaaggttagctattgtttgtcctagaggatctgttcgttgccagtgatcgatttcttgtgtaacatattgttctatagattcttgttttggttgactaccagaattttccttttcccatgaagaggtaagaaaagatataacacctttacggataggctcaggtttattgtagaggatttttgttacataaattccaactagtctactacttataaatgaattaactgctgggtatgaaataggaactgtactattatcttctgcccattctttttgaatatattcactaatagatttttgtacttgaggattttctgttccaaattttttttctaaaatatatgtaatcatagcagaacaaagtatttcttgagatgtagcagctatttcttccaaagttcggcttgtggaatgaagtggttcttgaatgtttcgaggacctgcatttactatggagtcagaattaacaatattggccattgcaatttgaagacattgttgacgtaccttaattgtttttgctgatctaaagagatcagcaaattttctaaaagaagaagaaagccgattttctgtttttatattcccactgttatcaatagtgagagtatatccttgttccaatgcttgaagtaaactgtctttattagtaataatcatttgttatacctatatcttagtgacatcgaaaaaagtgtagaaaaatagagtgtaatagtaagtagcctgtaacttgttataataagttacttaaatacaaagttcactccattaatgaacagtagtatatcagttagtatagagtttatttttaataattataagaagttatagtaattatggtataaattaaactatatttatatataacaaatctatttttgctttactaaatgcaaagtttattccagtactaaaggaatagtactgagttatatattattgtatataattaggtttgtttaacaattataagaagttagagtaattactttataatttacaatagttatatataagttataaaatatatattgttgttttactgtcaatatagttgtttaaatggggtaactatgcaacttttattggcagtaatttagggttaaagaaaaagtaattagagataaaacttattcaaataatccaggtatttctattaatactgtatagctacgatcatagccgtcatatcggtatctaccaataatacgataacattgtgctaaatatgtaacttcaactagttgagagtttgttttaccaaaagttccaagttctcgtaggtttcggaaatcttctaacgtaacagatacatttggtaatagctgtatagaaaaagagttttgaagtaagcgtaacctactagacataataatattattttcatctcgatattgaagatgctcacggtaattatagtattgatcacgaaagctaaggcctgttttccaagaaaatctgtctgatttgaatatgatattatgatcatgtctagtaatattaccgttatatggagaaataaatgtcttacctgaataagttaaccaagatagtatataaagttctagttcagaatagatgtcttttatagggcgctttggatatttttctacatattgttttcggcgttcttcttcaaaatcatatcctgttgataagttccagtagagaagatcatagtaggaagtaataagtgttggtgtaacactattatcattattattattattattatctacactaatagtaacattcttttttgtgagaatatttactattgaataagtaaggtcattttggggaaggatcctatctgatagtgtataaaatggatttttttcttggccttctctaggtataaagctatagcatatacgtggttggattgtatgcttgagtgctgtacaaaaggtttttcctatactttgagaatgaagattaatagtttttttatcctttagtcgccatattcggtgagcttgtgtactactttctagttgtaagttaaaaagtgaacgatgctgacctgtttgacgtggtgttttagtatcagggacatgtggtgctacaggacttgtgtgtgattttatacctgtttgatagtaagtttcacgtagcccaacagttgttataacagatccatatttgagatcgattggtaatgtaacttttggataaagttctgttctccaacctttagtgcctttagcacgatacatataagcagactgtaaatgaatggcaccctctaatgaaagaggttgaaatagttttccttggtaaagaaacatgtcaatttgtggaattcgttgcgttaactcactttgactagtaggatgattcccatgtcctaatgttggatcttgttcatatctaatatttcctactacccctatacgctgccaatcttttctaataagtaaagcatttaatcgagattggtcatcttcttggatatctctgccaaacatttgaaacatttcactacgggagtgtgaaaagcctgttataccttgatcaaattctctaagataatcttggtctgatacatagtctaaattagatatatagcaccaagttgagtttccaataaaaccatcagccattccacgaacccaataacgttgatggttattacgtacaagttggcttgatggatagacaggatctttccctggtgtgacaatattatttttatcatgaatgccactagcagcaaaccatgttttttgatttgtaaatttgtgtgaacgatatcttacagttcctaatggacctatttttgtcatcagtccagcataaaatgttagatcgctgctttgatcaatatttaaaaagtatggttgagtataataaattccacgtcgctgactgattccataattaggatttaaaaaacctgattgtcttgtttgttttgcaggtattgtaaaaatagggctatacattacatctatgtttttaattttaaaggtagaatcatataattgtgcatatccatcaacttctactattgcctctttagctgatattgaccatgctggatgaggtccgtcacatgtagtaactttgacattattaaaagtataataatctccgtaatgtttggtaatacgtgcaccagaaaagtaaacatgtgatgaagagataaatatgttcccattattaagccagcctgttttagtattcaaattaaattctgcttcgtcagcattgatttcattttcatccatctttacagtgacatgacctttaaggaaaagccaacctgttttttgataataccttgcaaagtcagctttaaatacatcctgtccttttgtaaggataatgtttcctttagcttcaataatagtattatttgatagtgtagttaacgtatcagcttcaaggttccatttagtttgagattggttaatatctggttgtgcaaattcggatatgtttataatagataaagcttgtagaggaaaaaatgctataaataaggatggaataattatataatatataaggttagttagaataaatggtaaaaaaagattatacaagatatattcctgtttgtatccaataaataaatacgataaaagtatattgcttatttgttaaaatttgagcgtataatctaatatatttttaatataaaaaaaagtaccaattaattgattgttttgggctatctatgtattcaagtagtgtttgtataaagatccatttagagcgattacgttataatttacgtatacttcgttctagatatcctaatgttatgcctgttattaaagctaatgcctatggtcatggtatcagagttgttgcaaatgtccttagagatgaaggcgttcaacatatggctgtaggatctattacagaagggtttttattacgacaagaaggtcatcaagcttttttacttgctttgttaggacctttttctgaagaagatgcaagaattgctgtagtacataatataactccggttattcataatattgaaagtctccaatctattgttcattatagtagagtacaccaaggtggtactgcagtaccagttgctattaaaattgatactggtatgggcagacttggcttttcttctaatgactatataagtcttatagatttattaaggcatacaccagaagtaaatcctattttattattatcacatctagttgcaccagaaatttcatctcttgataatgttacacataaccaagtagagcaatttgcaagagcttataaagctattaaagaagcttttccaactataaaaacttctttaacaaattctcctgggcttttagcatggccaaactatataggagatttttctagacctgggatagcgttgtatgggggaaatccattttatggtacaagtcgtgtaagtcttgggaaaggttttttaccagttatggaggtggaagcaccagttgtagctataaatacagtttctgctggttcttccattggatatggttgtacttattatgctaaagaagatatacgtgttgctgttattggagcaggctatgcagatggatattcacgaagtttttcaaataaaggttgggtagttataaaaggaaagcgctatagaattgttggtagggtttgtatgcaaatgttgatggtggatatcactaatagtcatagtaagatatctattggtgataaagcatttttattaggtggtgggggaagtttagctattaagccagaagaacttgcagaatggtggggcactattcctcatgaagtttgttgttcattgggttcatcaataggagctcaacaaaaacaattagtcattatttgaaataagtattatagtgatacattttgacatgttggacaaataccatataaataaagctgatgggactttaaaataaaaccatattgtttggcatatttttgttgaagtttttcaatagtaggatctataaactcaaagttaataccacatgtatcacaaataagatgatcatgatgttcattaaaatgttcatatcttgcaataccatcactaaaacgtacttctcgtgctaagttggcttcacaaagaagtttcatagtacggtaaacagttgcttgcccaagagagggatcttctttttttataatatgataaatttcttcagtagttaggtgtcctgttgtgctaagaaatgttctaataatttgttgtcgttgatgggtgtttcttaaacctttattcagaaggtgttcagaaaaactacggagaatgctttcaattcctggaagctttttagacataattacctctagagagtaataactgtatggtgttacaatctttttgtcaaagtgtaaaagtgagagaaattttttaacttttaaaagtagatagaagtttttatgtataagttatcaaaaaaagtttttattgttattcctcctcacgaagtaggactttttcgttttttgttagaggggtatgatcatttagcacaatttacagttttagatcgttttcaagccttattaaagatatttttttcatcttatcaagaagaaagggtaactttagctttgaatgagatatctgaagttatttcatttaagaaaattaactaggttgacgtgcaagaatttttttaattgcattcattacttgtataggagttagttcttccatacatttacgttggataggacattttttgtctccatgtagtgagcaagggcgacagggtatattggcttcaaggatgatattggcatcttctggtgggaaaaatccccagtcttttgttgttggaccgaatagagcaataactggtgtttttatagcagtagcaagatgcattggtccagagtcaccagtaacaagaacggctgctcttttaagtaaagcacatgtctctcttattgatgttttatttgtaaagtcatgttggggtgggatattttttaaaggagtaccttgccctataataaaccatggaattttttcagatgtaaggtgttctatgatgttataccatgagttagtgttccatgctttatttatatgagttgcataaggatggattgctacaactttttgttcaggtgattccaaaaatgtaaaatagtttttaactttatcttcttcttttttatgaagtaaaataattggtgtaagctgatcaggtgttggtggaagagtgttaagtgcataaatatatcgttgtggcacagtccatttattaagccgtttttttaaaagacgatttttagttaaaagaaataatctacgctcaaaactcatttttgaataacggtatataggccctctccataataaacttattaggcgtgtttttagtgtgccatgtaaatcaataagtccatagtttttatggtggttagcaagagaacgagcagtagatataatatgtttaggtaatagttgttctttggttaaagcaataatattttgaacagcagggttattttcaaatatagatgttaagccttcttgtgtaataatagtaaacttccaattaaaatgagtataccaatagtgtataacaccagttgtaagaacaacatcgcctaatgcacttaatcgaataacaacccagtttttagttattgattttatggtagttgaatataattcatttttgtccataaaataattctaacaatagcctgtaaaaaaagaaagatctaaaaatatactaaaaactgttaaagaagctgttagggtataatttttatctaatactgttttgttctttttgagtacatattttggggtttggatacgcatagtagtatgctacacctaattatttgaaaaaattatatattatcaaaatagttgttatcaactattttaccagtttaattgtatagttaccaatatattggttatagctttagctttagtaacaacgtgttaaaaaatataattagaaaataataagaattgtatctagttgtaggataatgataaataagcttttttataattttctaatagaaataacagtctcgattttttctgcaaattctgaaaaatttaatcctaagccattagcaagaccaataagaactcctagagtaggatctgacaatcctttttctagataataaatataatttctttcaacatcagcaaattcagcaagtgtttgttgtgaaagtccacgttgttgacgtagcgtccgtaacattacaccaaattgagtagaatgaaactttttcatgttaattatctttaggctaacatttcgattatttgtactaactatatttagcattctaatacctttctttctttttttatgtattgcaagagcagaaagttttataaaagtaatagatggagatagcttaagtttatataaaacaggtaataaaaaaatattgcgtttatatggcattgattctcctgagctatctcaaccctttggtttattagctaaaagagctacagaatttttggttgagcatggtaatattgtagtcaaaaatatgggttatgatatttatggtcgtacgttagctattatatatttagaggatggtttaacactacaagaacatttacttcggaaaggtcttgcttgggtatatcctaaatattgtagcgatgttatgtgtaactactggtatgaactagaagaattttctagaaagaacaagtttggactttggagtaaaaaaagagctatcccaccttggaagtggagaaagttaaagctgcgatattagtattgtattttgtaatagtaatataatatagtataggtataattatatttaataataaaatttattaaatataattgatatatttttattgatgtgttgatatataacatttcataattattattcagtgataattatattttcattaagttataattttttaataactatatgatcataatacaatatacattatagatattatattattttaatatacatcttgtttgtataatagttacttttttattttatgtagataaaagtgaggttgcagacacttaacaaggggataacatatggttgcgacagacgttatcaaggatctaggtcaggaattaaatattccaggacttgaatttgatcaaaatttggtatgttcgttctctgtccataatggtaatcttgatatgactattgagactaatgagacaggagatttagtctatgtgtgtggatacttaggaattatgcctgatgataataatgctgccgctgctgttgctattctatttgcacaagcaaattctacacttagttctatgaatagaggagtacttgccctagattataatggagaaagattattattttcaaagctttataacgttagtcattgggaacctaatgaatgcattgagtcaatcttacaactcatagaggatgcagaggaatggaaacatcgtttatatcagcctgattttggacttagtgaacttacgaaaggtggtataaataaaacagaaaataataacagctttttaaaagtctaacttgtacagtttttagaataaatattttttagttttacttagaagctatttttaatatagagcataatggaattataggggagaataccatgagagttggaagtagaccagaccctaatgttcctactaatgttgagcaaaactcagatattgatagtgatgataacacatcttcaagtactacttgttgtgtttctactcattctgtcaatgaaggtgctcaacagcacagtgatagtacgccactaacagacagagcttctcagggaagaaagtgggatccatctattgattttaataggctaggtgctcaattaataaccagtgtacagtctttttttactatcattagagatagagttagtagttttattacaaatatgaaagacagtggaccatgggctcgaagtagaggttcatatgattttcacagggatgatgatacaataagtacgacaagttcagattcatatactacagttagtgatataaattcctcagaagacactgctagtcttaatagttttcactcagtcagtagtcatagctctagtgaaaaaacatttccagtttatactcaagaacagttacagcagtttgcacaagaaggtgttactaatttagttcattcaagaccttatgtttctaatggaccttctattaaatttcctgatcaacttggtggtcatggagacgttggttttttgcaaggtacaaatatagttttcaaacaaaatcttacagctcaagaggctaagacatataagttattaaatgacttgaaaaattggcttcaagatcctcaaccttcatctatcaatattcctgaatcattaaaaggtatctcgcgctcagagatgaaacagttacttgataacaaagacttgttattgagtagtttgccatttcctctagcaatggcagagggtgaaggctcagcagctgtagctataaaaaatgttaatatgtatcaatcggaagaaggctcatttaataaagtatcttctaaaggtgttattgatgtaaaacttggctgtaaaactatgtctcttgctgaattaaaagctcattatcctaataaaactaagggaatttcactttttagaaagattgttacaaatggtgtattacctatgttgcgtggaacaactagccgtggttatgaggtaataccacaagcaaaaggtatgaaacgactatttatggcaaaacaggcatctgacaaccttatgcaaaacttatctgcacgtcttacagcacaacaggctgtaaatttagctaagcaagtgactgacttaacaagagctatgcgtatattacctataacatttgttggttcaagtatgcttatagcacttccagatgcaagtagtactaactctatgccacaagttggattagttgattttggccatccagtatttagtactgaagtaactgtagaaggaccaatcacagagcaagtttacggtgaattaaaagacaactatatggaagctattggtaaactacaatctcaaattgaagaaatttcatatcaggcatcaagacattaatatatgctttagattggtagttattttaagatagagccattatgaggatattgtttcagaacaaatttttgttgaattaaagaaaacatatctgagcattaacctatcttcttaagataaggagtagttatttcaagtatcaagaggttatactagtattagttttattattagttatgttaataaatatgtagagttagtttagtcatataggtatttgtagactaatgctctttggtggaagaataacctatttaaataaataattaattaatgttacattatttatttagaataaattaagaattctatggagagcaatatgaaagttggtccatctgatcccggtattaatagagttcagatagaggaacaaccatctacagaaagtataagctcttctagttctggaagcagtagtggcataagaactagagagcaaagttctaatcttgatcagagacgaatgactagtagtaacctgagaatgagccttagattaaatcctgttgtatcggataaggtcctcaaattttttggattgcgttcagcaagtggaagttactctccatcaacatcttctagttcttcttccagttctgcaacaagaagtagcagatatagttcaacagattcattaagctcaagaagtactattggaagtaatataacatttagtgaaagcgatgaatcttattatagtacaatagaagaagacagtgaatcaatttatgagtcagtaagtagtagcagcagtagcgatatatatacatatgactctaattctaatagcagttcagtttcaaattcaacacaaagtcaagcaccagagctacctccacgtccaaatgtattgcaaagtgaagcaccagaaccacctctacgtccaactagtacatcttcacagcattcaatacaatctcaggattcagttggatctgatgatgttttttggtctgaatctgaacctgaatcactttatgcagataaagagcaagttggggaaggtgcttatggaccaataagatcttcattagaagaaccaatagttttagagtcaaattacatatcatttggttctgatggtgtagtctattctgactttgctccaatgccacaggttaccagtaaatcttcacaatcagactctgtatcaacaccaccacctgtttcaccaagagagcaggttgcaggctcactaggtgtaggaagtagatcaaaattatcttctactaataatgtagctagttcgctgtttgatcctaatatgcagcgtattgcacgacaggcaattgataagactattcatggaaactttggtagtccaaatggaccaaaagttgattttccatatcaagttggaggctatagtaagacaggttatatagctggcacagatcttataatacaacaacatgtaaacccaactgaacaagaagtgtatacatttatgtctcaagttggtgagtggttaaaagatcctcaaggagggcctgaaaatgcaccagaggtccttagtggtcttacctatccacaactaagtgtaattcattcttatagagataggcttctaggaagtttacctattcctgtggctatgggtggaactagcgacaattcagctgtagtacttttaaatccaaataaacaacctgatggatcaggtggtgttatgaatttatctggatttgaaagtactgatgttaaagtaggtccaatacttgtttccaaaagcgaattatcagctcactattctaaacaagcaggagggttagggtgggctaggaaggttgtgactggaaggattgggccagggatgcgaggggcaactatccgtggatatgatatgaaacttgggaaaaatgaacgtggtttttcaagattacaaacagcagtaggaaacagtgatgatgctttcccaaaaaggttaggaggtcttacttctaaccagctaaaaaacttggaaaagactatggaggggttacaacaagcagctcattttttacctgttacatttgtaggatcaactcttcagtttgtattaccaaatcctggtgatacaaccactatgcctcgtgtaatgctaggtgatataggtcatcctatatttaaagatgaagcaacaggagatggtcccataagtcctcgtatctatgataaatataaaagcaattttacaagtggaatggattcaattaaagaaactatttcaaatatagtaaaaagtaaaatagaataatgtaatatataatataactatatgttaatagttatagagagtaaagtacatattgttgttaaatattatataatataattatataaatattgaaatattaaataataatattatatgtaatattatactgtttaatttatatgctacatgctaaagtagcaaataaacgttatgacatattattacacttaaatttgtagtttatgttacatacatgttctttacacattaaaccctgagggtataaaaatggtttcaacagatgttatcgatgcattgggtcatctattgaatattcctggtctatccttcaacgaagatttattatgtttgctttctgtaaataacgataacgttgatgtaactattgaaaccaatgaatcaggagacttattatatgtatgtgctcacttaggcactatgccagatgatgataatgcagcagcagctatagctcttctctttgcacaagcaaatgcagtgttaacagcaatgaataaaggtgtccttgtgcttgactataatggtcaaggtttaatgcttgtaaagttatatgaaatgaagcactgggaacttgaagattgtttagagtctattcttcaactttttaacgatgcaggtgaatggaaaaatcgtctatacttacctgattttggtctaggtggaatggattttgacttagatactagttcaagtggttcagatcaatttatgagggtatagtttttgtttaactacttattaccttaatagataaatagatatgccacagtttgattgctaaggagaacagtatgactaaagttggtggtagtaatcctttttcaacacttgcatcaatggttggctttagcaaatcttcttccagctcatcttcaagtaaggtagctgaattaaaaagtaaatttgaagcacttgggacactaacaaaagcaagtcctcgtcctgcaaatggcactcaggatactaatcgattaagtgatagactatttagaggacactatacagttcctgctaatacagcttcaagagtaggtggtcatcttcagcgggttgatgacaataaaagtagcagttcagcagctaatgttgcaaaaagagctgcagcacattcttcttttgcaagttcaaacccaggactccaaggagctagcggttcttcttctggaggaacaggcggaagtataacagatcaagttaaaagtaggggaattactgcaaggaatttttcggattctaataataattctataggatcagggtcaagcagtggaagtatattagatcaggttagaagtcaaggtattactgccagaggatcatctatttcttctggtaatgcatcaggtactagcaatgttaatgatggaacaagttcaagagattatggagctaatgtccgtaatactcgtgaaagatttgaagctggtcctggaggtgctcaaggagagtctcctggagtaaaagatgctaaagaagctactaaaggagttagtgtttctaatttaagaggaatatttgaaggaagaggtggtgcagataataatcaagtaggtagaagctctggtggagtttcaggagcatcaggatcaggaggagctcaagggacaggaggaacatcgggattaggtggagcacaaggtacattaggaagtggaggtcttgatggaggaggagtttcaggtgctgctggtggaacttcaggcgcctcaggagccggaggagcaagaggtactgctgatggaataacgtctcctggagcaagagaagcacaagaaactattaaaaatgctggtgttagtgtaagagatttagctggaagatttagtggagctcaaggtacaagtggagcttcaggagcagcgggagcttcaggagcctcaggagccggaggagcagctggtgcggcaggaggtggaggtcttgatagaggaggagtttcaggttctgctggtggaacttcaggcacctcaggagccggaggagcaagaggtactgctgatggaataacatctcctggagcaagagaagcacaagaaactattaaaaatgctggtgttagtgtaagagatttagctggaagatttagtggagctcaaggtacaagtggagcttcaggagcttcaggagcagctggtgtggcaggaatgccagcaggtagtggagatgttgttgatggactaagaagaggaggagaagatactgtcgatggatttggaagaaatcagggtagtggtcctatccctagttctgcagattttgtagatggtcctataggcggtatacaaggagctggaggagcttcaggagcagcgggagcagctggtgcttcaggagcagcgggagcttcaggagcagcagagccacttcctactaatggtacagatcagcagatagctgaagtcgttgtaagaaatgcagaaaatggtcattttgatggtattgatttctcgacacagcctggtggtgtagaatcaaatacaggtagtatccctggaacagatcttattgtccaacgagacatcactcctggagaacaaggagtgtataataatctcagtgagatgggatcatggatggatagccctaatgctagtcctacaaatgcaccagagtctcttacagatgatcatagtgttttgactacactacttaataataaagaaggcctacaagatactgttccttttcctcttgctgtgggtgaaggcactgttgttactaaaactcttgatccagacattgatacaagtaagattaaaatcccacttgaaattgtttttggttctggaagtatgtatggttctggtattggaggaggtagtagtacaattagctcctcaatgtctgatgatggaagttctagcataggatcaactacacgtaaaaatagagcaggtgaaataataagtagaattgcaatgaatcaatcacctggcgctggtagcgggggtcaaactgtagttggtggtcttggttctggtagtagtaatatcaatataagtggtggacgtggtggtattgtttatggaccaatgcctaatgtgaatgtagtagctggagatggccttaatagactacagcttggtagtggaataaatccattagcacttcttcaggaaagaatggttaatttttctgctgctcaactagagcatttacatggccaacttacaggtatgatggctatgatggaagctatgcctggcgtagcatttgaaggtgcaagtgtccaaatgacattacctgaaccaggtgatacacagactatgcctagtataaggctatcaggttttggagagccaaggttgcgggaaaatataggacagccagggcaacctccaacacaagaagcatttgatgcattaaggaatggtccactaaatggagtaagcgagttaatgagccaagttcaagaaatgataactgtaaggagtgaaggaagtatttcactaagcagaagtagtagtttatcagatttaagttcagaaatataactagctactttgttaacatgctatgacacaaaaatctacaaagtaattttgtgtcatatcagtatatttatataagtaattatgatgtgatattgttagatagtataactctacttattagaattactagttgttagttggatatagtgtgctagttgcgtttattaataatatattatggttatctatttacaaacaatatagtcttatagagaaaaatacagctagtgtagcgtaattatagactattatatttctagatattatttcaactagttcaagaaatgataactgtaaggagtaagggaagtattcgtaagcagaagtagtagtttattagatttaaattcagaagcataacagactactttgttaacatgctatgacacaaaaatctacaaagtaattttgtgtcatatcagtatatttatataagtaattatgatgtgatattatcagataatataatttaatataattctacttgttagaattattagttgttagttggatatagtgtctagttgcgtttgctagcaatgtactatggttatctatttatataataattatataggaaaatatagctagcatactataattatagactattatatttctagatattatttcaactagttctatatagaaaaataatgaaggaatactgcaagatacctttattgttatgtagtgtgttaatagtaaatggggtttaattctttttttattattaataattatagttagttatgttgttttattgagaggttgaaagtatgatttcatcaggagtagatagcatattttctttaagtttaccctgggtaaagagctcttgtgctgtttgatatacagcaattgcttgttggattaatattgaattagatttatttgtagcagttgtataagatgataaaaaagattctattattggattttttaatggttctaatattactagttctttttcagttagataccctaataattgatatgttccaatccaagctctaccatcatttttagaaagagttaagatattctttccaaaaaaactagaactataattccagttcaatagtgaaaaaagagtaggtgcaatatctaattgacaacataatgtgtctattttttggctttttatatgtgcaggactatatataaagcatggaatatcataattatctgggggaagaactgttttccctgcactaccagctgtatggtcagcaacaattataaatattgtatcagagaaccaaggtttttttttagcttcttttaaaaagcgatgaatagcatagtctgtatatttgattgcaccagttcggctagttccagaagggacgtcaactcgaccatctggataggtaaatggacgatggttagaggttgtaagcgcaacatggtagaatggtttattagaggtatatgctatatcggcttcacgaatgactgcatcaaataaatcttcatcacatatcccccaggcatttgtaaacgttttatactcatctggaatggttgatcgatctataatacgaaaaccatttcctgaaaaaaattcattcatgttatcaaaataaccatacccaccatagataaaaacagtatcatatcctctttgtcggaaaagtgttcctgtattaaagaggttatgattatttggtctacgaacaatagatgcacctggtgtggggggtagacttaagataattgcttcaagacctcgtacagtacgagttcctgtagctttcatatttgtgaaataaagacattttttactaagatcatttaagtgtggtgtacggtctcctaaagagacactccctaagctttccactacaatagtaataacatttaaatgtttttctggactattagagtgtatgtatcttctccactccatagagttgtcattgaaaaatacactatttggttctattaactcgtgatgtaggagttcaaaagctaattttttatcaattacaggataaaattgtctgtaatccaattgattatttctaaatgctgaaaatagtgaccatataccatttttagaaagttcttgacttaaggcattattagaaaaagtaggaggtgaatatatagtggttatagatgcaagaatgatccaaacactaaaaaaccatcgtacactaggcactggtatattattaattttttttgcaataggcctaagtagtatccaagacacaccaagagagcataaaaggatacctattaaaatagggataataggatatgactctataatattttttacaacttcagttgtgtatataagataatcaatagctataaagttaaatcgacaatgcaattcatcccaaaataaatattcagcagcacctgtaaatagaaaaacagccgtatagagactaaatacaaaaaataaaatttgttgagtaatttttccaactacacgtgaaccagttaatagtacacatattgctaatggaagggttataaggataaaaggaaaaacatcattaataaagcctacactaagtatcaacggaattgaataaaatgagtctatagcactagttcctacatgaataagtaatacaactcttacaatttgattaatactttcataaataaaaaataatagtccaagataaatacagcgaatatatttcataattgtattatagatgttttttggaagatattgctttaactcattattatattaaatataaagagttagctattaatttttaactaacttatcatgctttttgaagtgtttataaaataaaaatttatatcattgatattgaataaatcatttacgttttcttctattatagaagttttgatgcttactatatataatcactatttatttttacactaacaatataaagttcatagaatgcataggttagccattctacataaaataatttgtttaatattattttcataataataacaacaattgatataagtctatccaaaaaatagtatagatgcaattcaatatatatatatattctatatactagtaagttcaaatagatagataatatgagtgaacagatttatattaatagatagtcatattgacaacttactcaataagtagatgttagctatttggttaaaaaagagttatcctaagatttttgaagttagattatattttttattactttactacatacgttaaataagatatgtctaaaattatatttcttttttatatttgttattaatcaggataattttaactataaagcgattaagtaacttgtttgactataattatataatattatactctattctgtattaagtaaagttaagaaagatgatcttaattaactatctaagcttattagtgaactttggtgtgttaaccaataataattattaaataaaatttattatttctacagaaataataacacttaagtagattaaaaatattattataatagataaataaatcagaaaaaatttagctttatataaatttattaaatttaccattgttatttaagatagagctcaccgttaaaagagtaatatgtaaaagtacaataagaggtttttaaaaatgctaatgttaattaacgtaataagttataagaggtatttagcatggtaaagttaaataatgtaataaacttcaataaaaaattagcaaaagttaatgtaactagtctttctatgctactttttaacttcattgctattttctttttaattcaatcagatgcttatgcagtgatttttagtaatagtcagccacggatatttacagatgttaacactccagctgaaacttattttggtggttttgatatgcgtgatccaagaagccctattaattcagggccaactagtatgacttttaccacgcataatttagcccaaaaccaaattcttgcagcttctggtggtagtatgggtactgctgcacgaggaagtgtagttaatggtgatgcaactattacaatgcataatactgtatgtaactttttatatggtggtggttactctgaaggtccagatgttgtagttactggtacagctaatatctctgtctataattcacaacttatagatatctttggtggaggttttgataatggtggacacaatggtcatacaagtgtaggtgctgtaaagattttagtagaccattctgttgttcagaatttgacaggctcagcttcatctgttggtattgagtctcaaggtcgctatgctgtttttggtgatgtagatattgctgttgttaatggttcagatgttacaacactcacaggtacttctacaagttcagctcatattaaaggaaatctctcaatccttgtagaaaattcgcatataactgaccttaactgtgttgatcatgctttattggatgggaatctttttgttcgtattggtcctggagcattggttgatcgtctcttcctttctacagaaaatcttcctaagggttcttctttatttgagattgatggtggtagagttgatggtttatttgttggtccctatgctggaactttaaatgacgcaaaagttttaatgaaaaatggttatgtattgaatcttgatccatcaccaagaacgcctgcaggtgtaataaaaaatttagacatatttatggaaggtggaaccattgcttggttaaaccttgctccacaacaaggtgtgtctcataacgtcacattacatttggatgggggtacagttgaaaatctccgatttggtaatttccctggtgctaattttgatggaataattagttttgcaaaagcagaagtaaaaggtggcactatagagaatatagagcctttaagaagaggagtattaaattctagcttaatttttattcctggtggactatcaagagttcatacagttgaaaatgggagaggtttaggccttagtaatgttacagtacaagagggtgcaagaacggtttgggggctacctggtaatcgatttacaattgaagcagatgattttgatctagggggtactattatccttccaagtacggatagtacaatagagctagttgtaaataaccatttgatagctagtggtggaatgtttgaaattaatgatgcagatagatctagagtaacaccactagttgtatttactggaaatcctggaagttctgtaaatattatagatcctctaagtgtaaacttagatcttcctttaagctttttaggaactagtggtattgtattagctcaagctacacctaatcttgctgatcccaagttgtttgaaccaataatacataaaggacttatgtggggagatattgtttttgatgctacttctaacacatggtttattaataatattcgtgaatctaaggattactatggatatttatcagtccaaggagcatcaaattggttacgtcaacagcatatgataacaacacaaagacgttcagccaacgcactgttacataaacatgatggactttgggtagatattcaagctggtcatgaaaaaattggtacaaactatggtaattcaaagatgccatgggttatggcaagtgcaggatatgattatagaaaaaatattaatgataatatagctatgttatatggttttgctcttggtataggagatggtcatcaaaagtggactcttgttagtaagatgaaaaataggattaccatggggctactagatggatatttaggatttagttataatccaataggactatatggattagtagcactacaaggttcagtaagtaaaataaaaacaaaaagtccaggattttttgtaaatgagaactggacagaagtagtcccaacagaatctttagagctaggttggcactatgcctttaatgagttctttactattactccaagggcacaaatgattttagagcaaactcctaaacattctattgaattttgttgtagaaaaaataaagagaaaattaagcttcatagaaatacaacagtaacaacagttgctggtattttagctaactataatattgaatggctggatattcatggtagtgttgattggataaaaggtgttgctggtacatataaagctcactcagagcttttcaataagacatttaaagataaaaataataatagtgtattgcgagcatccttaggatgtgattacattatcagagaaaatatgagcataggaataactgcctttggagatatgattaataataaagggattggaggccaagctaatttctcatataaattttagaacaatagttttatttgttgataaaatatattgtcctaacctattaattagataacttaaaaaagatgagagaagcttaaagcttctctcatcttatattttaaagaattaatgtaatatgttaagttatattaatatcatagtatagttaaataacttttttagttttttatccatgtaaaaaatttaattttttacattaataagactatattcttatcacttacttcttttgatagtttattacaaatttgttaattaagtataatatattatgttactgtgtacgtatcacttattaatatttattgtatagttatttataactaatttaaaatagtaggtaagaattaagtataataagtttttatgtagaatttaatctgactaaatcaaaaaaatctgtggaaaatatttactgtaagtatagagggttagattgtttattttagattatgttttttagtctaaacgtaagattttttattagaggagggagctctacggattttgctgaagcaatagtttctttgggtgaaagaactctcaaatttaaagagagtttgcatatggaagaagcaacaaaaacagcgctcattttgctgtttattaaaatattaggttatgacattattcaatcctttagaagtcattcctgaatttgttgctgatattcctggaatgaaaggagaaaaagttgactatgctattatgcgtgaaggtaatcctagtataatgatagagtgcaaaagttgtggcttctaatcttgatgaggttaagtgcaatcagttatatcgctattttgttacacaagactctattatagctattttgatggatggcatttggtatatgttttttcctaaagatactgaaggcaaaaaaatggaagaaaaagcatttatggaggttaatcttaaagagattgacccgaccttgcttccggagttgcgcaagttatgcaaaggccgttttgatttgcagaaaactcttgaaactgttcatgagttgaaattcaatcttaaaattaaattgttgctggtgaataatttggaggaaccccaagaaaactttgtcatttacattacaaaagaatttgggattaaagcacaacaaaaagcaattgagctttacaggttatgttaaacgtgccttgatggagtttgtggacaagcaggtgatgcaagattgaaaaaagcacttgtggctacctctaaaaaagatgacacagatacttctattgtaacaagttcagaaggagaagaacaggatagtcgaattgtaacaactgatgaagaaagggaaggatttcagatttaaaggctatcatgagtaaagttattgatcctgatcgtgtatatctgcgtgatactgttagctattgtggtatccttctggataataagaataataaacctatttgtcgtttacatttcaactctattaaggtgaagtatattgaaacttttgatatagaaaagaaagggaccaagcacaaaattgaaagattgtctgatatctacaaatatgaagacatattacggacaacttcaggttattacgacaaaagttaatattttatttatgttacgattttcctgaagttaggtgtttgaaaacactgtgttattatatggagtagtatcaacataaagttgatattgattctaactctgctttattttgttttagttgttaaactatgactatctgtttttttatttaaatggaatagatcttattttttatacaatataaaaaatatcttgaagaagataaaaactaaatagtttcattttatgttgaaaaaagagaaaagctgttagaaggtttttaatgaatattttgatagttatttggttgcgggggaaggatttgaaccttcgaccttcgggttatgagcccgacgagctgccatgctgctccaccccgcgtcacttaaaaagaatatatcaataactatggttaatgtaaatagtttttagttatttctaacttattagtatgaaattttttattatttaattataacaagtggtttaagtgtatattaataattaagatatattgtctacttctttattatctttttatttttatgtaattttaatactaatgatagtaataagaaaaagaaaagtgaattatattataggatatgttgttttttcctaatgtggttggaatattttatttaaacaataccattttctccagggcgtgtatatataggagtagtagtatgttgaatatattgctgtgtatctccaaatataagaaggatagggcttgccacaaaaatggaagaaaatgttcctataatgataccaataatcattgttaaggcaaagtcatgaataacagtaccacctagtatgaagagactgaaagcagttacaaaggttgtaaaagaagtcatgatagtacgccctaatgtttgattgatactcaggttaataatatttgaaaggggaagatagtttttctgtttttgttcttggagattttcacgtattctatcataaacaataattgtatcatttaaagaataacctacaagtgtaagtagtgcagcaataacattgagatcaaattcttttcccataagtgttaataatcctacggtaataagaacatcatggagtaacccaacaatagctccaagggcaaagttaagttttaatttccaacatagtagaatagtaagtataagtgcaataactaccttagtcaccatagaaaagtcaaaaagattcatacaatacattgcagcagctaaaactcctgttatgccagctgctattatccaacgatgttcaaatcttcctgatatataaattgtaataagaaggatagcataaaatatagcttctaatgctgaattccgtaaatcagcaccaacttttggcccaactacttccagtcgttgaatcgtaactggattactaggagaatatgtatgtaatattgtacttatatcagatttaatagtcatactgttaaattcagaagatgaaaatcttacaagatatgctttattatcttctccaaattgttgtattgtaaggcctggaaggttaagttttgtcagtgcttcttttatatgttcatcttctataggttgtgaaaattggagttggacagctatacctcccgcaaagtctacaccataacgtactcctccatttacaataatggttctgattcctatcaaaataaatataatagaaataatataggcaagatgccgctttgcaacaaaattaatatgtgtttgtctttgaaagagttcaatagtcatagccactcctaaacacttaatgtttttttcttacttttgcgtagccataacaaaaagcaagtataagaaacaaaaatagctgtaaacatagaagcaataatacctaaagataatgttactgcaaaacctcttacagggcctgttccaaattggtataaaattgctgcagcaataattgtagttacatttgaatccatgatagaaatactagcacgatcaaatccagctataactgcctttaatggcattagtcctttttttagttcttcacggatacgttcaaaaataagaacatttgcatcaactgacattcctattgtaagtacaataccagcaatccctggtagggtaagtgttgctccaaaagcagctaatcctgctaataaaagtgtcatagtaaaaagcagcataacatctgcaagtaagccagaaagaccataataaagcggcataataataagaacagcaaatcctcctacaatagctgctaacatccctttttcaatagattcttccccgagggaaggtccaacacttctttcttcaagaatagtaacaggtgcagggagagagccagctcgtagaataatagataaatcttgagcttcagccatagtaaagtttccagaaatacttgcttttcctccagatatacgttcttgaatagttggggcactatatatttttccatctaagacaatagccatacgcttttttatattttctgctgtaatacgctcaaacattttagcaccttgagaattaaatgaaagtgctacataagctttattgtttttatcatcaaagttagggcgtgcatctgaaatgttttctcctgtcataactggttcacgttcgagtgggataagaatttctcttgaagttccgtcagggtagaaaatgacttgaggaaataagcgtactccagatggaagaggtgtattttgttgtaagtcatcccttacaatatgaaaggttaagtgggcggtttgtcctataagatgtatagcacgtgtagagtctgttaaaccaggtagttgaatttgaatacgaaagttgtcttgttttcttatatcaggttctgaaacaccaaattggtcaattctgtttcttatagtacgtatggcttgctcaagggccatgttttcaatagaaattttagcctgttgtgtgaagtgagcataatattttaaactaccatcaatagtcgtaggttttgaaagaacaagttgagggtaactttttactattaattcttctaggtcattttcttgttcttttctaggtaataaaaattctagttgtccatcaggagttatttttgtctttaagatagtaagaccatttttagatgcagtactacgaagatcttgtcctgttaatacaagagcattagacactgcagtattaacatcaacacctagtgtaaggtgtattcctcctttaagatcaagaccaaggtttattttagtatcaggtaggtatttacctataatagagttatcaataaatgggatacttggaagaacatatattatgcttaatattaaaataaagagcgagatagtaattcgccaaggaagcgatttcatggattgtcctcaagtcaaatatacctagttatagttaactattgtatagctaatgtttctattgacttttaattctatcatagtgaatgttataaatgtaaggtaataaaataactaactacgtgtagtttaattaaaggctattataggttatttttcttctttagttaaagaacctttttgatctactagtccaacaacatatgcacggttaatttgtacggttgtatgaccaagatctgttgtaatagtatcaccatcaatatcaacaatccgtccaataagtccacctgtagataatatatgatcccctttttttaaggcttgtagcattgccttatgttgttttgtacgtttttgttgaggacggataagtaaaaagtaaaaaatagctaacattataataagaggaataaactgcataaatacattactaggttcccctgaagaaggatcaggagttccaaaagcatgagcaatagaaatcataaaatctcctttttatattaatagctttaaacacagctactagtcatgatacataaaaatataactaagaccatctatgtatagatttaagttaagattggcaagaggaggtaggaaaaagttttattttttgatgtatatccaactttatattgagttttatactaatctaatagtaacctttagaaattgttagctagtgtatctgttaaaaaaaaattggatatttaaattataataaatactcaatgagcttttagtattactctcttagttaagggggatgtgaaaaaccaatatataagtaaggttagattttatttaaagaagataatattagataatagtcaagtttagttaattttttattactatatttagtaaatatagctagagataaaatatattttagtaaatatatcagctagttgcctaataatgctctttaattatagtgtatttttatataaagtagaattttgttagcacctaattgtaggtagtttttataatacagttatgggtaatgttaagttatatatagacattttttaagaatatatctattttgtatttacaaaaatggttatagtgataaattttaatgaacttactataacctcttgacagtcagttgtatttcacaatacttgcggaatacaagttgattacttgttgtaaaaaagacttattttgaggaataaacatgaaagccgaaacaggcgtaataaaaattataggcgatgtaaccccttactctggagcaggagatagtcgagtaagtattcttagtgaagataaagagtatcggatagctcctcgtggagcaggtattgatcttatagatcatatgagtgcttctgttgaagtagaaggtattgtttcagaagatcaggatggagcatattgtattcatgtacgttcttatcgtttgctagatgcatttgatgctgaagactggtatgatgataatgagtagttataatatataatatatattaacactgggaaaatgaaataggttatgtaaaagtattaaataaaattagggaagaagtaacttcagtggagctgaaaaaatatcttgtattaatcctatagtatctctcccaagagaacctatagtactaagaattaacttggccgcattaattgttctttttgggttatctatacttcctgtatattttatggggatagctataggaaatccttccatatctatagtgatgaggtagtcaagattccattcaggaagatcaatttttccactccctgttattaccattccaggccctgttattgcaaaattattatttgtaataataccatttataatatttcctgttgcaccaatgttactaaaattttgttgagtagtagtggtgtttcttttgaaatagccattctggataaaaatacgccatttcccttgaagatttttaaggaaatctatagatgattttgctattgactgtatattaataacaaatgtaccaaggcctgaaataagatattcttgttgacgttttttacttagtttaatcatatccacaccttttgaaatataatgaaaatctatctgtgcactattgccattagttgaaagagggcaagccttaaagcttgcttctgtttttccatcacatagtgatgctgtaattggagtgatagataatgttccttgattaagactaatgggtactactacattagtatatggaacttttctatagataagctcagctagagtcagtgtagattgaatatttactttattcagcaattctatcggccagagttcctgtgattttttcagtttattttggttaattgatagtaaatatttatctaagtttaatgaacttagttggatatctcctgtccaacttggagggtttgtctgtaatccattgagagaaaatttaatcagtgtattatctaatattccctgtatatttgtaaggcgaattgttgcaggagaaataaagatatctccttgcaatttacaatattgcaacatagttggagaaatattttttggttcataaccaagtttacttaataaatttctaagattttgtgtcatgacagtgagagaaccctcccattgtcttgtgttacttgtactagaactagttttgattgttccagatagggctgttttaggatgtatttcaccttgaaaattagagaagctaagaaaactattatctatgtcaaaagatattcctccataagccacagcttgtacgccagatacagaacatacaacttttgatggtatgttttctgctttaatagaaagccagtcagtggttgaaaattgtattaacccatccattgtaattgagccattccatcttgctgatgatatctctgcactccacttccctttatatggaattgtagaggatttatttccctttgatggttgaccaatactgtcacatgttagatgaagcatagaaaaaggaatagcttcagacgctgttttttttactaatccatcagttacatataaatcaattgtaccttttagacttgaaagaaatgatgctaaagtatcaccatgtccattaacacgacttgtgccagaagctttaccttttagttcatattcttttgtaataatatttgttatatcagacagttgaatattttctatagctaattgtattgtgtgcctattagatagtaaaagtgaggaagataaactgccatcataaaaatttttacagttagtatgaatctgagtaccctgaggtttaggttgtatgttacatataaactgatatccatcaaatttccaacatgttacatgatcagcctgaatagtaatgtcatagttgattgttttttttatattattattattattattattatggagattacttaagatagttaaaaacgtttctttaggataggatagttgtgaagattttttaccctttagttctggaagaagtgtattaaggttgaactgttttgtggcaagggataatgtaatcgttggggataaaaaattattgacagttccattcccttgaaatgtagtatctaaagaatgaatgattattttttgggcattaacttgttgaggagataatgtaaattttatttctccagataattgattaagagcatgttgaataccatttggtagttgccttgcaaaagtaaaccaatagggaaaactaaaattttttacatccattgttccatcaaaaaagagatttgatagtgtatcataattttttattgttccatgaagatctatatgagttttatcaaaaagtagttttgagttttttatcagcagtggaggaaagtgtgtcatgtcctcagaagatgttgttgtaaacggaacagataatagtataggaatggatgtattaccattagggagtgttccttcaatatgtaactgcccatgcattgtaagtttatcagagttatctttttctagttttgtcgtgaagtcgaatgtaatgttattagctgtattggttgtaggtatagcccctgaaaccttaaatgtagtttttttagtatttgtaaataaatcgtataaaggagaagtatcatgaagtaatgctgtatttattttatacggcatatcctctatgtggagctgtactttttcaatacttttttgtgcagtgctagaattattacttacagtattcattatttcccagattatttcatctgcagtgagctttaatgagcttgtaagtgtcttagaaacaccaattttaccattaatacctattatcttaaaacaatagtcattattttgaaaggtaatactaccattttcaataaaaagtttactatctgtaattaattggagaagatgcgaaacttgttttggtatagcatatcctgtggttttactattttttttttgttcattttgaagaataatggaggctattggttggattacctcaatagaatatatagaaatgtttcctgataatatgttggtgatttttggagtaatcaagcattctttaatatgaattgtatcacctttttgtgtttgaagtataacatttgttaagtaaagcttaggaaaaggtacaatatgaaacccaatagaattagcagaaatagaagtatcctttaattgttttgaaatagtagaaagtattttatttgtaatatattgtggatgttgtttgataaagtagaatgtaataccaaaaaatactataattcctaatagaaagagagtaactatactaatgagaaaagatctcatagttgatactccaataaaaatataaagattatattaggtatagaataaagcttattcaatggtatgtattcgttttaagtctaaataaataatgtaaccttttacaggtaatgatgttgtttcttttatgatatccaaatatttctgtaattgttgtatatgctgtagggatgtttctcctgttttatattcaataacagaatattctttaccattattaaccagaagatcaacacgataaatattgttatttttatcaagaagtgtttgttctgcaagtccaaattgtatccaataccttgtttttggtagagaagtataccattgaagaatagatagcacgtcttttacaataatattatattgtgaggatggtaaagggagtggaaatcgttttatagcataatctatagcaagggagatatctatatttggattttttgatatgcataaatattgtaaacagtgatgtataaaagttcctcttcttttgctcgtaatacctagttcattcactggattacgaaaaatacgtaattgaggtaaccagtgcataggtctccaactagatgtactttcatcttttgtttcaagatatatgtatggtatttctgtactgtttttattagaagataacattgctgtatgattagaagtatatgttttttcacctagttgatagatattattatcccagctgagatagtctagtatggggttaatggcttcagcaaatgatatttttttagacttagttgatgtaatgagtgcatataattcttcttcagctcttgtccatgcaacatataagaggtttaatgattcacaaacattttttagtaaactgctataatattcttttggcatggctggtgattgttttacaataatattaaaaccatcaacacatgtttgaataagtgaatcgttaggtttaagaggaaaatcatgccatggaataatgactataggaaattgtagtcctttagatttatggattgtcatgattcttacggcagctatattttctggcattggtgttttttctttatgaccgtgctgtttccagtactctaaaaaatttgatatagaatcatatccttttgtacttgctatatagataatttcaagaaatcttctaataaaagacatttcttttggaaatcgtttttttattttaagccggtcaatagattcttgtattgcatcataagcagaaagtaatccagaatcgtcataaaaaggaagaatccaatgttcccatgcatctggaaagtcagctttgaaagcaaggtataagggttgtgagcgatttctaatacatatccattcatctaatttttgttgtgggatattaagaagaggttgaacaagatttcctccatttattattctccaaaaggcaagatcattttgaggtgaatctaaaaactctaatatagcaataaactgaaggataattggatgctctataagtaaaaagctattttctgtcactacaggaatgtttttttccatcagccagttggctacttgcatagcccttttattagatctaacaagaatagcaatatcccccaaagagcgacgtgtttgaatatcatgaatgatatttattaatctatcatgaacaacagtgtcaggatcactttcttcatcatttagtatacgctgaatatatacatatccttcttttttgtttggagctatggattgttcagcatctgcaaaagactgagttactagaggtacttgctctgagagaatagtattttttattgttggtgcaatttcattagggagtatcttagagaaaatagattgaactatattgtgatcagataatttagtaaaaagagtattatttgtattaacaatatgatatgcgcttctccagtttataggtaagctctctttttgaacataagatgctatagattgtagctctggatcggataggactttttcaaagagtgttgtatcaccacctctccaaccataaattgcctgtttaacatctccaacccatgttaatgatcctccataggaaagagcttcaacaacaaaaggttgaataacagcccattgttcatggcttgtatcttgaaattcatcaataagaatgtgttgaagatttgtcccaagtttacagaatatttctgatataccataatgtcctgagactgcttgttgtgccaatgaaggaataagttcagcaaggataatacgttgtttacaaaaaaattctggtagtaggttatataattctttagctaatttaacataaggtatagttttttgagagttttttaataatactcctgttgtatcaagatatgtaattagtgattgaagggtattataaagtgaaatagtatgatgactaggggtattttttgaagatttgagtatacagtcagttaggtttggtttacgtaacattgtagattttggtggaattgtatgttgtgttcctatctgacaagcttcaagagcttttttaaaatttgaatgaatggaaagttgttcgtttttgatgcaagatgcaagttctgttgctattttttttactgattgaatttttattgtaagatgtgctgtaatttcttgaggtgaagttatttcttgttcaccatttataagtagaggtagtattgaaagaactttttctcttagagtagatccaatcataaaattgttatgtttagtatgaaataatatatcactacaggcttcttttagtataatataaagtctttcgttatgttgtgtttttttaaggatagagtctaatagtggtgttagtgcttcttctgtagaaaaaataggttgaaaatcaggtgggagatgaagttctaatgcagtactatgcacaatagtatgaagtaaactatcaattgtacatatgttgagttcactataattgcgtagaaaaatattaatccaatgtgctgcttgtgtactagttaagcctggtattggttgagtattgagtgctgcttgctttaatcgagttataatacgctgttgcatttctgcagcagctctattggtaaaggtaatggcaagaatacttgtccatgaatgttcatacttgttataagaagagtttgtgttattgtcatttatacttttatttagaagactaagaaaactatatgtgagttcatatgttttcccagatccagctgaggcacgaatttgacgaagaagaggaaagtattcttcatatgatgacttttgtatgttcattttcttcatttgtgagaggattacaatgaggaagcatacctgtaagccttccttgaccagtggattcaagtactgctcgccaaagtcctgactttgtattaagttttcgacgttttttgataaccatatttagtgggatatgaacatagttgtccataatatttgctactaccatgtttgttttacctgccatagctgcatgtacagcatattgtccaagaaatccacagtaaactctatcattagcatttgctggaactgatcgtataatatagcttggatcaataagctttagtataataggtatatcttttttagaaaaataatcttttatagagttttttaacaaagtgctaatatcagctaaaacaggatttccagaaggatctgtttcatcttgactatctaataaatgttgtccagcaccttctgctacaataataacagcatgtgaacgttcagaaagacgtttttcaagagcaggaaggagtccaccattaccatggagtgtaaattgtacttcaggaatgagaacaaagtttgcttcttttagtgcaagggctgattgggcagcaataaatcctgattctctacccataagttttacaatgcctataccgtttttagcaccactggcttcaacatgagcacatccaatagcttctgttgctttttctacagctgtatcaaatccaaatgatttaggaataaagttaatatcattatctatggttttaggtataccaataacagaaatacgaaggttatgttggtggatttctttagtgatagaatttgctgctttcattgagccatcaccaccgataacaaatagaatattaatattatggtgtactagtgaggctacaatttcttcaggttgttgtggacctcgtgatgaaccaagtatagtcccaccaaaacaatggatattttttacaacatctggtgtaagttcaataggtgtatgattaaatttgggaataaacccttctaatccataacgaatgccaattacagaagcaacgctatatgcatagtgagcttcaagaacaatagcacggataacatcattgaggccaggacaaaggcctccacaggtaacaatagcacaacgtgttgtttgaggttcaaagtataaatcttgtcgtggaccagcaagttcaagagaaagtgtaggtgaagaacctaagtcttctatttgttcttggttaagacaaaggtgtatgtattcgttttttttaatatcgcagtatggtaaaggagagggtatagcagcttctccaagagttttgataggaagtaatgtgactgaaagtgaggagtaatgtgtattagtcatagctaactccttaaaaaaatttgatgagaagttgaaagaaaataggtagtttcttgtgttatacctaatccttaatgttattataggtgtagggttactttcaggcaatgtaaggtatgtaagaatatcagtaaaatatatagtaattgctggaagacaagaagaagagaataagtctataaaaaatatggtgagagcattaaatgtagttactagttatagagtgagtagtattgtaccatgtgatttagtaagaaatagataaaagtatactattgcagtaacttggtatgattaatgcagatattaaataaatctttaatcattatgtatgctatttaagataactcttaacagttatcttttaacttattttttataacttttttaatataatgaagatgcttaaaaggattatacaaataacatgtagattatacttaactaacgataattagaagtattttatgttagttagaagttatggttagctatgttaacaaattgtgttatcctgcagatgctactttattgtagttattactctttattatttttttgagacttgtagtatagttatggagtaattatatgagtaacactgataattacataatgataaaaaaaacaaataatcttaataaattactatggagtatattgttgtgttttttattagtatgggttgtattaacctttggtattggtatcccatattatggagtacagccaagtaacctgctagagtcattaggttataaaaagaaggtaacaaaagttaacaataatcaacaggtattgtatacagaagatactcttgatcagatgacattggaggttatgagaaaagataaaaaatctaacttagtgtcatccagtgtacaaactccatatttttttatatggttagagataacttgttaatccaacatcaaaataacattaatttttttcaatcatcattttttttgagctatattcctcaagtaaatgttgcaatggctacaattcaattgtgtaaacatgtccaaagtatttctagtagtagactacaattagctgaacaattaatatataatagtgaactcctaactataactaactataactcttatttataaagtatattttgtgaaataaaattcatagttattggagtcgttttctattaaatatttttttattaacctagataaatataatataaaaaggtagttatgttatttttatgaatatgctattactactattattaatagtatgttagattcttaaacagtaaagttattttggcaacgtgcaaaacaacttataatgatgcctcctgcttgtgcaacattaagtgaattaacatctctcaccatagggatatgtaatatggtatgacatcttttttttagttgtaatctgataccacttttttcactaccaagaataagtagagcagggaactttagttctgcttcaaaaacatttttactatctttttctatagatgttccataaatatggaaacctttttcattagctgtttcaatagctctagaaagatttattgctttacttatagggagtcgttcaagacatccaacagcagctctccttgcatcttgaccaagaaatactccattatgtttagggattataactcctgctccaccaagtgaataaagagtcctgataatagttcctgcgttaccaggatcttgtatttgatcaaatacaacaataagcggaaggggtgcatctggaactttatcaaataaatcttcaagttctataaatccagattcaaataagcgagcaacaataccttggtgattagtaaggcaaaaacggttaagaactttacttgtggtaaatataaaacgtatgtttgtctggcgacatagatcaagaactttttgatattcttttgagcaaagacccttttgtaaaaatattgtgtcaattttttgaggttctttttcaattaaatccaaaactggcttaattcctgacaagatagaaatagttgagagaaaatctagagaatattcagaaaaattggggtgttgcatcttcgtaagctgttttgtataaggtaattggcgatgttttttattatgttgttttttattttttagatttgttatctctttcatcttatttatactatttagtttattggtgaattttatcaaaattataagatagttataataaattagtataagctataggtagtataattagtagtcatatctactagttattgtgttttttgtaataaatccatataagagttatctggggtaaaaagtgtaccaagttataactgttatatttattcttaggtcaagagcaatgagaataaaggtttctcattacttaatgcttttattacttctactgaactttggaatattagaaggttgtggaaataaaaaactttctggcagtgataggtttgtttctacaaggagttatagccgttgtaaagaagaaaaaacaggtactgtttatcttcctgcagatgacggaacacctttaaataaaacagaattcaatgcttttaattcaaaaggtcaatttgatagaaatattgattcaaaggatatgagagatattttattacactttaaaaagtatgtacgtcatgagcgtaaaactgttgaaataaatgtgcagcgtgctagtagatatcttcatcatattattaaaacttttaggcaagaaggactacctgatgagttggcgtatttagcttttattgaaagtggttataatccatgtgctcgttcttgtacaggtgcatcaggagtttggcagtttacttgtgcaacaggaaagtactatgggatgtccaaaaactcttgggttgataaaaggcgtgatccttatgagtcaactcgtgcagcagctcaatatttaaaaagattacatcaaatttttaatgattggcatcttgctattacagcttataatgctggagaagggcgtgtttctcgtgctcttgctgctagtggagcaaagtctttttttgagcttagaagacgtaataagtgtattccagaaaaaaatcgtctttctgaagaaggaaagcaatatttacccaagtttttagcaatttgtaagattataagaaacttaaagcagttaggatttgaacctattgaattgtctaaatcacagaaaatggttgaattaaaagcaaaaccaggaacaaatttaaaaacactttcaaggcatcttggtatgagttgggatgaattttttgcacataatgcagcatacttaaaacatactactccaccaggtgtacatagtactatttatgttccacatcataaagttcgaatggctcatgcttttttgaataaaaagtcgaaatctaaaacatatatggcggatagaggaaaatatagagttgttaggggagacactatttcctctatagcaaaaaaaacaggtgtttctattgctgacttgaaagatgcaaatcctcattatggctctttaagggttggtactatccttactataccatcttcgtcaaaaatggtggcaaactatgtagagccagaaatatatcaagaaaaaacagttcaggatactaaaaactctcagaatacaaaagtacaattccatactgtaaagaaaggagatacacttttttctattgctaaatattatggtataactcaagattgtttagtaactgctaataatttgtctcatacagatattagtgtggggcaacaactttacattcctatagaaaaaatatcacctatggcaatgttgaaaaaggatccagagcaagttcagcctaaacgtattgttcaatatcaggtacaacaaggggatagtttatggagtattgctagaaaatttaatgttcctcctattgacctactttctttaaataacttaagccgtcaaagtaaacttcgacctggagattatgttcaagttgctataaattgattataataataaaagttatgatatgaagagagatgcttaagtagataattaagttagttagtagaaaaaattaagttgctaatcctgagtggagatgattccagcggcagaggtatctttcaattgcattaaagaattcatgaagacccattccaagaagactcattgctaaaattcctgtatacatctgtagcatattgcctcgaccccatccatccataataagaaaacctaggccggattgtgtggcaaaagattcaaccataaaaagtacggctgtagctgttccactagaaatttttagagctactaaagcattaggtaatgtcgcaggaataataacatgttgtagttcttgtgatggtgttcctccaatagatcgaaaagagtcacggtattttttgtcaatgttgagggcacttgctcgggtagcaataagtatttgatagcctgttgtaagtgtgatgagtaaaattttaggcgactcaccaagaccaaaaagagttagaaaaataggaagtagaacaattttaggaatgggatatgttaagaaaatgataggagaaaaaatagtatctactaaatgtttagtaccaagaagtaggccaaaaggaaaagctgtaaaccatgcaagtgccatagcaacagatattctcaaaatacttatacctgcgtgagttaaaaagagttttgtttttaaactattataaaagtagataagaacttttgttgggttaggtaaaatattttccccaataatgatacttccaatcttccataggacaactattataactatagctaagaggtatttaaatgttgttttcatatattttctttatcacagctagggataggtataaggagttgttggagttttgatgtaattttaaagaatgtttcatgggtacggcaatgtctagtattgaaagtagagttttctatccagtacatagatggagaaggagtaggtgtaagaaccatgatatatttccctaaaaatgtagcttctatgatgtcgtgagttacaagaacaaaagttatttttctatgttgccatattttaaaaagtgtattctgtaaccgttcccttgtaatagcatcaagagagcagaatggttcatccataaaaagaatatctggttttgttactaaggcccttccaatagcaactcgttgtctttgtcctcctgataattgtattggatatcttttttcaagtcctacaagttggagttcttctaatatttctttaagggcttttttttgttcttttataggagtagattggagtaatagtggtaaaagtatattttcttcaacagttttccatgggaaaagtccatagtcttggagaataaaagctatttttttgctatatagtgatacatcacctgaagttgctttttcaagtcctgaaagaatatagaggagagttgttttcccacatcctgaaggaccaataatagagagagtttctccagcaggaattttaaaagaaagattatggagaattagagtattattatatattttatttatatttactactgaaataccatgaaagctcattgtagaactatttcctcatagctaggagatgtttgtaatagttttgaagatatcatccaatttgcaaaggtttctatatcagctgaattaggtaatggttctttttcaatatcaaaaaaaggcatagcaaaagtcataacaacatcttgaggaagcaagtctttgttaaccataagtgtacggtaggtatctgggttagcattgatacgttttgcggcttctaacaatgcattacgaaaagattgtgctatgttatcacttaatacttctttacgtaatgcaataacagcaaaaacaagattaagtcccttatcatcaaggataacttttgagccattactttctgctaacgatagtaatggttctactaatagggctgcttcaatcttatttgacatgagaagctgtgtgcgtaaagcaatcctgttgatatcagttagcgggcaacttgttgggggtaaatgagctttttgtaggagtcttgaagctaaaaattcgataatagtagctttggaaatagcaataggtgtattttttaaatcgttaggagattgaattgaagatttttgagaaacagcaataccaaaattgcgatgttgtgttgttgatcgtgctactgttgccacaatttgctgtgggacacctgtttcattttggagaagaacagtgacaatatcggtaaaatgtccatcaagcatacctgcacgcatagcagaactaagttcaactgtacttctaaaaggtacaagattcacttcaaggccttgatcagcaaagaggccttcatcaatagcaacatgtaaaatgatagaagatgctgcaggcagtgtacctatatttatagcactttgggcaagttgagtataactcataataagtaaaaaaagaaaaatgcgaataataatcattcaaacctcatctactgattattattaaaaataaatagttattttataaataagttactttttagattactatatactttttagctatagatagtattaataacttattggtgttaaataatactaggttattaaaatatatcgttttactaaggataagacaatagctaaaaagacagatatgaattttgttactattttccttattattcaatattattttcagtatttttttataatatggtagactaattaaagaagattatctaattttattatttaataatagttagcgataataagcatcaggtagttttttcatattatgaaaggagattactgtgcaaactttaattgttgtaacctatgataccgagttaaaagcagaagaagttagattagactttttaaagatgcaaaaagaatatctagttgcattagaagatgctgtagttgtggtacgtaaaccagatgggaaaataaagctacatcaaatgtataatctcacagctggaggagctgttagtggaggtttttggggaacacttattggtttaatctttttaaatccactattgggattagctgtaggagcaagtgcaggtgccattgctggtgctttaagtgatgttggtattagtgatgattttatgaaaaatcttgcaaaacagttaactccaggatcatcagcattatttgtattagtaaattcaaatattactgacaaggtattagacgcacttcatggtacaggtggagtaatcattcaatcatcattatcccatgcagacgaagcaaaattacaagaagctcttaatggtatgtcatctaatgatgatagtagtaactaatttatttattaaataatagtccatcaatattgatggactattattctttctctttttctctccctacctctgtaattttatgtagctaatgaatcaataaaaaagaagatatggaattctgtatcgatatatcaatttattaatattttttttacttcttataatcttatcttattgacattactcaaaatataacattctttttttgtttaatttataatttactatatgttaaagttctagtgaatagtaataggactaattaatttagtaaaaattaatagtatatttattataattaatacatacagataataaataatttagtttcttaatttagtttttgatataataaaacaattttatatataaattttacatagttattaataattataattatatgttaagttacattttttactttttacttataccataaaagttaattagcgttattatcttaaaaaatattttaagatttacttatataatctaatctaacctaatttaattctaacatattagaataatagtgagttagtataaaaaatatactagcttaatggatgattacattatacagaaactagttattgcgaaaagtaaattttcacggtaagttatgatatatattatgagcttgttgtatataaattttttgaaagaaacgttaactaattacttacatgaataatcgctagttattttaaccacttttcattttacaaagtgacattagaaatttgagtatatgttaaggtgattatgataaataagacaactaagcgccataaagcattgcaagaatttcttgctgcccgtggctatgcaactattgaagatcttgctagacattttgatgtgaccccacaaactgttcgtaaagatataaacagattagcatcagatggaaaagttcagagattccatggtggtgcaggaatgcctcttggctctgaaaacattgtttacgatgaacgaaagagcatttgttcagaggaaaaaaatagaattgcaaggttacttgcaaatcacatccctgatggagcatcacttttcattaatattgggacaacaaccgaagaggctgctagagcgcttcttgaacataagaacttaagaatactaacaaatagtttaaatgtagctgctatttgtgcaagaaatagctcttttgatgttcttgtagcttgtggtacagtccgacataaagatcacggaattgtaggagcaagtgcagaacgctttatgagtgaattccgtatggattatggtatcataggtatttctggtattgatgaatctggaaacttgttagattatgattatagagaggttgctgtagctagaacgattattgaatattctagagtagtatttttagcaacagatagctctaaatttggtcgacctgctatggttagagtaggtgggttatcaaatgtaaaagctatttttactgatggaccattagaagaaaagtggcgtcagttagtggagagttcaggaacagaactttttatagcctgattttataggcttaatttaaataattcattatcctatagtttaactaatctagtatatctttataatctatttggtatatagcaagattatgtttttatatttatactagattgttgggtggagtaagtcttatagcccccttgaagattaatgtttttttgcatcattttttcaaaaaaatctacttcttctttggagagaaaaggagttgcttctcgactaataatatttacatctggtaagcttatattacctttaatattaggcgtagtttgttgtattgttatattattagtagaggtatcaacttgttctttcaactgactactaaaagtggaggaatttgtgtttttttgagatctcccaagtaacatagactgtactgatggagcattatcaattttcattacagacctccaatcaatttttgtaagtattaactttttgtaatgtataaagcaataattttattattatatgaatgtgttaacataaatatgacattttactaattcaatataagagtattttattaggcatgttacatacaaatataaatatgaattatttaataaattttttattattcaattaaatcataaagatacactcttcataacttattttattatgaaaacagttagttattaatcatgtattaaaatactacaacagtctatattaatctaatatagaacattattataaaaaataatatgtttgatatgctaatttttgttattaattatatataattagttattatatattcataacttattttattaagttaaaaatattaaaaatagtaaaatacaaaatgttaaaaagtaatgttataagaaaggtatgtatgtaaagtgtatatagagtgcatagttggggtatgaaaaaattaatgtgctaagagtataaaaatattttatttccataatttttttaatatattctggtgatattctaacatttttgtgacaggtgttggcattgtatgatttaggtacactcctcctttccatgcggatctgatatttgaggagcgtatatccattataggagtattaagaaagaaacagtataaatttttaaatattgatgcataacttaccattttgttatgacgatcttgtattattgtagtgcaattccaaaagcgttttagtgttgatgaaaatgattgttttttgtttgtagatcttggaattattaagaaatttgtaatactaggtagttcaagaccattataccatgtatctagcatggcaaaatcttcatcacttaaaataaaaagtggctgatgaagagtatgtagtttcttccagtaattgagcatgttccaagtgtatgatggttgaggcaatatagattctatagtgttaatagataataatggatttccctgtatagcagcttgcaaaagatccacacgtagttgaaatggaataacatttttagttgttttatgaggaggtaccatacatggtatgaattgtatttgctctagatgcatatattttattgcagctaatgcaatgtttatatgtgctgagtgtacaggattgaatgttcctccaagtattccaataagtttttgattcatgatgctcaatttcattatttttgtttttagcagcttatggttaaatagaattcatcataattttttctttttgaaaatactaattatatctttggttattttttattttatagtgaataatagtatgttatgaaagattttttctatttattatctgtatgaactttactttaatttatttgctgcataagtaaaatctactatagatatcttttgtaaagatacattaataaattttttatgctagctgtaattattttttagttattgtatttattatttatgctaactatatgatactaacaatataatgttatattattctttttaggttatctagtcttattgatttaaaaaagatatttttcttttgacatatatattgttatattgtatagttaatagagcttatatgttgttaatataatgtttatttggacaattgttccttattaaggtgagttaatgattattccttttcgtcataaagaacaaaattcttcattagaacaaatagctgatccacaagtagagtatatagaaaattctagtcctttattgtcatttattattagacattcaaaaactattatagctttttttcttatattactaagcatagtaattattgctggagtctggagttggtatagttctcgtgaagaaataaaggcacaagcagcacttggtcaaattttaattaattcggtatctactgaacaatttgatacattgataaagtttgaaaaaacagctcctactgctttacaaaaaggcattattcttcaattagcattttgggctgttcaattagaacaatatcaaaaggctgctgaagagtatggtatcttatataataaagatcctaaaggtgctattggtattttatcaggccttaatcaggcggatcttttacaaagaactggtaactggaaagaagcattaaatgtattattaagtcttgaagaagttgcttcaaatcctatcttaacaggaatttatgagtcacaagctatatgtgctgaacatataggagaaaaaaatattgctatatctgcttataagaagcttatagatgaattaaatataacaggagttgacgctacatactatgaaaataagcttacaatattaagtaatagttaagaataggatgtataaaaaaggtagtaataaaactattacattaattttgattggtgtagctatagtagattattattttttagtaaaaaagtattgaaatataataattataaagatagaatataaacttttttttgataatataaaagtttatattagataacaaaatagtcatagttaagtaatctatactttttaagtagttattaagatatactaagcttaaatagatattattttgactatttgttatttttagtattactataaactagttggagttaatagaacatggcacttttcaggtaatttttatttattttgccggtaaagtgtttattattattattattattattttaacttactccaattagtggaatacataattattttttgttataatagatttttatttctattaagtagaatagataactcatatgttgtctaaatagaataatcaaaaactgtataacttttattagagttataacagttatatagcttagggaatagtaagtataatactctatcatactatacttttcagtaacctttaataaatctaaactaaattatatagttagttattaatctccagaagattaaaatggagggtcttatatggatgattttttaaaagaagcattagatatagtaaaagcacaagccagcgttcgggtaatggcagaagatgaaattatttctatggttcgtcgtctttcttcaggtataaaggttgtttctgaaggtgattgcattcaagaagagcaggcaccaacagaattacaaatggatccccgtaagtcagttaaagaaaaatctattacttgtcttgagtgtggtaggacatttaaaattttgacacgtaaacatttacgtagtcatgggcttgacgccaatgaatatcgtgaaaagtggggactaaaaaaagataccccgttagtatgtaaaagtttacaacgtgaacgtcgtaataaaatgaaagatatgaagctttgggaaaagcgtagaaagagttaataaaagttattattaacttttaactaacatcattaataatgttagctaaaaaaggggggagagtaatctctcccctctttttttaattttttataatagttaggtatactttttctaagataagaaaaagtatcttattatagaagatataaaattctatatagaatagctactatactaattaaatagtggtcgttctggtgtagatgaatcttgtaaattttctatagtaacatctttaggtggagtaaattgaaatatgttattatcaatatgagtattgggtgtaatattaataaaagtaatagtatttgtatttccataaaaatcaattgattgtactttgtgaatgagtaaactttttttattaatccataaaaatgcctcaaccatttgagtcgttggttcttttgggtataatttaaggaagattagctcattattattattattattattttcaataattgagaagtttttatcaagtcgtacttgtccagtaataacctgaataatagatgtggaatcttttacaatatctgtagagtacttataaacaaggttttcatcaggaagataatcccatacagcattggtattaataagaagaagttcttcatgaggtgtgtttgtttcccatctgacaagaagtggttttttaaaaaagagtttcccaatacgtgtttctttggacccactttcttgatgagtaagttcttgagtaaatgttgcagaaaagtttttaatggattgatatgattgctgtaattcttttactattggtatagactctgcataactatctgttatatatgaataaaatataaaagttaaaaaaaataatattagttgtagcatagaaaatttttgtgacatttttttgttcctttgcttaggaaaaattatagtatttataatattcttcaaaggctaatttgaacgtatagtacgtgaacgatttccacgtattgtaggaggaagtatgccttcttcttccattctttctacaaaacgagcagccttattaaagcctatacggaaccgtcgttgtaatagagaaatagacattctaccttgttcttgaacaaaagtaatagcttcagcatataacgattcttcgtcacttgagctaaaaggagtttttgtatttgtattactagttgtagtattatttatattgagagggttattccaattagaaaaatctacttcatatactggtgcttgttgttttctccagtattcagtaacagcagttacttcctcatctgtgacaaaagctccatgaagtctttgaatcttcccaccatttggtttaaaaagcatatcacctttcccaagaagttgttctgcacctgtggcatctaggattgtacgtgaatcatatttattagctacttgaaatgcaatacgagagggaaagtttgctttaataagtccagttactacatctacactaggacgttgtgttgccacaataaggtgtattcctgcagctcgagcaagctgtgcaaggcgaacaattgagccttcaacttcttttcctgcagtcatcataaggtctgcaagttcgtcaataataactacaaggtaagggaggtatgttaaatctgcaaattcttcaggtttgttattgccaatgctaagtaattttttattaaactcattaaaatgttttactccaaggcgtgcaagacagttgtagcgtctatccatttcataaacagcccattctaaggctactttagcaagtgcaggttctgtaacaacaggatgtataaggtgtggtaattgtgtatacatagctagttctaccctcttaggatcaataagtatgagtttcaagtcagtaggagtagcattatagagaaagcttaatagtattgtattaagacatacacttttccctgcgcctgttgttcctgccacaagaatgtgtggcattgttgccaagtctttgactgttgactttccttctatgtctttaccgagggccatacttaatggtgatgagctgtttttgaatgctttagactgtataagtgttttaaagcttaccagtgatctattttcatttggtatttcaataccaactgtatcactacctggaacaggtgcttgaatacgtacggcttcagccatcagacttcttgcaagatcatcactaaggtttgctattctacttacacggactccaggtgctgggcgtatttcaaaaagtgtaataactggacctggtgtaacacgaactaattctccttgaatattaaagtcactaagacaatccatcacttttttacttttttctttaagagtaagttgagatggtagtatatcattttctgtagaagaatgaagaagggataaggaaggtaatggtagtttgtgttttacaagattagttgtttgtcgcaaagctgttgaagttggtatactagatgtttctgagaatgactctagtagctttggtaaattattggaagaagtatgttggatttgttcctcatacttgttagtcgtaggagaggttatcaatggatgtgtggtgatatctattgtgtctaaattttctaatttatctatatcgatatgagtatcttcaaaggtatcatcttcgagtgttagaggagttatgtcaggagaagtgaattcgttataggtcgtagagattatgcttttcttatgggacttttttaatgtttcttgtaaagaatgtggtatgttccatagttgattgtttgatgtatgagaatattgtattctttcagatcgatagcttgatagcgtagcaatacctgtatactgatgggcaagggtattatgtaataaagaagaatcataagggtaagcaggttgcagagtagggttatgaatttcatataatgggataatatcaatatattcttcttgttttttaaagggaaaatagttttgtataaaacaaagccaattatagtttaaacatattgaacatatagtttttaaagaaatgtcatatttttcaattttatttttaataatattttgaaggcgatgaagaatatttaaccatgcaataccaaaggcaaattcaagagaaataaagaataaaaaaagccaaataagagtggaaccaatagtaccaaaaattatagaagattgtttataaatggtcatacctatgatgccaccacctctaacatcaccaataccaaagttccatgcagcaccaaaggaaatgaggcaaaatgaaagaataaaaaatccaagccaacgccaccaaggaatagttagccaagtagtaatacatccagcgccccatgctataaatatggctggccaaacaatagcagagaatccaaatatatctaccaatagcccactgatatatgcaccaaatattcctgcttgattatgagcttttgaaaaattacttactacatggttaagactaggatctcgttgatcatgagaaagtaggcttaaaaggacaagcaatccccagaaaatgaggaaaagtccaaataactcacgagcaagtttttgattattatcttcaggaggtgtttcattatttggtctactctgttgaagagatagatttcgggtagatttattttctttgcctgaatatatcatagtgagattctatagtaatagagggatatcatgatcatatttttatggtattcatagattagtagtaaaaatagtcttactcacgaccaatatattctttagtacgggtgtcaacttttatacgctcacctatattaataaatataggtacttgtataacaactcctgtttcaagctttgcaggttttgttacattacttacagtatcaccttttatagctgtttctgtttctataacttcaagaattaacgttaaagggatatctatatctataggtttttcattgtaaagaagtacacggcattgttgtccatctttaagaaattcagattttccattagtaacatcttctgacatatggagttgttcatagtttgtaagatccataaagatgagttcagagccttcatgataaagaaactgcatatcccttgactctaagtttggccgttcgactttttctccagaacgaaatgtattatctattactcggccattaaggatattgcggagtttggtgcggaccatagctccacctttcccaggtttaaaatgctgaaagtctattatatcataggggacaccatcaatttctattttaagtcctttacgaaaatcagtagttgaatacatgctgcctccatagcagtttttaacatagcacgtaactaatgttgattattttagcattaaacgacaatgagatattgaaattttgtttgttttttggttattagttattagagtaaaactaagtacagctcatatatatatatataactattttttatcagtatagactcatttacaataacacagtatctgtactgtcagacgtcgttttttatagtcaataatgataactaccactaagtatatgaaagggatatttttgagcattcagcaaagcttgtcaatatctcatatgaagtaaggcaaatgatgacacaatacaaacttcaacttgaggcaacaaattttactaaacaacagcttcaacaacaattagatattctagagcaaaacaatatacttcagattgcgttagcaggacgatcaaatgtaggcaaatcatctcttatcaatgctcttgcaggtcgtaaacaactagcaaagacaagtggaactccaggaaagacacgttccattaatttttatgcggtttatccaaatacttttatgttggtagatttacctggatatggttatgcacaatgtagtaaaatagagagacaacattgggctatgcttatagagtattatctaaaaaactgtagtaagctaaaagcttttgttttgcttatagattgtagaatccctcctcaaaaactagactatgaactagctgaatttgctaccagttattgtattcctcttattcctgttcttacaaaaattgataaatgtaaattggttgaacaaaataaacgtcaaaaagagtggagagcattgcttaataatacacaaccattacttgtttcttcaaaaaatatgaaaggggtacaacagctatgggaacgtatacaatatactattgatagctattaagcatgagggagaatgaactgtcatagccaattttgttgttagttttagactaaatgccaagatttatggcataggtatatgttatcagcttatttatatataatatatgaataaataaacttaatataacctatagtaactatataatttttataaaagaatttttttataatattagtaataattcttagaagttttctggcctaatttatgcataaatttttgctagttagcctttattatcttactactcctttatattactacctctattataaatatcctcattttattatccagtctgattttttcttattatgatatcacaataacaatattagtaaggtagagaaattatgaacgaattcattcagagaaatggtttttatggaaattcaatactggaaaattattcgttacaaacagaaactcaagctgatacacatagtaatattgctagttgtgcattattttggaagaaattcaaaacaacatgtcaatctacatataatattgtttccttctttttatatgagacatttattccctccatatatcaaagtaataaatacattgcatgctactgtgctattcaatcaagctcaatacctatgcttcaaaaagataagcagtgtcgtttttgattaaaaaataggtatatattgctaatagataagtataactaataggaaagaatagaatatgtaatgaatttaacctagtgtgttaatgacaaaattataacaaagtttttttcaatacattgacagtaaaagattcattatctgatgaatgaatattcattatgataggttaagttatttatattcttataacttaacctattatttttttctaaataggagatctgaaatatattttatgaaggaagaagaaataggagagttagtcataattattgatattttttcattatatatagatagttatcatatttactaatctatatatttaatgtttatagtattaaaaaatacaactggtatgttttgtgcttttatttattaaagatagaaaattttattagttcctctaaagctttttttagttaagccgtaaagctaggtaactgtataagtaatggcaagtaacctagtgaagttaagcatcccacggcttattgtatatttggaggaagttaagatgaaatttttttatcagttagataaagttacattaaatgattttcaggtaattgagcctactaatgatacaagaatatttaaggatagcgaatataaagataaatatgaacaatgtacaaaaatgactatagtgatggataatgttactctaaaagttgtgactcttggtgtttctgaattgatattagaaaacatacagtagtttgaatcataatgtattaagaacaatctgtagtgtgtactttggtaatatactaggtaacaatattgttcagatttggagagcattatatatgtttagcttaatatatatatatatgtctactaagttagacatagttgtgtctacactcttcatgttctgagtctaaggaggatgaaatgaggattgaatcagatggtagctggagacaagtaccaccaaataattcatcaacaagcagtgtagaatctagtcaaggagcacaacaaacaaaccaaacagaagaaacttctggtcgtagatcttcaagttctttttggggtaggttatgttctcgttgttctagtggtctttcacgtgttggagctgcaataagtagtatgttttctagtcttgttagttctattaggagcttaagtcaatatataacaagagataaaacagcttcaggtgtttcttctggaagtttagctcctagagttagtagccatggaattggtggtcaagatggatccacaaggcatactactagtaacccacgggacagtgctcctccagatttttctccacctccacctcctattaataaaagacatggtgggccagattcagatccaatttatgatgtgcctcatggagtggggagtacatcaccttctttacttccacatggtaaaccagatacagatccaatttatgatactccaagaaattttgggatagtaggtgcacctatacctatgccacaatcaggagggaatcgttctcaagaaccaatatacgatacacctaaaaagcctggagaatcgagtagtagttcttcatcatcgtcctcatagttttattattaaatgttaggctgttataagagtatataactagcttattatataacagattagtcatagttagaggaggaaatagtaaaagaatttttaataagaggataagttatgaaaatatataatgagccaacatggtatgatggaataaaaaaagagaatgagcttatagagaaagaaaagcctctggaagatataagtagttattgggagttttgtaatattgagttggggatagttgcacgtgttattgttggaatttttacactaggcttgtcagaagctgtatttaagtgcatgaggatgtataaagctaaaaaaagtgaaatatatggtccaccaatagtaaaaggtgtttcatggtatgaaaatggtaagaagaaaagagtgtgggatgataatcagtcacactcagaagaagctcaaagtcaacctcagaggaataggagtaggagaaatagacaattaggtagtagagcaccaaataggtatgggttgatgtatcgtaatggtatgcctacaagattttgggtttaatgaggggaacactgttgaaacttagataactaaatatttttgttaatatattctctactttttttatttattagctagatagtaaaaagaacaaaaaatgaagacttgtccacatataggggaggtttgtgatgagagtagatgcaggtcaaagaataaatcaagctttaatggcggatacaacacaagcaacttctactaatgagacttcagaagcgcagaatacagagaaaacagaaggcagtaaaggttcttcaaaactatgtggtatgaattgtaaaaaaggtctgaagttagctggacgtattgcccttgcagttctaacattaggtatttctgaaggtgtgagaaaagggatagaagcttatcaagctagacaagttaaatctgaaggggcacgaatgggtaaattatgggaaactggtaagcctagttttcctgaaaaaagtggcatacataatccatctgcaactgatgataatgataaaaatttgtggacatcttctagtcagaagaacagtggtggtgtaaatagttttggtaaagagtctccatcacctagttctggatctagtggttctcattttgtgtttcatgactcaccacagaaaccttcaagcggtattacagctgagacgacccttaaaacaaatagtggtggtgctacaggagaatagttgaagcattttttaaagaaataattattttataagtagggtacgtgaaaataataatatatactgcaaggtaatgtggggtaagctatgccaattacaataacgctcaacgcacctagacctcaagactttgaagataacacatctgtaaatagagataataggacagaaaatactcgacaaacacaagagacgtcatctaaaagcgctacatcatcatctgcatcttcattcctacatggtctttgtagtaactgtaggcaacttggaggagcaatggcacgtgtaggaagctcagtacttgcaagtgctactctcacagtgaggaatttaggtgtaagagcagtaaatagttatgctgcaacacaagttaggagtgggatatcaagattagctgatttaatttcattaagagacagccaatctggtccaagaggtcctgaaattactgttagttataataaagatcaagataaagttacgtttcatgatccatacaatagaggtggtttttcttcatcaggtagtagtggtgttagtggatagaacttactctgttatataatatttgtttacctatttatatatctaataaataaaataagtttgtttagtatcttttataaatgaattaataaggtatatttttataccttttttatatattaggatagtaaaacataacctaaaaatttcattgttatcttagaagtcattatggtttatattcattgagtcattatgataagagaggagtaagagcatgccgccaatagatccagctatagcagctaagatatcagcagctatgaatcaagggctttatgattacgctaatagaaacagtaatgacagtagtagtgcaagtagtacatcatcagcaagctctacttcatcattaagctcgtcctctccattatatactgctaattgtaaacaaggtttaaaaatggcagcacgtgttggacttgcagttataagcttagggttttctgaattaattatgaaaggtatttctctgtataaatcaagacaagctacacagaatccacaaccaagagtagtaaatgtatttgagtcacaaccacctttagaaatttcacgtagatcaagtacagatagtactagtagttctggaagtgtatcttctcgtacacagttgatttttgaacaatcttctcatatgcctacaagcggtattacagctgagatgtcacttactcgtggtagtaatgattaaaaaggataagttggttatgtgatatgtaaaaaataagtaggctgaagatggtaatgacaaaaataagattatacatagcaaaagtggatagctaaccataagctatactaatctgacattctatctaggaagtatacgaaaatggagaaaaataacatactatcagaacaaaaacttattgtaactatccatccaaaatctgtatttcatatttgtggaagagctattctaactattttaacttttggtatttcagaatatctattaagtgctattagttcttcaaaagtagttcaatctgatttaaattagtaagaatgtaccataatatatatatatattccctatgttagtaatgagtagctttgattagacaatatacaaataacaaagtgaaacactttacatatataaagtttttcctaagtaattcttattcttttttgggtaagaaaaacgtaatattatattattataactgacttattatggatgtatttaggatagatatataaaaatgatacttgggagtatcatttttatatatctatctattttttgtatattatttatacattaaataaataactactctagcttgaaagagtaacttaagctcattattatataattaaaaggttataaaaggttctgtcaattttttagtgatacataattattatagaaatggtaaagaaaaaatgaaggggcataaatatattgcttatataaaatatgttttacatacttttagtatggcatgaattctgcttatattttctgttattctaaatttattcttaaagcttcaaggaatataactatgaattcttttattgctaaaaaaagtagtactctgattatattaagttacctattgcagtaataatatttgattattggaagataaaatttctatatattataaactaaattaggtgaatatttactaatagttatatagaaagttattataggatgttttagtaaattatatcatgaagtaagagctcagaaaatacaagttttatacccaatgagtcataattatatgaatgaggagcttttctataattattatgggctcatagagcatctcctttattttatactataattactgaattgtaactagtagggaggtacacggggatgctcattattttactagtattaattaataaatagtatataattcatctggtagtaacataattctactaattactaagtaacaacaggatatttaactgaattattttgcaaagtataactcaacaaatttatattctaattatatgaaagaaataaaaaaatttttgtatttttgtattattttatataaatataaattttataggggtgtttttatataaaatattctgtgttagttgacttgttaattataagtcttcactataacacttggtaactaatgaacataactttattgctaagggagtttttaatcccattttattatgatattgttatcaagagtatgaactaatgttccttttatatattgtaatgtaagatcaggtcttcttttttgaaggaggatagcaactttttgtaactttttgctattattacctattaatataataggctttgttgtttcaagagtatcaatactttttttaaggaatttgagaggaatattaattgctccagtgagatgtcctacattaaactcctgtgatgagcgtacatctataagtgttactgcactcactttagttaaaagaatctctaactcatcattatctgtaatagctaaatgatcatgtatattggctaatgttttagattgcaagataagccaaattagaactataagtaatgcaggaattaatatagtgatataactcatagttatctccataattattatagagcttattatttctttttaataatacaatatacatagagtggtaatagtctattagcacaatatataaatatatttattaatattatcctattgttttttattagattttttatgttaaagaggtagattagcaagatttactactatagtatagcaatactcaatataataatataacagttaacttaagtaatttgattattgaattaaggacaatatatgcagtctataataaaatttattcatatttctgatacacatatttctgctcaaggctgtttagtatacgataataatcctagagtaaagttacagacatgtattgatgagattaaaagagatcatttagatgcagcatttcttatactaactggcgatgtaacaaatgatggtagcatggagtgtttttcttttcttcaagaggtgttatcagaactaccaatgccatggtatcttgttatgggtaatcatgatttaaaacaatcgttatttacagctatccctgaatatccaagagatccaaatggttttgttcaatttacagtagatactcctgtaggtttatgtatcattcttgatacaacaatagcaaatcagtctagtggaatactttgtgctgcccgcttagactggttagctaatgaacttaagcaagcaacaaaacctgtgttattattttttcatcatccaccattttctcttggaattccctcaatggatgctattgtacactctttaaaaaattctgaagaattttttgctgtattgaaaccatataaagataagattcgccatatgtttgttggccatattcatcggcctatttgtggttcatggaatggtataccattttcttgtgcaccaagtacagcacaccaaattgctttaaattttcaatctgataaatctgttcttggatttaaagaaccatcaggatatagtattgttttggtaaataatgatcagttaatagttcatttccaagagtgtaataagaccccgaatataattattaaagcataactattagaggaaataaattgtctgccatttgtttgaataatgtttgtaaatactgggatacatccaaagcagttgatgatataaattttaaagtagaatctgggaatttacttgtactcttgggaccgtctggttgtggtaaaacaactacattgaggctaatagctggtcttgaaaaagtaacatcaggccaaataatcattgatgattgtgatgtaacatatttgccaccctcaaaacgtcatttatctatggtatttcaatcttatgctcttttccctcatttaacagtacaagaaaatattctttttggtcttaaagtaagaaaggttccgaaacaagaacaaaaaaaacgtcttgataatgctgtagcaatgttgaatttatatggtttacttggtcgtaaaccttctatgctttcaggtggtcaacaacaacgtgtagctcttggtagagctcttgttgcaaatgcatctgtatgtctcatggatgaaccactttcgaatcttgatgcacaattacgtaatgatatgcgtaaagaaattagggaaattcaacaagctttaaaaatgacaatggtttatgttacacatgatcaggtagaggctatgagtatagctgatcaggttattcttatgaataaaggagtaattgtgcaacatgctgtacctgaagatatgtatataaagcctcaaaccatatttgctgcaagttttattggtactcccccaatgaatataataaatttatctcaaaaggatggaaagctaatcatatctggttctcaagatatttttattccgcaagtcccagaaggagctactgttataggtgttagaccagaacatcttcaaatttcttctgttggatggcctagtatcgtattatctaatgaataccatggagctgtttcattagtaacttgtaaagttggaagtgaaaaaattatttttattcagcatggtaatgtaacttgttctcctggagagatagtttatcttagttgttcaccagagcatatgcatttttttaatggagatacaggaaataggatcactagacactaatagataaaaaacatagaaagaaatatattagatagttatattagagtagttatagaaactttatatatctatagttatcctcatatttgtgtattatatagaaagcacaaagagttattatagggaagaataatggttcgacaatttatacataaaatatattatataggttttgtccttagtttcattatagttgttccaacatttgctatagcattggataaggtgcatctaacattttgttttcctgttgctgtaagtggtcctatcacaaaaattattgaagatatgactgctgagtttatgagaacttatcctgatatagttattaagccaatatatacaggaacatataaagatactattacaaaagttttaacagcaatgcatggaggtgaacctccccatgttgcagtgttacttgcttgtgatatttattcattaattgatgaaaatgctattattgcatatgaagatcttcctggaggagcagagttaagtcatgactatttcccagtgtttatgaaaaatagtcaagctcaaggaaaaacgtggggtataccttttcagcgctctactattgttatgttttggaataaagaggcttttactaaagcaggacttaatccaacagctccccctcaaacatggcaagagcttattgatataagtaagaagcttgttaatagagatagttcaggaaaagttacacagtggggtatttctattcctactacagggtatgcttactggatgtttcaggcattatgtattcaaaatggacttgaacttgcaaattcagaagggacaaaagtatattttaacgaccctagagctgttgaagcacttcaatttttagttgatttatcatataaatatggtgtgatggaaaaaggaactattgaatggtctacaatacctagagattttcttgaagggaaaacagctatgatgtggactacaacaggaaacttaacaaatattcaagaaaatacaacttttgattatggcgtatctatgttaccaaaacatataagattgggttcaccaacaggtggaggcaatttttatatattaaagaaaacaacagaagctgaacgtgatgcagccttaaagtttgtaaaatggatgactgataaagagcgtgcggcacagtggagtattgatacaggctatgtattagtacgtcctgatgcttgtcagacagagaatatgaaaagatatattaaagaattcccctaccttgatgtagcccttgaacaattaaaatatggagttgctgagttatcaactcatgcaaaccagcgtgtaactaaagtattagaggatgctatacagtctgctgtaactggaactaaaactccatctctagcactagaagaagcacaaaaagatgcagaacgtatcttattacgttacagtaattgataaaaaatagtttgttactatgttatcctatttttttacttataactccataacataatgttatgatactactacgtcattatattatttctcaagtaaatgcatggcttttattattaccagcattcattattatatttgtattttccttacttccgataacctctactattattaatagtttttttatgaatggagatgggggagctgtttcaaagtttgttggtatagacaactatctatatttactagaagataaagtatttcgaaaagctttatggaataattttatttttgttatgagtgtcatcccatgttcaatgattcttgcgttaattatggctttatgggttaatactaaactagctggtcgtagtttattgcgtttagcatattttgtaccaactattttacctatgattgctgtagctaacatttggttattttttttcacaccacaatatggacttattgagcaaattcgatctttctttggtctttctgggataaactggttaggtagtgagagtacagcacttttttgtgttattgttgttggaatatggaaggatgctggattttttatgattttttatttagctgcattacaacatatacctccttctttaggcgaagctgctatactagaaggtgcttctcgattttattaccttcgtaggatagttgtgcctctattgatgcctactacattatttattttaataaatgcaactattaatgcatttcgtatgatcgatcatctttttatattgacaaaaggtggtcctaataatgccagtatgttgttattatattatatctatgaagtaagttttcaattttgggatacaggttatggatcagtgctaacagtaactttacttataatccttggctttatagcattattccaatttggtattttagaacgaaaggttcattatcaatgaaaaataaatataatccatatgaacctcaggggataacatattttttagaattggcaggggcttggttacttgctgttatttgggcattacctttagtatatgctatttggactgcatttcatccaatggcatattctacaaacttttcactatctgctccaattacattagaaaattttaaactagcatggcaagctgctccatttgcacaatattttgtaaatacattattgctagtgacattggttattacttctcaacttattttttgtactcttgctgcttttgcattagttcgttttgaatttagaggtaaagagatatttttttggattattcttatacaattgatgattatgcctgatgttcttattgttgaaaactataagacaataagttctatgggactgttggatacgactttagctattgcatttccttatttagcaacaggttttggaatttttttgttgcgtcaagcatttaaaattgttccaaaagaacttgatgatgcagcagctattgaaggtgcaaatatattccaaatcttatggtatgtttatgttccattagcaaagcctacgtatattgcttatgcattagtctcaatgagttatcagtggaataatttcctttggccattgattgttacaaattctgtttcttctaggacattaactgtaggtcttcaaattttttcatctatagagcaaggtgttaattggtctattattgcagctgcagttcttataacaactatacctcttttattagctttattactttttcagaagcagtttatgcagtcttttatgagagctggaataaaataaattctatagttagaatattgtgaattactagtaataactatatgctatctatactatatattatttatattatttagtaatagtaattttagaagaaaattattgatgattataaatcatgataattttcttctgctgtatcttcattactatctgttgagtcgggaagactatctataggaacacgatttgttgtggctggggttgatgaatgctgtagctgcataaaaagagtcatttcatttggacttgtaggagttgtataatatgataatataatagcaagaagtgttgtacataatacaacaactataaggctaccagtaggagatcttttattagtaaatttccatagtatgaaaaatgacaatatagaaatagttgaagttataacaattcctagtttatcaaaaaagaaagactcaataattttagggaggtctgtttcaaatcctcgtggaagccaagtttgaattataggataaagtgatataaatagaaataataaaccaattaccaaaaaataactacttatacctaaatataagaatagacttttttgttctgtaagtgagattatacattgagctgttaagatagcgattaaagaataaagacttataatagagagtagatcagatgaacttataaatataatgcatagtactgtaataagggtattaatccatatccaactatgaccagggaaggataatctatatgctatcagtttacgaggaatactaaaaaagtgtgaccagggtaaaagaaaaataataagtgtccatggtaaccatataaggcatatcattgcagtagaaaacaaaaagtctttagtttgaatatgaaaaattgtttgagttgggttaataatttgataagttgtaataaatttaagtagttctcttccattctccactgaacttataatacttccccatcctaataacataacaagcataagtccaaatgctaatgctccgtcataacaaccagctcgtcgaagatttccactccaaataagaaaaataaggcttgaaatgagtggtataaaaaaacctactaaaccacctgttaatcctgcacaacctgttagtaagaatcctatagtaagccaaaatggagcactggatttcatccatcctttataaagacatataattgctaacaggacaatagcagcaaaaagtattgagtcaggagtgatatatggcatcagtagcgttatcattgttgataaaagaagaagtccagcaataaatggtacattttttttttgcttagtaataatagctagtagccatgtaaaaataagaacaatagcagacagtgacatgtttgttatcattaaaaaggaagttaaattgattggtgagattgcagtgaggtatagccagggagttaaaggaatcatagaatcagaataagtagctataccaaactttagaatgatttggtcataatattgaagaagataaggtacgtactttataaggagtaagatattttgaagagcaaataggataagtaagcttacaatgttaaggctagaaagaattgtaaagcactttgatgcaaaggaacgaactacagatgtatttatagcatattgagtattcatagtatattccaatatcattttaatgagaatacatctaggctagataaactattcctatcttattatgtatattatgtcaaaatagcatttttataatagtaggttataataatcttatttaaagacttatctgcagattatctatcgaactagtatattgtataattttttatcattatagtatgtataatatataaataatactaattatttatatattatacatactataaaatcattttatagtattatattttgaatatagaatctatcgtatcttataaaaatttataaaaggagaaaagtaagatgcgtgtagttgtattaggtggttcaggatttattggtagttcacttataaaaacattagaaggaagagatcatagtattatagtttcaacacgtgattcatcagatatttctattagtccatcttcaaatgtatcttatgttgtgtggaatggtattgatagagaaccttgtttcaaaatgtttgatggtgcagatgtaataataaaccttataggtgagaacgttgcatcaaagcgatggtcagagaattggaaagaaaaaattgtaactagtcggattcaagtaggcaaaacaattgtaagtgtactagaagagttaaaaagttttccatctgtttttatacaagcttcagctataggatactatggatactggaaaaattttgatactgctcctcaatgtacagaaagctctcttccaggaaatggttttcttgctcaaacagtaatacaatgggaggcatctacttcagctcttgatacattgggtattcgtagatgtattattcgtacagcacctgttcttggtatgaatggtggtatattaaaaaagatgttacctggtttttattttgggctaggaagtatttttggatcaggtagtcaacctttcccttggattcatataaatgacgaaatagcagcaattatgtttttaatagataataaagaggcatgtggagtttttaatttagtagcaccagaacagttaaatatgaaacattttgcacagtgccttggaaaggttttaaaacgacctgtatttattcatattcctgaattattattacgtttaacattaggagaaatggctgaagagctcctactttctggacaacgtgcataccctgaagccttattagaaaagggatttacttttaggcatggcctacttttacctgcgctaaaggacttattggataaccatttagcaatgtgataattagtaattgtatgacaaaagaatatatagtaaagatttttaatcaggaaggggatctacccatcctgtatcaccgccagcaccaaaacctgtaataaaacgaacagatgagagttctcctgcatggtttatatgtgccatgattctaaatgcaagttcttcaccttctcgttttacctgcaagtcgttaataaatgggatagtagatccaaaccttagatcactaaatatatagacttttcctgtttgtgtttcataactttcagttaaaacaggaaaaactacaaattgttcataagtacgaaatatactacttttttcttttaacatatcccaaagtacttctggaggctttttaaaagaagtaaatttagatgggggagaagtaaaactattataacctgagacattccagtgttcacctttatcaagaataagtttccagtgaaatggtgtaaatgcatcaggaataaggtggactgctataatatgttcttctgtgttatgtcttggtagtgttatttctttttgtgtttgaaatgtattttttgctagataactatgggtaagatatgtctcaagacctagtcttattactatattggtaagaggatagataattgtccatagtaataataacaccataatgaatctattgtttctcctaaaaaaaagtccaataattaaagggagtataagaagtaaatcaactatgaaaagagagtttagtcgaactctatattcgctaaatggaagaaaaatttgtgtgccataagagttcataacatcaagccaaatatgtaatattagaatagcataagtaaaaaaccatgcttcaataagtgtccatgaaatttgtttaggtggaggaagttcattgggttggggacgtaatgcagtaagtacaactaatgggattgtacatataaaagcaaggccccaagcgccagctaaagagtgtgtgatccctcgatgaactttaatgtagtctattgcagagctaacaaaaagaatatctatatctggtagcatagcaacaagcatgccccatacaagaaaccaccatggtcggctttctttaggaaatgtataaacgatggttgctccagttagtgcatgtgtcaatggatccatgtagtgccttattattaacgatcagaaaagatgattgttccttttccaagaaggtcgtgtatatggacaatcccaaggagtttatagttatcgtcaactataggaagaactgtaatagctttttgttccataatatcaaggagtattgcaatagtatcttgtggtttaccacatttaggcctaggtgtcattatttgttcaacaggtgcatcttgcttcaacctattataacaaatagaacgtcttacatctccgtctgtaatgataccacatactgtattttttttatctattattaacacaactccaagaccacctttgtcaagagttttcaatgcgttacattgagatgtgcctagatggacagtaggtagtccatcagtgcgcatgacctctgtaacacttagtgtaagacgttgaccaagcattccgccagggtgataacgtaaaaaatctttttctgtaaatgattttagtgacataaggcaaacagcaatggcatctcccaatgcaaggactgcagtcgttgaggctgttggtgctaatccatgtggacaagcttctttaggtacttcagtatgtagtacaacattggcagcttttgccagggttgaatttaatacagaggtaagagcaatcattggagtaccaaatgatttaattgttggtacaatagcattaagttctggagtttctccagagttggaaatagataaaatgagatcagaacttttaagacttccaatatctccatgtgcaccctcaactgggtgcataaaaaaagcaggagtccctgtggaggaaaaagtagcagcaatttttctgcctactaggcctgatttcccaacgcctgttacaataactcttcctttacaagatgaaagaagtaatagagcttcaacaaatgtattccctagacgttcacgtattgtttcaattccatccatttcaatggttaatacttcgtgtgctagtttgagtaagtattctggagaagtttgagtagactctgtatatttttttgaatatgaatggatagcagtcatagttttcctaacagttttgtaaatgtatttgattaaatgaagaataggcaaaaatatttatgactgcaagaaataaaatatataatctaaaggaaaatctattgtcttttaatgaataatgaagtttttgacttagtattataaacttaaagtagtttttactatgagttcatgggggaatagttgagattctatctatcctttaattttttatagaaaagaagagagtatcgataagtatcttttgaggtataataatataaatacattaaataaaattttaatagccctatgctattattgtagatggaatatattattttggtataggtaacatatcgttataagttataatacttttattcaaaaatatagattatttcttactgtcattatatttactgttcctagcatagtaataaaatacttaaatcctgaactacatcctttaattgtattatggagtagtgcgttagctattttttcctctgttattatccctatgtgggcatgtgaagtggctcagatagatatcccacaaccattggctattattgtaattactcttattgctgtgttaccagagtatgctgtagatatgtattttcatggatggctggtcaagaacctttatctatgtatcataattatcctattgcaaataggacaggggctaatagattacttataggtgtaggttagccaagattattatattattttttatcaactatagccagccaatactaatagatgcagcaaaacgtatagaaatattttttattactagctacaagctatgcttttatcataccatgggaaaatacttttagttgatatgatagtattatttttattggaatttatatttggtatataaaaacagttctaaaaaaagagaaggagagtcacaaatctattgaaattaaaggctctgcaaaagctttggtaatgttacctgtaagatattgtcgaattgtcacagtaagtttatttcttttttctgcatctatgcttcttatgaatacagagctttttagtgaacatgtattatattatgtggaaggttatttcaaattgatgagtttttacttgtttagtggattacaccattagcttctgaggctccagaatttattattgctattttactagtgttaaatggaaagcctagtttatcgttaggtagtttattgactgcaaagttaaatcaatggacattacttgttggtatgatacccttagtttatactgtttcttcagggcatataattcctcctatgattataacacatcaacaaagttatgaaatattgttagcatcacaatcgttatttgctatttgtcttttattaaatctttatatagggataccaaagctatagtactgtttgttctatttgtatttcagtttagtgtacctttttattcagacttccttgaagaaattttggagtttatcataatactgaaagatttcatatctacttttctattttgtatattgtattagcaatatttcttattatgaaacgttataataatcttttcttattaaagactattttgactactactactactactactacatcttcttagaagatttttatataatgctgtctctgttgataagaaataaaaagcacaagaatcttcttgtgctttttgggggccgggcacccggtatcaaccgttaccgttgctttctttcgaacctggcggggttggcggatctaccgccgcccggcttccttaatttaactttttaagcttatgttaaagatagagttacgtcaagtttttgtactttattatctatgattctttttattttgggagggatattacaatggaatttttaattttaagagttatagaattatgaaaatttacttgacataaataatggactcaagataagagcacctaacaggaatatatgtcaaattggggagaggtggccgagctggctgaaggcgctcgcctgctaagcgagtatacggataaaactgtatcgagggttcaaatccctccctctccgccatttttatttttcattagttatcattctattattataaaataagtatgttaaaaatataaaaagttttttaatacttattaatgagtagttgtgttctattagaagttaaattcaagagttttatggcctactttaatagtataattagaagagataacatacgatttcacttgttcaaaatctccatgtggatgatcattaaaaaatagatgcatttttgttccaggatgagcaaagttttttttaatatcatttaaaaaatataaccaattattacgattccaacgctgatttccttctaactcatgaaagcaaatagcaaatgcaactataagatggaaagactgatccattttggggattgaaatattaggttgaatactacaatatgttctaggaatattaaatgctggtattagataatcaaagattgcaacacctggaatatctaatgcataaacatcatgtccatattgtttgcatagccaacagaaaaaacctgctccagatccaatatcaaggatacgtacaggggatgatttatgtagtcctaaacgataaatacgtcgaagattaataataaagtagcgtttaaagtctgaatattttgcatatgtttgtccgtgaaaaagatcttgaactttttgttggagagctagtatttctggtttagatataaagtaattagctctataccttgctttatatttccataataattcttttgggttttttatataagttttatagtttcctaaccgatcatatattcgttttcttctatgtgctgtatttgtgaaatattttttgatatcactttgaaataacatttttcctcttgtaatgtgccaaatgtattattgtttaatatgctacgtagttgcaatataaaaaatatttagtcaaaaaagataattaaatttttatgaaagaatattaaaaggaattatgtttttttatttaataatgtgatactaaccataattttgtatttggctgtttaatttctaaaaatataaataaaaatctctattataactgtttgtcagtataaggaataactattaatttgtaatagtgagagaataaaaaagttaatattgtaattaaactatcctactctgttagtgtaaaataatttaaaaatattttattatttctgtatcactaggagacagctaatttatttatagaaataattttttgtgttatattaatcagatttattattctcctctaatagattcaccttcttcttgccggcttttacagttaatacaaagtttagtaacaggtctagctttaagtcgtggagttccaatgtcatcaccacaatcttcacaaacaccgtatgtaccatcatctatacgttgtagtgcagattgaattttgcgaattaatcgtctttcacgatcacggatacgtaatgtgaatgctctatcagattctgcagatgccctatcagcaggatctgcaaaaatttcattaccatctgtgaggtcctctagtgtagaatctcccttatgctgggcttcttcaagcatagttgtgagtaatgcacgaaagtactcaatatccttttgttccaaagtatatacctcctggcaggataatttgacttttttcatagtgcggttccaacatataagaaaaaaaaatcatagagtaaagacccgaaaaacctttgaaattagtattttattcataacaagataggcacatacactttaatttaacccaaataacgctataatagaatcaaagaaataataaaaatttttaatataaaatatattaaaatttttgaaatagataatacattgttctagtaaataaatattaaatgtataaccaattatagttagttataatcacataattatgtgaggagtatttgacataaccttcaaaagtttcaatggaataatataatgttaagtgtgatagagctattagatagtaaaaaatgatggaaaaagtttatagtaagaaatcaagggttctttttggtaactataaaaaaaatttttaagaattttatacttatcataactaattacgcatatattagttatgataaagaaaaattaaataatatcacctataaatattataaaaaatgtttatgactaactatagtaagttatttaattaagtagattattatttttaatttttataactgtaacttgatattaatcataaattaaatgaaaacatccttcaatagttataacctattagtatatactactgttctaattttaatagaaattagaaaaatatactttttatagttaaaaatatccatgagttacttttttagctgatattgtaagatgagtgaatggaattttagctactaatttttttagtgtgatagaatgttcatctatactcatatcaggtaaatgagcttcccaaggaaaaaccagtacccatatccctgtagttaatgttatccgacttaaaccatcagtatttgttgttggtttgtagaaaccaatgtctttatctatattaaacaagccttctagttcaaggttgttaataggcctattccaaaaatattcttttcctttaagaactatatgaagatcacacattgttctatgagattcatagaggcaagatccctccatccttgatgtcataggaaaaatattaatgttacaaccagcaacagtatatatcccatctggtagggaagagtttactttttggttgatccataacataagctcattccagattggtccaagttcatagttttgccagtttttaatactatcactaagcatagttattcctgtatatatttttctagtgtatcttctaaagtttgagcaaaagtctcaagatagtgttcgtcaatagtgagtgctggtagtagtcgtagtatattattttgtgtaagattaaggagaaaccctttttgaaggagtttttcccatagtggtttacctggacaaggtaaaactatacctatcataagtcccataccacgaacttcttgtatttttgttggatggcgattagcaatattttttagacgttgaataaatatattacctagtttttcagctctcttgtgcaggttatctcgctgcataatttctattgttttagtagcaaccgcggaaataagtggacctcctccaaatgttgtaccatgacttcctactacaaaggcttgagcaatttcgtctgttgttaatattgcgctaatgggtaatccattagcaagagctttagcacatgaaaggatatcaggtttaattggaaagtgttgaaatgcccaatattgaccagttctacatagtcctgtttgaatttcatctacaataagaagaagatcatgtttacggcaaagtttttcaatacctatgatatagtcgctatccataggccttaccccaccttcgccttgaataatttctataagtactgctgcagtggagggtgtgatagcttcttcaagtgcaaccagatcattccaagggacttgtttaaagccattaggcattggagcaaaaccttctttgagacttggttggcctgtagctgcaactgttgtaagtgtacggccatgaaaagagccttctaagctaataatttcaaatgcattacattttttgatatgttgcatgtacctacgagttagcttgaagcttgtttcatttgcttcagctccagagttagaaaaaaatacttttgtaaaatgccccatagataaaagtcgttctgcaagttctagttgttcgtcatgataaagaagattacttgtgtgaatgagttttcttgcttgtttttctatgacttctgcaatctcttcattacagtgtccaaggctagttacagcaagtccagacagaagatcaataaacttatttccgtttgcatccaatatgatagaaccatgggcttctactacatgtatggggtatcgtccatatgtatgacataataattttttttcatgtagcataatagattcattgtaggagagttgcatgaatacctttccttttgagctattagttttttcctgtatgtccaaaaccaaaacttcctctagacgtattatcaagttgttgtgtttcaactaagctgacttggaaagctggttggaatacaagttgggctattctatcaccacggttaacatgaacaggatttttagctgtatttaaaaggacaactattatttcgcctcgatagtcaggatcaataacaccaacaccttgggcaacagtaagcccatgtattgcaccaagaccactacgagaataaacaaatccagcaatatttttttcaagaggctcaatagcaataccacatggtattgtttctctttctcctggtaaaatagttagtgatgtttcttcaatgcatgcacgtaaatcaagtccaacagaggctggtgtttcgtatgcaattccactagttgtatatattttttttgcgtctcttaagtacataaagcgaatagacacttcagaatgcaaaaaagctgacataacaattcctttcattaactatcaaataattaattagtgtaactctatatacaacagactaaatagcataaacttaatgaaaatcattaacgatagtgcagggatataagtttgttgtatggcaagtatattaaatcttgagtccagaatgtttctactatatcttcctttttctgtgtagacaagctttaaaagctgattgtgctgtaaagaattaacggaatattaatgagcatggggtatttaaatgacagaaataacacatagtggcgatcaaactactcatttaaaaattcttggtaaaggctctataggacatcagggacctccttcgtcatctctcttagaaacatttggtaatttatatccacatcgaccttatgttattactatagcatttccagaatacacatctttatgtcctgtcacagggcaaccagattttggaactattgttgttgagtatattcctcatgagcgttgcattgaatctaagagtttcaaactgtatttaattgcttttcgtaaccatcagacgtttatggaaacagtcacaaatacaattcttgaagacatggttactgttctagatccattatggtgtagagtgaagggtttatttgaacctagaggtgcaacacatttgcatgtgtttgcagaacatataaaagaggttgaagaaaaagagaaacaggaagccttacatacagttatttttaattggaaacagcagtacttaccacatagttggaaataagtttttttggggtatagtaatggagaactatggtcttttcattgatgtagggaacacatcagtaaaaattggtattggtgttattgataggcttctgatttcatatacactttcaacaaacaattcattaagcggagatacattaggcatacaactccttcaatgtattaatcatgcagagcaagttatcaataaagatattactatttctagttgtatgatgagttctgttgttccaactatggatacgttgttacagtatgcttgtgaacgttttttgttatgtaaaccacatattattaatcaggattttattatcccactagataatcattatgaagagcagtgtgaggtaggtgctgatcgattagttgctgcctatgctgcaagacgtttatttcctgattctaaatcagtagtatctgttgattatggaacagcgactacatttgactgtgtaacagataatacctatcttggcggcttaatatgcccaggtattaaatcttccttacaggcattatatactaatactgcaaagttaccttctattatattaaatactgcatctaaggttcctataattggtaaaaatacaaagactagtctaacacatggttttctttttggctttgctacaatgacagaaggtatttattcaaaacttattaatgttcttgatggaccagtaacttttgttgctacaggtgggtttgctagagatatggcaaatgttgtttgttgttttgatgctgtttgccctgatcttattttagatggactacatttactatggatagattgcttaagtaaaagttattctttataattaaaattaaaaaattattgatgtattcgtattccttattgcagaaagaagattttttttgtacatagaatgctaattatgatatagtgacatgttgctattaggaggaatatatgactgctattgcatcaatttgggctagagaaatccttgattctcgtgggaatcctactgttgaagtagaggtgactcttgattctggatatattggacgtgcagctgttccatctggcgcatctactggaacccgtgaagcattagagttgagagatggagacaagcagcgatataatggaaaaggtgttttgaaagttgttgaagctgtaaatggtcctatctcagaggctgttataggtattgatgcattaaggcaagttcaagtggataatactcttattgatcttgatggtactgataataaatccaaacttggagcaaatgctattcttggagtctctcttgctactgctagagcagctgcagaggctgttggtctaccactatatcagtatattggaggaactaatgctaaagtactgcctgttccattaatgaatgttattaatggtggagcacatgcaccaaataatttggatattcaagaatttatgattatgcctgtaggggcagaaacatttcgtgatgcattaagaatgggtgcagaaatttttcatacattaaaaactatattatccgctgatggacatgttactagtgtaggagacgaaggcgggtttgcacctcaccttaaaagccatgatgaagcttttcaatatttagttaaagctattgaagaagcaggatataatcctggttcagaagttatgttggctattgatgttgctgcatcagagttttataaagataaacgttattttcttacagaatataagactcctttaaatagtgaggaaatgatagagtggctaaaaggatttacatctaggtatcctttaatatctatcgaggatggtcttgctgagaatgactgggatggttggcgtgaattaacagttgaattggggaatgatatccaactagtaggtgatgatatatttgttactaatccaatcatgctgagtcagggagttgaagaaggtattggtaattctattcttatcaaagtaaaccaaattggtacgttaacagaaacattagatactattgaacttgctaaacagtcagcatatacaactattgtttctcatcgctcaggagaaacagaggatagttttattgctgatcttgcagttggaataaatgctggtcagataaaaacaggttcattgtcccgtagtgatcgtcttgctaaatataatcagttactacggatagaagaagagcttgaagattctgctatttactatggtcctgtttttagtgaaagtaatcattcttgttgtgatcatacctaataatatatagatattacgttaataattgtcgaataaaaggtaaaatggcttgagcagctttttgtggtgtaacaagcttgaggcatttggtagagatattacatgtatttttattacatggctgacagtgaagatttgattggatatgtctatgattgtctgaaggatatgtccatgcagagcttgtagagccaagtatagtgaaagatggtgtatctacagcaacagcaatatgtcttggagcagagcaattaccaatatgtaatattgcttcattaatacaagcagacatttccctaagagttaacatgttatcaggaagtaaaatatagttattgagttctggtgtattaatcagttgttggatctctttatattctccaggtccccaaagaggaagaaagtataaattaagcttagcgtttacaagcatctttaataattcaatataatgtgtgataggccaacgacgggtattttttttatgtgttggatcaatggtaataagatgactttttgactttaatcctaatgtggtaagtcgttgttttgctaaagttttttcttcttgagtaaggtaaatatgaggaggttcaccattccactcaatacctagtagtctaaggatacttgctttactcatggctgagtaaccatcaagtggtttaattgaatgcgtgtaaagcagttttgtgtaccatggtggagtataagaaattcgaataggtgctttagaaagagctactacccaacgacatcgtggtagttgttgaaaatctataacaagatcaaattttgtctgagtgactttccaataccattgcacttctttaaataaagaacatagtttttttttatccaaagaccaaacagtatctataaatggattgttttctaaaaggggaacacattttttttctgtaagtaaatggagttctgcattaggatatcgacgttttaaaagttcaatcgatggtgttgccagaataacgtctccaagttgtcgaagctgacatacaagaatttttttaggtgagatactagaaagggagttcataaaaattatttaattaactttgtgttaatattgttctatacatatgatagaaaatagattatatttattattcaatactatttaactgtaacaatatataatttttcattattaatgctatagctaattttattctttaaggaaatcttatagcataagagataatataattgctgaaaatgtagcaacgcattaataagatcaagaattttttactgttactagttagcttttataaaagattatcctgaaaatatacgatactcactttttttataactagcaacagttacatattgttattctatatctttattgtttttattattaactttgtaattttgaacttattattattattattataaaagctagataaagacgactaatttgataactaaatttaatgctattaactttgctatgactatgattgattcttcctcaagtaatgttataataactcatattatgtatataattttagtatattttacttctttctattttatagggaagtaacatttttattatggctactaatttattctctatccaaaagaaatttacgttattcttagttcttgtaacacttattagttttatgtacatttcattcacaatcgcaaaagatagctctagttcttcaaaagaaaaaaatgtgtctaataagttgtataaaaaggaacaactaactagattagatgagtgttatactggaggaggtaatggttattatcaatgggattttgatctagataatattcctaaatggcagctattggagcatggtttatggttaggaaagtttccaggcgtgactaaggccggagatgtttttgaagttgtaatgttaaagattaatcctcaatattacgacttttcacttcacatggcatcacagactggtaaagcattttctttacaggattggagtaatacatatgagcttagtgcagtaattaatgctagtatgtatcttcctgatggcgttacaagtacaggatacctccgtaatcatgatcatattaataatgcacatgttggaaagcgtcttggagctttttttgttgcatcaccttataattctactctccctaatgcagatcttcttgatcgcacaagcgataactgggagatacttctccctcaatataagatagttgtccaaaattatagagttatttctgctaatcgtcagtgtttgtggagtacaaaaaaagttattcactctatagcagcagttgcacgtgatgggaaaggttatttattttttattcatacaaagtatccaatatcagatttagattttggtaaccttttactctcattacctattgatatccgtatagttatgtatgttgaaggaggaagtcaagcaggactacttataaatacttctaactttaaacaattatggatgggaaaacatccagttagtattttgtctatcaataatacatcagtacctattcctaatgttataggcataaaaaagagaaaaggtccaataccatctttaaaatagtctaattgactcctatgggaaattgtacaagtaaactgtatgtaataatggttgggttgccagcaagaggaaaaagtacgttagcaaaacgtatatgctctggactggaacagcagggtattcaaacagctatttttaataatggagagttacgtcgtactctttttggaggagaaagtgcttgcccagaattttttaatcctcaaaataaaagaacaaaacgctttcgagatcaaatcctttatcaaagtatggctggagcaaggggttggttagaacaaggtggagatgttgctattattgatgctacaaatggtacatttgttcaacggatgaatatcatgatgacattacaagatagaccgttgctgtttgttgaatgtgtaaatgaagatcctttacttttatcagcatctattcaacgtaaaacaaaattacctgaatttacagaactttcagaagatgaagcattagagtcgttcaaaaaacgattagcttattatgaaagtgaatatacaccattgagtaatgaaccttgttggatgagagttgatgctgttgataaccgtattttagcagaatctccatgtaatgacttaccatactatgcagctattagagacattgttgtttcaagatgggtccatgatttatttttagtaaggcatggtgaaacagaatataatttagaaggaagaattggtggtgatccacctttaacagaaaaaggacaagagcaagctaagcagttagctgatcattttatgtctattgatatcccttatatttttacttctacaaaaattaggtctattcaaacagcagaactattacttgctagccataataaaactgtttgtatggaattgactgagtttgatgaaatcgatgcaggtatttgtgaaggtatgcgttatttagatatacgtaaacatatgccacatgagtacgaagctagatcaactaataaatatagttatatatatcctcagggagaaagttatgccatgcttaaagaacgtgtggcacagggactgaggcgtgctttatttcttgcaggtgaaggaacattaatgattattggtcatcaggctattaatagaaccttattgtctttattcttattccatcgaccagaagatgttccatatacatatatacctcaaaatcaatattaccatattactgtgacacaacagaaaaagctttttgaaatgattcaatatgcttaaaagcttttttataagagaaaagagttatttctttgaatctcgaaacatatgatatgtaaatttaagtattgaaatagcatcttgcagttttggcatagattttagaaaagatggtgctttaaatctatctttaagattttcaggctcatttatattttttgtttgttgagtatttgtcttatgttgttttttgtcttgagtattagctgaatctaaaaaaaaggaaaattgttcttcattcttggaagaagaaataattttttttgctgaatgttccagtgatagaatacgttttttgacaggttgaaagaggtgttttccaagaagttctgccaatggtgcttcaccaatagattttaagtattcttggagggttgttgcaatttcttgaggattaggatttgctatacaaccacgagcaacttgttcgtagagtaactcattttgaaaaggtgtacgtccagcaatgagagcttgtgcagcatctgagatatttttttttgataagaattcgcatgcttcactatataaaggattagatgtaccttcatttacttggactaaccgttgattaatggtttttgcatgttcccattgatgattttttacataaatatgtaacagttcgtctaatatatctctatacttccttttacttcctttacctttccatgctgttgctaatgctagaagtgcatttgcatgttcaggttgatgttttactatatagtttaattgagtaatagcttcatcccaatttttttctcgtatggctttaattccagctgtataactgttttcagaagataactctttagtgctttgatgagttttgataaaatattcaagtgctgtttcaaaagcaattgtatttgaggtaactgtatgttgaatagattgtgttttttccttagctaattgaatggacttaagtaaatcggaagatgaataaggacgctttaatatggaataatacatattttctgcatgttcttgagaaatgtttgttattgtcatgataagaggaatcttttttaatacaggatgtaattgcaataattcaacaaactcttttcctgttatgtcttttaattgttcgtggcataggataagatcaggcatactaagttgatttaggtagttactgacaagggttgatgctgcttttatacctagctccataaattgaatgctttttacattaatagatcgaagtgatcgacgatcaaccacagctacatcttcattacgagctaagagaaagacatgtatattgtcttcaagttgatttaataaatttttcatatagagaatatatctattctgaatgagtactgtctagtagaaatcttttataaaaagatagtaatatttttagttagtcacattctgtgggaatggaataatttttttacaattatttttttttatcaacgttggatcagtatttttctttacagaagccccacatgttgaacatagttctttatggttatcaatatagctaagtattcctcttaattcatagcaatgtttacaaaatggtccttttttgccatctgtatgatgaaaccaataggaatttctatcaaagtgaaggttcttagaaaagaataatgtatcttgaacgtcttggagatgaagacgtagtttattattttcatcatgaatttcaataaattcctgttgtaattctataagtaatttaagtgcttcttcatgtttgccattaatggcatattcataaacttgtttaaatttatagtaattaatcatacaagatgcactccttttttttttttagtcatactttgttatcgtgtaataaataaaaaactttagattaggggaatagatagtattagtaataagaaaaatacatattttaggataatcattaattaaaaatagttactatataaatgaaaggagctttcaaggagagatagataacctacgatatattaaggctaaatcttagttgggaataaatggcggagaagtattgcctagttgagtaaatatgctaatgtagcatgtggtatatgtgatatatttagaagtgataataaattatatttacacaataactgtggtaagttttgtgatatttaatatttatagcatgttagttaagtaaaccataatggtactaaaaatcatagtattaaccaaataaataatacagatagacctatttttaaatatttatagaaattaaacatcatactactcatattatagttagattcaattattagtaaaaattatcatttattactattacatttttctattcttgtaagaataattgttataagataaaaatgagatataaaataagtatatattaaaaaataatacattataatgaattagtatgattgttatagatttagtaatatctttgagtttaatatatatatatactttatttatatagactacaataggttaatatttcctattagagttaatgtatcttaatgtattgttatatactttattactctaatgtagaatgaatttttatcaaaatagttatataatatgttcttataatataagaatcttaacttattataattaataaaataagttaattaaataattatagtagttatagtactattgaaaccatcctttacgatagaaaaagtaaataagaatcccagagataaggaccatcaagcctaataaaacaaaatatccatattcccatccaatacctggcatgttttcaaaattcattccataaatacttgttataagcgttaatggcatgtagacagtagaaagtacagtaagttgtcgaagtcgttgttctgtctttctttccattagatactggtaaaattgttgtatatccctcaggcgcatttcaaggtgtgtcaaacttcttactagatgtccttgtgcttcaatgctgtcttttagtgtatcataaagttcattgagaaaagctttttttgtatgttgtgtttctaaatttgttaatgcataaaactgatcttcaaattgactgagaagttgactaacttgtcgacgtacattcacagcgtcttgttctttgataacaacagtagctaaatcaactttttccccaaattcttcagtagttagtcgagctctggtaaagcagcgaatatttgcatctataaggttgtctaaaatataagaaattaaagttggtatagattttacatcttcatccatagtatttttttgatactgtattctaagttgtacaagaagagatacttggctttgatggagagtaacaagtcgatctgggaaaataagaaatgttacatactcacagtcaggtatagaccattcgctacgtataggaagtctaagtatagcacaggttgaaaaaactgtagcttctgggaacggttggttttcaatagcaatttcagaaatttcaggagatatagaaagattatcaagaaaagtaatgaggtcatttttactaccagctatatcataccattgtattttttcataaataggaatttttttatggatactatgttttgagctatatcgaatttttttcatatatgtattttctagtatatattaaaagatagatagttaaacatatttttttttttaataaaaaaatggataaatagaatgtaaactacattgtaataatttataatttattatataatgtatttagttcatatgatacattatatatcttttcaattgtatattaatatatttttataaatattttactattatattttgcatcagtatttttttttgtattgtttataatacgatttagtaatttatattaatttataacttattttactaaatgatattactaactgtgagggaacaatggctgatgctatagctcttggagatcatattgaatctaaatgtacacgttgtcatgatgtaacgggtcatattgtaattttaatgattgatgatgaaattactaaagttgagtgtagggcttgtggaagtatacataagtattaccctccagttaatcaaaagagtagtctaaaaaagataaaagaatctagtcctggatctaaaaaagtacaaaaagaaacaacaacatctgttaatgttataccaaaagctagttctaaaaagacaaagtctcaaaaagtgaatagagaactaacagaacagcaatggcaagaagctataaatacaagttatggaatacgtaagccttataccatgactataaatttagctcttggagatattgtagatcatcctaagtttggagaaggtgttgtacaggaactattcccgcctgataaagctgaaatattatttcgtgaagggataaaacttctaaaatgttctaccaattagtagttagggcagaagaggacagaatataagtcctgttgtcatgggtaggttaaacataagatttgcatttgctatagcttgtcctgaagcacctctacagaggttatctatagctgatataattataagtcgttgtgtacgtatatctactactaaccctatatcacaaaacatagtaccacatacatttcgtgtttcaggaagtttacttgaaggaactattcgtatccatggctgatctttccatgtattcgtataaagtctgtacacttcatcctgtgagattggtaatgctaattgagtataaatagtggaaagaattcctcgtgtagtaggtaaaaggtgaggactaaatgtgactgtaataggttgttttgcaatataggaaagctcttgttcaatttctggtgtatgtctatgtataccaatattataggctttaaatgaattttgtatttcacaaaaaagcaatgaagacgttgaggtattacgacctgctccagaagttccagattttgaatcaatgattatattttcaaatttgattaacccatgtttaatagcaggatacaaccctaaaataatggatgttgggtaacaaccaggatttgcaacaatattagctctttttatgaattcttcattaagttctggaataccataaacagcttcagaaagtaggtgagatgcattatgttcaaggtgataccattgactatatgtcattggattattaagcctaaagtcagccgaaagatctataactttagtaccctgttctaataattgtggtgctatctccattcctgtgccatgcggtacagcaagaaaagctacatcacaagttttaccaatagctttatggtctaatggggaaaaaatagtttctgcataaggcattcctgaaagaaatggatgaacttcatagagttttttaccacattgctctctagatataataaatataggttggatatttgggtgtaatgatagtaagcgaataagttctatacctgtatatccggttccacctataattgctgcttgaattttttgtattcccatacactaattttttttcataacatatttcatacgtagttcataaagtaggccttcaataagtctagattcatcactatctagacattcttttgttttttcttgtaacattgataaaatttcaattgtatgttttgccatgggtaaatcttggataatttccccagattcaggatgaggaacttctccaagttgtgctaaggctgatgatgctagtgataaaataaatgttgagaatgtaactttagggagtaaattacttgtcgtagtaaaagaaggttgtgtattttttgtgccattaatgtttttagttgtagagtgtacttcgtcttctttagttgtaataggtttatacattattatctccaaaaaataaattttaaactataatacaattggcaataagttattattagctaacgtcaaggcccgtcttaatgtgctaatgaagttttatagcgtagaagtatttatttgaaattatagtaataagttactttaaatgtaaagtaagaaatgttgttgtggaagataatataccatcatttagattaatttatctaggtagttatcatttactatcaaagttccataagaggagatatagttggttattcttttaagctagttataaccagttaatattatgcctattttttaaaaaggaagagtaaacagataaatccaaagacctatattgatgacaatagctaaaaatatagctgcagaagccatatctttccctgctttaacaattggttttatgtcagttgtaataagatcaaagattttttctatagcactatttagtagttctattatcatgacaaaaagccatccacttatggtaataagacagtgcagtgcatttttgtcttgaaaccacaagagaaaaaatagaattcctaagataattacttcatgacgaaaagattgttcagatttgaatgcttggattaaacccattagagaatattttgttgcatgtattagatgacaaaactttattaagcaaaatgacattataatcctacagtaatagctaaatgactaatgtgcacttccccaatcatagcctatactccattgagttacaagtggtactataagaggtttaccacctggcgttacatttgacattaacatggctatacgtttacctacttcttttgcattgtcttctggtgcttctacgacaagttcgtcatgtacctgaagaataagctgagcatccattttagctaatgttgtatcaccatgaacagttaacattgcaatttttataatatctgcagcacttccttggataatagtattgatagcctggcggcgtgctaaagcttgtaattgaatattttctgagtgaatatctggtaatagtcttctacgtccagcaatagtagttacatatccatattctttagctgagtgttctacttgatcataaaatttttttatggcttgaaggtgttcaaaatatcgttgtatgaatttttttgcttcatttaatgttgtattaagttcttgggcaagtttttgtggtcccatcccataaattaaaccaaaattgatagttttagcatttcttctttcatccgctgttacttcttcctgacttttttcataaagaaggcttgctgtacgtgtatgaatatctgcaccttcaaggaaagcagtaagaagtgtgggatcttttgaatagtgggctaagacacgtagttcaacttgggagtagtcagcagaaattaagaggttcccttgagaagctgtaaaacatgaacgcatacgttgtcctaatgagcctcgtataggaatattttgtaggttagggttactggaagaaagtcttcctgtagctgtagcaagttggttaaatgttgtatgtacacgtccatctttaccaataagtcgtggtaatggttctagataagtagagcgaagcttttcaagtttacgatattctaggattgtatctatgatagggtgttgtcctgatagcttttcaaggacttcttgagatgtggatgcttgccccccacgagtttttttagctgcaggaagctcaagttgattgaaaagaatatctccaagttgctgagctgagcggatattaaaggaaccaccagcctcatgataaattgtttcagtgagatgatctaaactattttgtacttccacaagaaatatttttaaattttgatcatctagaaccacacctactgcctccatatcagcaaggacaggaataaggggtagttccaatgagtccattagttctaatagttgagcagtcttaagtttattacgaagttgttcccatacttttagagcaatgagacctgggtttcctgcggataatccaaaaactgagccccaacgtgcaacaagtttaggccagctataatctctttcttcgggatcaagaaggtaagtagcaagacctaaatcaatccaatgtgtattagggatagttctccatattccatttgttctcagcaacgattttaaatcaggagtaactacgtgtcgcgattgattaagagctttagttagtggtagtaatggtcctgtatagaaatattctgtattttctacagctaatgttacttcatgtttatctgtcaatagtgctacaattttccctttaactgatggaagatcactggctgtagagcaatatattttattgattggtttagaagacccaaaaagagatagttgtccatgagaagatgttccagactctataataccctttgggtctatgagttttttttgatgtacaacagccataaattctcgctccaaagaaacaagttcaaactcacgaagaatagtcaatgtttcttgtacgttaattgggccaactttaattgtatcaatctgaagatctatacactcagtcgttgataatgttgtaagttgtctgtaaagaaacatggcgtcaaggtggccatcaaattttttttgaacaggtaagggtagtgaggagaaattatcttttatagattctaatgaaggaaagtcttgaaaaatttttttcgcggttttgagtcctatccctggaattcctggaatattgtcgctagagtcacctattattgcttgaacatctggccattgagaaggtaataatccttcatcttctttaaagctttttagtgtagtaattttttcagctttacttgctggatcccacatcagaacatttttatctagacattgttttaaatctttatcagaagcaataagtacaatagggtagttatcacgatagcggtgtgcaattgatgcaaggcaatcatcagcttcgctattactagcaacagttaaacatagtcctaaacttattactaagcgttttataggttcaatttgttttataagtgcttcaggagcagggctacgttgagctttataaagagggaaaagtgtatgtctaaaatttgttccagggccatctaagacaaatacaaaatattttggttgttcttcacgtaatatttttaagaaaattctaccaatattaaaaagtgcacttgtaggaaatccatcagagcgttgcatgctttgatttgcataaaatcccctataaataaaagctgagccatccatcaagtaaatggggtcttctgaaaagaattctttaatattcatgagtgaccatatgtttttagtattacttgttatagctatcttatttcttaacaataagataacaacattgaggcataattctatgcaataagaacattattaaaaatttactacaataatgagataggtagatagtatatcaccaggcaaatatgtatctgttccttgtgagcaaatcaaggagagttattcaataatataagaaaaaatttaaattataaaaatacaaaaagactggtagataaacacttcacagtaataaatagtttgtgtattttctaatgactttagtttatagtactttttatagtaaaaagttttttgtttagtttggatttatccatagagatctaaaattgtctgggaggagatatgggcaatcctataggtagtaggaataatggtcttaataaaaaaaataaagatgaacattttgaagatgagtcttcaggtaatgcaaagttatggcttgcccttattttcattattatttcagcaggtgtgatacttttattttggtttgttagaggttctgtttttcaaaaagatgaagtaactacagaagatacacagaatatgatagtaaataacccttcagaagcatatgaagctatgaaggaaaagcttatgaaagatatagaatcttctcagtctaaagaaaaagaacctatgcttgaagaagtaattgaggaatctatatctccaccaccacctgcgtcaacttttaataattatgagcaaggaagtaaacacatatttagagataaggatgaaacaggagcttctgaacgtgggattttttccacaaaatctacacatcctgttcatacaaaaagagacaaaaaagatgatacagttgttcgaattggctttattgatagtttagctgcatggatggcaaaaaattatatacctccttcaaagtctacgatgtctggctccattaatgtaacgcttcagagtcttaatatgcgttatggtgtaggtatgacaggcctttcatggaaaggtgaagatccacaggcagctcggtctgcaattttacgatatgtctttacaccatctatgttagacgcattatatcgtctatatgttgatagatttatgaaagcactttctgaagagctttctgtacgtcgtcataataaggtacttactattcaacagaaacaagaattttatcgtttatatgctacacagtttcgtggtattgcaagtacattgcagggtattgctactatacctaattttgtccaaaaggtggatgacataaaattggctgccaaacgtgtagtcgatactaatacaaagtatataaaccttgtaagttgtacagacaaatgtaaagaattaggaaataaagtggagttacagcagctcacaaagaaagttactgctgcaagtaaagcatatcaacaagcaattattacacgtgagaaaatgattaaagcacttattttatcaattaaacaacatactactacacgtgttttggatgactccaacatactattccttgcaaactgggtatatcgtcgggtaaagagtgatccagggaatatagatgctgtattacaatcatcaacattgtttttagatcttgcaaaacgttttgagatgacctctggaataataagacatgagtagtctgttattatgaagagttggtttgtaatttttttaggtataattcttcttctttattatccttttataggagtaggaaaacagacacccagaaattcattacttaaaatacagtatgcaattgattcacataactttgagctttttgaagaatatgttgatataaatggattattaaatcaaggagttgaatattttttttgttcactaactactgttaaagatacatcaaagttaccatcacttttatatttattggctaataccatacaagtacctcaatatgcagcacaggtcagatctttatttattagtgaattatatttatttattaaatatggaatttcttctgggttgtttgcagggcatgaactattagatgaacctactggccttttaacaccttatatttcaaaaatttctttaggtagaaaagagttattattttctaattcagaaaaagtattagcaaaaatgtataaacagaaaagagatattgtagttcctatccaaattaaagattatggtaatggacgacagtatcctgttttactaggtatgagcttttgtaatggtatgtggaaagttactactattaaaaatcttcctgaactatgtaaaaagtttgaagaggaatatttgcataattagtatataggataaagaaaaaagaatattatgggttgttatagctcttagtaacttaacagtacttaatataacatgccaaatttatttatctttttctatctaaaaaataaaaaatcattaatataagttaggatagtgttagcatgaatagcagtataagattgatatgttatatagtttgttgtttttttattctttcaaaattgagtatggctgctgttaattattctgatctagaaatacttgttcaacatagaattgtttttcaggaaggctcagatattgctttatttggtgataaacaaattcttttcacacaggatgctcagatattatgtgatgataatgctatattagattttgagtgtctattggcatcatatccaggggttataactggaattatcactgatgaagaaaaaagactttggttaattgtgaatggacataaagtactttatgatgatggtaaaaaacgtatttatagtgaggcattattaaacagtacagttaaagattctatggctcaactgtatcctttagagcctagtcgtcctatccctgatgttggcattgcaccaggacgagttcgttcttatgcattattagaggcaatatatggtaatagtagagaagaagtagagaagcaattagtagggattaggtttaaaaaaagagaaaaaatatgttttttttctcattctgcaaaggctgctcaaagcttaaaagatgtttttacacaacttgatacattattagataaagatcctcaggtttatgaatatatttttcctttatcaggtggattcgcatggcgtgttattgcaggagaaaagaggttaagtccacatagttacggtatagcaatcgatttacatccaaaaaaaggtatatattggcgtttagtaaaagatagagaaaaatatttacagatacaaaaagaatatccaagtgagttagtaggcatttttgaacaaagaggttttatttggggcgggaaatggtatgaatatgactttatgcattttgagtatcgacctgagttaatttataaagcaaagagaagtattcataataacgttatgtaactatagtaataaaaatatatttacttatcttgtttatacttaagataaaaaataaaatttgtataatgctgttataaataaataaactactaattattggtattagctaaactagtatgaaaaaatatactgtattttttaaagacatttagttctatttttatatagaaattaaagtttaagatctaactctccaagtttttcaataagtttcatattttcactatagtctacaggacaagagataacagagactgttgagtcattaagtgctttctgtagtattggtaatagatcttctgctttagttattctatagcctttagcaccaaatgcttctgcatatgttacaaagtctgggttagtgaaatcaacaaattggtgtttacctatttccatatccattttccattttatgagaccatatgatttatcttcccagataaggataacaaaaggaattttttctcgaatagctgtttctatttcttgggagttcatcataaacccaccatcacctgttaccacaagaactttacagtcaggacaagctagttttgcagctaatgctcctggtaaagagaaagccatcgttgataatccatttgaaataatgcaagtaagaggaagataggttgggtatagtcgagccatccacattttgacagctcctgtatctacaagaacaatgtcatcatctttcattgcttttctaatatcgctgattactctttgtggtttaagaggatagtcatctgctgattctccatattcaagctcttctttatgcagctggataatattagctatacctttccaaggggtatgactgtttttaggaagctgttcacataacatatttagtgtagcactaatatctgcttggatagctacagtgataggatatgcaatgtcttcatcttctgcaatttgatgaatgtgaatgatgtttttattattatttggattaatcttagatggagtaaattcttgaagttcatatccaatgctaataatgagatctgctttatcaaaagcaaagttttcgtagtcatgtttcataaatccaattacaccaagcagtaatggatttctatctgacagtatgccttttgccataaatgttgtagctacaggaatttgtaattgttccgcaaaacgttgaagagcttcactagctttgtttctaacagctccatggcctacaagaataacagggttttttgcatttacaatgagttctttagcttgttctaacatctttggatctggatatgaagtatgctgaggacgtgtaagtaacggtttcaaagaagtatcaatatgcatttcttctacatcttctggcaaggcaataaaaacagcacctggtctttcagtttgagcaagttcaaaggcttttcgtatcatctcaggtacagagtttggagttaatatgatatctgcccattttgtaattggtttaaacatggatacaagatcaacgtattgatgagattctttataaatacggttgagcccaacttgggctgagatagcaacaagaggtgtactatctgtttgagcatctgcaacaccaagtaagagattgatagctcctggaccaagtgttgatatacagacgcctgcttttcctgtaaggcgtccataaatatcagccataaatgatgctccttgttcatggcggacaagaataaacttaatagatgaattagcacatgccaaaactagatgtaaattttcttcaccaggtaatccaaaaatatatttaacaccttctgcttctaaacactcaataatgagttgagaaacagttttgatattatttgtatccataaaaattctccttatattttacttgagtagccagataaatagccccattgtgataatggataaggtagtactgataaagagtatagaagccatttcacgttctgctgtatggtattgaacagcaaggatgactgttatggaagcagttggtattgccatggataatactgattccatagtttgttcatgagggagttgaagtaacattgctaataaccagactataaaaggtataattatattacgactaataactgaaataacaacagggaaatttagtgtgacacgttgagcaaataaaacaatgcctgatgcaaatagagcaactccacctgttgctttaccaagtaatgttaaagaatcattaatagatgtgggaaattgaatattaaatacaataaaaacaagagcaagtaatggagcccatacaacaggttgacgtaatgcattaagaatatgtttatagaaattattcttattactttcagataatgtagatatagagagtaatactaaactgacaggaacttggaaaaggttcataataatacttgaaatagctatggcaacagcactttcaataccaaaaagatatcctaatacagggacccctacaaagggaacagcaggtccacttatggctagtgcttgcagtgctgcacttcctaagtcttgtttaaagacaattcgagatattagaaaaacacctaaaaaacctccaatcattgcaatgcatatgagaaagaataatccccaatcagaaactaattgttccttagggataagaaccatactagaaaataatgttagaggtagtgcatataacataaccatttggtttagtattgttgcttgctctatattaaagtctttatgccatccagcaagtacacctaaaagaagtgtgattacaataggtaataaagctccaattatagtatctaacattggttacgttccttatacataagaagtaaagcaaacaatagtaaaaatattacagttaaattaaagatcaacaagatagtaatcaatgataataaacaagtagttgtggatgatacatgcattatttaactttattgcagtatatctaattttattactatgcgttaattagtaatagtagataaaaatgaatattatatctaatatatatatatattagatataaaggaggctctcattctttgagtagttatcttaatcttaatgattataattttatataatttttaagaggtaattattaaagtaatcctacttttttcattaactgttgcatagtagatttatctttatctgaaagagtggaaggtaatggacttctacagggtccaccataataacctaggcagtctaatgcatatttaagtcctgtaataccaaatccggaagtaatagctgcattgagttcaagaatatccatttgtaatttttttgctttattatgttcaccttcatgaaatgcttttataatagctttacagtagtcaggagcaatatttgcataagccattgttccaccacatccacccatatataatgtaggtaataaaaaacttgctgaaccagcaattactgaaaaacctggtgcactatcatgaataattgtagaaagttggataatatctccgctactatcctttattcctatgatattatcatggcgtgatgcagatatacttacccatgcaggtatatttaaagcagtattccttgggatattatagagtaatacaggagaagtagattgatcagcaactctaaggaagtaatctaacataacttcagggttactaacagtatttctataatatgtgggatttatgacaactacaccatcgacttcagctaatgaagcttctttacataatgttaatgtagagtattctgattcacatcctactccagcaagaacaattttttcaagaggaaagtgctctctagctaaagagataagctttattttttctaattcagataatgatactgcttctccatttgagccaagtactaaaataccatctagcgttgtttttccaaattgtttaatattttctataaatttatcccatgcaatttctccactagcataaaaaggagttggaacaggtgcaaatacaccgtataacgtacactcttccataatatcttcctttattgtgttatttagtagtattatataactgtatattataataattatatcataataaaagtaattatacttcaatagtatattatttataataagttattatatttaatattccatttttatataactaaaattattacatttacgttattatataagtagtatattataggaagagatattaagtagtattcagtatgtataggtaggtaaaagttcactacacaaggagtaaaagtaaaaaagttttttcaatcttactatttactatataggtatacctagtttttcgcttgtgttaggataactattgataaataatgtatatggttagacgttatgtggttagatccttagttacactaataaggtaaataagtggtgcgcccgggaggaatcgaacccccggccaagagcttagaaggctcctgctctatcctactgagctacggacgcaacgatttttttcttaggatatgaatgattaaaggtcaagaagaattatcttgttattttgttgaaagaatgaagtatatagtctattcacaaacctatcttattgtattacatggaggttttcatgtatagactttatagcattatcctatgtatagttatcctgtgttctggttgttctttatggactagaataaagaaagcaataaagagtaatgatactatacaagaagaagtattaaatgaagctgaagctggtactatagctgaagcactttctgaactagatgcagatagagaaaaagagagttcaacttatttaaacaagatttctgataaaaagacaaacattgaccctgaatctgttgaaaaaaatactcaacatgtgaagtctgtagatccgtcgccttctttagatgaaacaataccaaaaaagaaggtacagatagataataataataataagttaagccaatcacaagaacaaaaaatgtataaagatgctcttcatctatatgagctgcataagtataatgagtctataacgctttttgatcagtttatggaaaaatatcctaaaagtcgcttgatgccaaatgctctttattggaaaggagaaaatttatacgcacaacagaagtttgctgatgctatttttatgtttaaatccgttacagcaacatatccaaaacatcagaaagcttcggatgctttattaaaagtaggaatgtcatatagagcgctaggagatcaagataatgcaacgttgcattttagagcactatatgaggattatccaaaatcgacagctgtacaacgtgcacaaaaattaggaatcaaaccatgaaaaaatggaatacttctttggaggggtttctttgaccaagaagttatttcatagtagtgctcttggggcattagatgcagtaagtcgaaaagaattttgggcatctttagctttaaaatatacaaaaggtcttggaggacgtacatataaaaaacttttaacttcttttggttcagcatttgaggcattacaacaggtaaaaaagtggaaacagcttggaataccaagtgataagtctttaggcatactttccgattcatggagagcaggggctaaaaaagaatgggaggcagttcgaggttgttatggaacaattttgctttggactgatccacgctaccctaatttgcttaaggaaatttctgatccaccactttttctatactgtttaggcgatatatcgttacttgaaaatccttgtatagctattgtaggaacaagaaaatgttctatagaaggcattagagttacaagagcttttgcaaaaggattagcaactgctggaataacagttgtttctggtatggcgttaggtatagatcgtgaagcacacctttcttctattgattttcctggtaaaactattggagtacttggttcaggaattaacataagttatccacgtcaaaatagtgatgtaagggaattacttgttaataaaggtcttctcatttctgagtatgctcctggtactcgtccagagcctggattttttcctacaagaaataggattattagtggactgtctttaggtgttcttattgtagaagcagcacttcatagtggtagtcttatcacggcacgtttagcgcttgagcaaaatcgttctgtatatgctatcccaggagcaattggttctccatttgcagaaggttgtcaagatcttattcgtgaaggagcaagacctattttttctgttgatgatatattacacgatttgtcagaatcgctaaaaggatttattaatcagtataataaacaggatattatatataaagaaaaaaaagagggtttggaggagcaagatatcatgctttctcttcctgcttctaatgataaaacaactgttattaataaacaaagtcaatataaaacatttggaaagatagaacgacagataatagatattatcagactagagccaaaagatattgatcaactgtgtcagttattgcaacttccagctgaagaaataagtccaatacttattattttagaaattgagggaattattaaacgtcttcctaatacacagtatgttttagcataatatctatgtaaaagcttattgaacttttttaataacacataacaaatagtacttattatctattctatgcaacttccagcagtaacagaaacatttttatcatggcttaatcttcataagggattttctttagcaacacaggatgcctatagaagagatatatctcagtttgaagtatatcttagaacaattggacttactcttgagcatccagaacatattaataaaaagcatattcaacagttttctgcttcattatattataaaaagttaacaaggacatctatagctcgaaagttagcagcattacgttcccttttccgttatcttttaaaaacacaccatataaaagataatcctgcagttggcgtacataatcctaaacaacatgtaaaatatcctgagatacttaacgtagatcaagtatttttgttattgaagggagcaaacaatatattaaagacatcacatacagggttagaattagctattgcacatagaaataatgcattattagaacttctatatggttctggtttacgtatttcagaagcattatgtcttaatgtgtctgacataagaacagaagatggatttgtacgagtcattggaaaagggaataaagagaggttagcgccactaagtgatacttctattgtagcattagaagaatggttagctattagacatatggtagcaacattaggggaacaagcactttttgtaggcgttagaggtaaacgattgcataggagacagacaataaggatacttgaagaactgtgtctacaagcaggacttccattaactactgctcctcatacattacgacattcttttgcaacacacctccttgaaggaggtgcaaacttgcgtgctgttcaggaactattgggtcatgctagattatcaactacacaacgctatacacacataacgctagataagttaattcaagcctatgataaagcacatcctttttcaggtactctacggttaaaaaattaaataatagaaaccaaaaatggaagtttggcaggattatataataaaagtaatatttcttatctagttaggcatgctcaacttgctggatgccatcaagtttccaagaaccctcaccagaagcagggcgtacaaagtgccatatttctcgaacttcaataggggattcttgagattggttttctttaagaagtacattaaaatatacagagacaagttcctcatcttctatttttttcacatctactacagatgcattaactaacataatctctgttgtctctggatttggattttcagtaatttgttgctgaagttcatttaaaaaaccaggtgtagtgaattgttgaatatcttctaaatctctattatcccatgcagcattaagtctcacatatgctgcctttgcgcctttaaggaattcttcttcattaaagtctataggtatattggttgttatagcttgattagatacatctgctgaatatgttgtgtgttgtgacttgagagattcccaacctgtacctgataatgttgttgaacgaggtataggcatttcagatgttagtggttgttgtgtggcgtaaagtgaattagttacagaagcttcatttgatgtgatttttcttttaaagaaaagccggtaggctagatatacaagtccagcaataagaatgagatctaaaaagcctcctccagaaaatccatgtcctgaaagtaatgagccaataagcgttcctgctaagagtccaccaaaaataccacctaatccaccaaaaccacgagaagctgtgtttgcaacgcttccttgttgaatttgttgtgatatattagactgttgacgcatcattggtgaagatggaataggctttgaatatggtctattcataaatgatttcccaccaaatgagcgtccgccaccaatacgtgcataagctttatgccatccaaggacaagaactgtaacagtaagtaataaacatatacaaacagtaattttttgaaacatatattgatcctagaaatagttattgttatgcacaaccaaggtataaataagagtagaagtaaaaaaaacaaggtttaaattttgataaaaataataagacgatagatatataagttatattgtgaagattagaatttttttttaataagtcaagttttttatatagcaaatttaatgagcgttaatagctagttattggttacgctttttatgtgatgaacgtaatcgaatacgtattggagcatgatgtaagttaaaaatttttcttaaggagcgttcaagataacgtacatatgtttcagatattttttctgcatcattaacaaaaaaaacaaaagtaggagggctagtttcagcttgagtcaaataaaaaaatttgggtcgtatacgacgtacaacaggaggttgatgacgtgtaataatttcttccatagctctatttaggactcctgtattaatgcgagtagaacattcaagataaacttgttctgccatagcaataatttgatcaagtcctgatgacgtcactgcagagaccataagaataggaatatgaggacagaactgtagttcttctttaaatgacttagaaagtaatgtcttttgtttttttgcaataagatctgttttgttaataagaagaataaaaggtatttttctagtgtctaaaagatcaagcagacgtttatcttgagctgtgatgccttctgtagcatcaatcacatatagtgtaatgttagctttagttgcactttttatagatgcgtttacagaaaagcgttcaacaggatctgtaatttttgttctacgacgaatacctgctgtatctacaaaaagatactgtgttttgttaaaaataaaaggaatatcaatactatcacgagttgttcctgcaatattgcttactattagtttatttttaccaattattgcatttataatagaggatttcccagcattagggcgtccaattattgctagttttagtgcagcttgggcagtagactgatcctttatattttcattattgggtaataataaagaaagttcattttctagttgtctaatattatgaccgtgttcagccgaaacagcaatcataggtaaacctaagatatgaaattctgcaactatttgatcctctttctctattccatcaactttattgacggcaagtaatattggcttacctgtttttcgaagaaataatgctaagtgctcatcaaaaggtaataatccatcacgagcattgacaataagacagatagcttgagattcttctatagctaattggacttgttgaaagatatctttttcaaagccatgtaattcatcaatgatattgatagtagaataatggctatctagtataactcctcctgtatcaataagaataaatgatggatgacctatagattgaactagtccttccattcgatctcgagtaactcctggccgatcatgtgtaatagctctatttttgcgtataagtctattaaaaagggtagatttaccaacatttggtcgacctactagagctattttcggtaacatacaagttctcttttttctttaaaatggctagtaatatgataataataagaaagaagtatattatttatataagttatgattgaatatgataaaactatggctcaatacactctatgcctcccatatatggaacaagttttttaggaagtttaacagagccatctttttgttgaccattttctaagatagcaacaatggtacgtccaatgggtaacccagagccatttagtgtatggacaaactgtgttttttctccagaagaggcacgaaaacgaatattagctcgtcgagcctgaaaagattcgcagttagaacatgaagatatttctttatatgtgttttgtccaggaagccaaacttctatatcatatgttttacttgaagaaaaccctagatcaccagtgcacagaacaactgttctataaggaagttcaagttgttccaataatgtttcagcacttttcctcatttgttccaaaagatcataggattgatctggatgagaaaaatagaccatttcaacttttgtaaattggtgttgtcgaataagtccttttgtatctttacctgcagaacctgcttctgaacgaaaacatgctgtttgagcacagtaagatagaggtaataggtattcatcaataatttcgtcagagtgtatatttgtaagaggaacttctgcagtaggaatcaaaaaatagtctgttccttctagtttaaaaaggtcatctgcaaattttggtagttgacctgtatttgtcattgatttttcattaacaatgagtgggggtagaacttctgtacggccttgggctagatgaaaatcaagaaaaaaattaattaatgaacgctcaagtcgagctgcccatttccatagtattgtaaaacgacttcctgtaattttacttgctcgttcaaagtctaatccttgaagagtggaacctagttcccaatgttcctttggttgaaaatcaaatataggtatttcaccccatctatatatttctttattatcagtttcatcttttccaattggaacactgtagtgtgggatattagggacagcaagcatccagtcatagagttcattttttacttgatttatcatattgtctaatacaacaatttttgacgaaagttcagaaagttctgcaataatagtatttgtattttcaccattacgcttcatttgtgcaacttgaatagaagcttggttacgtttagccttaagagtttcaacttcagaaagaagttcacgccgtttagtatcaagctcttcaaaacttgttatattaagtggagatcctctatgaataagtgcagttgacactatttcaggttttttttgtaacaatttaagatctaacaacacttgtcctttataattaccattagtatagttatgagtattatcagtagtaaaagtattcttttgtaaagaaaaagaagtataaaagttatattatactgtatcaggtttagagtaaagaaagtatcacgtcaactaatagcttatgttatcttagtaccttattgttttttaaccataccatattatagaagataggattgcatgtcttgtataaaaataatatagtttcttattcataattatatttttaggagaggcctactatgggtaatagtattttacaggtagtcattaaactctctttattttttttcataatccttttaggttgtggaccatcaaataaagttaacttgatatatccaaaaggtgaaattgtccttcctaaatcaggagctcctagagtagtggttgtattatttcatggctccaataaacttcatacgattgggacaaaaacggatggttctcactttatgcctacatctccagttactgagtggataagtagatctttagcagaggaactctctaagcaaggtttacaagtctcttatgcaagagatttagctcaggcaaagatgagcaatcctaactatatagtgactggaactataagtgaagtatgggtggttgaagaaaaccctgcaacgtttactgctgccattggattaaaagtttctctttcaaataataaaggagtaatttatacagaaaacttcaactcttctcaagaaagacaatctattccaataggttctcaagttgaagtattactttctaccacattaaaaagtcttcttgagtcaatagctaagaaaattcattcagaaatccactagccacgagaacatcatttatgaatgaagtaagtgtagggatagaagatggagatagtatagcatgtcaaaaacaatggggatactttagtataattacctatattctcctattttttttgattttttctccatctattactatagcaaaagaacctatacttgaagtaacttatacaattccctaccatgcacatttagttacagagcctgttatacaaatagctgaagctgccactaaattacatgcattagagcagactagaagtaattttacatcaaacttggctgtaaagttagaattaaggacaagggagcaacaattagcattagcatcggctatatattttgtctctattcatgagagaactgtacttgatggccctaaactttctataaaagcacatgtatatccttcatcagaaaaaatattagacgatcatattcgtcaattattacgtcaacaggatcatcttcagcttagactgttggcagtaaatcagcttgaacaatatattaatgaaggtgttgaacttcttaatcaagcacatctatgttctagtgctgatatacggtgtaaacatgatgattcacttgtaccaaaaattaaacgaacttctaatcgtattaaggcattggagttgtttctagttgaattaaatgattttgaacatgtttgggcaaatccagaaaagtctgttttaactttttcagaagcaacagcattagatcctgataattctttattatggttaggggttggagagtgtctggtgcttttaaatagaccatatgaaagtattaaagcatttcagaaagttatgataaagaataatatacctgctcgtacattatatatgcgtggaatagctcatttacagatgtatcttcctggacttgctataaaagatatttctcaagcattgcagttagagccagagcaccccagttggtggagagctcttggcacagctaaacttgttgcaggtgatacagtagcaatgtgtgccgatttttatcaagcatgtgctatgggggattgtgaaggactagctgaagtccgtgaacaaaatttttgtttagtatctcctgaattttaatatagaaaaaaattataattacatggtaataatttttataggttctagataacgttagttatgaggcaaatatgaaagtatatctcattggagcaggaccaggtgatcctggtttacttacagttaagggaaaagaaatattacagcaagctgatgttattatgtatgattttttagttaatgaaatcctgcttaactatgcaaaaccagatgctgaaattatttatgttgggaaaaaaggtaattcatcatatacctcacctcaagatgaaataacacaattacttataactaaggcaaaagaaggaaaaataatagcacgattaaaaggaggagatccatatatttttggtagaggtgctgaagaagctgaagcacttgttttagctggtattccgtttgaagaaatacctggtataacaagtaccattgctgcacctgcatatgcaggtattcctttaacacatagagattatacatcgtcagtaacatttattacaggacatgaagatcctgataagattgattcagcccataattggtctgcattagctcatagtgcgaatacattagtttttgtgatgggcatgaaaaatcttcctgagatttcaaaaaatttaatacaagcaggattatctcctgatacaccagcagcacttattttttggggaacaacagcaaaacataagagtttagcttctacagttaaaaatctccctgaagaagcaaaaaagaatggttttacaaatccttctattattgtcataggtaaggttgttacatttcatagtacattaaattggtttgaacaaaaaccattattaggaaaaagtattgttgttactcgtgcaagagagcaggcaagttctttagcaaggctacttactgaattaggagctgaagttattcagtttcctacaattgatataacaccagttacagaaacagctacgattgatcaatatgtacataaaataaaagaatatgattggattatctttacttcagtaaatggtgttcgatttttttgggaacgtcttatagcttttaaattagatgcaagggtatttgcaggtgtgagtattgtagctattggacctgctacagcagaagctataagagaaaaaggaattcagcctgactttgttccagaagaatatattgcagaaagtattgcagatggattagtgaaacttggagttaaagggaaacgtattttactcccaagagcacaagaagcacgagaagttcttcctaacaagttacgcgaggctggagcaacagttgatattgtcccagtttatgaaacacgtcttgctattaaacttcaggataatatattacaactcttagaacaaggaacgttagattgtattacttttgcttcttcttcaacagtagagaatttttttgaacatattcctataactgtgctaaaaaaatatcgtcttccaaaatttgcaactattggtccagtgacatctaatacattaaaaaaatatggatttgagtatgatatacagccaacaaaatacacgattcctgatttagttaatgctatcgctgatacctataaaggttaatataaaaaggtagaaaggtttttataatatgtcattaaaaatagctgtatttggctctggaaatggaggaaattttcaagctattcaagatcatattacaaaaggcacccttaatgcagaaattaaactcttagtttgtgataagtctgatgcttatattatagagagagctaaaaaggagaatattccttattttattgttagttatacaaaagataaaagtagagaggagatcgataaaacaattcttgatgcagttcaagaggcagatgtagatgtacttgttcttgcagggtatatgcgtctactgtcatcagttgtcattaaggtgtttcataaccgtattctaaatattcatccctcactacttccagcatttcctggtgttcatggtatacatgatgctcaaacatggggtgtaaaatttacaggatgtactgtacattttgttgatgaaatgatggataatggttctatcattatccaagcatgtattcctgtcgtagatggtgaatcattggaaacattacaacagagaattcatgaacaagaacataggatatatccacaagcattacagtggatggcagataataggcttgaattatgtgaaagtagtaggatggttaaagttaaaggagataaccatagggggttggcaccattgagttatggtgtacttattaatccacctcttgaggaaggattttagatattttttatattaggtatggaaaaataaactcattaatataggtaaagagagttctgaaataatagataacgtttaaaagcgtttcactcttaaatgacaacctccacgtcctgttttttctgtaaaattttgatgatattcttcagcaggatagaaagttgatacaggaagaagttgtgtaactataggtagattagtttgttttaattgttttattatttgttctgcaatatctttttgaagttcattggcataaaaaattacagatcgatattgtgtccctatgtcaggaccttgacggttatattgtgttggatcatgtatttcaaaaaaaagttttacaagatctttgtaactaacttgcatagagtcaaaatgaacatgtacagtttctgcatgtccggtttgaccagtacaaacttgttcatatgttggattttttgtagatccacccatgtaacctgatacagcatcaataaccccaggtgtattttgaaatacatcttcaatgccccaaaagcatcctccagcaaaataggcatcttctttactcattttctgtttgctcaccatttgtatgatttttattctgtgatagttctatacttggttcaaatagtaatgagagtgagtttacacaatgacgaacatttttttgagtaaaattttctccttcaaagacatgtcctaaatgaccattacatgtactacaaacaatttctgttctatatccatctgcgtcaggtaattgtttcaccgcattaggaattgtgtcatcaaaactaggccaaccacaacctgaatcaaatttgtctttggagttaaaaagaactgcaccacactgcctacaaatatatgttccttcttctttatggttaacatatttccctgagaatggaggttctgttcctttatgaagaataatccatgcttctttatctgatagcggcttcatataattatcctaataaataaattacgatagaatatctctacatgttacgaatgactatagtcaatgatatcttttcctaagagttgagtaataagtactgtcccacttgtgaggttagtaagctcattctgaaagctttggatatattcattttgtatagagataacataggtaacatcactggtaaaaagttcattaataattatacaatgaaattgttggagaagatgtaaaaaggaggaaatatgttcataacttaaaacaacctctagtgttgttgatatagccatctttttaagaggtaattcttctaatccaagttgaatggtttgttggtaagctcgcattagcccacctttacctagtttaattcctccaaagtagcgtgttattatagcagtaatttcaccaatttttttatggataaggatattcatcattggtcttcctgctgtaccatgtggttctccagcatcagagtaaccagtatatattgttttctcaggagcaccagcaataaaagcccaacagtgatgactagcattactaaattcatattttaatttttctataaaattttttgctgtttcaactgttggtgtatgtgcaatacttatgataaatcgactttgtctgactgtcatttctcgacgatgaatatcagttaaattaatatttggtatgaagtaactaagtgacattcagaaaaaatatctttagttataatcagatgcaataaaaagcttttatagtattatatttataggtaacctggaggctaatacaaggctagagcttaaataagttcttgccattagctaattataaatactaaaaaagaaaacatcttgaagataggatataattaaaaggtataataaaaaataaaagggagttagttagccctaaaacgacatccaactattatactaagttgaacaagctaatatagtaactatatacattttttaggtaatagttagactgttataacgtttttataacatagagtatgttaacattaaagtaagatatgttgatatataacaaacaaatgagatttttataattaatataaaattatgatagttaaatatgatattttagataaataaaaaaatttttaaaattaataagttagttataaccccttagtttggttaaaaataaatttttatttatttacattgaagaatattgttttaatgatatatgttatttgatttagtcaaggaagttgacatgtagtaataggttttatgctatatgtgtttattgtactattagtaatgaatagattattgcttatagataaccacatgatatgtgaatataagtaagaggtattaatgttaggtattttttctatggaaactacaaactgggcagctgaaagccttgcagttatttgtggtagtgcttttttatggggattgggtagttcacttttaagtccatgtcatttaggaattgtacctattttaggtagtcatgctgctgggtacagtatttttggttcaaacacaaatcctttgcgtcaagtgttgttatttacattaggttttttccttacaattcctctcattggtttgttaattggttttattggttatggcctccactttggagggcattattggactattccttctggatttctactgttatggttaggatgggatatgacacgtggacacagctgttcacatttgtcttatttattaggcagaataagaactcggcttggccttggtgtgtcttctggtgcattagtactaggttttgcttatggatttcttgctggaggatgttccgcagggtttcttgtccccatctatgcacttaccttacctagtagtatatgtgtatatgtagttattgctgcatgttttggattaggacatacattaccaatgactattgcaggtggttctgtttcattagcaaaacgttttctaggtgataaaagatgttgtgatcaaaatagtaaatgtgaaagtaagacaaatgaaccacatagtggagaggcaaaatttcgtaaatttgtaggaattattactattattataggtattctatttatattacatccatttcttgaaagttgattttctaactaaaattaaacagtgttattttagcatatattaataagtttaatatattgataactcaatagatgtttgtattataactggtagttattgttaccatatattatactatagcagtaaatttatagataattagttctttgttgctgggatacttttaataacacgacaagggttaccaaatgctaagacaccatcaggaatatctttacttactatacttccagcgccaatagtactgttatctccaatggttactcctggtaagacaataacattacctcctatccaaacattattacctatagttatgggataagcatattctaaccccttatttctttgtaaaacatctaagggatgcactgctgcatagaagccacagtttggtccaataaaaacattattcccaaaagtgactttagctgtatctagtatagtacaattatgatttgcataaaaattttctccaatttcaattaagtatccataatcacaccataggggttgctcaataagaaagtgttctcctgttttaccaaagagcttttttataatgtttctacgttcttccatttttatagggtgtagctggttatattcgtagcatagctccttacatcttaagcgttcttctataagcaaaggatcagtatttgcatcatataataatccattccttgctttttctttttccgtcatgataagctcctaagtaataaaggtaaggtaacttcttttggactactttatttattattattattatttgcaaaagagtataagctaggtaatggaaaaaacataaaattaattgttaaacagatagtaacttatttagccttatattataaaatatattttttctatgaagtagaaaagactattttttattagagacttgtatcttttaaaaataatgcctatctctataaaaggtcttttttggggtttatgtttgttatataggaagattttagaattatagtaatgataaaaaaataatctatggatttgtagttttttagtaaggttacttttttattgttatagctaataattatagtgagatattgagtaaaagttagaggtaatctaaaagataatagtatactttttataatattataataaaattatatattatcataatatttatataagtgaacatagttttctaaaaagactataatgatcctcattaggaggtatttttgtggctgttgagtacaaagattattataaagttcttggggttgagagaaatgctacaaaagatatgatatctaaagcatataaaaagcttgctaaaaaatatcatccagatcttaatccaggtaacacagaggcagaagaaaaatttaagaatattacagaagcttatgaagtacttaaagatgatgaaaaaagaaaaatgtatgatcaactaggttcaaactggaaagatggtcaatatttccagaacgaaagtggatttgataattttagctttaatttcggcggagatgcctttgggggctctggttttagtgacttttttgaatctctttttggtggggggcaaagaggtagaagtagtgggtttagtgggttttcttctcgccaacatcgtggaagggatattgaagctgaaatttctatttctcttgaagatgcactccatggtggtgaacgtagttttactctacaaacgccagatggtccaaagacattaaaagttaacattcctgcaggtgttcgtgaaggtgctaaattaagacttgcaggccaaggatactctggctcaggtggaggagcaacaggagatttatatttacatattcgctttttgcctcattctcagtttcatgttgaaaataataatatcacatacaatgtacaaataatgccttgggaggctgtattaggaacaaaaattagggttcctactcttgaaggaaatgttgagctttctgttcctgctggaacaagtagtggacgtaaaatgcggctacgtggaaaaggattaggctcttcaaattctcgtggtgctctttttgttattataggtattaaaacacctactaaccttacagataaacagcgtaaattgtgggaagagctagctgctaatgcagaaaagtgaaggtaaggaggttcgtatatggatttgttacaagacaaaaaagacctacccagctgctccagatttatagtatggtcagagtttatagaactcacaggaacaactcctgagcgtgtctttgagcttattgaaataggctggcttgaacctgtacgtaccgcagaaaatattttgttatttcaacaaagagatgtttataaattacgaaagcttgaacgaatttgtatggattttgaaatagatacactaagtggaagtattattattgatcttcttgaacgtgttgatagcttagaaaaaagagtaagaatgctttcatcactttattaaagttataatatttagttaactaaaaacagtaattgaaattattcttatatacttattatatacttatactgaagaagtagaggttgtattatggatgtgaataagctcacacaaaagtctcaagaagcattatcagaagcacaaagactttctgctcaatatgggcatcaggaagtagatgtagaacatttagcattggcacttaccatacaagagaatggttttgttccaagggttcttgaacaagcaaaagtacatgtaaaagttgtgatttcagcattagaagaagtattaaaaaagcgtccttctgttcgtgggcctggaagtgagatggggaaaattactatctctcaaaggctaagtaaagttattgccaatgctgaattattagcaaaacgattgggtgatgagtatgtaagtgttgagcatctttttgctgaatgtcttaatgagccagagtcaacaggaatgggacaagttgcaaaagagatacaccttacgtcacaaagatttatagaagttatgttagctgtgcgtgggccacaccgtgttacatctcctactccagaagatagttacgaagcattaaaaaaatatggaagagatcttgtagaagctgctcgaaaaggaaagcttgatcctgtaattggacgggatgctgaaatccgtagagttatccgaattctttctcgtagaacaaaaaataatcctgtgcttattggtgaagctggagttgggaaaacagctatagtagaaggattagcttttcgtatcgttcaaggagatgttcctgaaggtttaaaagataaatctatttttgctcttgatatggggtcactgattgctggagcaaagtacagaggagaatttgaagaacgtcttaaggctgttttaacagaagtcgagaagtcagaaggaagaattgttctttttattgatgaattacatactattgttggagcaggaaaagctgatggagctatggatgcagggaactttttaaaacctatgcttgctcgtggagagctccattgtattggtgctacaacattggatgagtatagaaagtatatagaaaaagatcctgcattagagagacgttttcaaccagtgatggtagatgaaccttctgttcaagacactatatctattttacgaggattaaaagaacgctttgaagttcatcatggtgtgaggattagtgattctgctatagttgaagctgtagtcctttcagatagatatatctcagatcgtcaactaccagacaaagcaattgatttgattgatgaagctgcagctatgatccgtacagaaatcgactctcttccatctgagcttgatgaagttaatcgtaaaattatgcagttagaaatagaaagagaagcccttagaaaagaaagtgattcagcatctcatgaaagattagtacgtttggaagaagaattaaaagtactgcaatcaacacagtctgaattaaaaaagcaatgggaaactgaaaaaggttcaattgattctcttcgaaacataaaagaacaaattgagcagacacgacttgcaattgatgaggctacacgaaatggtgagctaagcaaggcagcagaattaaaatactcaaaactgtttgaattagaaaaacaattagaagaacgtgaatcaaaggctgatggtccacgtttacttaaagaagaagttcgtccagatgatgttgctaatattgttgctcgatggacaggtatacctgtaacacgactgttagaatctgaaaaagaaaaattgttacgattgccagatacattacatgagcgtgtaattggtcaagatgaggctgtgaatgtcatatgtaatgctgtattgcgtacacgtgcaggactttctgatccaaagagaccacaaggttcttttatttttcttggacctacaggtgttggtaaaacagaactttgtaaagctcttgcagaatctttatttgatactgaagaaaatatggttcgctttgatatgagtgaatacatggagaaacactcagtagccaggcttattggagctcatcctggttatgtaggttatgaagaaggtgggcaacttaccaatgctgtaaaacgtaaaccttatagtgtcatattatttgacgaagtagaaaaagcacatcctgatgtatttaatatttttctacagttacttgatgatggacgtttgacggataatgctggccgtactattaattttagaaatactattatcattatgacttcaaatataggcgcatataaattacttgaaggtattagtcctgatggttcttttcatgaaggtgtatatgagtctgttatgggtgatttgaaacaacattttagaccagaatttcttaaccgagttgatgatgttgtactttttaaaccacttctggctgatcaaataagtagtattatagacttacagttaaggagtttaaaaaaacgcctagagtcacagaaagttacattagaattaacacattcagcacatttatatctagctgagaatggatatgatcctcattatggagcacgtccattaaaaagataccttcaacgagtagtggaaacacctttagcaaagatgattattagtggtaaagttcatgaaaatcaacagattgttatagattactcagaaagtgattcttctttacaatatggtgtgaaaagtgcatctgaagatatcaactgggttcaagtataattataactttaatttttgtaattattaacgataacaggttatttattatacatattatttattataaaatttgtttaagaaattgctgaagtcgtggatgttgaggtgaggtaaaaatagtctctggggggccagtttcaacaatttgtcctttatccataaaaataacatgatcagccacttcacgagcaaaacccatttcatgagtgacgacaatcatagtcatgccttcttctgcaagtgttttcattacttcaaggacttctgttaccatttcaggatcaagtgctgaagttggctcatcaaacaacataattttgggatgcatagcaagagctctagcaatagcaactctctgttgttgtcctccagacaaataggatggataaacatttattttatctgaaagacctacctttttgaggagttgcaaagcttgttcttctgcctcatgggtagaaagctttcttaaatggatgggagccattgtaatattttggagtacagttttatgagggaataggttaaaattctggaataccatccctaactcttggcgaatggtattaatatcattttctgatgagttaatatcaaggccatccacaatgataagtcctttatcaatagtttcaagtcgattaattgaacgaagaagtgtagattttcctgatccagaaggaccaataataactactttctctcctggtattatttctaggcttacatcatttatggctgtaagtgatccaaaaaatttccaaatattacgaatggtaatgataggttcagtcatagttctcctggtcataatgatcaagtttcccttccataatacttactcctttagagagtaagagtgtaataattagatatacaatagcaattacagtatacgtttcaaaatattcaaaggttactgcagcatactcccttcctcgacgaagtaagtcagctacagcaataatggagataagtgatgtgtctttcagcatagcaatacattcattaccaataggtgggagaatagctcttagagcttgaggtaaaatgacataccgcattgtttgatatttgttaaatccaagagagcgtgcggcttcttcttgtcctttaggaacagtaagaatacctgctcgaaatacttcccccatataagcaccataacaaaaggtaatggcaatgatagctgatacaagcggagaaaaatggcctagtgcataatagatataaaaaagttgtacaagtaaaggaatacctcgaataacttcaacataagtagaggtaagaatattgataatacgatttttagaaagtctaccaaaacctacaagaagacctagagggagagtacaaattatagaaagaaatgtaacttcaaatgttacaaaaatgccatcaggaagaaatgctaggatgtctatgtagttttctgagccaaaactacataggagaactaaaagaagaattgatccaaaaaatgcaatattccaagcattgataatattcctttccctaggatctgggatagaagctccgtctgtaatttcaatgcgtatgcttgtattttgcatatatgttttccatatctttatatgttattgagctatttatatgtataaaattaatgcatgatccacttctttattaatgcagcctcaattcctttttcttttactgctttgacaccagcattaattttctctaataattctttattaccttttttgactgcaaacccatactgttctatttcagtagtaatgaaagctatagtaatatgatctgtatattctggttgttgttttataaaatagtttgctacaggttcatcacaaatgacagcatcaaggcttccattagaaagatcttctagcgcaagacctatttcatcataggtttttactatagcttttacttttgctttaggtaacgtttctataagacctgaagtgccaatctgtccacctacttttttcccatttagatcctgtatactttttattggtgaaccattagggactacaatagcttgatgaacattatagtatggtttactaaaatccattactttttgtttacgtttatctgtaattgttacagaagaggcaataatatcaataagatcagcattaagtgcagcaaatattccatcccaagcagtattacggatttctatgttaattcctgcttctttagctacagcagtaatatagtctgaagagtacccgacaacctttttgtgttcatctaaattttccattgggggccatgttgcatcagaagcaacaatgtaaatatcttttgcaatactggtagaagaaaaaatacttaatatagtgagtatgcttagaaagccaaaagtgcgaagcatggtttgctatactccttgaatatgtctatctattatagatatattattcatatattttttatgtttttaaaaagaattatagatattttttgtttaaaaaagtatgaacagatatttataatatatgttaaccaatatctattcaagagataattatatatcatttattatgattttctgtaaaaatagaaagagtaattctatattattttatatcgttattaaaaatgaaagtaggtaagttagataattagtaagagtagaaatatagagttaggatacagtatgatataaatgaatagatattattaaggttagtaggtaaattttgatatgaaaaaggtatggaatattttttttgatcgtgatggcactcttattgaagataaacattatctttcgaatcctagagatctagtattattaccgaatgtaggcctagcattagaaaagcttattaagaatggatgtcatttatttttagtttctaatcagtcaggagttggaagaggtttgtttactgaaacatctgttttagcatgtcataaagagcttacaagacttcttgctggttatggagttttttttactgatgctctctggtgtgtacatgctccatcagaaaattgtgattgtcgtaagccaaaacttggtatgtggaaagcactatctcaaaaacatagattaaccgcatctgaaacaataatgattggagataaatgtgatgatataagttttggtgtaaaggcagaatttttagcttctattcttgttaaaacaggcaaaggtgaacaagaagctataaaatgtggatatcgttttcctgagaagggatgtgctcctatggaagtaacaaaaaataaatctacatgtattttaactacacaatctattatggatgctgtatcatggatattacaagaataatcttccagaaaaaagagtatatactatataaaacagtgtggctcagtaattaacttatatcatgagataacaattaatagtttttattaagtagggttacatgaaatttacttcatttgatgatgttcaaaattttttagataatcttggtttgtttaatatcgatttagagcttactcgaatgaatcaagcattgaccaaacttgattttaattctttgccatataaagttgttcaaatagttgggacaaatggaaaaggttctacagctactttccttgcatctttagcaaaatctcatggtttaaaggttggaatatatacttctccacattttgtgacacctcgagaacgtatttgtattaatggtgaaatgctttcaccagaggtatggattactttaactgaacgtatcttagataatacactatctttaacatattttgaattattaacagtattagctattgttgctttttcagagtttaaggttgatttggctatactagaggcaggccttggagggcaacatgatgcaacaacagctgttcctgcagatttggtatgttatacaccaattgatcttgaccatgaacaattccttggatcaacagttgaagcaattgcaaaagaaaaatcacaagcaatgcgttttagaaaacctgttctttcaagttttcagcagcctgaagtaatgagcatactttgtgctatggctaaagaaaaaaattgctcttttcagtctctagaacaaattagtttagtatatgatctcttttaccctaatctagatggtagtcagacaaagtcagaatatttaactttaggcatggctggtaagcatcaacgtgttaatgcacagcttgcgttagcagcatggcatgtactttcacagaactttggatgggattttaatcttaactgtatttataaagggcttgctcatgcgtttattcctggacgatttcaatatgttcctcctaatccatcattaggctgccttcctactatacttgatggtgctcataatcctcatgggttagaagcatgtattgctgcatgtaaatctataggaatccgcccaggagccattattttttcctgttttgctgataaaaatattaaagagatggttgaacttgttcagatatttgcagaagggatcccattatttattccaacaatccaagttcatgagagagctatgtgtagcaacgagctagcaaaactgtttaaatgttctgttcagcctgtacaacgtcttagtattgcattacaagctataaaaaattctgatattgaaattagtgaaaaacgtcctatagttattctaggttcattatatttaattggagaattttttacactctaccctcatgtattatcttcttctataggtatgatataaaaatatagtatacattttatagtggtaagttcaatgaatatgctgttacgtcaattaccttctgttgatatctgtctacatgcaatttttaaagaagatactacactatatactgtaacacccagacttttattacgtgaacttattaatacatttcttgataaactaagggaagatgttaagagcggtaatattactgatagttcttttcttactttggactatattttacctcaattactgacatttataaaaagacactcctctttaaattgttgtaaggttattaatgccactggcgttattcttcatacaaatatgggtagatctattcttcctcaagaggcactacaagctattaacactatatgtagtggatattcaaatcttgagttaaatttaaaaacaggagaaagagggagtagatatagtcatgtagtaggactattgtgtaagcttacaggagcagaggccgctattgttgttaacaataatgctgctgctgtattacttacattagatacgctttgtaaagggaaagaagttattattgctcgtggtcagcttgttgaaatagggggtagttttcgtatccctgatgttatggagcatagtgggactaagttaaaagaagtaggatgtacaaatcgtgttcatttaaaagattatgaaaacgcaataactgttgatacagctgctattatgcatgttcacacatctaactacagagttataggtttccatagtgaagttagtttaaaagatttggttatgttatctagtaaacataatttactttgtatcgaagatttagggagtggtagttttattgatttttcacagtatggtcttttaggagagccaactgtacaatctgttattagcgcgggagttcatattgtaaccttttctggcgataaagttcttggtggtcctcaggctgggatcattcttggtaagaaagagactattactcaaatagcactaaatcccttaaatagagcattacgtatagataaaatgacacttatagctcttgaatcaacattaaaactatatcttgataaaaaacaagctgtaacaagaattccaactttagcaatgataactatttcacctaacttgttggaagaaaaagctaaaaatattctttctaatctaaaaaaaatatgcggtgaaatgatagaatgttctattgttcctggattttctcaagttggtggtggtgcatttcctgaatataatttaccaacatcacttatctatcttcatcctactatttgttcttcagaaaaattaaaaatgcaactgttagatgtttctcctcctatattaggaagaattgaaaaaagtgcattttgtatagatccaagaacaatagcagatacagaaattgatttagttactacagctatttcacaagctatagatgctattaatattataaataataaataatatatcataaaatattaaataattactgacataaaaatagatgattggaatatattactaatactatttttagattgttataaatagtatgttatattctatagctttcttgtagattattatttaaaaagatacatgagttaatgtatctttttatttatagttagggttgagtatggctataaaaattatagagcattctccattttgtatagtaaaaataatagactctctttctatagagaatgctattgctatacagcaggagttagaaaatatatttgttacaagtgttacattaggagaacttgttctggatttatctaatgttcaaaatgttgatttttcagggataggaggggttatagcagcattattctttgcaagagcaaagggtattactgtgatactttaccgtcctactaaacatattcaagagatcatgtggaaaatgcagacaaataatctttttcctcttattctttcagaagaggagcttataattcatgcgttaaatagttagtagttatattatgtattcgttttggagtttttctatatttgaaggatatggaatattatattctattgtgatgttatctaggtaagttttatgaaaatgtatttacaacattattttaatcctgactttgactatcttcaattacagccaattgttagtgttaaaggacaagctgacttgtataacttaggatatgttcagaatgttgttaaaggtcaagtcattgctgaaatgatacctcttgaagcaatagaaaatccaattcctcgatttgtgcttgaacaagaaaagtttcctcagggaccaaatacatatattgatcctgcatatccacattatttactttctgacgtcaatgggtatgttttttattataatggtaagatatctgtaaaaaaagttttgaatgttcgttcaaatgtagactttcatacaggtaatattgcttttgttggtgatgtcatggttcataaagatgtcaaagctggttttcaactacaggcaaatactattattataaatggaatggttgaaggtggagaagttcgttcaagaaaagatatgaagattattggtggtgctcgaggtggagttagtaatcgctgtcttctttcgtctggaggaagtcttcatgttaactttactgaaaaagttgaacttcgatcaaaaaaaaggatgattgttgaacgtttttgtatgcaatgcaaagtgtatgcagaagaaagttttattgtttcaggattagtagctggaggtattattcaagtttcaaaacatgtttttattaaagaaaaattaggaaatacatcaggaataccaacgcatatttttttaggatataatccatttcttctgagaaaactagaaagttgtgataatagcttagggatattaagtgaaaaaataacaaattataaaacaattattgatcaatcatcttcttctacagatgaaattcatcaaaagttagaagaggttgttcagcaacataatcagttatcaaaatatagaaatactatatggaaactgttacaacttgatgaggctaaagcattttcttgtcgcttagttgttccagggatagtatatcctggtgtagaattatctataggtaatgctagtttttctgttaaggaagaacttaataatgtatgtttcaggcttcatgaaaatgaaattatttatgagtcagtccctgcaactcttcttccttttttttaaaaataatgaataagtatattcaatatgatgagaacggagatatcattgatatcattatccagatacaggatagatctatatccatgttaggttctggggggaagataagagaaaagaaaattgccagccattttattacagcattgcaaaaagcagaaatgtcttcaaaagtattaccagttctcttaggaagtggtgcaggatatgcattaaaagagattttagaaaatacaacaagtccaattgctgtgattgataaagagttttttcttaatgatacacaattgaaagaaaaaattactgatcaaagaatcaattggatttgctcatccaatatcgaagaggtattttctgctctaacacattggcaaatacagcatggtcgtttacctctttaccctttagtgcatccattttactttagaatagataaaccttggtatcaaaaaattaaacaatatgttgcagcaagtacaagatttgacttttggtctaaggctattcgaccacgtttttctacagcagagccacgtcttctattaattacaacacgatattttttattaggagttattgaagaggcttgtaatcgtcttggtattcctcatcaaattattactattcaagatgaagaaacaggatgtgtagagtttgtagagcaacttttaacatcagttgccacgtttcaccctgactttattttaactataaatcattttggggtagataaagagggtattttagtagatcttcttgctaagctagagttaccaatggcttcttggtttgtggataatccacaccttattatccatgagtatggggaagttgtatcaccgtggacagctatttttacatgggatgaaaatacgttacattcattgaaagagtatggttatccacatgtgttttatttaccattagggacttctcaatatcgctttagacctagaatgccacaagataagcctttatcatcagtttttcctactcatctttcttttgttgggaactctatggtttataaggtagaagagcagatagagaaaggcaacttcccttcaatattgcttcaacactataaaaatatagctagtgattttatatattcagataaacgttctatacaacaatttttaaaggaaacatatccagaatattataaagaatatcttaagcttcctgatgttgaacagcgtttagcttatgaagcaatgcttacatgggaatcaacactccaatatagattcagttgtgtagaacaattactttcttttcaacctgttattgttggagacaatggttggtatgaattacttagtaattataaagataattggagttattgtccgtctgtaaactattacaatacattaccatcaatatacagattttcagatattaattttaacagtacaagtaaacaaatgaaaggagcagtaaatcaacgtgtgtttgatattcctgcaacaggctcttttcttattacagactggcaacagcaaatggatacattatttgaacctaataaagaagttgtctattatcgtgaggttggtgagataagagagcttgttcagtattatttgacgcatcctaatcaacgtaagtctattgccagtgctgcaagacaaagagttcttgctgaacatacttgggagcataggctacaaacgttattagagcatatgcgtcaaacatatggataatatattcttattattaccatactacttgatagtatcttttattttatatacatatttcttttagccgaagtggtggaattggtagacacgctaggttcagggtctagtgagggttccctcatgggagttcaagtctccccttcggcaccatttaaatacaaggattaacaggctgtaaccctttttcttttttatcttcttaagggttcagagatggtgaaaaatttttgatggatccaaaggggtcccagcaggggggcaacttctccactagtaaaaggctagtcatgactaacccctttatttccttccaactttatgggaagatatcgaatttccactctcatgtatcctcctatctatctttatcagaagaggaatctctactaatttcaatatgtgcttcccaaacacatactgaaattgcttggtggcacggaaatatggttcagtttgtgcaccacatatatccgtgaagcaaaaagactggtggataaacttcatgatgcattgtgtgctaatttgtaaggacaactgatgctgactctttaggaaattaaaaagcgcttagcgactcatgagtaatcttgccgattttcaagcggctatgcttgaaaagatggagtagagcttgttctatgagaatgcgaatgatagtctatccgctaaggagttgtgttaaaagcagaaatctttgtaccagaacagaaggtgttaggaagctaatatgagaattggctgacaaagaaactcttcttctgtcttccattactataaatcaatataatgaacttttggacagaccattcaaataggagtatttttttgctttatacgttgaaagacatgcccggcttcttttccaaagaataagttgagtaacacaaggacgttattggcaaagctttaatgcaaacttgtcttatgtttaatgactatgttgtcgtggacgaagctgaaaacacccttaaaatatatttatagcaaacttatgggactgaactttgtggagacaaaagttgctccagtggtttaactactggatatatagtttttttcagcattcctaagtatagcatggttcaaggtagtatcctgaccatactacaagatctggcttcgctcttgaaaagcctgcaacccctgatagaatatggtcaaatgactctggaaagacgcaaaaattagtacaaggttctgtagtccttgttcttaaccaaatgtaccatgtaagtggataaggaagtgagtactaaatcaggaggaaatggatagactggctctattttagatctttccggttattgaaagccatggattatggtgatatattacctttggaggatatgatggattctgtacaattaaacgagtgtattgcttttattcaacgtgctgaaaatctaaaaaatacattacgcagtgcacatacatcgcaagggaggcaggaaagtgctgcagagcatagctggcggctttgtttactgatacttgtttttgcaaaatactttgaacatgctgatgtaaataaacttttgcgattggctgttgttcatgatttgggtgaagcagtttgtggagatatacctgctattgccaaaccggatttagacaaaaagtcggagactgaacgtagaggcatgtgtgaactgtgcacgggtttaccggaaagtatctatacggaaatgttggctttatgggatgaatatgaattagcggaaactctggaggcaaaaattgtcaaggggcttgataagctggaaacaatcatgcagcacaaccagggaaagaatccacctgattttgattatgaattcaacttgttttacggacaggatgctatatcagttcttcctctgcttaagcaaattcgagatgttcttgataagaacaccagggaaaatgttgctataaaaaactttttcaaacattacgatggtggactattataaaaattttctgaatgaagaataatgcatatctgtaaaagtcctcctaagacatttgtccagaaggttttttgtttttgaggaactcatgaatctcaaagatattatttccctatccctggctgcgtttattcttgaccgcaagtaaagggtgtaggtctgctataaagtctcattagactatgacaaaatcctcttggtatggaaagatacagttataataagtgatttaataatgttatatatgtagtgttactaattcattaattaaactacatagctttttttattcctatagacataagccaccagttcatagggtatgatgtaataaagccgcaaaacatacctatttgcatcataaaccaaaaagtaggatctgttggagacataggacctatgagtagaaatatagcaatggccatccagccatacatacctatttgccaggctgtaagtgataaaaaatcaactctgaatgctctccaccataatgatagtccatgatgaagtgtcattgatgcaagtgctgcatattgaaaaaatactccaataataagcgctaatacatattctaatgcccattcaccatagagcatatttccaaatagtgtaaatggaagcaaacgaaatatccaaggtcctattagatctgcaatggtacacccagaaccacaatgcaatgttccttttataatatgtttccagttaagattatgttctgtagacgacatatccatgttttgcattatgtttttgtctaaaatattgacttcctgttgtcttgttatctcaagtgtatcctttcttttttttagtgatgtggcaatgttgtcttcatttgaattaaggacgtttctatggcttattacacggtaagcccagataccaaaaattccagcccataatgcagttattggccatacccatagcataattttcatttttgggacaggcctgccacattgatctactaagatatgtgcacaagataatagacaggtactcacatacagtttagaaaatagactcaatgattcataagaggttccatatatcatttctatatacctcctgtgcatactatttatctataacacaagcgattatatttatcttatctactttatataagtattaattaacataaaaaggtctatatcattggtcaatgactattctttttattgatattagaaattttgagataataaattaaatacccctgcttactatatgacagttgtttaggaaaaacagtatttttatgaggataataacgtacagttaatagtagaatcattattttttcttttttaaccttaacaactagtattagttagtagatttttatagagataaattatagtaatattatttagtataacataatattattaaaataacatctactttataatccactttttatatgttccatatctttttctatgtcttcttccataggaagttgactatggtttttcatataatttctttgagcttctttacgagctttcatatagttttgatctgctttttttatttcattctggtatgctttaagatctttatcgtgctgttcaagatatttttcagcatcagtatttttttcatctgttaaagaactcattgtttcttcgacattactttttaaatttgtatagccatctttaatactttgagtaattgatgtttcaacaacaaattgatctgaaaaattatgtgctacagctaaaggtatagtaaataaattaatggataatattccacttcttataattactgcatgtactttcatttttatcctccgtataattttattctaatagaattagaaaatatcttttgttttttctttaacgttattaaacagttgttttgtatttttactggcattgtgtattgttttttttgtagtatcagaagtattttctatatactttttggtgtgttctgcggaagtgtgtaattgttcttttactgaatcaatagtatatttaatttgtatgttaatatcacttaatgtttcttttgttttatcagaagctttttctatctgttcttttgtatgatcagatgtgtggtgtaattgttcttttagatggtcaaacgtctctttcatagcttcatttgcatgagaaataacttcttttgtctttttgataattttttctatattttctaatgcttgttctgaaatggtatgtagttgttctttaaaatgactagaatctatttcattattgtggtctcctgtattattttttttaatgataatctcattattttcatgtttttcaggaagattattcatagtaacctccttacttaagttttttattttttagactttagtatgttagataaatttgctttattcacttaaaagtattaaaaattataataagatttttctaatacatttgatctaccgtatgatgaaaagcaagattttgatatgagattatcaagacgtgtaatgataatttttgaggttataatagaattaatatgttattattaaatgatagaagtagtttttattttattacgtataatttgggcttgaatagcagcttgattatatttttttagtagttcatagcgtcctgttttatttaaaatatattgtatcctttttaaggtacctaaaaagtttgatttattcaaaataaattttaagaggctatttatcttttgttgaaacagatgagaatcaatccctaatctattacatagagttataatatattttaactcatctatattaagtgatttacataaattaagttcttctatcattaaggttaatgccatagacacttcattatttttttcaagccaattgactaaaaggtgtctaccatgtttccaaaaaggttcttccttaagaagatcaaagcattgtaaggggttaaaaggagtagataaacttttgagcagatcatattgttttgatttatgaattgttggataaggccatagagaaggtgtaatatctactgtataaccatcttgttgtaagaagtaatccatatcgcctaggaaggaaatattgttcctcttgaaaaagagacttgtgttataagcttctttattctttcttccaggtgtttttgattctttatgtataacaacactttcaggaatacacatcatatatttcccctgttctgtgagtctaaggcataattctacatcttcaaggccatttttgtatccattaaagaatccaccaatatcaataaaattttttctatgtaaaagtaagcatgctgctgtgataattttgaactttcttttcttatgtactaaggggattgttgcaggaatagagttataaaggtgatttacatagtttccatctggagttatagtaacacctaaatgttgtactgtactatcaggataaataagtaaagatccaacgccagctagatatggatcagaatcaagtgcttctacaagaggtggaagccaaccatatgatacttctgtatcattattcaaaaagagaatatagtctgtatttgcagcataagctccagtgttacatgcaggaccaaagttatgattagtatcaaaagatatataatgaaagttagatccaaataatatatttcctaatgtagggcatgctagatttgtttcatctgatgaaccattatttataacataaacatgaacgttgtttgtatatttagctaagcttattaaacaagtttttgttaattgccactcattatatactggaataataatactaacttttatcattttaatatgttagaaataattaggttataattaaaataagtgggttataattaattgaatatttaataacttaataatcttttaaagttgaagtaatactactatatataatagagagtcacaatgataaaaataaattatattataatttatttttatcattattaataataagtttataactatgctgaatgtattatgaaatatgttgtttgtcttttatgtgtgatattattttattatttctgtagtgcagggacactatatgatctatggggtccttcactgtattcttctttcccttctgatagtcgaaatgctcttcctaatgatgcatcaatccctaaaaattatattcctatatgctcactaccaccccttttaaatacaattggcacaatccgtagagttgacgtaccaggtgataaaaaagttgtagctttaacttttgatatgtgtgaacttgctacaaaaacaacaggttatgatacagctatcatcaattttttgcgtttacatcaaatcccagctacattgtttcttgggggtaaatggatgagaacccattctgaaagagctatgcagcttattgctgatcctctttttgaaatcggtaatcatgcatggactcatggtaattttgggattatgagtgaagcaaagatgaaagaacaagtattatggacacaggcacaatatgaaattttaagaaaacaagttattgagcgcatcaaattaaaaaattttctactacctactatccctgagtgtatgcaattatttcgtctaccatacggaagatgtacagggcaggccttaaaattacttgcagaactagggttttatgttatccaatgggatgttgttgctgaagttcataacaataatagtatacagggattagagcagtatgttgtcaaaaatgtaaaaagtggttcaattattttatttcatgctaactgtgttcctattggttctgctgagttacttaaaaaaactgtagaattattgaaacgtcaaggataccagtttgttactgtaagcactttgcttacaatgggtaagcctcaatatacaatggatggttatttcacatcgcctggagataacctttcattagatacaaaatttggcattgatggaacaggattaaagtaatattctttaacatagctaataaggtacaagttaaaatttgtttatccttttattaagagaaaaaatagtattgcttaaatgcattggcagtttttttgttctagcgatattctaaagttagattgaattttctactttatatattattacagtaagttagatatataaagtttttcgttttagttgttaaacttgaattgctttttattataggcttaatttttaactaaattataaatgtaagtacaaatactaagactctgctataataatatataaaatctttatcagagtagtaccttagtatatatctatatattatcattctttatttttcaatctattcatttatttttcctttttatttataatacaacaataaaaaagctgagttatattatctataattattttttttaattattaggaaataaaaatgattacatattaaaaaaagagacgatagaattattccttttattgttgataaaattattcaatctacttttagacaacacatctttatcagaaacacatggatgattatatctatatataatttaataagaatcattttaggggatattgagactatgtttcttagtaatacttacttagaggttgaagcattacagaatatcatagaaaacttcttatagaagaaggactttaatttttacttgatacgtataaacagtatcataataagcgtacataaacacgtaaaagaaaaagttactttatacaccttatgtatgattttacatttaaagatgttaagcatagtgagcttaaatatgaaaatgctaatttcagtacagatacaacaatagatattatgttgaagccagtagtgaaatgctaaaaatttttatgagttgtatgtatttaaaacacaatatagtattgcttataccaaagatgatatccatattcatgagttagattgtttaactttaacaaatgttgttagatagatataaaaaaacttttttctagtaattttaacataggttatggattcactcgtgaatcaaatgaaatacgtaattatagttcattaatacatattgtattacaagctttaaaatgatcaacatggtgggaaagtatattaaattttgattataggactggctctaagaatagctaagacgtttataaaacaaatttatgtaattcttgtaaataatctagaaactaaagatagtattacttcttaaaaagttatgttattcaaaataagtctatccttggagtagatggtctttttgtatatacaaacaattaaataatgttaacctactatttagataaaaagtgtattattactaatgcaatagaatatactgaaaaagaaacattccaggcaatggaagccctagtttataatttaaatacaatgcattcttgtgtaggagtccaaattctttatagctccattagccatggtacagacacaagctctgaagggcatatgattacttgaaatttttatttgctatagagtatgaattaggaaatggtgaaactctaatatttctataaggatttttgaagtaaaagaagggattagtttcaatataaaagctctatatcataattctaacaaatggggacagttacatatgtggaggtaagatggagatattagaaataacttagaagcatttgaagatattattagagctatgaatgaaatatgagcagggtatggtttattaactatcctgtagatagagattcctgtttggggttatctaatattattaatgatgtgtgtccacagtgtggtcgtcgtgaagttaaagtattgatttacatatagtaaaaatatgaaaaattgtttcaacacactataatatatatatatattaatatagatattcagagaaaaataaagcctacaggtagtaatatatattatatagtaaaaaatgttcttgtttaatgtattattctcatatgtaacaatatattttatgagttataactgttggagaataaatatggaagtaaagcaacagaaaaaagtaaaaaaacttattggtgaaggtattaagtttgaaagaattagacgtattactagttatttattggtacagtagatcgttttaacaatgttaaacaagcagaagtagttgatagagttaaatattctaaaataacttcttgctaaggttaatagtccctacaacccaaaaggtacgcatatccacctatcttgcgtaccttttactaatttttaacatatagatgaatacagtctattcagaatgttagctccttctaatataatcaggctttcaagtcttattgaagaatctgttgttgatggtcctagactaaggtatgttatttacacagaggcgtattcatgctgtccaggctgtcataatcatcaaccaatttataccaaggagaaaagcttgttaatattgatacaatttttagtgatattaaaaagaaacctcttatacatggtgttacttttagtggtggggaaccattttttcaaagcaactccttggcgaacttagcaaaacaatttaaggttataggatatctgttaagttatactggatttctttttgaagaacttcttacagataataactagttatcatttttgaaggtattagacgtaattattgatgggccttttgttttagaaaaaagctagctatactccactttcgtggatctcatagtcaacgagttattgatgtccactcatctctttttcagaataaaattatatcatgtccttagtgataataacttattatctagattagtttattaataaacacgtaattgtatcatattacctttaagagcatcttgctctttctttatagttaggctaaggactcacttggtaggagaggtagcgaagtggctgtaacgcgctcgactcgaaatcgagttatcgatggtaagtcgatacgtgggttcaaatcccaccctctccgccagtatttaattaggatttctattttttattcctaacatatagaaatcattttttgctatattgattatgattgaaagttcataaaagtatataatttttcaagtcgcatgataacgggattattttcctatattatagtcacctagtaaatttatattagggtgaagtatattttaatgactagaatttttgaaactctaatatatagcttattaagctgtattattcattaagtccattttactttctttataattttatgacttagtctatacttgaaagattcttagactactaacagtttttatatagaatagtattaggtataggatttatataataagtcctatactgttaacacatatatttttatgtagggagcttgttgtataaagcaaagaaggaattttttataagtataatatattaacactaaccagctataatgattgaaattttattaaacttattttaacaacatttataacatattgaaagttcatactaaattttgaacttatacaataaattataacttagtataaggatgatagatatgttgtttagtttattatattctggttatggagaagctaaatgtatatatatatatagtacttttaatattttttccatctattttattggcaaaagagtttgatggggaaaaaatttttttcatgaaaaatcagtctccacaacaacaaatactttcaattgcacttttaaccaaaaacaaaaaaattattatatttgacggtggtacaaaagcagatagtaaccatctttcttcttttattaatgagcatggaggaaaagtatcagcttggtttttaacacatttacatgatgatcacacaggtgcactttcagaaattcttcttgatgataacataacaatcgataatatatactacaatttcccacctccagaatgggttgaagagcatgaacccatgtactcatcgcatcttactatgatagtagagcctttaaagaaaatggcttatttaaataatcaaaagaagatacaaaaaggtgatacattttcgatagatggtgttacaatcactgttctcaatgattttgatctttcaataactagaaatggtgtaaataatacatcatttgtatatgatgtaatgattgcagggaaacgtatgttggttttaggagacttaggtgaagaaggtggagaacggcttttagctgagtatggaaacacattgaaagcagacattgttcaaatgtcacaccatggacaacgaggtgtacaaaaagaggtatatactgcaattagtcctagaatttgtttatggccaacaccattatttttgtgggagaatgactgtagttatggtcctagttctgggacatgggaaataaataaggttaaaacatggatggaagaggtaggtgttagagtacactatgtttctgggttacaagaagatgatatcgttattgaatagattactaggttatgctaatttgttgaacaagataggattagtattctatagcaataatacagtactgactattctttttagttaaataactatactacatctaccataaaaaaagactatttataggaaagttgataatctgataaaatgagtagatacatttatagaattagaaaggggtatttctatgcatgaaacgtttcttataacactaggcacaatattatatagtcttgctgcatttgggtgtgctatttattttacatatcgtgacaaaaatactacagctattatagggttccttgtattaagtttaggactattgttgataaacaagttagctgggaatatttcagaagttcagattggtaactttacccttcgtgctgaacaggtaatagataacttagaaaataaagctaatcatataattgataaaatgaatgatagttgtgatgaaataataaaaaagatagaaaaaactttagataataagaaataataaagttagcagagagaataaaaatctatatgaaaataggagatagatagattaccaaataaaatttttagatagattattatagtaagtaaaagcaactagttatgcagttaatctaaaaaaataagaatagttagacaatgtattgatattgtatagaaacattttcattactaaaaaataactagtaattttttagtaaaagtagatgagcacacacacacacacacacattaagcaagtccctgacgcatcgtattatcaaggacttgcttcttttgtgtgtgcataaactatgtttttattaactctatagtactataagtatcttgcatttttaatagaagattttcagtacgttttagctgctctgtaagaagatgaaggacatttccctccactgtggcttcagaatctacaatttataaaagcgatgtaaaagtagagatagatgtacaagcattaaagaggagtcctttaaaatcagttacattttctcctttgaggagcttttgttcacaggtaacagcaagagaaggaaagtagtagcaacgagtttcactagggatatcatcattatcatacataacatatgtatgttttgtatggctttcttgtttttttgtttctttattaggtatagataaatctatatttgaagaagaatctgataatgtttttacagcttcctttacttgatgttttaccatttctaaatcttgtgttgctttatggagtgtaatggtaagttctgttagatctgaatgaagttttaatggtatatatgtgtcgtgttgtatagtgtttaataatatatctggcataattgtatctccttagcatggaaaacctacttatatataaaggtgtaaaagctgcctctctatcaggagggccaaccgccaaggataaagatgttctgaggcatctaatatagaagtacctaaccaaagagtaatggataagtcaagtaagaaaaaatataatatagtataaagttagttacatataaagaatataaagaagatgtagttctatttttttagatgtattaaacagtgctatatttattggaaatacaaagcattatatctttttcattatataaaagacatagctgtaatcatctgaattttctttatataaatcgatttcggattgtattagtgctataacttgttgagctttttcatcattattataggtagtcttcattctttcaagatttttttggagaggagcatagtaattttctttccaattacttttaggtaaaacaaaatgtcctaagactttatagcctgcagattgaattttttgtaagttgttctcgattgtatcgatttcagggtaagcttcattccaaaaatacttacttgcatctgagtattgatctattaaccagcttatttcagagcaaacaaagtatccgttattttttagaaattttttccagtcttttaaaccagtttgaaatcctgcaatatatattgaaccttctgaccagataagatcaaagctttctggctcaaagtccatttcaaacattgacatcacttttggcttgatattgtttgtagctttgctttccagttcattgatatattgttggttattatcaatagctattatttcagcattactaaaatgcttagctagtaaaagagtactttcaccaactccacaaccaatatcaagaatctttttaggtaaaaagtcagcaggtaaaagtttaatagcttgttgagtactttcagtacttcctggagcaagcctgtttaatccatcaaatgcttcaaaaagatattttttcatgccttaattgtagacaatgctagattttaaaacaattatattttgaattattctaattggagctccttttatcatttgtacctatattactagtcattaggttacatttgttagcctacctttaaaactatttgtattaattatttttcattgttgttttaatcttatgtttcacattaattaaataaaaaaatgtcccccaattaaggaggacacatatactatttttaaattgtctataagataattaataatactatggatagataataactagataaaaaaatgaatcaaatgaagtaaaggtggcgtccccaaggggatttgaacccctgttgacggcgtgaaaggccgctgtcctgggccgactagacgatggggacgcatcagcaagttgtcttaatacaagcatgcttctactgaacttgctaaattgagtcaagctttttttgataattctgtgtagcttttctatatgttatctattattataaattaattacaataatttatataggttatatcttttttcttttttatggtttttcttgcagtataagtgaaatatctatatggtatatagattgtataggaacatattgtagtttttacctgattattttttatgaaggatatcttgcttgagtaataatataacaaataataatcttagaaatatagctattatagcacatgttgaccatggaaaaacaactttagttgatgccttatttcgtcaaagtggtatttttcgcgaagatcagcaagttgatgatcgtgtcatggatagaatggatcttgaacgtgaaagaggtattaccattgcagctaagaactgtgctgtgacatggcaaggtataaaaattaatatcatagatacaccaggccatgctgactttggtggtgaagtagaacgtgcactttcaatggctgatggtgcaattttacttgtagatgcagcagaaggtccacttcctcaaacacgttttgtgttaaaaaaaacacttgaagctggattaaagattattgttataatcaataaaattgatcgaaaagatgcacgagttcaagaagtccttaatgaaatttatgatctttttatagaccttgatgcaacagatgaacagttagaatttcctgtattgtacgctattggtagaaatggtgtggcaatgagaactttggatgatgcacaagaaggccttgttccactttttgagactataatagaagttgttccaggacctaaatacgatcctaatgaaccattccaaatgcttgtttcagatttgagctattcagactatcttggacgtttatctgttggaaagatatctcatggaagtgtacattcaaaagatgcacttgtttgcatgaatgaagagggtgtagctattcctcttcgagtaacaaaattacaatcatatcagggaataacacttacagatatagaatctgcagaacctggggatattattgttattgcaggtcttgaagatgtttctattggagatactatttgtactaaaaatgaaatacgagttctaccaaggttaaatattgatgaaccaacagtagctatgcgttttactattaataattctccattagtaggaaaagaggggaagattgttcagtcaagaaaaatcagggaaagactttttaaagaaacactaactaatcttgctattagtgtagaagaagctgaagaacgtgatagttttattgtaaaaggacgtggtgaatttcaattagcaattctcattgaaacaatgcgtcgtgaaggttttgagttatctgttggtagaccagaagttattctccaagaaaaagatggtgaacgacttgaacctgttgagcatttgtatattgattgtgatgaatcctttatgggagtagtaacagaaaaaattgctcaaagaaaaggacggatgttaaactgtgttaataatggctcaggtcgtgtaaggcttgagttttcaataccatcaaggggtcttattggatatcgtgatgaatttcttactgatacaaaaggtacaggaattatgaattcgttattatcaggatatgagccctggagaggagattttcctagtcgttttacaggttctattgtttcagatagggcaggttcagctgttgcatatgcattatttaatcttgaaccaagaggtgaattatttattgtttcaggagatcctgtctatgaaggaatgattataggtgagcataatcgtgataatgatatagatgttaatcctataaaagagaaaaagttaactaacttacgtacatcaagcaaagatgaagctattattcttactccagtaaaacctatgactcttgaaaaagcattacattttgtaaaggaagatgaactagttgaagtaacaccaatttcgattcgtctaagaaaagcagaattaagtgctcaaaagagacatcaaatagcaggaaaaaagaaaacaggaaagtaaagacatattctttttctaagaaatatgtcttattgttgtagtattattttttgttagacgttgaataaaaagtgaataatatcaccatcagtaacaatataatccttaccttctgttcttaacactccagcattacgacaggctgtttcagatttgtattgtagaaaatccgaaatactcatgacttctgcacgaataaatcctctttcaaagtctgaatgaataacccctgcagcctgaggtgctttccaacctttttcaattgtccatgctcttacttctttttctcctgctgtgaaataactaataagacctagtgcattgtagccggtttgaataatttgaatgagtccactttctttgatatgataactattaagaatttcagcttgttcttcatctgataatccttgaagttcttcttctatttttgcacaaatgacaatcatctctgtatggttcttttctgcaattttttttactgaatttagatagttattaccgtcaattaaattagtttcatctacattagcacagtatataatacgtttatcagttagtaagcctaactctttccataatgaacttaatttttcattttttttctcattaaatgtagatgcagggtttccactatttaagtgaagaagaagaagattcatttcttcaacagccactttagcgtctttattattttttgctattttttgaaggcgctctatacgttgtgtcacagtttgtatatctgctaataagagttctgtttcaatggtttcaatatctctgatggggtcaacatttccttcaacatgtgttatgttttcattatcaaaacaacgtacgacttgaagaataacagagcattcacgtatatgggccaaaaattgatttccaagtccttcacctttacttgcaccttttactagccctgctatatcaataaagtctacagttgtttgaataaccttttgaggagaaactatagatgctatttcttcaaggcggtgatcaggaacaggtacagtggctttgttaggttcaatagtacaaaatggatagtttgctgcttgagcattttgtgcttttgttaacgcattaaataaggtagattttcctacattaggaagacctacaataccaatttgtaaagacatagtttatctccaaacgatttatactattaactatgatttgttaattagtacaaagaaaataatatgttttgtacaaatataataagctatattacagcaataagatagtaaaaaataatttgactttacttataataagatagctaagtaattagaatttttattttattattatctatggttagagaaaaaattgttatgtttattttttgttaaaagatatgttaatatttagttaccataaagaaattattgatagttaggaggtgttatgcagcgttgtggtctttatatcatttgtttagtgttatctataggtatgataagttgtgcaaattttagtgcttcttcttttggagggaagcaaattcgtagtgcacatattgttgaatttggaaaagtcgtttctgtaaaacctgttgaactagaaggaaatacaccaattctaggtactattactggtggagctgttggtggtgttcttggtagtttaatcggtggaggatcaggaagaatattatcaactgttgttggtgctggagcaggggctgttgctggaaacattgctgaaagaaaaattacaacgcaacaaggtctcgaaatagaagtgaaacttgataatggtcaaattatttctatagttcaaggtgctgatcaatcttttagtcctggcgaacgtgttcgagtactacgtggaagtgatggttcggctcgagtatcttcaatatagagaacaaaagtattaagtgaaaaagacaaaatttgttaaataaaaaaacttgttactattaagtaacaagtttttttataaaaagaataacttttttatgatgttggttgttttgtttgttttttcttagtaacaacaggaattgtttcgctaaaagctaatggaagaacttcatctatatggcttacagtatgtattttaatctttttctttaattcttgaggaatttcttccagatcttttgtatttttagtaggtataataacatgtccaagacctcttgcaacacctgcaagaactttttcttttatacctccaacaggaaggactcgaccacggagggtaatttcacctgtcatacataaatctccacggacagatttacctgttaatgcagaaataagtgctgttgttaatgttacaccagctgatgggccatcttttggagttgcacctgcagggatatgtatatgtatatccattgatttagcaaaatctggtgagatattaagactagatgcttttgaacgagcataacttaatgctgcttgagcactttctttcataacatcaccaagttgacctgtaagaagtaagtttccttttccttttactgtagatacttctatatataaaatttctcctcctgctggtgtccaggcaagtcctaaggcaacacctggtggaagtgttttttctgtgtcatcatcaataaatcttggtattcctaaaaatttttcaatttggtttgtagtaatacggaatggtggttttttcccttcagctttttttcttgcaaccttacggcatagagaacctatttctctttccatatttcttaatcctgcttcacgagtatattctctaataattttttcaaggcaggtgtcagaaatgataagctcgttttcttttagtccattttcttttaattgtttgggtagaatatacttacgagctatagcaagtttttcctgttgggtatagccaggtaatgatatgatttctaatctatcctttagtgctgcaggaatatgttctaagtgatttgctgtgcataaaaaaaggacttttgataaatcaaatggtacattgaggtagtgatcactaaagttatggttttgctctggatctaatgcttcaagtaatgcagaagatggatctccacgaaaatcattccctagtttatctatttcatccaagagaataacaggatttttagttcctgcttgtttcatagcttgaataagccttcctggcattgcaccaatatatgtgcgtctatggccacgaatttcagcttcatcatgcataccaccaagagagatcctttgaaattttcttccaagtgacttagcaatagagcgtccaagtgacgttttacctacaccaggaggtcctgcgaaacaaagaataggaccttttgactttggattaagttttcgtacactgagatattcaagaatacgatctttgatttttacaagtccatagtgatcttcatttaagattgtttttgctttatgaatatctagttggtctttggatgtttttttccatggaagctcagcaatccaatcaagataggtacgaattacaccagcttctgctgaatcggcatgcattgttgaaagcctacgaagctgtttatcgacttctttacgtacttctgctggtaatccagctttgtttaaggcactagaaacttcttcaatttcttcatcagcatcaatagcatcacctagttctttacggatagctttaagttgctctcttagaaagtagtctttttgagctttatccataccttcacgagcagaagtttggatttttacttgcattgttgcaacttcagcttcatgggtaaggtgtgtaatgacaaggtgaagtcgatctataggttcaagacattgaagtatttcttgtgcttcttctgttttgagtcgaagattggctgcaattagatctgcaagtcttcctggttcattcacattagaaagaactcccataatttcgccagtaggaatacctcttaatgctagtattttttcgcattgttcacgagcataacggagaagagcttcctgttctgttggctttacggtaggttgaggttcttggagtaactcaactgttgctgtaagatagccatcttcattatggatcgtaagacacctagctctagagataccttgtacaagagcttttagacgtccatcaggcattttaagaagacgaagaataagagcaacagttcctacggaatagagatcttcttctgtaggattttctatttgtgaatctttttgggcacagagaaaaatatgttgtccatgtgtagtagcagattcaacagcttgaatagaacgttctcttcccacaaataaaggaacaatcatatagttaaatacaacaacatctcttaggggcaaaatagggatactcgatggaatttcttgtggctgaacatcatcttctgtcccagcatttattttcatcgccccctcctcttgctgttgttctgtttcttgattgtatggtgcaagagaatttttggcaatactatcatcatttgtatcaaaagtcataatatattcctaagtatacgggattatacttttggttttacagtaacccatcatttcggatactgtaacaatttttttctgtcacaataatatgatcaattaaccgtaagtttatactttgtgcaatatgttctaagtggcgtgtaatttctatatcaaaacttgatgcatttgaagagcccccaggatgattatgtactaatataaacccacttgctttcctttttaagactatttctattgtatctcttggatatagaggtgaactccctatggttcctttacttaacctttcccagcttataagtctgttttgtgtatcaacagttgcaatccatacttcttcatgaggacaacctgtaaatcttgctttagctatttctgctacaattttaggtgtacataattgaattttttctctcacaggtgtttcagcataacgtgcaaaaatttcacgtataagtttccaaaatgcacttagagcttcaccgaattgaggaatagtttcaagttcacctgggaatgcatcaagtgcacctcttattgagccaaattgttgtaataattttttagccaatggctttgtgtccttgcgtaaatgtacatatcctaaaaataattctaaaagttcatattctgccatctcagatgggtcattacataaccgttttctgagtctagctcgatgaccaaggtgatgaggcttgtcatttggcataaattagctagtccttgtatctcaagggaaaataacactatatcctataagccctcttgtcgtctatagaagattgggcattatctgctgatatctatgatgtttcttgagccttggtaaaaagtggtaacagtgtagaaataagtgtttcaagtgcctgtatggaagaaccttctcctgatttaactgtaacctcagcaaaataaagggcatcccacatttttgttattccttttattccaatatattttgcaagttgtgtttttttagataattcgtttggataacctgttacagtttctcccataagtagttgccataatgttttggcttctctttgtagcatagtaagaataaaaaagagtggatcttcttctttttgttgttcatgtaagatagatgtccatacttgtaatgcattacctgattcaagctgttttaagaatataaaaatatcaaatgtatttgctgtatgactgattacatttaattgttgagtagagataggtaagctatcagaatgagatagcttaatttttaaaagttcagactttatagttgcagcatcagtaggtaaaagatttgaaagtgtttctaatgtatggggttcaaacgtaagtcctatgcttgtagcttgtgtttttataaattgttttaaattgcgttcatcaacaccaggagagctccatatccatttttgtttttgtgcaaaaataaaacatggaagtttttggatatgagcaggaagtttaggttgtcttttttcccatggagcttctaaacaaaatataagccatagatattggtttggtttgctaataattgatgaaatatttttccatatatcaacaggaagaaggtgtgcgtttcggaggacaactatttgtttatttgtaaaaagattttgtaatgtaaggttgtcccaaaatttttttggtaattcttcatctccccagtacacagatttttcccacttatttgacacatattgagcagtaactagttcctctaattgctgttgaagaattgtactatctggacatatacagaatatgaatccttgatgaatcataagataagtgaaattaaagattaaaaaggttgttgaatttgatctattgctcttcgtgttgtcatgaatatgacttcttgaatagcttgttcttcattagcatgttcatagttttcactataaattacaggtcctgaactccaaatttctgtattagtttttccgtcaaaaataatgagctccatattgacagttgctgtaaatagtaagttatgttgtttatattctccagcacttcttatttgaaatgagtttatacgtacagtaagagtgaagtctgaaggtccagagtcaacccaaatagcaagctttcgtgcattaatatcattacgaacttgtgttcgtatcatataaggaagccatgggtagagtgtcgattgttcgatattgttcatacaaagagtttttgttccatcaccaagaatagtgcgtttagaaaggtatccttcttgcccttgccaagtgtacccacaaccagttaaaaatattgatatataaaaccataaggggatacaataaaaagtagttgtaatttttttgttatacattgagctactcttatgttgtaactatatttatgattttgtttggaataataatatgtttttgaatcgtttttccttcaaggtattgagtaatctttgtatcattaaaaataatgtgttctaattcttctttggagagatccattggtacttcaaatttatttcgaactttcccatttatttgaacaactattgttacaacatcttttaaaagggcctggggatcccattttggccaaggttctaaactaatagacgttgagtgccctaaataactccataattcttcacaaatatgaggagtcattggtgataataaagtaagcacagttgctatagcagatgaaagtatatttttcccttcaactgtaagaataagttcattttttgagagataaagcgtatttacaaactccattattgaagcaatagctgtattaaattggtatttgttttctatatcttcactaactttttttatggttatatgttcttttctttttacatcttttgtaagggcagtagttgtttctataactgttgagttaccagcatgtgttgtatgtatgtgtggttgtacatcaataaaaagtctccaaactctatgcagaaatctataagaaccttcaatccctgagtcactccagtcaaagtctctttcaggaggggcagcaaataaacaaaaaagacgtatagtatcagcgccatatatatttatcatttgatttggatcaactatattccctttagattttgacatcttagaaccatcttttataaccattccttgagtaagtaattttgcaaatggttcatttatattggagggtaagtaacctaaatctctaagaagttttgtgaaaaaacgagaatatagtagatgaagaatagcatgttcaacgccaccaatatattggtctacattgagccaatattttgctattgatgtatcaaatggttgttttgtatttttaggatctacaaaacgagcaaagtaccatgatgaatcaacaaacgtatccatagtgtctgtttctcttttggcaattccaccacattgagggcacatacaatctatgaagcttgactcttgaggtaatggggagcttccatcttcattaatggtaatattagtgggaaggataacaggtaattcgtttttaggaacagaaacaacaccacagtttttacagtatataatagggataggtgttccccaataacgttgtcgagagatattccaatctcgtaatctccaagaaacaacccttgttgctttacctatcttttcaagatattgagtaattttttcttttgcttctttgttagtaagacctgtaaattgccctgaatgtataagcgttcctaaaccagtccatggttcaactattgtatgttcatttatttgaagttcatctggctgtataacaatagaaatgggtagattatattttttacaaaaatcaaaatcacgttgatcatgggctggtacagccataatagctcctgtaccatagtctgctaatacaaaattaccaatccagatgggtattttatctccagaacaaggattgatacaataacgatcaataaaaataccttcttttgtgagtagattagattgacgttctaatctatccatatttctcattttttcgataacattatatagtttttctttttgcggagtatcattaagtaaggtttctaatataggatgttctggagcaagaataatagctgttgctccaaaaattgtatcaggtcgtgttgtgaaaatagtaatgaagtcttgagaggattcaataggaaaagaaatttctacacctgtggatttcccaagccaattttcttgcatagttataacacgatctggccaggaatatttaagagttgtaagatcatctaatagctcttcagcataatctgtaatttttaaaaaccattgtgttagttctttttgaataatagatgtatcacatctccagcaacttccttcaataacttgttcatttgctagtacagtattgcaagatggacaccagttctgaggagctttttttcgataaactagtcctttttcaaagcagtcaacaaaaaaaagttgttcccattgataatagtcaggatcacatgttgctatttctctttgccagtcatatgaataccctaatcttttcagttgggcacgcatttcattaatatttgtatacgtccaatctgcaggttgtgtatgatgttttattgcagcaagttctgctggaagaccaaaagcatcccatcccatagggtgaaggacattatatccttgcattcttttaatacgggcaataacatcacctatagaataatttctgacatgtcccatatgaatgtttccagaagggtaaggccacatttcaagtacataatatttttttttattaggatctatgtcacaagcataggcgtgttgttcttcccagtaacgctgccatttcttttcaataatgttaggatcataattagaatgcattatcatagagtttatcttaatttttatctatatagttgattttttctgtttcaatagcttttattatagcgtctaaaataccatttataaactttctagctttttcgtctccaaaacaagtagctagttctaatgcttcgttaagagatactttaggaggaacgtctggacaataatacatttcaaatgtagcaatacgtagtaatgttaattctatcttacctaatcgatcgactcgccaattttgagaaaattgacttattattttgtcaagtctagttacattacgccagactccctcaacaagttgccaagaaaaacttatttgtgtatctaattcagttattataccagtatttctttcttctaatgggttaggtagattaagaaagatttctttgagggtttcaattgtatttatttgagtaaaatggagactataaagaacttgaaaagctttagttcggtctattcgtctagaatgttttttattagcaggcattttttttgcctatgaaattttttggatcacacggatactttcaaggacagctaatgtagcatctgatcctttattcccagcttttgagccagcacgttcaatagcttgttcaatagtatctgtagtaagaacaccaaaacctatagggacgtctgtttggagtgaaacattgactacacctttagtagcttcactagcaacatagtcaaaatgaggtgttgaaccacgtataatggcacctaaaataatgataccatcaaattttgatgttaatgaaagttttttacatacaagaggtagttccattgctcctgcgacacgaacaattgtaatattttcttttgttcctccatggcgtagaatacaatcaatagatccagaaataagacgatcaacaacaaagtcattaaatctacttgcaagaatagcaaaccgaagtcctgaagcatcataatgtccttctattacatttagttgtcccatttcattctcctttattaaagttagttataataagccatactataattatctgttaaacttttttatgaagaattgatagtaacaggttaactcctttgacatgttgtacatagatgtaataagtgtcctaatttttcttgttttgtacgtagatatgataagttagtcctagaacttgctatttcaagtggaacacgttcagtaatatgtattccatatccttcaagtccaataacttttcgaggattatttgtgagtatacgcatacgcttaatacctaaatctacaagtatttgggctccaactccataatctctaaggtctggtttaaaccctaatttttgattagcttcaactgtatcatatcctttatcttgaagagcataggccttaattttattagcaagtccaattcctcggccttcttgcctcatatatacaaggacacctcgaccttcacgttcaatttgtcttaatgctgcagaaagttgtccaccacagtcacacctaagagagtctaaaacgtctcctgtaaggcattcactatgtactcttactaatacaggactatcatcctctgtattgttaacattaccttttattatagcaagatgagtgtctgaattaatgccattttcataagcaatcacttcaaatgtaccaaattttgaaggtaagttagctctagcaacctgctttacagtaagcttaccaagcttcatcttataacgaattatatcgctaatagtagttatttttaagttatacttagatgcaaagatttctaaatcagacatacgagccattgaaccatcatcattaagtatttcacaaataatagctgctggctttaaacctgcaaattgtactagatctacacttccttctgtatggcctgctcgagtaaggacaccaccaggttgagcgcgtagtggaaacatatgacctggagtgacaatatcttcaggttgtacgttatcatcaatagcagtcaatgcagtatgtgctctatcagctgctgagatacctgttgttactccttgtcgtgcttctattgatacagtaaaatttgtaccaaactttgaattgtttacttgtgacataggagggagctttaacttatctatgagcgtagattccataggaagacaaacaagacctctggcatattttgtcataaaattaatatgctctggtgtaacatgttgtgctgcaatcacgagatcgccttcgttttcacgatcttcgtcatcaacaagtataatcatattcccttggcgaatatcttggatggcatcctcaacactataaatagacatattgagatctctttttttctttaataaaaaccatgcttatgtaaaaaatctaaagtgatatttgtagttttgttttcattagaatgtatagaagatatgataggatttagcatgttgtaaatatattttgctataatgtcagtttccatatttacatgtgtacctactttccaatttgaaatagttgttatattccatgttgcaggaataatattaacttcaagaaaaccagagccacaattatttacagttaagctaattccatctaatgtaacagaacctttagaaacaacttctttactaaattttgaaggaaaaataagtttaatacagtttgatttaccttgtttttctatagattgaacagtagcaacacaatcaatatggcctgttacaatatgtccatttaagcgttcaccaacagcaatagattgttctaaattaacagaatttccaacaaccaatttaccaaggtttgttctttggagtgtttctaaagaggcgtatacagtaaaagtagtgcttgtatattgttcaacagtaagacatgtaccatttatagcaatggattcacctgtggagataatttttagagggaaaagtggttctactgtaatacgtacttctttaccataatggttaatagagtaaatatttccacaaccttgagtaacacctgtaaacatagattacatttccggcctaaaagtgagatggatatctgaacctgataattccattgtatgtattttgagggaaatagcatcatgtatagttaatggatttctaccattaactataggtaatgcattgttatctcctaaaattttaggagataaataaatatgaagttcatcaacaagattagctttgagaagtgaacttcctaatttccctccaccttcacataacatataaagacatccttgtgttgaccttatatgttctgtaatatctgtcaagatagcagatagatcaggtgaccaattttttaatgtaactattttaacaccttttttacgtagtgttgttgcctgttgtgttgatccgctttgtggcgttgtataaataatggtttctgttggcctactattaaaaagatagatatcttgttgttcaggaagtgttgatgtaataattatagctaatggttgttgtatcttattattattattattattacgacaagttagttgaggattatcgagttttaatgtattaccgccaattaaaatagcacctcctacttttccaacattctctcttaacttatgaactttttgtcgagatacttcagatgaaatccatttagaatgtccagtactagtagcaattttaccatctagcgtagttgcaagctttagtaatatatatggacgagaagtgttttgccatgttataaaatcagcaattagtgcttggcattctttttctaagattcctacttcgacagttatacctgcagatgttaatgtatgtacaccacccgaggcaagagtagtaggatcttttgtacctattataacatgctttatattgttatcaatgatggcttttgtacaaggaggtgtcttaccataatgattacaaggttcaagtgttgtaataagtgtacagtctgaaagattaatatgtttattttttgcatcattaatacaaagaacctcagcatgtggtcctccatataaagagtgaaaaccttctgcaacaatctttccattttggattaatacagagcctacaacagggttaggtgctgtatcccatcgacctttttcggcaatgcttatagcatatttcatagcataatcatatggatgattcacttgtaaactcaaaggtagaattattttgtttagatgtaagttgaattaattcaactccagcttcattaagcattttttttgcaagttcgtcagggtatggaatagtataccaaatagtagtaatattgcaattaataagcatttttgaacaaataagacatggttgatgtgtacaatatacttcagcattatttaatgatatagcatggatagcagcttggataataatattttgttctgcatgtaaaccacgacaaatttcatgtcgttgacctgaaggaatgcctagttgatctcttagacaacctacctctgaagcatgaggaagttttgatggtgctccattatagcctgttgctaaaatccttctttctttgacagcaattgcaccaacttttttacgaagacatgtcgaacgttctgccactaaatgagcaatacccataaagtagtcagaccaagataagcgggacatatcaaatccttacatttgtatcactaaaaaaagatgaagaaagataatgaatatctgactctttcttcatttttaccatgaaaagagtggaaattgacgagcaaaataagtaacttctttatttatttctttaagttgagtttcgttattgatattattaagagcagtaacaatccagttagcaacctttatcatatcttgttcacataaacctcgagttgttaaagctggtgtgccaatacgaataccagatgttacaaaaggagaaagtgtttcaaaaggaactgtatttttatttacagtaatgccagcttgatcaagagctttttctgcatctttacctgtaatttttttatttgttaagtcaattaatagaagatgattatctgttcctccagaaacaaggttaaaaccagcatccaaaagttgttttgcaagggttttagcatttaagattacttgtttttggtaagttacaaagctagcttttgaagcttctcctaatgctactgcttttgctgcaataacgtgcataagtggcccaccttgtatcccagggaaaatttggctattgattaccttccccatatcttctgtagaaagaatcataccaccacgaggaccacgtagtgttttatgtgtagtagttgttgttatatgtgcgtatggtattggagaagggtgtaagtttgtagctacaagcccagcaatatgtgccatatctacaagaagttttgctcctattgtatcagcaattgaacgaaatttagaaaagtcaataatacgtggataagcactagctccagctacaatcagttgtggtttatgtttttctgcaagctttgctacttcttcatagtcaataagtcctgtctctttgttgacaccatacgatacaatattaaaaagtcgacctgaaaagtttacaggacttccatgagttaaatgtcctccatgagataaattcatacctaagattgtatccctaggcttaatgagagcaaaataagctcccatattagcttgacttccagagtggggttggacattagcatattcactatgaaaaagtgctttagcacgttctatcgctaaattttcagctatgtcgacatattcacaaccaccataataacgcttcccaggataaccctcagcatatttatttgttaaaattgttgattgtgcttctcgaactgcagttgaagcaatattttcagatgcaataagttcaagcttatctatttgtcggccactttctaagataattgcttgggctaattcagggtcttgaagtattatttgatccatttcaatatccttcaacctaagaaaaaagagtggttgtttttataaaaatatttaattaatataaaggattagcattcaaatttttttaaaattaaactagcatttgtaccaccaaaaccaaaagaattacttaatacatattgagggttaagttcttgtggtccattaggcatatagttgagatcacaatttggatcaggtgtagtatagttaatagttccaggtactatacctgtatatagagacattacagaaaagacagcctcaataccaccagcagcaccaagcaaatgaccaatttgagatttattactacaaatagctatgttgtatgcatgattaccaaatgtttttttaatagcaactgtttcatacatatcattgaggaaagttgaagttccatgtgcattaatgtgagtaattttttcaggtgctatttgagcattttttaatgcttgtttcatagcaaaactcattccttcagcatcttctcctggtgctgtcatgtgacttgcatcatctgatgtaccaaagccaataacttcagcataaatttttgctccacgagctttagcatgttcaagttcttctaacataagataaccagtaccttctcctgcaacaaatccatcacggtttttatcaaaaggtcttgatgcttgagttggcatatcattatattttgttgagagagcttttaatgctgaaaaccctgagatacaaagttttgtaattgttgattcaacaccaccagtaatgcaagcaatacaacgacctaactgaatttcagagtatgcaagaccaatagcatgtgttcctgaagcacaagcacttgttacaacaaaattagaaccttttgctccagtaaaaatagctacttgtccgggagccatattggatataagcataggaatcataaatggagatatcctattaggtcctacttcttgaagtttttcatgaaaaacttcaatagtttttagaccacccaatccaacaccaagaataattcctacttgataagcatttgcttctgtgatttgaagtccagaatcttttatgagttcactagcactagctacagcaaattgcacaaaacggtccatccgtttactttgttttggaaggataccatagttctcaggattaaattgttttacttcaccagcaatcttgcatgcgtattcactagcatcaaagagcgttataggtgctattcctgattctcctgctaagagcttactccaactttctttaagattattacctaaaggggttatagcagaaagcccagttactacaacacgtttttggctcatgtatactccttaaaattaatcaagcgcctcatgattaggagagacgctctgacacaacacataaaaacttagtttagctagacattgtcctgtacactattaatataatcaatagcatcttttactgtaagaattttttgtgcatcttcatcagcaatttcaagatcaaaagcttcttccatagccataattagttctgttaagtcaagagagtctgctcctaaatcttctataaacgatgcttcaggctttatttcttcagcagaaacaccaagttgttctataattatttttttgactttttcttcaacagacatgaataagatcctccaactttttagtcattttaatgttatgagactatatttaatatttagattttttaggttttaataaaagataggaatagtaaaaagacatcaacaatacataccaccatttactgcaagaatttgtcctgtaatataaccagcacctggagatactaaaaaaagtatagcttctgcaatatcttcaggtgttcccaatctttttaaaggaatagattcttgatatgctttttgtacatcatcactaagagttgctgtcatatcagtagcaataaatccaggagctacagcattcactgtaatattccgactagcaagttctttagcagcagactttgttattccaattaagccagcctttgctgctgcatagtttacctgacctgcattaccagattgcccaactacagaagtaacatttataatacgtccatatcgttgttttgtcattattttcgctgcttcacgcatacatataaatgcacctctaagattcacgtctatcacttgatcaaagtcttcatttttcatccgtaataaaagagtatcttttgttattcctgcgttattaacaagtacagaaaggtttacttgttctttaacttctgtattaaaaaagcgagtaatatcatcggcattactaacatcaaggttgaacatttttgcttttccaccttgggattgtatctgttttataacagattcagcttcttcagatttactaacatatgtaataaatacttgataacctgcttttgctagtgaaagtgccgtagctttaccaatacctcttgagccacctgttactatagctgtagagattaaattagccataagatatacctcacttcttgtttgtctacttagcctaaagtaaaaggaaattcaacaagatattttttcttttttaaggttaaattttttgggtacatataaatatgattaataaaagttaagtatagctgcaccccatgtgaaacctccaccaaatgttgctaaaagaacacgcattcctgactgaatacgttgctgttttattgcatctgcaatagctagtggaatggatgcagcagatgtattaccatatttatctaaagttataaatgttttttcatgaggaatagagagtctagaagctgcagcttcaatgatacgttggtttgcttgatgtggaataaaaagatcaatgtctttaaaagacaaatcatgtttttgaagaatagtagtgcaaacttctgtaagatttctaacagcatgtttaaaaacttcttgtccttccattttaataaaaaatgtgtcgtcaattgtatcacctaaattatacttctttgatgttcctcctccaacagtaagtaaagaagtatatgatccatttgcataacagactgtgtcctgaacttcagctattgttgaaagtgttttttttccttttaaaactaaagctccggcaccatctccaaaaagaatacatgtacttctatctttccaatttacacgtttggatagagcatctgaaccaataagaaggatacatgctgtagggtcattagcaatatgttgaacaatattaagaccataaatgaaacctgaacaagctgcatttatatcaaaagccataggtccaactattcctaattttttacttattacacatgctgtgtttggacacaaaaagtcaggagtacaagttgcaactataaggtgactaatactatctgtagtaatttttgcattttctaaagctagttttgctgcaatataacctgcatctgaagtgttttcatagtcgttaagtatatagcgagatttaattcctgttctagtgacaatccaatcatttgttgtgtctacaagctgacataaatcttcgtttgtaagaatagtagaaggggtgtaggaaccaattccttcaatataaagtgagtttgttgtgaaagggatattcatttattaatactttattataatagaatttaaaaataaactatcaattatggttagattcactgcattgatagtacaaattggctagcaggaatgaccaaaacgggttagttcttcattaagaccaatagaatctattaggcgtttatttgtttctttttgttcaaaaagaacagccattttagttgcattacatatagctttttcattagaggatccatgactaacaataaaaataccttttaatcctaaaagtggagcaccgccatattctgcataatcaataagttttgaaaagtttttaaaagcatttttagcaaggaatgttccaatttttgaaaaaatcccagaagaaaatagttcttttcttaaaacacgacttaaagatgagcttaaaccctcacttaattttaatgcaacattaccaacaaaaccatcacatatggtgacatcaacatttccagtaaaaagatctcgtccttcaacatttccagtaaaattaatatcttttgccatttttaaaagttcataagcttcttttacttgtgtatttccttttccttcttcttcaccaatactaagaatacctactcgtggagattgaatatttaataaatcacaagcaaaagtatgtcccataagaccaaattgaaaaaggtgatatggtttacagtcaactgtagctccaacgtcaagtaatataagaggatttttttcagtaggcaggattgaagctaatgcaggtcgctctacacctgtgatacgacctataataaacatcccacatgcaacagatgctccagagtgtccagcacttacaataccattcgctaaaccctctttaacaagtcgacaagcaatctgaatagaggagttttttttccttcgaagaatatcggaaggtttttcatccatgtttgctacatcagatgcatgaacaatttctatttttgtattttttacttgaagtaatgcaagttgatcttcaatttcaggtgtatttccaacaagtataatttttgctcctgttatttgggcagctttaactgctccaggaacaactacagatggaccataatctccacccattgcatcaatagcaattgtaatactatgactgttgagcattgattgttttaggctttgtaacttgacggttacgatagacaccacagtttgggcaagctgtatgaggaatagatggttctccacatcctgtacagtatataatagtaggtatagctactctgtcatgagcacgacgcattccttttcttgaacgtgattttttattttgttgaacagccattaaggcactccttacaatttattaaaattaatagatggatcttatttaattactatatttttaaatgctgcaagacgtggatcaccttcgtctttgctacaattgcaagtttctttattgagatccttaccacaactataacataatccattacagtcaatattacaaagtggtttacttggtaatgaaaggacaaattcttcccataaaatttcagctaggttaacctcaattattccattggactgacgtataatattttcatttatatctttattaataacctctttcccatctatattaagagttggaagaggctcaacatctctaaaagtatgttgaatagttattaaaacgtcagtagtacacctattacaaggcatgactattttcccagaaattgatccatctaccatgcatccattttcttgtaatgttactgtaattataccagaaaacggttgaacaagtttacaatccatattgaattgtttaatagaattttcccatattgatggagagtcaagaacaaattttttgctctctgatgtatcaagtttaacccagaatgagtccatctttataacctcatgaacagcagtctttacctgttgtcattagtggtgtcaagcttgtttgtaactaatgaaaatatataggtgagagataaagctaatataacttgttacttatttttttgtattaaaaaataaggtagcaagttttctgtgtggggagggtaaaggaattgtttgtagctctttttgagaaacccatcgatagcttgaagctgagagtctggttgggtttggtaatacaacagaaagcgtattagttatattttgtgaaaagcaaatatcaaaacaataaagagtaatatgataatgagtatagttatgaataattgttgtaataatgttttctatttgaatagaaaatcccagttgttcattccagttgcgaataatagcactttctggcgtttctccagtttctatgcatccattagggaattcccatagtcttccccagatattgttgtccaatcgttgctgaataaatattttttgattacattgtagaatgcctgtaaccattttaaggcgagtcgttggagtttttttagctaatactggacgactaagttgtgtcccatttattctagaattacacatactatagactggacatataagacacattggtttttttttacaaacaagtgctccaagttccataactgactgattaaagtcacgtgcattcttttttggcatgagttgcttgactaaatcatacagtttactttttgtaggctctttttttatatgagtgttaatatcaaaaattcttgatagtactcgttctacgttgccatcaatacaaggaaaatcttggttaaaggctgtactagcaattgcaccagctgtataaggaccaattcctggtaattctaaaatatcttcatatcgttcaggaaatgttccattatatttatgcataatgacttgtgcagcagactgaagatgccttactcttctataataaccaagaccttcccatgcagataataatttttcttcaggtgcataggctacagaagcaatatcagggaactgttttatccaacgtaaaaaatactcaacacctctatccatttgtgtttgctgcatcataacttcagcaatccatacatgataggggagatatgtttcacgccaaggaagagctcttttatttttataaaaccagttaagcaaagcttgttgtatttctttcacaatatagatctttagtaataattaattacatttattttactattgctaatatagtctattgttgattattttatatttttagactaaccagatcaagctgaactactttatacttaaggagtatatcctaatggcaaatcctatagttttaattgaaacatcatttggagatattctagtagaactttttactgaacaagctccagtcacagttaaaaattttttaaaatatgtaaatgaaggtttttataaaaatacaatttttcatcgagtaattgatggatttatgatacaaggaggtggattaaatattaaaatggaagaaaaacaaactgatgctcctatagaaaatgaggcttcaaatgggcttaaaaatattcgtgggactattgcaatggcacggacatctgaaccacatagtgctacttctcagttttttattaatactatagataatgattttttagactatcaatctcctgatgaagatggatatggttattgtgtttttggtaaggtcatagaaggaatgaatgttgttgacaagattcaaaaaacaaaaacgcatcaagttggaattcattctgatgtcccaaaagatattgtattaataacaaatatttcattatttgaataaaatagttgaatagaaaagagtagtaactagcactagttactactctttatagtgagaatttttttgaaaataaaaataaagatagaaagagtggtgcctggggacaggattgaactgccgacacggggattttcagtcccctgctctaccaactgagctacccaggcaatgtgttgcatctctaactgaaagtttgttacttagcaagcattttttataacttattagcataaacatcataaattcttataagacatctagcaatactatttgttaaatgtatttatgaaaatgaagtaacataagtttatagataacctaattaattattagcttaagttattatttatcttttgttttttcttcagctgggatgatcaccattgattcaataataacaggtacgataggaacatcattatgcataccaactgtatgagtaggaacttgctttataagatccactatattttgtccgctaataacttgtccaaaaacagtatatccataaccactaggagtaggagctttatagttaagagctttattatcttcaacattaataaaaaattgtgttgtagctgaatgtggatcatttgttctagccatagaaatagtatattttttatttaataatccatttgcagcttcattttgaataggttttttaattggcttcttttcttccatattttcagtaaaaccaccaccttgtatcataaatccatcaattactcgatgaaaaatggttttattataaaatccagattttacataaaaaagaaaattacctgctgttttaggtgctttctgtgtatcaacttctatagtaaacgttccataatttgtttttacaagaactttaggtagttccccagattgaacatcttttaagaagaaaaaagataaaatacaacttaatgtaaaaaaagaagctattaattttttcataaaaatctccacaggtctattaataatatttaactatgttttttataattttattataactataggtaaatattgatgctgagcacactagatttcaaatagcatttctaaatcttctttagtaagagatttccaagtatcttgtccaggaataattgcttctgcaacaccacgtttcatttcttgaagtttaaggattttttcttctactgtattttgacagataagcttataagaaaacacttgtcgtgtctgtccaatacgatgtgttctatctgttgcttggctttcaacagcagggttccaccatggatcataatgaatgacgtaatctgcagaggttaagttaagacctgttcctccagctttaagagagataaggaagacaggaatttctggagtgttattaaatttatctacttgttcaagtctatctttactagttccatcaagataacaaaatggaatatcagttatttgtagccagcttttgatcaattgaagcatctgtacaaattgtgagaacacaagaactttgtgtccaccttcaacaatatcaaagatcatatctttgaaagcttcaaatttccctgatgcaagacttccaatagagaagcctggcatatctactttgagtaggcgtggatgacaacatatctgtcgaagttttagtagtgcatcaagtatagacatttgactttttgcaatacccttagtttctatatcagcaagtacttgtgagcgaagttttttagtaagtgctgtataaagctcgttttgttcatctgtcattgcacaatatgtaatattttcaatttttggtggaagatcttttgctacttctgactttgtccgtcgtaaaataaatggttttacgcgagttcgtaagtattctaaggtttcattatcaccatcgcgtataggtttaataactccacgttggaatgcatgttgtgaaccaagaaatccaggcataaggaattcaaataatgaccataattcaaataagttattttcaataggagtacctgataagcaaagacgcatacgtgctttgattgtcctaacagacttagctgtaattgtatttggattttttatattttgggcttcatcaagaataatagtattaaagtaatgtttttctaactcttctaaatctcttctaagtagagcatatgttgttataactaaatctgaatttacaacttttttgaacatgccttcacgtcgtgttccataaatagttaatctttttaaatctggaacaaatttttctgcttctctttcccagtttggaagaactgaggtaggaacaactataaggtttggtccttcatactttcgatttaccatatgttgaataaaggaaagagtttgtattgtttttcctaatcccatttcatcagcaaggatacctccaaaaccatattcactaagaaaattaaggtaagatacgccttgtagttggtaactacgtaatgttgcatttaatcctttaggtgtttcaataggtgtaatttctttgaaacttctaattttatttcgtaatgaattccaaaatgaatctgtttctgaattaggaagttcatcaagaatagtatcaagaacaggtgcttcaaattgtttaaattgatgttttggaggtttagttggatcaaagccaagtgcatgaagtttatgagagagtttttgtagccatgtttcaggtaaacttgtatatgaaccatcttttaactggacataccttttacctcgcacccatgctttccaaatacgttctaggggtaaatgttgaccatcatattctacatcaatatctaaattaaaccatttttctttttcattactttctacttttgcagtaataacaggttgagctatccttactttatatctggtaagtgctttttctccataaactctccagttttctactagagtgggatatgagtctagtagaaatgcaatagcttcttctggttccatgaaccataatttgttactgcgtggttgaaagtgcatctcagacagctgtgttataagcgctgattcttcttgctgatctcttcgaataagaaatgtgtgaccttcaaaaatatagcttcctgtttgaaagtcaggatttggcccaggaagagtaaattcgccatgaattgtttcatatgtattttgtacttctagcgtgagtaaactaccttcttcatcaagaaaaagttttgggtcataggatgctggttggaaaataggttccattatttttagaaattcttctggttcgtatagttcagatgaaggtagtcgagtccatactctatcaagaaattcagaaatattatcttgtggtacaattggggtattagcaacaagttctttaataagagttggtgacagacttgtctgaacaggatagaaactttgattccaatttacccaaaggggcatttgtccatgaaacgttatttctgtatcttcttctgtgagtgaaaaaggcatctttccttcacgttgcaacaagacataaaagcgtagtccttcatcatcaaggcttggtttaagtttaagggctaaaggagtactgacaatagtgcaagggaggtttgtatctctccaaagaagataatattcatgacgtatagcccagaaaaaccatgaaacaagtccttcagggatttcgactctatgtccataatagtctaagaaatgtcctatttgttgggctacttttaaaagctgaggagattgttcacaccagtcaggattacgtaaaatttgttctaatgttgtttcttgatggacagaagacagtccggtcttattttggcgtccacggaagaaagcgacaataagtcttgtaggttcagggtaaaacctaaaaataaggtaatgacgtcctacttctggttcaagagaagtagaaaagaaattccgaaaactttgacgccattcaatattatgttttataggttcttcaacaagatctgttgatttatcaagatcattatgaagtttaatagctactgaagcaatatgtttacatacgcccataaatgcttcatgacagttgcatgtatgagaaacacgtgattcttcaataaaaataataagttgtggagaatagttttgaaaatcttcttcttgtacaatactgtctatataccaaatatcatgttctttacgaatggtaagtttttggacaccattgttttgaataattgattgaccaacatccctaatataatcagggattgaaccttttataaagccttggatcagagatcgggctatattttcctcccgaaaattcatgtactgactttccttacgtatattactatatttaatttttgatattataggacttcatgtttatatatcaagagaatacatttgtaacaagtaggttttttattctttattctataaataaaaaaagtgagtgaatcaaacttagctagttatcaagaaaaattgttgatagctttttactccaattattttttagataatatgagtgcttaaatttaattctaattataatgtataaaaagatagttatacctaaaagaaaatattgactagatcttttttaattttttttaattttttagttatctcttgataaaaaatgactaaatagtgttgatgataaaaataaataagagttctgttataacacagatagaatacatctatatgtagtctctaattttaatcatgttatgttaccatattatacattattcataggaatattagattactatgtagctatgaatcacagtacactgaaaaaatataacgtattaggataaaaagtatatcaactttctcaatgttaaaataaatcttttttatataactttttgtcatctcattcatatgattgactttcgttcattgtcttactaccctaaatttattacttttttaaaataatactatggagttttaactctctatacttattaataaaaattgaatcttttttgtttttccataaatttaaattggttctgatgatatctttttggtcaacaggtttaaattaaggtcaaaagtaagataagtataaatcaattttttatattattgaagtagtaaaagaagttatagttattttttgattagctacaatagatttatagttattaaggaaatcatatggataaaattatacattataaaactaaaacattagtacattcaattttttttcttctttttttattgacctctctttatctaacaatacattttgtttatgcacaaaaactaacagagcaaaacagtgatgaggaccttagtacagaacaaccagtacatggtggacgtattcgtttaggaacaatagcagaaccaataaatttaattccttacttgtctacagacggtacttcacacgaaattgctgacttactatttgtatctgcacttgagtatgataaagatttacaagtagtaccactagcagcaaagtcatatgaagttttgaatgatggaaaattattacgatttattatgcgtgaagatgtgttttggcaagatggagtgcaacttactgttgacgatatagaatttacatataaattaatgttagagcctaacacacctacagcttatgcagaggactttctcactattaaggagtttaaaaaaacaggccgttttacttttgaagtgtattatgaaaagccatatgctagagctctaatgacatggatgggctcaattttaccaaaacacattcttgaggggcaagatattaccaaaacaccttttgctagaaatcctataggtgctggaccatataaattaaaaagttgggaaacaggttctcgccttattcttgaggcatctgatagttactttaaaggtaagccatatatctcagaagttatttatacagttatcccagatagttcaacaatgttccttgaattaagagcagggaatttagatatgatgggccttacaccacaacaatacttaaagcaaactaaaggtccacagtgggaaaaaaattggaagaaatatagatatcttgctttttcatatgcttacttaggctttaatttaaacaagcctatgtttcaagatatattaactcgtcaaggaatttcccatgctattgatcgtcaggctattgtagataatgttcttcttggtgaaggagtcgtttcctttggtccttacaagccaggaacatgggtatacaacacacaccttaaaccaatagaatataatccagaaaaagctcgacaattatttacacaggcaggatggaaagatacaggcaatggtgttcttcaaagagatggtaggccttttacatttactatacttgtgaatcaagggaatgaacaaagagcacgagtagcaagtattattcaaagtcagttaaaagaagtaggaattgaagtacaaattaggactgtagagtgggctgcttttcttaaagagtttatagataaaggaagatatgatgctgttgttcttggatggtctattacacaagatcctgatatttatgatgtatggcattcttcaaaagcacatgaaggaggattaaacttcatggggtataaaaatacggaacttgatgcactccttgtagaagcaagaacagaacttgatcaagctaaacgcaagccattatatgataaaatacaagaaatacttcatcatgatcaaccatactgttttctttttgtaccttattctttacctattataaaatctaaatttcatgggataaaaccagcaccagcaggtattatgtataatcttgatcagtggtggattcctaaaaagcttcaataacatataataattatatcaatcattttacatttatttaaaatgattattatttattatttattattaaagtatataacggctgtgactgtagtaataatatatctatttaccatggactgttcatgaaagtgattgaagctcctacagtaggtttaccaacccctatgcaaaacgttctacggcggttagaagcaaataaagcaactgccacagagcgttcacttgttcaaaaagcatatgtttatgcagcagcagctcatgagggacaacttaggctttcaggagaaccctacctatctcatcctctagctgtagctgaaatgttatctgaaatgggttttgatgcttatgctattatggcagcattattacatgatacagttgaagatacaaagtgttcactagaagatattgaaacagaatttggaaaacaagttgcagacattgttaatggtgtaactaaaattagtatgatgagttttgaaagtaaggaggaacaacaagctgaaaattttcgtaaaatgattcttgctatgtctcaagatattagagttcctattgttaagttagcagatagactgcataatatgagaacattaaattttcaaaaacctcataaacgtcagtctattgctcaagaaacaatggatatctatgcaccattagcaaatagattaggacttcatagaattaaattagagcttgaagatttaagctttaaatatctccatccagatatttatacacaaatttctacctggatgcattccaatagagttgtagaaagaaatcttattgaaagaattatttctaagattaaagctattcttcataaaaacgggctaaaaggtacagtgcaaggtcgtgttaaacatgtttatagtatacataaaaaaatggttgaacaacatcttacactggatagtatgcatgatatccttgcatttcgagttatcgtagatacgattagtgattgctatgcagtattaggacttcttcactctcagtggaagcctttacatggacgatttaaagattatatctccatgccaaaagtaaatggatatcaaagcttacacacaactgttatgggtcctgaaggagaacgtattgaaattcaaattcgtacaaatgagatgcataaattagctgagcaaggtgtagcttctcactggttatataaagaacgtaaccattcagttaatttaagtgatgtacctcaatttgaatggttaagagaagttttagatcgtcaaaaggacgaaaaagactctcttgaatttatgcaatcattacgcttagaattattcaaagatgaagtatatgtctttacacctgcaggagatgttaaagagctacctaaaggagcaacacctcttgattttgcgtttcttatccatacagaaattggtaatcattgtgtgggcagtagagttaatggtaagcttgttcctctttactcagttcttaaaagtggtgatactgttgaaattattacagataaaaataggtatcctagtcgtgattggcttaaaatagtaaaaacagctaaagctagaaatcgtattcaacaatatcttcgaactgaggaaaaagctgcagctatttctcttggtagagaactgttagaaaaagaagggcgtaaacttggtattagtcttaccaaagctgaaaaagaaggacaccttatatctcttgctacccatctttctttaggttctgttgacgagttactagcttcagttggatatgcccgcaatacacctcggtatacattaaaacgcttacagacattaatgtcttcagatgagacttctagttattctaaagtaattgctcctcataaaaagaaaaaagaatcttctgtattgcaaaattttagtggagttaccgttagaggcattgataatatgcttgtacggtttgctaaatgctgtaatccagtgccaggtgattctattgttggatttataagtcgtggccgtggtgttattgttcacacagaaacatgtcctaatgttcaagcacttgaatctgacagacttgtttcagttcaatgggatggacatgaaactgttccttttcctgcacgtatttatttagttggtataaatgttgttggattacttgctgatattgctctagtttttaaagcagaaaatgtgaatgttgaatcgtgtattgttcaacgtttaattgatggaagatcagaaatggatgctaccattggagtaagagatattgcacatttatatcaagttattgataaactacgtcaactacctaatattgtagaagtccttagaaaaacagcagacgagtaatttgtataattatagtattaaaagtttgtaattggtggagtaaaagagggtactattgttggaaaaagagcatgataagtcataacaagtataataataccaatgccacattttataataatacctaataatcttccaataagtgcacctttagctgcccggctggcttcttcacgactacgtccattaaggatttccataaaatagcaacctatccatgctccagctaatgctccaataaaagcacccaatccaaataaaaatggtaatcctaatattgcaccaataaacgctcctaataaacctatccacattccacttgtactagaaccatattttttacttccccaactttgagctatatattcaataatttctccaagaatagctagtccaaataacataataaagaaaaacatattcatatcagatgtgtttggaccaataaatttccacagagaaataagacctagcataatccaatttgcaggtaatgtaagaatatttaatagaaggataacagataaaataagaagaaaaatagaaggaaataaaacatccatagcaatatcctaagcagacgtaatatgagttagtatgatgtcactatagttatattatccagttagtatattttattctacgtatttttataaaagataggtagtaatttgttataactagttgaactagaaataagtgtaaataaaaaaagagagatgaacaagtattgtcttttttacaatacttatgttactactaaaagtagtgtttacgtatgtattagtgtatagtagatagatagtttccaaaaagattcaatcttacttttttggtatagaactatttttatacatttaagagagataagagaatgtagaaaaaggtagtgctaacaataggcaaattataattatgtctattatatgtattgtcaattaagcaaaaaaataaaatatattgtactaactagtaggatattatcttcctaatattaaagaaagatatgaatgtttttgttaaaaagtatacctaagtgtacaaataaatctatatgcattgctttttgtatcatgactgttccatatttttttatcaagtttaagatgcatccagttaagttctaatccaaccataagattttcatatattttgtaaaaagaattaatatttaactctagtacagagtctttttttgtcaaataaagtccatttggagtaagaaatccatttctagataacccactattaggtaaagctgcgaataaggcatattgctttgcaatttctttattatttgttccttgataccatgctagccgtaaattatgttttaatttttcaataaaactaatatccatcagttgtccggcaattccccatgttcctgtaggatcatttccagctattgatgctcctgtcccacgatcttgccagtaaccatcaaaccccatacttgttcctgtccaatttgaatcataggttggcattcgctttgaaccattactcaaattatctttatcacctgtagtataccatcctaagattccaggtgttacacctgtaaattgatattgtgctaataatgcggcataccatcctgatcgattaaatttttttgtattagatgattggtttccatagttaaagtcccaagcaatagaaaaaggaatttcaaatttgtacatcccggtaaaacctagccaccaaatattagcatgttctttgaggagttgtgttccagtaggtgtccaaataaatggaaaaagaagttgatcaggttgtccaaattgtttttgcaggttaaaaacatttttacctattcttccataaactccccatggagttatagataagccattatatgtacatggaatagaaagcccaacagtatccattgttgatttatttttaccttcataaggacgaatccaccatgtggtaacaccaatagtatcatttataggagtatttacagtaatacctgttgcatttgaatcaagaatagctgaatcagccacaaaacctggaaaagcaaattgctgtagtcccatacggacattgatagaagtatttggtacaatccagtctatataagcatatcttacgccaatacttttgccatttgtaccaatagaacctccataactataatcattttcattttttcctactccccagtcattattaatacgaaaacgtaatacacctttaagattttcattggcttcataagtcgtttgaaatgtaaaacgttgatttgctccaaagtaatcacttgaattagatcgtgagaaacttgtatcaatccaaaacattgagatatcaaaaaaacctgatagtttaatttcactagcataagcatgctgataagctaatggaaagagacaacatactaaaaacagtataataaactttctcattctaactccaataaaaagaatagacttatttattacatgtatttttatattattatatagtgtataacctttttcttaggagtttaatattataattaacaaaaagtagaaataaaattaatagaagaatacctaatatcattagataactaaaaagaacgatatagctcaatttagtataatattatatatgaaacataacacttattattctatacttagtacatgtactaagtatagaataaaataaatatagaagaggttaattctattacattcatgataaagtaagttataggctatttttattagcttactattaaggtaggatgtgacataaaatatttttttaacaaattatgataaaaggttaaattaatataaaaattatgttataatatttttttattaaacataattttttattgttttttagaggttgttacaaaaagataaaaatgttattagagttagttattaattactattataattttttttttttattggcggaagcgtataggagtcgaacctaccacggacaagctgcccgccattggttttgaagaccaacgaatattattttcctagattttcatcaatttttattatccttataattcaataaattattaatacactctctttcctttattttcctaatatgttatttatctgacctaataggttggaaatagggttggaaaaaaaggagacaaagaatggccgccacaaaaaggaacaaaacaaaatatcccggagtattcttccgagaagaaaaaagaataggtgcctctggaagcgaaaaggtctactatgtcgtattcaagaagaatgggaaggttattgaagaaaaagtaggacgacagtttatcgacgacatgactcccgccaaggcttccagaatacgttctgagcttatagaaggtaaacgaaaaaccaaaaaactagccaaagaagaagctcttgctgcttcgctcagaaaaaatattcatggtatttgggaagagtatgccaagggtcgccctaaaaacaaaaatactgatattgacctgtgcaggtatgaacttcatttgaaaaatatatttgggcataaatttcctgaagaaatcacaacaaatgatgttagaatattcaaagataaccttattcaatctggaaaaagcccacaaacagttcttaatactcttgctttgcttcgtcgtattctgcgctttggtgaaaaaaatggcttttgtacactacctgatagatcacaacttgtttttgagatgccaaaagtcgataatataaaaactgaaaacttaacagaaacacaactaaaagcattgatggaagctcttgatgctgaaacagatcaggttatggcttcttgccttcgcttagctttagtaacaggcatgagaaaaggagcattactagcattagaatggacggatttagattttgagcaaggtatcattacattacaaggaaaatcagctaaaaaaggaaaaacggcatacatacccatgtccgaagctgcgaaaattatcttggaaaaacttccccatacgtctcgatatgtttttccaaatacaaaaggagaaaagcgatctgactttcgtagtatgccaaatagaataaaacaaaaagcccaattacccgctgatttccgtccatttcatgggttaagacatacttatgcttcacatctcgcttctagtggaaaagttgacttatatactcttcaaaagttactgactcactcaagtccacaaatgacgcagcgctatgctcatcttgcagatgaagctatgaaacgagccgctcgtgtagctgatgatatattaaccagcaatatggagaaaaaagatgacgactgatattcttcagaaggctctagagagtagcttcaattcttttgtcaagtcagaatacataaagagaaattttgaatatacaagtcaggaagatgctgtgtggctaaaagaaaattggaatttgccattgatggaattgaattatgattttgacgacattttttcaatattatttttaaatgacttaataacttattttcatcaattaattaataattttgaatatcactcgtttattacaacagtttacgagcaagattttaaaatgattataaataaatatcaaaaatggattaaacacgtatataatatttcgtgtcaatataaactatcctttgcagatctatgccatccatttaatatagaagaattcataaaaaataaaattcgagatacacaactacatcttccaacatttatttcgactactacatcaactggctttgtagggacaagtcgaatagatggaaaatggaagttcgttgtagattttacaaaagaagatttgaattacgaagcacttctaaatctatttaaagagcaactagctatagagtttgcgtacttatctaaaaaaattactcctcatattgaaaatgtactaacagaaatagtaaaggaagataatcgtactgaaacttatgaaaattcgagattaagtcgtctatatggtctagctcaatgggaccatcgtttgaaatatattgacaccaaaggaaataatattggaaaatttaaatgtggtcttagaaaattaaattggccgtattgcgaaagcgaatgtaaaagtgataataaatattttatatgtaaaaatagagaagcttgtaagaaggcactaaaaagacaactacaagggacgatacaaagtatagaaaataaaaaaagtgtagctatgattgaaacaggttgtacaatgcctaagaacgccaaaaaaatttttgaaagatattccatgcctgatgtaacgaaaatttatcctttggcctaccttcacatctaaaggggacactacatcatttgaaaaagtccctagaaaaataacgtataatctcggaacgtgggtgttgcaaaacacccacgtttttttttgaggaggaattatggaccaagccacttggctgtcagaaaaggccgtagcgcagctaaccggtatttccgtatccacgttgcagaagcagcgtttttaccatcgcggcataccgtactcgaaaataggacggctagtccgctactccgttcatgatgtccaggccttcatgacggcccatcgcattcaggtcgcctcagaaaagtaacccaagtcgcccagggcatacccctgggcgctgccggaggattttatgccttaccctcagactttcgtatccaacacgtggaacaatgcatctcctgatgatctcatctcgtacatggaaaagcagaaccatgcccgaagtgtcatcagtacctcatataaaaactacatcagcgatttaaagagcaagcgggtctatgacgcatcagaaagactcagatgtacctactattctttgccggaacaaaacggaccaatgaattattttgctccaaggactcctgttccttacatccttggaaaggtagcttctgatctcgcatgcaacacagggttcgatcaagtcggtctctataaaatgctgcttgcctatacgctatacgccacagcaggcaactggatcatccgctgtggaagcgaatggacagaacaagccattatcaatatcattgccaccgctccatccggccatcgaaagtccgtcatatcggccttttgtcaggaaccattcaatatatttgaaaaaaacttcaacaagctgagaggttccgatgaaggctctggggatttatcccacacgaagctgaaggttgctcaaagagtggccgccagaatcacccagaaaaaaattgcctcctcgctggtaaacttaggcagcactcccacggacgaagactttgaagctctcgtcaatgaaatcgcgggggaagaacaaagccggattgctcaattcatagagcagccgtccctccagttttttacggacaacgtaactccggctggctttcatcgtatctgctatgcccaaaagggtcggctggccatccaatcaacagaaggaggtttcctgacccggacatcgttccttaagggatctctgcctgaaatgctgaagaattctttctctggagaaggcttcacactacaaaatttcagaagcacataccgctatgaacatccgtttgttgcacttttcattctcacgcagcccgagcaattatcgcgttttctgtacaagtccagcgccttcgaaggcgacggactgtgggcccgcatcgtttttcatctggcccagagtagtaccccaaacggagaattttctcttggtgaggcgcgcaaaagttactctgatgtcatttctccaatcattcaaaaggagtataacaactcggcacgtcaccagattgccctcagcaacgaagcctacgacatggtaaaagaatatgagaagtctcttgccctcgattttcaaaacggaactccattcatgagggaggccctgaaaaaagctcacgggcttgcgtgccgatttgcgtttgctgcccatctatggaaccaagctgaagcctcaagctggccaacaaccatcaccgctgatgaaatgaatctcggcgtatctttgagtaaggacagcttggcgcatttcaggttcacgatcgaccccacgtgccttcgagcgcgaatccatgcccgaaagctgatcgactccctgctgtgtatcgacttcaatatgcagcacgatgtgctcacgcatggaatcacctcgcggatacttcaacagcgtacgggactcaaagccgacgaagtcagaaatgccctggctctgcttcaacagtgcaacttactttccgcactcgacttcggaggaaaccagctcgtggcagctctcaggccggacttttttcagcagccgatgggcacattcttataaaaaagcgtctacacccatgccgtagacggtggttacgctaaaactcctttccatgagagagcagtccatgagggcagctctctcgtttttttgaccatgaggagcactttttaccgacacaaccgctacaaaacagacctctatgctcccgtactgatcccctccccacaccgcctatccgcctcacacggtacgtcatcggcaagacgggaggataacgagtctgaggccattccagaaccaatcagagacgccatccccagaaagcgcactgagggatctccactgccgttacgaggcctaacgctccacatcctctttcccacccacaaaagcagacagacattcgcagactcacagagcgtcagaagacctccaagttcaacggtcaggacgatcacaaagttccgaatctctgctgctcacaagccaccgcaagacaccctgaaggtcgtcataacccctaaagccccaagacgctgaactccctctcccctgctctccatctagccgaaaacctgtgacagaaccagccgctacctcaaacggacaagccgaagcatcatgcctaacactgctcaccatgaaaccaacgctcacagcaaacgcaggctgaaaggacaagcgtaccaggcaagaagatttacccggccacaaaggcaacaccattcaaaacgagaggacttagaccaggacatccgatttttagcggaaaaatcagctaaaaaatccctccccccgatttttggcacgccgttttcatatttgtacgataacactctaaggttttgatgtaagagaatgaagaaggaacatgagcttaccatgttccttcttttttatccgtcatcttagaataagatgatataagtttataaaataattcggacaagatattatgtaaccaaatcaattattttcacaagtatactttttctaaacatgtaaataaattatatattttaataggtatcatgtagtatatataaacaacattaaaaaactatatatacagaatttacaaataaacataatacatcatatctcataaaaactgtattctaaactatcacatcaaaaaacattttaactccaacaaaaagaggaaaagcatgaataacaaaaactatttccatactatcaatgaaagaattgaaaacttacttatcaactatatatcaaatcacaacaaagtattaccggtattcttcaacgtcagatatcctcaacattatccttaccctcaaaagaaagatatttcctcgttattcgataaggtcaatacgtattattttcgtttaggttatgatccttactacttttggaaaagagaacagaatatatcagaacaccaccattaccactgcttgctttttctgaatggtaacaaaattcaacgtatcatgccggtattcaagacagtcgaaagattctgggcttctacattgggtatagagaccgctttaggactggtacattactgcttgaaagactggaaaggagatttgacaggtaatggtactatgctcagacgagatgatcctgaattgtcctataaactagacagatttcgtatggctgcttcctatctggcaaaaacagctacttcaggttttgtgaatgacggatatcggaactttggctgttctcgtatataagtttatgtaattttttatttttacttttatattatagagttcgaataacgataatcagtcttatttattggagtagcacatgaaaaagcaagaagtttctgtcccggaaaaacatcttatcagtatccacggcaatgatattccaagatttttaggcatggtcgacatagcgcatcaactgggtctacaatcaattgatactataccactacaattcccttcatctgacaatggaaataccgctatattcaaaagtacggttactttgaaaagcggtatcgtatgttctgctataggagatgctacgcctgaaaatgttcctcctgcgtgtcgtaacgccttcatccgtatggcaagtacacgagcaaccagcagagctataggacttgcttgtaacgtaggcactctggattttgagtccgaaacgatgaacgaccaggtgatcgatgtggattaccgtgatagctctgcatcatctaccgtccaaactgctcatagcaagcccgtaagtcagaaacagcttgagtatattcatagtctcagtgacaacgcagaacagatagccatggaaaaattcagtaaggacttgaactctctgacaacaacagaagcgcatgaagttatttgtgagtgcagagccagggagaaataatacattgtatgataccgtcgtagctatcaaaagcaaaaaagcctcatcgaatccaagtccaagaagaagggactatccggtaatgagtcctcccaaaagatcatcaacaagaacatcgatgaacttacaggggcagaggaagatttagttataaaatcaattttataattatagtgtgatattcgaacaacaaggagtgtagtatggacttatttcaagaacatccaggcatagaactgagaaatataatcaaacaaaaggatatgaacatctctgaatttgcgcgtatgattgatgtctctccatcacgcatcaatgagattgttcacgccaaaagaagcataactcttgacactgccataagactcgccaaagcactcaataccacaacaaaatactggatggaaaaacaggtagattatgatatagctcaattgcattcataagcagtaaatacattatttggatgcgaaaagaggatcgactttttacagccgatcctctcaattttagcaattatcgtaagtcgttgttgggcatcatatttaacggattttgcttcataaatttgatacctcatttttttgattatttgatgtgtccatattatccagccctatacgatgggctgttatcaaattgttatcggtggtgataacggggggtagcagggttgttgttttctctggtggtttacaactacattttaccacgaaaggcagggaaatgcaataaccatccttgctgtggcgtatcaaggaatcttactgaacatatggcgcaccttatccaaacggctgtttggacgacggggctggatgattggctcgccgacagtggcctgataccctttcagttccgtcaggcacacactccgcccgttggtgtaaaaggccaaatcagtacggtatgcctgtatgcaacgggcgggaatctcgccagtaaagacaacttcatccttttttatctgggccgtttcgatggtggcacagtatttcggcgcatcatgataagccctggaaaggtattcctggggcgcatagagggtgaaggagagataaggttccagcaactgcgtcccagatttcttcaatgcctgttccaatacaatcggggccaatgagcggaagtccgccggcgtactgaccgggctatagtaaagtccgtattcaaagcaaatcttacagtccgttacgttccagccacacaagccttgccccaaaccgtaacggataccatccatgacagcgttttgaaaactctggttcaggtatcccagggaaacccggctctcgtattttacaccggagccaagcgggagcggtgtaacagacagtccgatagatgcccaaaacgggttaggcggcacctcgatatggatggtgtgactggccactttgagcggccgctctaaataaatgacggtgggttccttcactgctgtttcaatcttgtatttttccgtcagcaaagcggaaacaacctccaactgcatccgacccaaaaaagaaagaatgatctcatgggtggtggaatccacctcgtagtgcaaaagcgggtcagtatccgcaatttgcgtaagagcgtccagcaaccggtctctttgctctgccgtttttggcgtaatcgtcgtccgcagcatagggaagggaacatcactccacatttcacgaggaagttgggttttgtcccccaatatatcgtttaatctcaagctgtcgctgggaaggatgacaatttcgcccttatgggcggtatctgtccgaacaatctcccctttggatggaatacgcatctctgtgattttcagcttttctctcccggctagggccaccgtatcccgcagacgcagcgttccgctgtatagccgcagatagacaagcctctggccgcaatctgtatactccaccttaaaaactctaccgcacagggcggcgctcccctgttccttggtcgattggaacagccctatcaccgcatccatcaactgttgaatgccaaggccgtttttggcgctaccatgatagaccgggagcagggaggcgtcttgaactcgccgctgttcttcttgcgcaagttctttctgactgattgattctcctgcgatatactttgccaataactcatcgttattttcgatgaccgaatcccaaacctctgcactagtgttttctgtcagagttattttcgaggacagcgacactgtctgcttgatgataatatcagcggagagcttatcccgaacagactgatatacgctctccaaatcaatgccaacctggtcgatcttgttgataaagataatggtggggatgttcaatttccgtagggcatggaacagaacacgggtctgggcctgcacgccatctttagcggagagcaccaagatggccccgtccaaaacagccagagagcggtatacctctgccaagaaatccatgtggccgggagtatccacaatattgactttacaactgtgccactggaaagaagtgactgccgtttgaatggtaattccacgctgccgctccaaaaacatagtgtccgttctcgttgtccctttttcgacgctccccggctctgaaatggttccgctggcatacagcaggctttctgtcagtgtcgtcttgcccgcatctacatgggcaagaatcccgatattgataatgttcatgtctatcctccatacaaggcccaaaagggcgcaaaaatccccagcggcaaatacttttaccgctggggatcatgacttcggatacatagaaacgcattcagctaacatgagccgttatccgtcacgatatttgataaaaaggcaaaagcattcttaaattgggtacaaaaaccaagcccctgcaaggggcaattatttttgtgcccattatcaaattttatttaagaataccttgccgcatgttgaatagactcctcaaatcaggatgacagcagtcatagcatagcacactctaaaatgcaagaagtttttacccgctgtcccaaataaatcaggagggcattcaccgggacaccctccgatttggggcctcatgcgcaaataatttctgtgtccacgatttccgccgcacacgcccgaatattgttagtccctctgcaactcataccacagaccgttgccctcgtcaaagatgtacttttccatgaaattacctccattttttgtgattatcgtgcgcctacccttatttttgaccttgcaccccatttctgctccttttcgacctgttcctgctggtaagctgcctccagtatcctgtccgcctgttccgggccttttccagtgcagccgcaatggctctgctgttgttgcgcgccgtaggcagcacgttggctccggcaaaaagaaacagggcggaaagtcctatgagcgtgacataaagaccgtaatccccggaaccggtgagccaagtgtacgcaccgtatacggaagctgcgagcgcaaggcagaatatggccagagctatccacttgtgggccggattggtcagctgatccacgcgacgggccttgctggccgcggcaagccttgccgtcagatcaggacgctcttccagaaaggccctggctctgcgaagctcttccagactctcctgggccgcgggagaaagctgcttcacataccttgcctcttccgccgctctggcctcggcaagtcttctggctgcggcttcggacatggtcttgatatggggaaaacgccgctgaatttcggcaagcatcagatcgacatgattttcatgcttgaaggtgcactgcacgctttcgtccttcccgtattccaccacgagatagggaatggaaccgaatatccccttgccggtaaacgcgcctttgctcatggcgacgcgtttgtaggcccgtcgaatgttggatacgggtacatagaaacgacgatccatgaaaagactgttcagatacagagccttcttcccgaccccgcagggaccgaacggaagacaggatgttctgtctttcttcagttctccgtcatccaggccgacgctgcccagccgtgcaggtttgaaatacagcatcctcgactcccgaaggaataacattcatagaccgcggatcatccgcggaaataaggaaaagggggccgccttttacgggcggcccccacgacattgatacagagggtcatgaaacggctttggcgttagacaagactatttgcaagctaaagaatggtacggaaaatcatgtgataatggttcacagctaggctgtgatggctataagcgattgaataacagaaaataacacctatgcctgaaattttcgacgcgtcgaaatttttagaggaaaccatgaaaaaactactccttttgttatctattctgtttctaaccccaagtattaccttggcggaaggtaatactttcaatgatagtttcaacaaggctaagcgcatactgcaagatgaggtgtattacgaccaccaagttacactatactgcggatatgaatatgatgaccaaaaaaggatatgtctccctgatggatttatagcagagaaacatcaaaaaagatcatataaaattgagtgggaacatagtgtgcctgctgagaattttggcagagcttttactgaatggcgcgaaggtcatcctctttgtgtagataataaaggtaaaagtttcaaaggacgaaaatgtgcagaaaaagtaaataaaacatatagatatatgcagtctgatatgtacaatttgtttccagcagtcgggtctgtcaatgctgcgagaagcaataagcaatactcagagttacttggagttcaatctgcttttggaacgtgtgaggcaaaaatagatgggaatagattcgaaccaccggatagagctaaaggtcaagtagcccgtgctgctctttatatggataaagagtacaaggaatacaatctaagtcgtcagcaaagaagactttttgaggcttggagtaatatgtatccagtcgatgaatgggagtgtacacgagccaaacgaatcgaatctatacagggaaatgaaaatatttttgtaaaaaatatgtgtatcgaaaaggggttatggtaaacaaacgaggacaatataaatactacctaagtaaatcatataaaaacagatatatattgcgacaagaaaacaatagagagaagtacaggcttactgtctgtacttctcttttttattactcaggagggattatgacgcaatccactgatatcactaaactttctcaggctatgctcatcgtccaacagcaacttcaaccagccataaaggacgccaaaaatccgtttatcggtaacaaatacgccacactcaactctgtcatggaatcctgccgcagccttctttcttcccaaggtatctggcttacccaactcccatgtcctgcgcctgtagaactcgggacaggacatatcggattagaaacaagacttatacatgcggaatctggtcaatggatttccagcacagccatcatccctctgacgaaaaatgatccacagggaatgggcagtgctatcacctatgcccggcggtattctctgtgcgcgatccttggtatcgtgacggaagatgatgatggtaatgccgcctcgattactccaaaacaggccaaaacgcgaataaggcccgtagaagccacacagagacaaaaagtggcatcagacaactcttcatccacgaacaaaattttagacacctcaaatcgccccgtatcgcttcaccaaaatctgcccaaaatcgacggcgtgagcttcaggacggttcaggccgatgatggaagaatgtgcatcgtggcatctgggcgtacactggagaaaaaggaattgctcagggcttcagggttcaagtgggattcgcagcaaaaagtctggtggaaatatgatgatgctgcataatttttctttcgacttgtcagaagagctgaccttcaccggggcagctcttcttttatgggagatcggctatggaatctgatactcgtagccaaaaactgctcgaaattatcacccatggactagacttatacgcaaacaggaacactctgactcagcttggaaatcgggaagagtatatcggcatgagcgaccttggaagttatatgacctgtcctcgtatggccgttctaaataagctccatccccagaacactacctatgccctcaagcctcttctcaccatgcagagggggcattggttcgaggatgggattgccgacgccctcaagactctggaactgcctctggttcgtcagcttgaaattgccgtcacgcataacggcacgcccatcaaagctcacctggatttcgtgctcgcctccacccatccaaggcctacagtacggatactcgaagtaaaaagctgccagaaactcccggattgcctctacgcatcctatgaaacgcaggtgtatggacaggtaggactgctgacgcggtactggaaagagccggttttcagtgtcagagaagaaactggacagtatagttttcaagacatgacttttcctgaaatcgcccggaatttttggaacttgaatttgccgtatgagtgggaaggggtagatatcgaagcctgggtactatgcctttcgatgacggatgcaaaagtcttcggtccttatgtgtcagatgcaggaatgatggatgctgtacttggaaaagcagaggaattttggagtacgattcaccaggtaaaggacggcactctcgacgcatcttccctcaaaacaacaagcggtttcaatcccctatgtgaacattgcctctggaatgccgactgcccgaagttcaaaggaaacgaccacccagagttttcccctgaacttgaggagctggaaacttggaaatcggagcgtgcaagtttggatgggaaaataaagaccagagagacaagcatgaaagactggtacgcgaatattttcggtactcaggacggatgggttcaggctggtcattggcggttcaaagcctcagaaatacccggcagacgcacactagccaaggacagccttgcgggagaactgattgaactttttcatgacggcggaatggatgatgtggacgtgcccgctcttttggctcgtcatgaaaaagtaagcgcaccttcaacacgactttttatctacaagaccagaaaacaggagaagaacgatgggttacaggtctgatgttggactggctcttacgcaggcagccgtacaaacattgaatgaaaagatgaacgccttggataaaacgtccgaggcgtttgctgttattacggacttctttgcctacgcggacaagcactttgaagacactgactccggttctgaagtctatctgtgggaacatctgaaatggtacgaagagtttcctgacgtgggcttcatcgaacatctgctggctgagctcgactgggacgatttcctgttcattcgcatcggggaagagctggaggatatcgacacaaggggcagcttctgggataaccccttcgaccttggcatcagcagaagcatagtcataagcgatcccaacgactgaaacaaagcactatttccataaggccctgttcatcttgcatggacggggcttttctttttgggaggaaccatgtctcatcctgttcaactcgacgccggtcaaattttcagtggcaaatcctccggcactatgattttcggctatgacgcaccctcggaatacacgccgtccatcgatcccaactatcttttccatgagtccagccgtgatgtaatcgtctggtttcttatgcaaaatcccgaaccgctgtacatctgtggccctacgtctgctgggaaatcgagtctcattcgccagattgcggcgcggctcaattacccggttttcgaggctaccggacatgaccgactggagttccctgatttggtcgggcatctatccgtacagaacggcaacatggtctttgaggatggaccgcttactctggccatgaagattggcggcgtattcctgttcaatgaggccgatttgtgctctccggctacgcttgctggactgaacaccattctcgacggttctccgctctgcattgctgaaaatggtggagaactcgtcaagccaagccccatgttccgtttcatcgtgacggccaactcaaatggcaacagcgacgaaaccgggctttatcagggagtcatgcgtcagaacatcgccttcatggaccgcttcatgctggtggaaatgggctatcccaaagcagaagttgaacgtgacctgctgaaccgtatgttcccggaaattcctgctgaaataacggagaagatggtcgattttgccaacgatgtgcggcggaattttatgggcaactcctcggcacatgatgctctggacgtcacgctttcgacgcgcacactcatccgctgggccagactcaccatcgcattccagcctctctccaaacagggaatttcgcccatcatgtacgccttggacagagctttaggattcagggcgtccaccacaagtcgggcagctcttcacgaaatggcccagagaatttttccttcaataagcaactaaccgatggagaagattatggaaactcctattctgaacacacctttgcaagttttggacaatattctggcactgaatttgaacattacgctttggtcggccagaaagaagctcaccgctgaagactttggtggtgtagagcttccgcctgacgatttggcctctctcggctccaaaaaaatctgcgacccggccagactcaacgtctttaccaagctcaaggctcgtgcgttcagtcttctggataaacatggcgtccgttttctttcgggctgggcgataccggacgacaaggccggagatatcatccaggggctatgcgaaatccgagatgagtttttcacggaaaagcagaactttctgaacgtgtacgatgctgccatagctgactggattgcccgacatccttcctgggccaacatcatcgaaaattcaacggtcagcagggagtatgtggagtctcggatggggttttcttggcagctctatcgggtatctcctgctgctggtctcgaaagcgatctggccatgacggaatctggtctgcatgaagaggtagaaggtctcggaagtacgctttttgccgaaatcgccaaggatgctgcggagatttggaagaaggtgtttgaaggaaaaacggaggtcacgcacaaggctctgtctcccttgaaaacgatgcgcaataagctcgccggtctttccttcatcgaccccaatgtggaaccggctgtctccatgatcgacaccgccctcggaaatatgcccaagcgtggaaatctgtcaggaaacgcgcttcttacgcttcagggcctcgtatgcctgctcaaggacaaggaggcactgattcagcagacacaggcgttactggctaccccggcagaagaaaatgtactggatgatctgttgcaggggttccagcaagaagcccccgtactgaatctcccgcctgagcatagctacattccatccagcccacgcctcgatagtttgggtctgtggtaaaaaaggacgcttctatgtcagtcacgatgaaagccatgccgcttgttgcctcgatgctaggcaacaagctgggggtcaaagtcgttatcggttcttcggataccgcctgcactaacggcgataccatattccttccacctcttcccgttgacgatgaaggagttctgtatcctctggtgagcggctttatcgaccatgaggcggctcatatccggcatacggaccttggcgtgttgaatggaaagagacttacccctgtcgaaaaatacctctggaatgccatagaggactggcgggtggagcatgaaatcataaagcgctatccgggatgtcatgagcattttatctggctcatacggcattttttcttgaaggatacggaagaagaaaaggctggggaaaatgactccccggccttttctgttctgaactatgtgctcctgacgctgcgttcctgggatgtgcctgagctggttcgtaattgcgaactcgaagcaaatattatgcaaaaatactggcccggactacgctccagtattgacgcgatcatgcgggatattccggcccgatgccgatctacgcaggattcgctggattttgcccaagatattctccggctgatcgaacaggaagtccagaaggaacagaaatccaccgaaagcccagtagtatccccctcgataactgcgcaggataactcagaacaaacccaacaagaaccacaaacaggaggtgaagaacaaccgctccaagaccttctacaagcaacggaagaagagatgccaacctctatgggtaagcagctctccgacatgatttccggccaatgctctccccaacaacacaagggaatgagcgtggcagtaacaggcaagctcttaacagccgaacttcccgatgcgcttatcatggaggctcaggccatatccagagcgttacggacaaaactccaagggcttctgcaatcccaaatattgcggcgttccagtccctcacggcatggaaaattatgtgggcatggtctctaccgaattgccgtccatgatcctcggctgttcatgaaaaccgaatctgtgacaggaatcgatacagccgtccatattcttctggacatatccggctccatgaccagctgtatcgaacttgctggtgcggcctgttactccgtggcgctggctttggctgctatcccgggcatctccgtaggcgtttctgctttccctgccgattataaggaagatgttgcggccacagtttacccgttattgcgccatggtaaacgtataacaaactcattcgccgcagaagctcatggaagcacacccatgactgaagccttatggtgggtattggggatgctttcgacacgaccagaacatcgaaaaatcgtatttgtggtaacggacggctacccggacgatcctgagactgccaaagaaacgatagcagtagcgaaacggatgggaatagaggtgctgggtatcggcatcgacgccccagccatcatctctatgattcctggctccgaaaacatcaccgacatccgcgaactggctccggctatgttccggctacttcaacaaataatgactgaaaaagggaggtgaccatggcgtcatccatcaaaccgacgacttggctcgctatcgggattcttgttcttcagatcgccataaaaatcgtaaaggacacagaagaggaagactgaaggaaaggcactccgggtggtcgccggagtgccttttgcatgtattttttgccggtgttttgccaagacatggatagactttccctctataggttggaaatagggttggaaaataaaaaaggacaagtcacaaactaatgcttcttgtcctaaaaaattcaattatggcggaagcgtataggagtcgaacctacctcagacctctcagcctgacactggttttgaagaccaagtaccacaccggtggcaatacgcttccaagtatttatataatatttttgaacgttaaataactactttaaaatattaacggtttattaattaatactatatcctataataaaatgtaagtaaacttaactaggctattataaaaataagtataattaaaagttaaagagaaagtttaataaaaagtcattgctctaacattgtcaaatataataatacaatttacaatatacaaagttgcttctaatagtgtctttccccttaagggaatacttcatggaggtagtgtttgaatcaatttaccaggaatctcattttatgggggcttatatcccttgcaatggttattgtttttaacctatttagtcagccacaatcttcattacaagaacgtatgacttatagtgagtttttaaatcaagctcaaaaaggtaaaatagctgacgtaattatacaaggcgatattattaagggaaaaacaactgaaggaaaatcttttcagctttatgctccatctgatccacaattggtaagcaaacttattgagcaacatgtagatgttcgtgctgagcctattgaagattctccttggtatatgacactacttgtatcatggtttcctatgcttcttttaataggtgtatgggtttttttcatgcgccaaatgcagggaggagctgggcgagctatgtcttttggtcgctcacgtgcaagaatgctaaaccaggaacaaggaagagtcacatttgaagatgttgcaggtgtggatgaagctaaagaagaactctctgaagttgtagattttttatctaatccaagaaaatttacacgattaggtggtcggatacctaaaggagtccttcttgttggccctcctggtacagggaaaacattgcttgctcgagctgtagctggtgaagcaggggttccttttttttccatttctggttctgattttgttgagatgtttgttggtgtaggagcatctagagtacgagatctctttatacaaggtaaaaaaaatgctccatgtcttatttttattgatgaaattgatgcagtaggacgtcagcgtggcgctggccttggcggaggacatgatgaaagagaacaaacacttaatcaacttttagttgaaatggatggttttgaatctaacgaaggtgttattttaatcgcagctacaaatcgtccagatgttcttgatccagctctattaagacctggaaggtttgatagacaagttgttgttcctactcctgatgtaaaaggacgtttaaaaattcttgaagtccatactcgtcggacaccacttgataaagatgttaatcttgaagttatagctagaggcacaccaggtttttcaggagcagcacttgaaaaccttgttaatgaagcagcacttcaggcagctagagatgataaaaatttaattgatatgaaagattttgagtacgctaaagacaaagttctaatgggtaaagagcgacgtagtctcattctttctgatgaagaaaagaaaattacagcctatcatgaaggtggacatgcacttgttgcacgtttacttccaaagacagatccagtgcacaaagtaaccattattcctcgaggtcgtgctcttggtgtaacaatgcaattacctgaagcagatagacatagttattcaaaggaatatttattaaataacctgatggtgttattagctggtagagcagctgaagaaattatatttgatactattacaacaggtgcaggtaatgatattgaacgtgcaaccaatatggcaagaaaaatggtttgtgaatggggtatgagcgagcttataggaccattatcaattggtgagcgtggagaagaggtttttattggtagagagtgggcacattctagaaactttagtgaagatacggctcgtattgttgatagtgaagttaaaaaattaatagaagaagctagagaaaaatgtcaagaactattgacaaataatcttgatacgttgcatgctcttgctacagcactacttgaacgagaaacacttacaggtgatgatatagatcttcttatcaagggggaagaactacctccatttataccagaaaactctaatactgaaattaaaaaagaagattcaaatactgaaacctttattttagatgctgatgagcagaatccatctcctccaaaaacagaataaaaaaaatagaagtggtgtggataaaacacatgaaaagtagtcaaataatcagttatgataatcattggatagttaaagggggtaggcaaataaatcctacccctttttgtattattggaatactgaatataacgcctgactcattttcagatggaggaagatatttaataacaaaagatgttattgagcatacaaaacaaatgcttcaatctggagcacaagttattgatataggtgcggaatctacacgtccttttgcagaaccaattatagaagaagttgagaaagaaagacttattcctcactttaaaatattaaaagaacaatttcctgatgttattttttctatagatacgtataaggcttttactgcaaaagcagcattagagttaggtgctgatattattaacgatgtttcaggatgtacgtttgaacctaaccttttagatatacttgtagagtataaacctggttttgtgttatgtcatactcaaggtaaacctaaaacaatgcaagttaatccttcatataaagatattatcgaagaattattatatttcttcgagtcccaaatgtctcttattacaaaagcagggttacctgaagatagaattgtgcttgatccagggatatgttttggaaagaaaaaagaacatacagaaataataatgaaaaatattgagagactaaaagttttaggaagacctttatatataggtctctctagaaaatcattttttaaacaattttttgatcttgatgtccatgaacgtgatgaagcaacacgtatagctactgcattacttgcagctagaggtgtaagatatcatcgtgtccatgatgtagcaggatgtactcaagcattaaaaataacagaagtttttactccatttttgtaactaaggagttattcataataagtttaaatctctttcccctaagtgtaattaggagttatttttatggatttcatcccttttagttggagggacttacttgacattacattagtaacgatacttatttatcgagttatcttattagtaaaaggcacccgtgcactttcagctttatctggtctgcttttacttattcttatttatcttggtgcgcaatatttaggactttatacccttggatggttattagaaaacttatttggttctctctttttagtaattattattttatttcatgatgatatacgtcaagctctttcaagagtgggtgttcataatttttggaagaaaaagaaagaaattgctccaagtttaattgataatattatttgggcttgtcaacactttgctaaaagacgtataggcgcacttattgtttttgaaagagagataccccttacagatatgatgcaagaaggagtgatgttagattctattctctcaaaagaactacttttaacacttttttatccgatgacagcccttcatgatggagctgttattatccgtagaggaagaattgctgcagcaggatgtattttacctttagcacaaatggatcgacaagcatttggtacacgtcatagagctgcccttggtgttacagaagtaagtgatgcttttgttattgttgtctctgaagaacgtggtgaaattagcatggtttcaagaggaaaacttgtggttgtatctgatattgaacaattgatagagagtttacgtgatgttcttgactacaagtgatcatagaggtaactggaaatattttcttattgcttttgctactgcattaattttatggtatacatttaatgcaaaagagcaagtagaaagaattatggatgttaggttagactataaaggtctaccttctgatttaattgtcacagagggacaacttaataagattaatgtcgactacgtggttctttagaaatgttacgtttattttcaggtagagaactttcttacacaataaacctttctggtgttactcaaggagttaatactattcctctatcatctattcaattcccagaattacgtgcttatcaaattattgatgttattcctcctcgaatggtactccaagtagatcatgttaaagaagtagagcttcctgtaacattacaattaagatcttctcttttttctgatgcagcctatttagaagatgttcatattattcctagccatgtaaaagttcgtggtgcttcaaatattgtttcatcaatgaatacagttatagcagaagtttctgcattattagatgacgagggacgtgttgtgcaagacgatgcacctcttattgcaccacagtttgttgaagttagtccacctacagttaatgtctgttttaagttagggatgcaacgtcgttctattagtcttcaacgtactgtattactcccagaagaaaaagaaagattaacaactcgaccagagcgagtaactattgtcgtatctgttccacaatctcttttaaatgatcctaagtatatttctcaagtgcatgctagtgtagatacatcaatattagaagattcattaggtaaagattttgatggagttaaaagacctattaaagtatttcttccagcagcagctcgtcttattaaagtttcacctgatatagttactgtttttcgtcgaaaataatttcaatgtatttgttggagaacataagtgggtaaaaagctttttggaactgatggattacgtggtcgtgtaaatatttatcctatgactccagaggtagcactaaggcttggacttgcagcaggaacatattataggcgaaaaagccatcggagtagagttgtaattggaaaagatacacgtatttcagggtatatatttgaaaatgctcttactgcaggtcttcttgcatcaggtatggatgtttttttagttggaccacttcctacacctgctgtttcttttcttacagcaaacatgcgtgcagattttggtgtggttatatcagcttctcataatccattttatgataatggaattaaattatttgatgctgatgggtttaaaattccagataaagcagagcataagatttctgaaatgattcttgaccaaagtcatacatgggattacccagacccctcaagtgtaggtcgtgcacataaaattaaagatgctttaggaagatatattgtctacttaaaaaatacatttccatcaactttatctctagaaggactcagaattgttcttgattgtgctaatggtgcaaactataaagtagctccacttgctcttgaagaacttggtgctgaacttataaaaataggtactgatccaaatggattaaatattaatcatcaatgtggctctttgttccctgagtatgtagccaaaaaagtaattgaaatgagagcagatattggtcttgctcttgatggggatgcagatagacttattgttgtagacgaaaaaggtattatacttaatggtgaccaaattatggcattatgtgctcaagatttaatgcgtcaaaataaattgcctggaaatattttggtagcaacagtaatgagtaatatggcacttgaagtatttatgaaagaaaaaaaaggagccttgattcgttctaatgtaggtgataggtatgttatggaagcaatgagaaaacatggagctatgtttggaggtgaacaatcagggcatctcatttttcgtgaatatagcaatactggtgatggacttcttgctgcattacaaattttacgtattatgaaacagtacgaacgtcctctttcatctttagctggtttattacaattatttcctcaacgtcttataaatgtgaatgttaaacaaaaacgtcctattgaaacaatgcctactcttttaaaaacaattcagcgcatagagacagcattttcaggacgtggtagagtgttactacgctattctggaacagaaccattgtgtcgtgtaatggtagagggggaaagcgatagtaaagttaatacatatgctgaagagcttgctgatattgtggccaaatctcttgctgaatgattgtatctattaactaataatatatttacaataggagctttaatgaacattcgtaaagttgtcgttcctgttgctggatggggtactcgttcattacctgcaagcaaaaatatccctaaagaaatgttgccaatatataataaaccagtcgttcaatatgttgtagaagaagccatgcttgcaggtgttcaggatgttatttttgttaccaatagagataaaagcgttattgaagatttttttgactataatccgcagttagaaagtatacttgagagatctggaaaatacgaacttctaaaagtcattcaaaatgttgctgaaatggttaatattatgtctgtccgtcaaaagcgacaattaggacttggacatgctgttctttgtgcaaaagaaattgttcgtgatgaaccttttgctgttatggttggtgatgacttaatgtttggagaaaatgctggcatggatagacttattcaaattgcccgtgagcagaataagcctgttattggagtccgtgaagttccagaagacaaaattaatagatatggtattattagtggtacagaaattagtactgatgtgtatgatattacagaaatgatagaaaaaccaaccttaggttctacacagtcacgtcttgctattgttggtcgttatttattgacaccagacatatttgaatatttagaaaaagtaacaccaggacatggtggagaaattcaacttacagatgcacttgcagcattagcacaagaaaaaggtatgctagctgttaaacttggaggacttcgttttgatgctggtgactgggtggattatctttcagcaaacgtatattttgcgatgatggatgaaacactaaaagatgatctttttaataaattaaatcagatccttcacatttcagaaaaacaataatgaatttcattattatttttctttattctcttgtatgaatgaatattgtacaattacactattatcaccaccatattctttattaacatacacattaccttcctggcttccatataccctatggaagccagggctaagagttgctatccttttaggtaaggaaatgttaaggactggtattatactatctttacatactcaaaaacctgaattacctcataacgttgttcttcgtccaatattatgggcattagaaaaaattcctatattttcatatgaatacataaaaatgatccaggaacttgcattaagacattctatcccttctggaaaaatttttgcttctattcttcctatgggacttcgaacaacacatgtacaaatgaagtgtacgtataaaaatgtattaactaaccttcaattaaaagaattaaaacataaaactgaagaagaacttcatgatattggaactaaatggatatctgaagaaaataatgattggttaacatctcaaacagaatcaatgattgtttcagaagaatgtatattaactgttgatcctccatggcctattcgtccttcagcaacacgccaacgtgtcattttagattttctttttacaaatggggtagtatctaaaaaagaattattacaaaagttaggtaaagaatatcgaacagcactaacttcacttactcgttatggaattatatctataaaacaggaaatcctaacagataaagatgagttagcaaatactattgccttattacctccacttataccatttggttatactcttactgaggaacagaaagaagtagtaactcttttaaagaaagaattacaaaaaaatcaagcaaaaacatttttattatttggtataacaggaagtggaaaaacagctatctatcttgagattattcaggaatgtatacgtaataatcaatccgtacttgttcttgctcccgaagttgcattagctcttaaattacaacatgaaattaaaaccgtatttcctattataccttgttatttatctcatggatatcaaagcagtcaacaaaaagaagatctttttagaaaaatagtaaaaaatcaagtagcaaaagttattataggaactcgttcagctctttttttacctttaacaaatattggttctattattttagatgaagagcatgatgcttcttttaaacaaggtgaacgcttaatttaccatgctaaagaaatagcttggtttcgtgctgttcaatcaaatgcacttttattattaggttctgcaacacctgatataaaaacatttcatgctgtagagaataataaaatttctatagtaaaacttcatagtcgtgttggtggaggagttcttccaacaataaaacttattgatagccaacagttggaatcaaaagatgtaacatttgctcgtgaaagtcttactactcttaaagaaacacttgaagttggtgagcaagcagttattttgcttaaccgtcgtggatatgctcctatcatttattgtattacatgtagaaagtctattcgttgtccttcttgtgatgttggaatgagttatcataaaatacaagaatcccttatctgccactattgtgggaaaagcataaggtttccttgtccttgccctttttgtaaaggaacccaatttttacctatggggcagggtacagaaaaagttgaagaagaaattcgtgcaattttaccttcagacagtatggtattaaggttagattatgatacaactagaagacctggacgtactgaagaaattttaaaaacttttgctcaaggaaaatctcaagtattgattggtactcaaatgctttcaaaaggacatcattttccaaatgtaactcttgttattgttgtcaatgcagatataggacttaatattcctgactatagagcagctgaaaaaacattccagctgcttacacagtcagcaggaagagctggacgtggtgagaaagcaggacaagtactaatccaaacacatgatacctctcattattgctggaaatttatacaacaacatgattatctaggtttttataagtatgaaattgctcttcgtcaaaaatggctatatcctccttttatcaacttagcattaatacgcttatcgtaccctattgaatggaaagaaggaaaaatttggataaaaaaagtccagtcattgttacaagagtgggctaataagttaaatgtatctgttcgtgggcctgcattatctcctattcctatcctgagaggacgtaacagatttcaatgcttattaaaaagtaacaattggcaacatattcgtacaatattttataaaattcaaacaactgctttaccacaaaaacttcgtgtagtacttgatattgatcctattgatatgctttaaaaactaaaagtaatactttattttttatactttaaataagactaacttatgaaagataaagtatatttaagaattttaaaaaaagtcaaaaaatattatagaaatgcataataactatttagaaaatatttaaatatttttttattatcataataatttctttgtagaataatacataaccttaaatgatctttctaaataatatacatatatattataaaaatagaaattacatattaaaattaattttatctattactaattatgtagtaataataaatatatgttgcatcattaggttaaaaaacatagttctatttttgttaaagtaaagtttgtagattattagtaaaatatttaaataaaatatattactataagttaaataaatataataatcattttaatgacgtgttatagtaactatggagtagatatgaataattttattaaagttattactataataataacttcaatagctgctgtacttattattttttctcttactacagttggaatatttataatatctattttatttataacattttttgttttatcagtcatatctaaaataacaggtaagagtttatataatacaaaaattatatattatacaactaaacataataataataataataatatttatgatctatcttcagatgagtacaaagtagaagataaaaaataaataaacagaacaattactatcagataataacatatttgtcacaacataataaagtaatacattatatattaatttgtctataatacttacgctcttttgattaaaaatatacttataacttattttacgttaggtagatatattcttttaaataagagtcattagttattttataaaaatatttaatttcatactatagtaggaacctattgcgaatttttaataataaatgcaaaatgacactagccttattaagcaaacggtatatgctttgtgtttttatacacaaggtatctaaactaactgttcaaaagtagctgaggattacattgaagtttattactgacttcaaaaagctagatgtattagcgcatcaggcagttacttcagcattgtccacttatcagtatcacctacctatttttattgatgctacagctgggaatggttatgatacatgcttcttagcacaacttgctggaacacaaggtatagtattagcctttgatatccaacaagaggctataacgaatacatatcaaaggcttatatctttacatttggaacaacaagttacactcataaaaagtggacatgaacgcttatatgctgaaacattaaacttttttcaaaaaaatactcatttagtagagttctaccattttaataatcaaatagatatttgttctggtgtgatgtttaatcttgggtttcttcctaaaagtgataaaaaaattgttacacaacctactactacaataatggcattaaataatgcattaaatgtattagctcctggaggaattataactattcattgttatacaggacacttaggaggagtagaagaaagtgaagctgttttatattggagtgaacaactttctttaaataaatgggatataacaatctataaacaaatttttaaacaaaagaacaatgagcaattagtgcttattaaacgtaaacagttatgaatagtttttcacagccatggatattttatttgtgtgcatcaattgcaataggttatgcattaggtagactaaactataagggagcctcccttggcagtgcagctattttatttgtaggtattgcttttggtaaaatgggtgcgtctattccacaagatattggtggtattggactattaatatttctttatgccataggaacagatgcaggaccaagttttttaagtgcattgaaaggaaaaggtcttcaattttccatggttgctttatgttttactattacagctgttataactgttgtaatctctggttcatggtttgatattgatcctgctggaatggctggtatttatgcaggagctatggtttcctctcctgccttagctggtatattagactctgtatcaccttatcagtctgttataataacaacagcctatagtttgttatatcctgttggtatcttagcaagtattttatatacacaatggattattgcatttgataagtcagataccagaaaagctgaagaagaattacatcaaaaatctctttttgaaaatccacctattcatattggttgttttgaagtataccctcgatctgtctcttcagttcgtgaaatccataatctttttaatgtaagaatcacacatattattcctgcaggaagaaaagttgtagctccagcatcagcattattaaaaatttgtcctggagataaaatacgtcttttaggttctgaaaatgcgttaaaaagagtagaaacctttttacatgcaaaaatagcaaatgatactgattttaaagaacatatacatcattatcaattagtcgttacaaaaaaagaagcttgtggctcaagaatcatgcacttagcagctaaatgccatatggatactcttatgtttgaacatgttcatagaaatgaaattgatattccacttacaccaagaacacgtttatatatgggggatatcttacatcttagtggggatccaagacaaattgagacattaagaagattattaggcgatgatccaagacaactacaaattgctgatgttatgcctgttatgcttgttattagtcttggatggctattaggcaatatccctatccctctgtacgaaggcaaaacatttatggtaagcagttcagcaggagtattgcttacagcaatttttttatccaatataaaaaaattaggttctatagatttttatttaccaagttcatctttactcttattaagagaaacaggacttgccttattttttgctgctacaggagtacatacaggcgcttctttaaatatgggaattatccttcaaagtggtaatattcttttatgtggtttaataacaacaatattacctatgatagtaacatggtattttatcaagtttgttcttcatatgaattatctttatgctattggcagttttgctggagcacgtgcaacagcttcttcctttgcaattgcaacagctataaccaaaacaccatatgttgcagctgtgtattctattgtttttccagtagttacacttttacaaattatgagtagtaaagtggtgtacactcttggttcgctatatctattttaattgctatcattatattattattattattattatttataattatgataaattccatatttttttagttgggttagctttactcagctcttcaagtgtcatatcaacttgttgaggaccagcagaccaaggtgcaacttgatatggttggaaaaatatacggataccattaggtattaatgcaattgagttatagttatcaagatcaggagctgtgcctacagataatatttctttatctgacatattacctagtgtttctgacaaagacttatatgaatattctgacataatttttaaggcactattaacatcatcaaaaatgtctataagatctaatggttgttctgtagttagatcataattaaatacagaaatttctaaatttccatgagctccaccagtaaagtctgttatagtatatataatagatatggctttatcagagggtttagtaatagaatagtctgccctaagttcatagggaccaatggcaagttctttttcactattagttgttttaaaattttcaacaagttgttgggcccaacctttgatatcttgatcaatcttactactatgaatttctggataatgtacagaaacctgcatttcttttgttgttatagtaatactatgatcaagaatagaggaaccatctgtgttatgagcaaaacatattgtttgagttataataataaaaaaaaataagaaataataataataataataataattaatataacgcataacaaaacctattttatagataaaggtcaaaatataaaaataacacatcttattttaattaagtgttattttataatataaataaagatatttttgtataaacagaacataccctaattataatctatattgactcactatgtttccaaactttttcttcacctttaatgagacgttgaatattttgtttatgactccaaaaaataagtgccataataattagtgataatggaatatatgcaaattttcctgtaatgaacaaaataataggtaatgaagttactaaaaccaaagaaccaagtgaaacaaatccagaacgccatatgaaaaaagtacataggatagcagcaaataacagttgccaaaaagcaattggaataagaacacctatagaggttgctacagcttttcctcccttaaagtgtaaaaagcaagaataaaggtgacctataattgctgctagacctgtcatagtatacataaatggactttcagataaatatgttgctattacaacaggaaaaaatcctttcaatacatcaaaaaataaggtaataaacccaagttttctaccacaaattcttgttatatttgttgctccaacattaccgcttcctaatgttcgtggatcaataccacaaaaaatattggcaaaaagtacaccaaaaggaatagagccaataacataagaagtaataatccaaataaggtctattatcataataaccccagtatattattttagacttgctgaatttctaatatatgaatttcattatgtagtggttgaatattacctatacgaatataaatagactgtcctatttcaggaacagctgtaaaaagttttcgacgagcccgaagagtaagttgctctcttggcaaattaacaacaatgtaatgttctgttacctcagtaacaatagctggccaccatgtattcttatcttgttgaagaatatataccaacttccaatatctttgtcgaaaccgctgtatttggtttgtatattcaagacgagaagtaatataaggtagcattatctctaactcttttaaagaccatttatatttttcatgttgtaatacatgaagaatttgtgcttgattaaccatatctggatatcgtcttaatggtgacgttgatggtgcataatatttttctccgatgccagcatgctttttgggaactacatcaagtacagatggtgctaacacttttactacttttgcaatatcatgaggctctttccatatacctttatattgatcaggaattataatgtcttgtgttctataaaaaagagaaatgttattttcataactccaatgagctattgctgcattaataaggatcataatttcagaaaccaaaagatgagatttaggagtagcaaactcttctgttaatactacttttgtctcattctcttcaactattagagaaagatatggttctgaacgttctactataacagcaccatgtttaagacgatatttttgataggtttgtgctacatgaaaagctaacttcagttgttcagcatatggagaatcttctgaatagttatcctctaaaatatactcacattcatgataagtaagattagcagcaagagagacagattcaaaagatggtgtacaagattttactacaccatcatagccaacaatacatgtaataataagcacaggtcgagtacattgagcatgaagactgtacttgtctatccctaatacattaggcaacatgttataacttgcttctggtaaataaatactggttgctctttttctaactgcttgatcaaggggatcatcaaatggccaattcaatgcagggcaggctaatgcaacaaccactttccatccattgtctattggttcaataaaaaaagcatcatctttatcttttgttgtttctgaatcaatacttataaagggaaggggtagggtagacgttgtataaagagaagattgtttacacaacatgtctatagtgttttggaaaggttgttgccaattatctgtaggatcataatctatacgctcaaaccaaatgttatgatgtggttgtaatattccccatgcttgtgcaagatataaagcaagaaatggatcatcaggaagtcctgttacaagttttttccataactgactatcagctttttctggatttgaaatttgttccataatgatctgacgaagctgttcttcaaattgcgtataaacattagcagtattaatagaatagacttttttttgtgtataaagctcccataaataacggaaaaagggtatactatcagtaataaatgcttgctgttttatagttttttcttgttctttaacacgaatatcaacaatctcttttgaatatatttcaaaattaggtgattgaaatttaaaatgaatattatcctttaaaaggacatgtgcacatgctgctattgtatcaatatctggagaagttgtaactagctcagaaaaccactttgcaggtgcttgaataatttctccttgagcaatctcccataattcataagaattaaaagatgattcaagctctttacgtttaaacttatgttgttcaatgtgtgctattgcaatatctttactttctatatttctatagtttggacctatccaaggaagaatccttgatgattgtatatttatttcttttctattaggtaataatattttaaatttattttgaaattcttcaagaacccaagcaagttgaggttctttgtcttgcataaattcaataagataaccagctcctacatggctgacaaaatgttgaaccataatttgtcctaatgtttaaatgagcgttgtccagtgaaaaccatagcaacttgaggagaagattcattgactgctttaataacttcatagtcatttaatgatcctccaggttgtgcgatagctgttactccttggttaatacataaatcaacaccatcacgaaatgggaaaaaaccatcagaaaccataacagatccttttaatcctccgcaaacatcatttgtttctttttttattttttcaagcttttctaatgaagttttatcgttagcagcttgttcacgaagctcataaagacttaatccgtaattttggtaggttaatttgtctgcatattttgcatatgctttgaaaatagctaactctatacaaccaaccctatcttgctctcctgtaccaatagccactgttgcaccatcatgtgcaaatataactgagtttgaacttactcctgcttcaactgaccaagcaaagagaagatcttcaatctgttcatctgttggttgtttagcagatattgtaaccccatccttagaggtagctgttgcaggtaaaaaagatgcagtagatcgtacacgattaagaaaagattcttgaagaatcagtccaccatcacaaagacttttgatatcaagatagtgagaatgtgtgagttgatctaaagaatttagaccaggaagttttaagatacgcaaatttttttttgttgtaagtaattctagcacacctggttcataatcaggtgctgcaatgacctcaaaataatgcttaaaaataaggttagccgagtcatgatcaaggggacggttaacaacaattgcaccaccaaaagctgcaattctatcacaccaaaaagctttttctaatgcattcccaatacttttttttgaccatgctactccacaaggattattatgctttaatataactgcagcaggacgacttgctaagtattgaagaatgttacatccattatctatatctgtaaggtttgtttttcctggatgtttaccagattgtatcaattcagcatcagtaagtgaagaaataatacctccagatgtacgccaaatcgtatcacctatagttaactcaccagaagtaaattcataaagtgctgctggctgatctggattatctccatagcgcaatccttttatttccccattgatattccatgttttttttgtatatgtaagtattttatctccaaaactaatagtaattgtggggggaaagtgttcttctactactttatggtacatatctttaagtaaacccattggtattcctctataaaaaatgagtgtgttaaatggaaactatattaactgactcaggcaattagcatagactgccattaatagtaaataacatttgaagcttttggccagttagtatactctctaaaggagaggatgtgaacttaaatttaaatcaatatattattcaagatgttatattgttgttattagttgaagtagactaagtttgaatgtaggaatagatatggaacagttattaataaagttagctagacagcttgaatctcttgatgaagcttctttaatggcactttgggaaaaatatgctaatattgtatctcagtttgaacctacaaaacgttgggaagaagcaaccttaattttttctttaattcaagcaaagcatatgaagaatcaactgtttaactataattgggcagaacaagttcgtccttctacatcatctcatgaagttcctatttctgtaatgcttgagacaaaaaataaaccccatgaagttaagcaagcaaaaataattccttttaaaaaacttattgaaaagtcataacacaatctctatacctttaattaatccattgtcacttacctattatctctatataatccattgcgcccatattaggaataataatttagttatatacaattaattataatctaatagtttttatagtaggatgttatcttcctatacttataaaactagctatttatctttaaataacttttgaaaggaattacacatgaagtataaatggttatatctatacaattcttcctgtgctagtcaggagatactatgcccaatgtagttattattggagcacaatggggtgatgagggaaaaggaaaaattgttgatttattaacacgtgacacagattatgttgttcgatttcaaggtggtaacaatgctggtcatacagttattgttgatgggaaaacatatatcttacatcttattccttcaggcattcttcacaaagaaaaaatttgtataattggtaatggagttgtccttgacccacaaatttttatacaagaattagatacgttgctatcacagggaatagatgtttctcctaatcgattaaaactaagtaccaagacacatctaattatgccataccataaactacttgatcaggttcgagaaaatgcaagtaccactcaaaaaataggaacaacaggacgtggtattggcccatgctatgaagataaagtttctagaatagggatcagaactatagatttaactcaacctaaacttctttataaaaaaattgaattagcattaaaagaaaaaaatacattgtttactcaattatataacactgaatttgttaatgcagagactatatttaatgaagtaatggaaacagcatctagaatccttccttatctatctgatacatcaagtatattacaagatgcgtttataaaaaataaaaaagtaatatttgaaggagcacaaggagtacaccttgacattgatcatggaacatatccttttgtaacctcatcaaatacaattgctgcaaatgcatctattggatctggtattgctctttcttcaactgagaaaatcataggtatagttaaggcatacacaacacgtgtaggatctggaccttttcctactgaattatatgataatacaggaaaatttttacaagaaaaaggacatgagtatggtgcaacaacaggacgtccacgtcggtgtggctggcaagatcttgttatgctaaaagatagcgttagactcaatggttttacagagcttgcacttacaaaacttgatgtcctttcagggctcaaaaaaattaatatttgtacatcatatgcttatcaaggggaaagtgttacttatccaccacaagatgaacacattttattcaatgaaataaaaccaatatatgaaactatgcctggatgggaacattctctagaatcttgtacttcatggaatcaattaccacagtgtgctaaaaactatattgaacgaattgaacaagtagtaggtgttccaataactatcatttctgttggagctgatcgtaatcaaacactttttcgggatatatgattgaagtattataatagacctaaataaacatgttgactgttactagatgaaaattatatcttaaacctgtagaaagatgtatcttctactagttataatatattttaaaggaataaccctagtggtataacactaattatcactagttaaaggaatagaatagaatgaatgttgctgtagctgttagtggtggtacagatagtttatacaccttagctacattaagagaggcctttggaaatcatcatgtatttgcactacatgcacgatttaaagaacaaattactaatgatcctgttcctgcacttaaggaacaatgccataaccttaatgtacctttacatgttgttgatttacataaagaatttaatgagctcattattcgtccatttattaaagcttatgcagatgggaaaacaccaaacccttgtgtacactgtaatgctaaagtaaaatttggtcttctccaaaaaaaagcacaggaactaggagcaaatcaaattgctacaggtcattatgtttcgcttattgaccatgatctctatggtaaagcattaaaatgtggtgctgattctacaaaagatcaaagttactttttagctttaactcctagagaacaacttcaaacagctattttcccattaggaacgttacgaaaaacagaagtccgtgaacgtcttcaaaaaatgggactagaagtacccctaccaaaagagagccaagaaatttgttttgtccctaatgatgattatagaaaattcctacagtcatctgatgtagacctcttatctgaaggtagaatggttatgcttgatgggacattagtaggaaaacataaaggactatggaagtatactgaaggacaaagacgagggcttggtgtatcttggtcagaaccactatatgttgcacacaaaaatcactcctgtaatgaacttgttcttggcacagcaaaagatatacttgttgatacctgtacagctcaagatattaactttttagttccacaggataactggccaaaagaactttttgtacgtactcgttacagacaacaagctgtacctgctgatatccaatttgtaactaatacgtcttcatcaaaaaaaataactatacattttcactctccacagcttcctgcagcacctggacaacttgcagctatttttgacaaatctggttatgtattagctggtggacttattacaaatgatttatagtgtatacaattttttgaaatgatttttctcctatgattaacagaagttataattaataccttgcagatttaaggagatttcatgattggcatatcaaagttatattgtggtcaggtagagtcgtctgatgcattacgatatggacgtcattctggaaaacttccttcacatttattgcaattttcagcagataaaaaaccagtagtggtttggaacacaacacgtaggtgcaaccttaaatgtgtacactgttatgcaactgctttagatgaagaaaaaggggcagatcctatgtctacagaacaaggaaaagcccttattgatgatcttgcagcttatggtgcaccagtattattactttcaggcggagaacctttagttcgtaatgatttagttgagcttgcagcctatgcgacaagtcaaggcatgagagccgttatttctaccaatggaacattaattacaaaagaaaaagcacgtgaattaaaacatgttaacctttcttatgtaggaatttcgcttgatggagcagaagaggtacataataaattccgtggagtaccaaatacttttaaaaaaacacttgaaggtattgaaaactgtaaagctgaaggtcttaaagtaggattacgttttaccattaacaaaagaaacgttgctgatcttccaataatatttgatttacttcgtgatcttgaaattcctcgagtctgtttttatcatcttgtgtattctggccgtggctctgatctcatccaggaagacttaagtcatgaggagactcgtgctacaatagatcttattatggaaaaaactcgtaagctttttgaagaaggatacccaaaagaagtacttacagtagataatcatgctgatggaccatatgtatggatgcgattgcaaaaagaagacccaaaacgagcagctgatgtttttgaactattacaatataatgaaggtaatagttctggaagaggctttgcatgtatttcttgggatggtaaagtacatgcagatcagttttggagacatcatacatttggaaatgtccttgaaagaccattttctgaaatttgggatgacccaaatattgaattgcttcataaaatgaaaaacaaaaaagagcatgtgaaaggtagatgttctacatgtcgctttcttaatatttgtggaggaaattttagggctagagctgaagcttattatggagatgtttgggctccagatccagcttgttaccttacagatgatgaaataaaaaaatgaaagtaaaacattatatatatatattaatatattagtgttacgtccaaataaaatgacaattaaacttactgttttttaattggcattttattttataaaaataaaggatactcatgaatactattttctttcgtggccgtaggcttcgacgttcaatacaagttcgtgatttaatccaagaaactagattgcatagtcaagacttgattatgccttattttgttgttgatacagataatagtaatttttttcagcctataccttctatgcctaatcagtatcagctttcactttctaatcttgaaaaaaaagttgatgaagcaattaatcatggtttaaaatctgttattctttttgggttacccaaaaaaaaagattcttatgctacagaagcttataatgaaaatggtattatacagcaggcaattcgaactttaaaaaagaaatggccttcattacacgtcatcacagatgtttgtctttgtgagtatacaaatcatggacattgtggactactaaaagtagaagatcagtgtgggcatgtaaaaaatgatcctacccttgaattattaactaaagttgctatcagtcatgctgaagctggtgcagacatgatagctccatctgatatgatggacggtcgaattcaagcgttacgttctggattagatcatgctggttttatagatatacccattatgtcttattctgcaaaatatgcgtcagcttattatggtccatttagagaagctgctcaatctgctcctcaagtaggtgatcgaaaaagctatcagatggatcctgcaaatacaaatgaagcacttcgtgaagttcaagctgatattagtgaaggtgcagatattattatggttaaacctgcagggccatatcaagatatcatccgacgcatgtatgagacatttcctgttccaatagcagcatatcaagtaagtggtgaatatgcgcttattaaggctgcaggagaaaaaggctggatcaacgaacaagctgttattatggaatcccttataggtattcgtcgttctggtgcaaaattaataataacgtactttactgaggacgttctaaaaaaaaggtgggtagattcatgagtcttcaagcagaaaaaatatctctagagggacatctttctagaggaaaagatatgtataaaggccatcctcatgaacaattaatgggaaaaacttctgatggaagtggacaccctcatgtaaatggagctcatcctaaaagtgcacatccaggaggtatgcctaggacattaccagacggatcaccaacatgtaaactaattgcatgggaagtaacacgctcttgtaacttagcttgtaagcactgtagagctgaagctcatatggatccatatcctggagaattttctacagaagaagctaaagctttaattgatacatttcctgaagttggtaaccctattattatttttactggtggtgagccaatgatgcgtgctgatgtatatgaactcatggcttatgcaacgtccaaaggcttacgttgtgtaatgtcacctaatggaacacttattactccagaaacagcacatgctataaaaaaatctggtgttcaacgttgttcaatctctcttgatgggtacaatgctgaaagccatgattcttttcgtatggttcctggagcttttgaagcttctcttcgtggtattcagtatcttaaagatgaaggggtagaatttcaaattaatactactgtaacaaaaagtaacctcaatgattttaaaaaaatatttaaactctgtgatgaactaggagcttctgcttggcatattttccttcttgtacctatgggtcgagctgctgaaattgcagaacaatccattacagcagaagaatatgaagaagttttacattggttctatgattttagaaaaacaacctctatgcatttaaaagccacctgtgcccctcattactatagaattatgcgacaacgtgcccatgaagaaggtgttcctgttaatgtagatacctttggtatggatgccatgactcgtggttgtcttggtggaacaggcttctgttttataagctatgaaggtcaagtccaaccttgtggatatctcactatggattgtggtaatgtccgtgaaacacctttcccagaaatatggaaaaaagccaaaacatttcaacaatttcgtactcagtctgaatataaaggtaaatgtggtgtatgtgaatatcacaaatcttgtggtggatgcagggctcgagcttggagtatggatggtgatcatatgggtgaagaaccgctttgtacatatcaaccaaaacgctatttaaaacaaaagaattcttctcaacctattgatcatcaaggcattacaccttgtgctcgtggccatatgggataatcctatggataatattgataaaaaactattagatattatacaaacaggatttcctattgttccaaggccttatgctgagattggagaaaaacttggaataactgaagctgaagcattaagtagagtacgagctcttaaaggaaaaaaaattatccgtagattaggtgctaactttcaatcttccaaattaggttttcgatccacattatgtgcagcaaaagtacctgatgaaaaaatggaattatttacaactgaagtcaataaacttccaggagttactcataactatatacgagatcatgtttataatgtttggtttacattaataggtccttcatgggaagaagtatgttcaacgcttgatggtgtaacagagcgaacaggtataaaaattctcaatttacctgctactcgtatgtataaaattcgtgtagactttcgtatggatgatgaataaattaattatcaataatatcaataaatataaaggtgctctctagtagtagggagcatttttttatgatacataaaaaactcttaaacttttgggagataataagataactaactattaattatcataattatcattaagagatatttttaataaggagtaactatgcattatccctttaaaaatattatacatttattcataacattagtgattagtgtatgtattggatgtacttcatataaaatttctgagaaatatccatatatagatggtgctgttattgaatattctaataatgttgggaataatgctaaagctgaaaaaattgataatggtatgtttataccagatgggaaaggtggatccatatggatacctggctcaaatcctcaaggtccgaatgaagcatttattcaagctcaagagttacgtttaaaagtaagagagcttgcatcacaacttcttgatacacaagacagtagttctttgattggtctaatagcattaccaacttcttttgttaatttgaataatttttcagaatcaagtccattgggtcgctatatgtcagaagctatgatttatgagttcaatcaacgaggatttcctattaaagaatatagaatagatactaaaatttctatgagtgaatcagtcggaggtgaattctctcttcaaagaaatctaccagcactatctgttaagcaacaatgggctgcaattcttgttggaacatacctaagagaaaacaatgctgtttttattaatgtaagacttgtaagagcaaaagatggaatggtattacgtaccgctcaaattgttcttccacaaaatgcactactttcaaatatgatatcgccaccattatcttcaggtatcttatatattggaccacaggaaaataatacatctatatctaaatttaaccctactagttcttctcaacaagaacaacaactagttaagccttctgtgaaaactcagcttgctcaagatacacaagaaatgaataatcagcttgagcaaaaagataataataataataataataataataagataactaaacagatacagtctaactctctagaagagagtagctcaaaagcaacaatatctcctccagttcctgggatgcctaataatctataataaagtgagaagattatgcataggttgttattcttactgtgtatctgtattattacaataaatgtagggtgtacaaaaattatgtatgttccagagtcttcagaaacactccataattggcatcttgctagagaatatcaaagacaacaacggtatgaacttgctagacaatactatatattggctttagctggagcaagagaacctcaatctcaaaaaactcttcaacttgaaataaaagctgtagacagaatgatagaagctatgcgttgaatattcttcatatgttatcgggagttattattatgttccgattactatttatttttatttttagtataactttccttttacccaataaagtattagctactactagtggaacaatccctactgctgctgtaacaataagtgaacaattagatgctcaacttcttcgtagaattggaaataatctttataataaatcctctatatctattgtggtaaccccagctgtacttcttgaagatttatcaaaaagtagccctttagcaagacaactggcggaagagattacaaagtgtttagttcaaaatggatattctgtcacagaaatacgcaaagctagtaaaatcattatagataaaacaggtcctaaaattcttactcaagacccatcacagcttgcaacaactcaagtagaagcagtagctatacttacaggaacctacactgttacaaaaaagaatgttagattcaatataaaactattacatataccaacaaatgatgtcttagccacagcgtcaacaacaataccaattactaaagaaatttatccattattagtagataaaaatactaaacctggaacaccaagtgtaactacaaaactacaataaatattttttcatcaattaccaatataaataatatattaattttctattgtcatagtattacttatttctataaaattaaaatataaataacactatatttatagtagctatatacaattgatatattatatagctagactataaaaagtctaagtaatttttatatataattattaggtaaaattaatttttataattaaagagaagataataaaataatactttataaaaagtatataattattttactaaatatctagtaacaagcctatatcttttaaaaaatgtatacattttttaaaaattttttctaaaaatatagttatattatatagttgcaaggtaacgctatatgttatctttcaaagcttacttcacctataaatcacatgttaattattttgtgatatcttaccatatgttgatgtcacacgtcgtgaagctagtcctgtagtagatggggaaggtattgtaagttccttttatttatttaattcttcttgagctttgtgttgagcagctacttgagcttgtgtacctgtaatttgttgtgttttataagcagactgggccaatgatttacttgctcctgtaggatgttgtgtccttgtaattggtacaggagaaccactactttgttgggatactgataacttagatgcaatttcagcagctgcagcttttgcttcaggtgtattaagaatttcagcatatgctgaacgtaagcctgcaagaacatctatgacactatctattaacttgatatctaacttaagatttgcttgaaggagtcgagtagtacaaaggacatagagattatgcaaattttctgcaatttctcctccaagattcatatttaatgatgattctaactcactaataacatcaagtgctttagaaataagtatcccttttgcaccaaagtctttctctaaaattttctctttagcttgattaagaaactttattgcaccatcatataaaagaagaagaacttctccttgaccagtcgtattaaactgagcttctacatacgcctgagttcccttaatcataacaagtttctcctagatgctaaaaaaagtattatgcaccaagttgccctaaactagaagcatttgctgacatcatctgattatattttgctaatacagcatcaagtctagaaaattttaaacgcatcatacgttcccaactagtaactctttgtgtttctttttctattcttgtctcaagatttttcataacatccttatagttatcttgcatgataattaaaggacctgtgttttcttttaaaggatcttgctgtacttcagctttaagtgcttcttgtatttggctaagtttaccttgtttgactcttacagtactttctacattgatacctggagtacgattattaactgctatactaagacctgtagcaggaccagatgtgaccgtatatatattttttgcaggatcagatagagaagcttttacacctccaatgtaaacgtctcctatagtaccacttgcatctacagaatactttacatcatatgtaccagcttgtgtttttccaacaatatgatcttgataagaaaaatctgttgaatcagatattccagaactaccagctaatatatctgctactgcttgtggatctttttttaatgcctcatcaagagttgtataaggtgcatcaggaccaattgtttctctatctaaaattttaagttgtccaaaagtttcactaccctcatcagcatctacgacaataccaattgaagcaagtgatgaaaatagatcccctggaccatcttgtgtttgtttaggagaaaaacctagaccattagaagaaaagatagacttaagtctagtactaagcatttgtatgccagtatcacctgtaaatagtccagccttcacttttgtaggactttgtaaatatgatggaattttacttgaagaactagaagtgtctttactatcatctttgtcttcagctgttgctttagttaactcttgaattttggaaagaacattatttatagactctactgctttctcaacttgtttttttacttcgtcagtagaagtctgaattgtaatttgtgttttcccttcggaaagtagtgtaatttgaagtcctgggataacttctgtaagttcatttgtagaagatgtaagttcttggtcccaaccattaatattaaaaatagcatcttgagaatcacgtttattccagcctgcttgacccgaagatgtgaaacttccaagatcagtagggctagcggttactttaacttgttgattaggaactgttccttctaattgcaatactatatctgagccatgtttttcaaaagttgcacgtactcctgtattttttgtattttcatttatagctgtttggagttcttttgctgttgttcctgaaggaatatcgaaagtaaatgttcttccattgtattcaaaagaaaattgttgagttgttcctgaagtattaataattgtatcttcaccattagctaatgcactgctggtagcaacagatgctttaaagtctggaagcgttgtcttatttgaaatagataaagtcgcatttgcaccagtttcagttccttcaagactaaacatatagccatcgccagtcttgataaggtttgctttaacaccaggattattagaatctttgtttattaatgttgcaagatattcaagatcactacctggaggaacttcaacttcatgtagttcccctttatactcataagcaaagataccaggtgaacctgtattattaatactttcagttttagaatcaaaaatatgattattagaaagaatcgtgtttgttgcaagctgtttcacatcaattgtatgtgttccatcagatgcatcagaacttgccttaacgcttgcaacagaagtatttgaaacagaaccttctttttttaaaatagcaccaacagaacttagcttacttaaagacgcttcagtatctttaactgtttttataagctcttcaaatgctttatatttttttgtccattgttcatgggaaactacaagtctatttttaggaataagctcaattttcttaagttgatcaatcatagcttggaaatcggttccactaccaattcctccaaaagaaattcctcctgaaagataatccgccatagttttgtccttacaaaaaaattttacctatatgatcctattcagcaaataaagtgccaaatgttattttctttatcggaaaaactttttttatgtttagacatgaaaaagaaaaaaatgcattttaaaagaaaaatacttaatggaggagtgtatcttcttctcgagtaaacattctccaacgtgtacctgttggtgtattttcaggaattactctcaatatagggaaatctttccagctatataccattgaatgatcaggataaacctcacaatgcatatattcagatatagtatgtggtgatagattctttggatcttctccaagttcttcaagctgctcatataaaagttcttcaatacgagctgctacttttttagatatgttatctgacataattattcctttacctataatgaatgactaccctaacagtatgtattataatgttttttggcaagtagcatcaaaatattatagagatatcttgacagtattattggatagcgatagaaatatttcttcaataacataggcgcgtagctcaggcggtagagcacttccgtgacatggaaggggtcagcagttcaagtctgctcgtgcctaccatatacttccattattaaagtaaaaagataagttaaccttcaattaaggtaatagttatgcagagtgatataaataaaaatcatcttactatgactgaaggattaacatatattaatgaatcaggtttaaaagaagaagaatcaaaaaatattgttggttacaacattaatggctcaataatagatctttttacacctcttcctaccataacaaaagaagttatacctatcactattgattcagaagatggtcttgaaatgttacgtcactcagcagcacatatccttgctgctgctgtaaaaaatctttttcctacagtaaaaatatctattggtccttctattgagaatggtttttattacgactttgatgcagaacgtccttttaccccagaagactttcctgctattgaagctgagatgcaacgtattattaatgaatctattccttttgagcgtattgaaattagtaaagctgaagctctagaatttttttcttctcttcatgaaaattataaagtcgaaataataaactccttagaagatggtaatattacactttatcgaataggaaactttacagatctttgtaaaggtcctcatgttccaaacacaaattttataaaagcttttaaactactttcagtagcaggtgcctattggagaggtaatgaaaataatcagatgctctctcgtatttatgctacagcatttcctaataaaaaattattaaaaacatatctaacacaactagaagaagctaaacgtcgtgatcatcggaagttaggtaaagagcttaatttatttgaatttcatgaggacattgctccaggaatggttttttggcaacctaatgggatgttattacgtactattttagaagacttcttacgtaaagaacacttaaaaagaggatatcaactcgtacaaggtcctcaattacttagacgagaactttgggaaaaatcaggtcactatacaaattataaagaaaatatgtattttacggaaattgaagaagatgtttatgggataaaacctatgaactgtgtttctcacatgcttctttataaaacacatcttcatagttatcgtgaacttcctcaaagatattttgaactaggtgtagttcatcgccatgaaaaatctggtgtattacatggactcttaagagttcgccagtttacacaagatgatgcacacattatttgtatgcccgaacaacttgaagaagaaattattcaagttattacttttgtccgtgaccttatgtcactatttgactttaattaccatattgttatatcaactaggcctgaaaaaagcataggttctgactatgcatgggaacttgctacttctgctttaattcaagcagttgaaaaaataaatcttccatactctattaaccatggagatggagcattttatgggcctaaaattgatataaaagttactgatgctattggtcgtgaatggcaactttcaacaatacaatgtgactttacattgccagagcgttttgagttagaatatgtaggtcaagatggaaaacgtcatcagcctgtaatgattcatagagctatttttggctcaatagaacgctttattggtatattaacagaacattatgcaggtgctttccccacatggttaacacctatacaagtaaaaatattaactgttactgatgcacaaacaccttttgcaaaacatgtctatagtcaactacaggatgtaggtattcgtgtaggactagacattcgtaatgaaaaattaggttttaaaattcgcgaagcacaacttgctaaaattccttatattcttgttatcggacagaaagaattagaattagaaagtgtaaatgtacgattgcgaacaggagaaaatattggtatgcagtcagttacagagtttattaaacttgttgaaaatgactgtatacaaccgttcaaacgtggagggatgaattatcgcttctcttaatattaaacctcgtagagaggtttcccaagatggagtatgccgtaatgagcaaatttttgctcgagaagtgcgggttattggaccagatggtgagcagcttggtattttagaccgtaatcaagctattgctattgctaaagaacatggccttgatcttgttgaagtagcagcaacagcagatccacctgtatgtcgtattatggactatggaaagtttaaatatgaggcacaaaaaaagaaacaagaagctaaaaaacgccaaacaatagtccaaattaaagaaattaaaattcgtccaaaaactgatgaacatgactttgaaactaaagttcgacatattaaacgttttttagaagaaggtgatcgtgttaaagttacagtctttttccgtggacgagaaattgtacataaggatagaggaattgtaattttagaacgaattatacttgagacaaaagaagtagggaaggtagagcaggagccaaaagccgaaggacgtacacttcaaatgttacttgcccccttgcctaaaaaagctgtataaatatgactataactcataaaccatatagttactataatacaactaaacatattttgatttcattaggagaaaagatattatgcccaaactaaaaacaagacgttctgcagcaaaacgtttttcttctacaggaagtggtaagtttaaacgccgtagacaaaaccttagacatatccttacaaaaaaatcacctaaacgaaaaatgcagctagggcaagttactattctagctccaagtaacgttaaagcagttcgtcgtatgatgccatatgattgttagttctgttttaatggtttatgatacatttatatcacaagtagatcactttttagtttacttttagatagtaaagaaataaaggaattatcatgcgtgtaaaaagagggttttctgcccatcgtcgacataaaaaatatttagaaatggcaaaagggtttcgtgggggacgtagtcggctgtatcgtactgcacgtgaagctgtagaacgctcattagtttatgcatatattggaagaaagcaaagaaaacgtgaattccgtaagctttggatattacgtattaatgctggtgctcgtgaacatggtctttcttattctaaaatgatggcaggattatctcaagctggaattatgttgaatcgtaagatacttgcagagcttgctgttaaacaaaaagaagactttgctaaactagtagaaattgctaaaaatcaagttcattaattataataacaatattacttattaacaaaagtagttaaagaataaagtaatagttatcaaattagatataaaaagttaattgaatggacctaattaaggaatttgaacgcctgataccagaaattaaaaaaaatctggaacaggcgtcttcattagaacatattgaacaaataagagtagcttttttaggacgaaaagggcaacttgctgcacttatgtcaaaaataccttcagtagatacttcactacggccagtagttggagaaactgcaaatagtgtaaagaatcaacttactcaacttattcacgaatacaaaactcagcttgactttctaacaactactaatcgtatacaaaactttgatgcaggccttcctgggaaacgaccttggtatggaacactacacccaattacaattgttttagaagaaatttgttcagtatttactagcttaggatatactatagcaacaggtcccgaagtagaaacagaatatcataactttgaagcacttggtataccatcggaacatcctgcaagagatatgcaagatacattttatatttctgattctatcctattacgtacacatacatcttctattcaaatacgtaccatgttaaaaaaacaacctccaattgcaattattgctcctggacgagtatatcgtagagactctgatgttactcatacacctatgtttcatcaaatagaagggcttgttgttgataaaaatatatctatgtcacatctacgtggtacattaacagcatttctaaaaacaatttttggcgctgaaataaaaattcgattccgtccaagttttttcccctttacagagccaagtgctgaaatggatatttcatgtcacccttgcaataatactggctatgtaaaaaatgaaatttgtcgtatttgtaaaggaagtggatggattgaaatccttggctgtgggatggtacatccaaaagtttttgagtctgtaggatatgatcataatatatactctggatttgcttttggacttggtgttgaaagaatagcaatgttaaaatatcacattgaagatctaagaatattttttgaaaacgatctacgctttctacgtcaatttatgtaaatataagctagatagtataagtgatatgaaaggcacaaaatgttattaagtttaaactggttacgtgaatttgttccatatgaaggaactgctcaagagcttggtaatagactaacaatgcttggatttgagcttgaagatatcataacaccatataataacattcaatccattatagttggaaaagttgttcattgtgaaaaacacccagaagctgacaaactttctatttgtactatagatattggtcaagaaacattactacatgttctatgcggtgctccaaacgtagctacaggtcaaaaagttcctgtagctactattggtactactatgcctgatggtaccattataaaaaaaattaaattacggggcatagaatcttttggaatgatatgttctgaaaaagaattagaatttacagatgatcattcaggaattttagttcttccagaagaactaactgttgggacatcactagtgaatgctttaaatcttgatacagaaattctaaaaattagtattacaccaaaccgaggagattgtttatctattttaggacttgcaagagaaatttctactgcatttgggctaccgttatttcctcagcaacctatccatttcctagaagtagagcctgatttttcaaaaaattggtctgtccatgtttcttctaaaaaagtatgctcatcatatctattacgtttagttgaaaatatatccgtacaaaaatcacccttacatattcgccatagacttcactcaatgggtattcgtcctatttctaatgttgtagatatcacaaattatatcttactagaattaggccaaccacttcatgcctttgataaagatcttattgaaggtaatacaacatatatctctttagcaaaagaagaagaaatactttgtactcttgacggaaaaaatcatacattaactccatctgatttaattatctatgatgatactaaacctattgcactagctggtattatgggttgtcaaaactcaaaagtaacagaagcaacaaaaaatattcttattgaaagtgcagtatttaatcccagtataattagaaaaacagctcgacggcttggtatttctactgaatcttcctatcgttttgaaagaggtgttgattcatctggagcgatgtatgctcttaataaagccattaaaatgattattgatacaagtggtggagaagtcaagataggtaatgctcactatgaacctacaccttataaacaacctattatccaacttgatacatcaaacatacaaaaagtaacaggtacttctattccttctaacttctgtatcaatacactgacacaacttggttttgaaatagacacttctaactgtaatatatgggatattactataccaagttggagaaaagatattcaacattctgtagatcttattgaagaactacttcgattttatggactaaatactatacctgaagaacttccatgtatttataaatcactaaatgacataggattaccagaatctcagtatcagtttattacaaaagttaaacattgggcttgtggaataggacttaatgaaactgaaaattatagttttataggaaataacgagttagatttgcttaaattttctaataatactagacttattatatacaatccccttacagaagagcaaaatgtacttagaacctcacttatacctagtcttttaaacaatgtgaaatataatgtagctcatggaaatactggattaagattatttgaagttgctaatacatatacatttgaagcaatatcagaaacaacagcaaaagaagtcctaaaactaggcatagttatgcatggtgatttatttgatacaggttggcctcaaccttctactagcgcctcttatttagatcttttaggtattgttgaacactttataacttttttacatttaccacccctgactacttcacaaactgatacttatgcatttcttaaccctggagttgatctttttatccatgggaaaaaaattggatatattggctgtatatctcaacatattgcaaaaaattgccatacccataaagaaatatggattactgagcttgatttagaaacattagctcatttatataaaaatataaaaataacatttaaaccattaccaatttatccatcttcttatagagatatgactcttattattacttctaatacttctatctcaaacataaaaagttatatggacttaatagatattcctatattagaaaacattttcttattagatatatttagacctaataatatagaacaacattgtacgtttcgtttcgtttttagaagtgctaaaaaaacactcaaggatagcgaaattgatttggcttataaaaaaatcactgaaatactatccaatcaatgtaatataagatttaatgtattacttgaataatatttaatgacaatgtaagatatctagaggtaggtacgtaatgaatgaacgattatataaaatcggtgaagcagcacgtatacttgaacttgaaagttatatcttacgttattgggaaacagaattttctcaactttctccaaaacgtacgccaaaagggcagcgtttatattcagaaacagatataaaacttcttttcaggttaaaatacttactgcatgaacaaggactaacaatagaaggagcacgtcgagtactttctggtgactcagctttactgataacaccacaaacaaaaaacaaaaatgaaactaagtcgattaaaaacgaaacaacaatatttaaagaaaaagaagaaatggaaaaattattagatacaattaaaacagttgaaaaagaactcttatatataaaacaactacttaacaaatcttcaactttttcattatcctgctaaagccctagagttttatactatgattctttcgccttccctcttatctgctaaaatagggagccttgaaactgaactccatgaattagaagctgcaggacttcaatgggtgcattgggatgtcatggatggacactttgttcctaatataacatttggacaacacgttattcagcaacttcgtccttgttcatctctattttttgatgttcatcttatgatctcatctcctgaacgttatatttcaaattttcatactgctggagctaatttacttgttgttcatgttgaagcaactatacacttacaacgagttgtttctgaaattcatcgacttggaatgaaagctggtgttgctctaaatccttctacctccttatcagtactagaatatattttagatgatattgatttagttctccttatgagtgtcaatccaggttttggaggacaacatttcctttcttctacttatgaaaaaatatacaacttacgcaggatgattgatgaaagagaaaaaacaatccttattcaagtggatggtggagtaactttatctaatacaaaagcattactagatgcaggaactgatgtttttgtttgtggttcttcattttttgtaggagaatcttactcagagaaacgatatcaatttgaatctgttgccaatagtctaaccatttaatcttcttacaacatctcttcatggaaaaaaatataccatctcgtaaagaattagctaatgtcttgcgtatcctaacaatagacgctgtagaaaaagccaactctggacatcctggcgcacctatgggaatggctgatattgctgaatcactatggcggtgctttcttaaacataatccttctaatcctcaatggattaatagggatcgttttatactttctaatggtcatgcttcaatgctgctttatggagtattacacctttctggttatgatttatcaatagatgatattcaaaactttcgtcagcttcactctaaaacaccaggccatcctgaatataaatgtacaccaggtgtagaagtaacaactggcccattaggtcaaggcttagcagtagctgttggtatggcaatggctgaacgtttattagctacaacatttaatcgtgaacactttcctattattgatcattatacatatgtttttgtgggcgatggttgtctaatggaaggtatttctcaagaagcttgttcatttgctggaactcatcaccttggaaagcttattgttttttatgataataatggtatttctatagatggaaaggttaataaatggtttactgatgatacacctgctcgatttaatgcttgtggttggcatgtcattcctaatatcgatggccataatgcagaagctattgattctgccataatacttgctaaaagtataacagataaacctacacttatttgttgtaatacaatcataggatatggctctccaaataaatcaaatagtcaaagttcacatggtgcaccacttggaaagagtgagtgtgatgctgttagaacagaattacactggaagtcagaaccattccaaatcccagaacaaatatataaagcatgggattgccgtaaaaaaggaactatgcttgaaaatgaatggaatgaactctattcaaaatattgttcaacatacccagaactttcttctgaacttgaaagaagaatacaacacatacttcctgagtgctggaattcgctaacaacatcttacttacaagaaatagaacaaaataaaatagctatagctactcgagtagcttcaaaaaacactttagatattattgctccttgcttaccagagcttattggaggttctgctgatttatctggctcagttggaacaatccatagccacactaagtatatctgcaatttatcatatgatggaaactatctctcatatggagttcgtgaatttcttatgggttcaatcatgaatggcatagcgcttcatggaggatttattccttatggtggaacgtttttagttttttcagactatgcaaaagctgctatccgcctttcagctatgatgaatcagcatgttatttggcttcttagccatgactcaattggtgttggagaagatggaccaacacatcaaccaattgaacatatcagttctcttcgtcttattccaaatcttaatgtatggagaccttgtgatgctgtagaaacaactatagcatgggaaaagtctattgaatctcaaaaaacatcatgtatcactttaagtagacaaccacttacttatcaaagtcgtacaaaagaacaaatatcaaatatacaatatggtggatatatcttatatgaacccacaaaatcaccagagttaattcttattgcaactggctcagaagttgaactagctataacttcagcaattcaattagaaaaagaagggtatgctattcgagttgtttctatgccatgtacatccatttttgattcacaaccaaaagaatacaaagaattagtgcttccaagtactattcgaaaaagaattgcaattgaagcagctataactgactattggtggaaatatgttggatttgatggtgatgttgttggtatagacacatttggagagtcagctccagcccaaatattattttctcattttggctttacaaaagaacatattatttctaaagctaaaaacttattacaaaaatagtaatgagtaccatatgaataattaataattgctatctattttttcatatatgcatattaatattgtcacgctatttccagactggttcacttctcctttaaatacagcgttattaggaaaagcaaaaacatctcgtcttatccaaacacatcttatcaatccacgtgactggacgcttgatcgacacaaaaaagtagatgatcgtccttatgggggtggcccaggaatgataatgatgttagatcctattgttcgttcattaaactatatttcagaacaatctcaaggacatggacgaattattatgttatctgcatcaggaaaaccatttacacaaaaatttgctcatgaacttgcaaaagaaaaaaccttaactattatatgtggacgttatgaaggtattgattatcgtttatcagagctttttcctatagaatctattagggttggagaagctgttattaatggtggggaagctgcggctatgatgcttatagaagcaacatctaggctacttcctggatttataggaaaagaaacatcttatacagaagaaagtttttcaaataatctattagagtatcctcaatatacccgtccagaattatatgaaagtatatctgttcctaaagttttacttgaaggaaatcatcaaaaaataaaacagtggcaacgaaaacaatctctcaaagtaacatttaatacctgtcctgagatgttaaataaagctaatctctctacttcagatatggagtttttttgtaataatataaaagaactggctagattaaatttaggacgaaaccttcattgtgtattgttgcactatcctgttatgttaggagatcaaacaattggtgcgacatctttgacaaacctagatgttcatgatatagctcgttgtgctaaaacctatggattaggtagtgttactatagtgacgccgcttcaagatcaacaaaatattttagaaaaaattattacacattggacagtaggagcaggaggaaaatcaaatcctgatagagcagaagcttttaagcttgtgaatatagcatcagacttacaatcatccctagatactattgaaaattatacaggacaatccccattacttattggaacaactgcctgtaaatatggtgtgttactaccttgtgatgtaaaagaaatgctattacaacaaccaattgctcttctttttggtactggtcacggtcttacaccagatactttaaatagttgttttggagtattacgtccattacgatggatagataactataatcatcttcctgtacgtagtgctgttgccataactctggacagaattttaggtgatttttactaaatatatagtaggtattcttttcaaaggagaaatagatggacattttcaaaaaaattgaacgtgaacaaatgcgactagatattcctagttttaaatcaggggacactataaaagtttattttcgtattgtagaaggggagaaagaacgaatccaagtttttcaaggaaatgttattcgtattcatagaggtacaaccaatgctactattacagtccgtaaaatatctgacggggtaggtgttgaacgtattgttcctcttcattctcctttggttgatcatatagaagtcgttagtgagggacgtgtccgtcgtagtcgactttactatcttcgtaatcttagagggaatgctgcacgcattaaacccaaaaaaatttattaacgtctcctatttttttaaataaacatagagggacattaaagtcccttttcttttttggagaagcctgtgtttcaaaaaaaattaaaacaacaacagatagttgttaaacaaagcttaccaataactccccatgagctagtatatgataacttatctttactcactgcaggtcttgatgaagttggacgtggatgccttgctggaccagttgttgctggagcagtcatcttaccagacactatatcaatagatggacttgctgattcaaaaacaatctcttctaaccgtcgatatatccttgcaaaaaaaatatatgaaactgctattagctggggtattggagttgtttggccaaaagaaatagacgaaataaatatcttacaagcaagtcttaaagctatggctcatgctgcaactgtattaaaaacttttccagaacttcttcttattgatggcaacaaagctatacctcaaaaattttttatccaatttggttggaactttttaccaatacaacattctatcattaaaggggatgctagtattccagccatatcagctgcttctattattgcaaaaacttttcgcgatactttaatgtctaaacttgataaacgttatcctcaatataatttttctaaaaataaagggtatggctcaaaaacacatcgagaaatattacaaaaaattggcccttctcctattcacagaatgacattcaaaggcgtcacttctcactagtcgtatccagttatattatatgaaatcttgtgaaattggacaacaaggagaatctgcagctgcattattcctatataataaagggatgagtattttagaacgtaattggagaaaaggtagatttgaaattgatttagtttgtcaagatatcaaaacattggtatttgttgaagtcagaactagaaaagcaaaaggaatgctactacctgaacaaacattaactatatctaaacgttgtaatattattcatagcgctcagttatatcttatggataaaaaagattggagtatgccttgtcgatttgatgtaatttgtattatatcaaaaaaaacaaccctagaattggaacactataaaaatgtctttgaattctacgaaattatggatagtagcaacacctcttggcaaccctggtgatttgtctattcgtgcaaaatctgtattagaatctgttgatattgtccttgctgaagatacaagacgtgctggattgctttgtcagcattgtaatatagtagttaaaaaatttcttagttttcatgatcataacgaagaaaaaaaacttaaacctcttcttacaatgttatctagtgggaaaacgttagccttaatttctgatgcaggtatgccaattataagtgatcctggatattgtttagtaaatgcctgtagaaaagcttcaataccagtttcagtagttccaggtccttcagcaccaataactgctcttgtaggttctggaattataccacatccttttacatttttaggatttttgcctagagatttcatagaacaagaaaaaattttttcttcatttattatgctgtcacacacactcgttttttttgaacgtaaaaatcgattaattaatacattaaaaaatgcttatacagtccttggtaatagagaagtatgtattgctcgagagcttaccaaactacatgaagaatttcttttttttaaccttggagaagaagttacatttaaaaacttactaggtgaacttactgttattattagtcctccaaaagaaaaacatataacagaacacagcatattatataaaataataacagaagaaaaaaaatatggtgggacagctcgtgaagttgctaaaagagtacaaacacgtacaatgggctggacgacaaagcagatttacagcatcattacatcaaggagctaataatgtctgctaaaaaaaatagtcatcttgtatttgaaaatagaaaagctagacatctttatgatcttcttgattttcttgaagcaggaattgttcttacaggccctgaagtaaaaagtttacgatcaggccatgcaagttttcaagatagttatgtcgactttaaacaaggtgaaggatatattgtaggacttcatatccctccatataataatgcaggttatgttatacaaaatcctgatagacctcgaaagttacttttacatcggcaagagttgaagatgttagcttcaaaagtagagcaaaaaggacttacaatagtaccattaaagctatactttaaaaatagaaaagtaaaaacagaaattgcattggctaaaggacgaaagttatatgatcatcgtaacgaactaaaaaaacgtgcagaagctatggatattaaacgtgagttagctgctcgtcatttataaattggaagtaaggagttttcatgagtagtgaagcagaaaaaattatttattctatgattcatgtttccaaacgtcatgggcaacgtgaagtattaaaagatatatctctttcatatttttatggagctaaaattggtgtacttggactcaatggttctggtaaatcatccttactaaaaattcttgctggagtagatcagtcatttgaaggagaaacagttttatctccaggttatactattggataccttgaacaagagccacttatagatgaaacacgtacagttcgtgaagtagtagaagaaggagttcaagaacttgttaatctaattaaagaatttgaatctattaatgcaaagtttgctgagccaatggaaccagaggaaatggatgcccttattgaaaaacaaggtaaagtccaagaacttatggatgcaaaaggagcatgggatcttgactcaaaactagaaatggctatggatgcattacgttgtcctccaggagatacacctgtttctgttctttcagggggagaacgtcgtagagtagcactatgtagactattattacaacttccagatatcctcttacttgatgaacctacaaaccatttagatgctgaatcagttgcctggcttgaacattttttacaaacttttccaggtacagttattgctgttacacatgatcgctattttcttgataatgttgcaggatggatacttgaacttgatagaggtaaaggaatcccatggaaaggaaattattcttcctggttagaacaaaaagaaaaacgactagcaaaagaagcaaaagcagaaaaagaacgaataaaaacattagcacgtgagttagaatggatacgcatgtctccaaaaggtcgtcaatctaagagtaaggctagaattcatgcatatgaagctatgcttaaccatgaaagcgaaaaaagagctcctgatttagaaatttatatcccaccaggaccacgtttaggaaaaactgttattgaagcaagaggtacaacaaaaagttttggagatcgtctccttattgaagatgcacattttattatcccttctggcgcaatagttggtattattggtcccaatggagctggtaaaacaactcttttcaaaatgattgcagggttagaaaaaccagatactggtgagtttcttataggggatacagtagtattaagttatgtagatcaaaatcgtgaatcattactaccaggtaaaacagtatatgatattattagtggtggccaagaagttattagacttggaaatcgtgacataaatgctcgtgcctattgttcacgttttaattttataggttcagatcaacaaaaaagcgttgatgttttatcaggaggagaacgtaatagggttcacttagctaatatgttgaagtcaggtgctaatgtcattcttcttgatgaaccaacaaatgatcttgatgtaaacacaatgcgtgcacttgaagatgggttagaaaactttgcaggttgtgtattagtgattagccatgatcgttggtttcttgatcgacttgctacacatattttagcttttgaaggtgattctaaggtgtctttctttgaagggaattattctgattatgaagaagataaaaagaaacgtcttggaaaagctatggagcaacctcatagaataaaatttagaaaattaacacgttaaaataactatagactctaattagagtaataacataacaataaaataaagttttttattataactcttagaaaaaagaaaatattaaattatatctaaacttttttgattattagttgttactctaatagtctaagttaatgttaaagaattatttgaagtaaaacaagtaagagtttttaaagaatctatagagtgaacactaatattattatctattgtagatatatgttcttccaaaataggagtaaccatacgtgataaaacacctttagggccgacttctatccattggcgggtaccatctttccactgatttgtaataacattaatccaatggacaggtgatatcatttgatttagaatagaatcataaatactttttgtatctacaaagggagtacctgtactgttagtatagatagggtatagtggtgtagaccaattcattttagataatttttctgaaaatttctgtgaagctttttccataagtggactatgaaaagctccactaacaggaagtaatacagcacggcctcttttttcttttacaaaagaaatagttgcttctatagcttctcttgttccacttacaacaaattggacaggagtattatagtttgcgattgttatagattgttgtatgttatgagatacatctttcacaatacattcaacttcagtttggctaagacgaagaatagcaatcattgctccctgttcactaggttctaaatttgacattaattccccacgtaaacacacaagttcaagcactgattcaaaggataaaacttttgctgctgctaatgcactaaactctcccaagctatgtccagccacacaacctggcacaaggtgtttagataattgttgccaaattgacatattcactacagttaaagctggttgcaaatattgtgtatctgacatcaaagttgtatcattgctttcccagtacacagctcggagaggtagtttactaatagattctgctttttcccaaaggctcatcatttcttttgaagattctgctatatcacgtcccatattattttcttgtgagccttgtcctggaaaaagaattgcaataggatttttcattataattacctataagtggggttaacttaaaaatactaaaaaagaaaaaagaaagaatattaaaaaaatattaattataaccaattgaactgattttcataagtttttcccaattatgtgaagattgtatgtgacgaacagtacctgttttacttctaatagcaatagagtgtgtggttgcaccctgcccatgaaactgaacaccatggagaaatgagcctcctgaaatacctgtagcagcaaagaaaacatcatctgcttttactaaatcatcaacttcaagtagttttgataaatctattccagcattgtatagagactgtttttcagtttcagtctgaggatctagtcttgcgatcatccctccaccaatacctttaattgcacaagccgaaagaacaccttcaggagttcctcctgttcctatcataagatctatctcagatctgggatctacagctaatagtgcacctgcgacgtcaccatctgtatgaagttgtattcgagcgcctgctgtacgaatatctgtaataagttgtttatgccttggtttatctaatacaaataccgtgagatcttttatatctttcccaagagccttagcaatatttttcaaatttgtttctacaggtgcatctagatcaataacattttttgctgactgactcacaactaacttttgcatataaaaacttggaccaggatcatacatacttcctgcaggagcagctccaactactgcaatagcatttggtctaccaaatgcaaggagatttgttccctctacaggatctacagcaatatctaaagggtatccataacctaatccaacttgttcactattatacaacataggtgcttcatctttttcaccttcaccaataataatagtccctatcataggaagattattaaaagaaagacgcatagcatcaactgctgctttatcaccggcatttttatctcctcttcctagccaacgagcagcagaaatagccgcagcctctgtcactctgacaagatcaaaggctaaattacgctctagtgtttctatagatgacatcatttttctccacgataagataactgttgcaaaacaaatatacataaaaagattacatgagagatatatgatattcaagaaaaagatcttttaaaaaataatatacaaaaacacattattattcactgcttaaagataattattatatagtaattgctttacatttatattgaatacgataaatatatttctcactattttttgatatacatagaggatatatgagagctgagcaatatttgaagacatgtttagaatgtactataaaaaaactaggttatacctggcctaaaaaagcagttatagaaatcccccaaaatacattgcatggcgatcttgctacaaatattgctttagtccttgcaaacaatataggaataaatccaaaaaatattgctgaaaaaattgctgaaaagttgcagcaagaaagtacctcattttcttctgtatctgttgcaggaccaggttttctaaatattacattttctccaactttttggcaaaaaactattaatcatatcctctctaaaggaagtagttatggctcttgccaattaggaaataaacagaaagtacttattgaatatgtttctgcaaatcctacaggccctttacatatagggcatggaagaggtgctgcaataggagatacccttgcacgtcttctacgcttcactggatataatgttactacagaatattatatcaatgatgcaggaaggcaaatgcaattactagggttatctatttggctaagaattaaagagcttagtgggatacaagttacatggccagaagaatattataaaggaacgtatattattgaaattgcaaaagcattattagaagagcagcctgatatcatctcatatacagatatagatggtgagcaggctagttttcactttggtatgaatgtaatacttaacggtattaaacaagatcttaaaacatttaaagtagaacatgaagaatggttttcagaacgtacattaataaaaacaaatgctattgaacaaactcttaaagctttagagtgtacaggacttacattcgaaaaagaaggtgctctttggttccaatctactgtttttggtgatgataaagatagagtccttcgtaaatcagacaaatcgctaacttattttgcattagatattgcttatcattacacaaagtataatagaggatttgatagaatcatagatatattaggtgcagatcaccatggatatattgctcgtattaaagctgcaatgcaagcttttggacatgatccaatgacatttgatattatacttattcaacttgtaagtttattagaaaatggtattcaagtagcaatgtctacaagggctgggcaatttgaaaaacttattgatgtaataaatgaagttggcgtagatgcagcaagatttatgtttcttctacgtaaaagtgatgctcatcttgattttgatcttgaattagtaaaacaacgtacaatgaacaatcctgtttattatgtacaatatgcttatgctcgtatctgttctattataagaaaagctcatgaccttggctttactattactgatgtaaatgaagttcccttatcaaatattactacaaaagatgaactcaacttattacgcctattagataagtttgaagatgtcatttataatgctgcacaacaccttgcccctcactatattacacattatcttatggaacttgcaggagaacttcatagttattatgcaaaatatcctgtattacaatctaatgaaaagactatagttctttctcgtcttgcattactacaagctgttggacaagttatttataatgcgcttaatattcttggtgtaacagctcctaaaaatatgtaactacctatgtcatataaaccaatatccaaaaaaatagtaagaccaaaaaagtatagttctcacacgacacctacttgtttctctttttcgattagtattccaggattatgtgtaatactttttataagtattatggcattaagctggagctttgtttttggaatactcataggaagagggtacagccctaaccataatctttctgaaattaatcaactcatcaatgatacatcatctgagaaccaaattgaaaaacagcctattttaaagccagaaaatctacgtttcatgcatgaactcaaacaagataataatcctactctatataataaagaagaaaaaaaaatacataatttatctcaagaaatagatacaaatcttcaacatagtcaaataccttcttcacacccacaccaagaccttaaacaaaaaaaagatatatcttctgaaacaaaaaatatacaaaaaaatattaatacaaaagagcaagttcaacaaataacatctcaaaatgatttaatgatatatagttttgtttttcaagtagcttcatttaagaaaaaaattcaagcagaaaatttacgagaaaaactcgaagaagagggttttcgcacacaactagtaacaacaaacgatgaaaaaggtaatatacgttggtatcatgtcagggtactcttgagaggagtgatcagtgatgctataatagccaaagatacctttactcaattaaaacttaaagatacaaaaattatttctcaggagccaaccggaagacatcgctaagtcacctggagcacatatgttaatggtatttaatcaattagttatattgcttggtcaatggactatcagtatttgtataacacttggagaaatatttttatttctacttgaagggttccgtcaaatatttattacaccaaaattatgctcaaaagccattagacaaatttatgttattggaactaaatcactttttgtcatttctcttataggattatttacaggcatggttcttggacttcaaggatattatgttcttataaaatttggatctgtcggttttttgggttcagctgtatctttaacacttattcgagaattaggtcctgttttaacagccattatgataatagctcgagcaggctcttcaatgacagcagagataggtgttatgcgtattacagatcaaattgatgcacttgaagtgatggatataccagggataggatatttagtttcgcctcgcattgttgcctcactcatatcatttcctcttcttacagctgtatttgatgttataggtataattggaggatatcttacaggagtatgcttactaggtgtaaatgaaggtgcatatttttcaagtattgaatcaagtacaactttatctgatattaatgaaggttctattaaagcattaacttttgctatacttgttattcttatttgttgttataaaggttataatgctcatcgacgtcgagatggtagaggtccagaagctgttgctaatgctactacctctgctgtagttgtatcatgtgtactagttttaattgctgattatgttgttacctcagcaatgttacgttaaggataaaaatcaatgccacatatacgtacagcttgggatatccgtttagaacacctctacttaggttatgaaaacaaagcaatacttcataatattaatacagtgattcctggtggtaaaataacatttgtattaggtgaatctggctgtgggaaatcaaccttactccgacatattattggattagctaaacctatttcaggtaaaattctttatggaggccaagacttattttctcttcctacaaaacagtttagaagtatcagacgacgttttggtgtactatttcaagatggagcactcttaggagccttaacacttgctgaaaatgttggccttccattgtctgaaaatacaaacctccctccaactattattagagaaactgttattcgaacactgagtttagtaggattagaaaagtttgcagatttcttccctaatgaattatcaggaggaatgaaaaaacgtggtggactagccagggcaattgtcacagaacctccaattcttttttgtgatgaaccaacttcaggattagatcctataaattcagcacaaatggatcagcttttaattggtatgaaaacccaatatcctgaaatgacattattggttgttagtcatgatcttgctagtgtttctagaattgctgagcatattttatttattaaagatggagcaataattttttctggttcatacccagaactaaaaagttcaaaagatccatacttacaaagatttatagatcgtaaacctgaaaaggaaagtattcgtgtagaagcttcccctattaaccctgctgtgcgtgtggcccttaacgcttggcttgaagagtagataaaaggattacatatggtaatttcaaaagaagctgcagttggtttttttgttttaataggtttaatttgtttaggatatttgactattaagcttggcaaaatggaactttttaactctgatggttattcagtttttgcaacgtttacatctgtttctgggctaaaaccaggagctgaagtagatattgcaggtgtaaaagttggacgagtaaaatctatacgacttgataataaattgccaagagctatagttgaacttaatgtcaataacaatatccatcttacagatgatgctattgcctctgtgaaaacaagtggattaattggcgataaatatatcagcatttcacctggaggtacaggagaaccacttaaaaatggtgatgaaataatggatacagagtcatcagtcgatcttgaatcattaataagtaaatatatttttgggaaggtataactatatgtcaatacaaaaaactttctttaactttatatttttctttttaatactacttattttttcaaatcaagcagttgcaacaggtccgacaaaaactattgaaacttccgtaaatgacgtgattaattatcttaaggatccatcatactctaatcctcaaacacatctccaagtaaggaataaaattgaaaatgaagtaagaaaagtatttgattttagtgaattttcactacgtactgtgggtttaaattggaactcattcacaacttcacaacaagaacggttcaataatgcgttctctgatcttttacttgccacatatcttgataagattgatggatataatggagaaaaagtaacatatacaaatgaacttatttcttctaaaggagaccgagcagaagtccaaacagtcattaatttatctgatggtagaacaatacctgttgtatatagaatgatgtcaaaaaagaatacttgggttgtttatgatgtaattattgaaaatattagtttaataaaaaattatagagcacaattccaagatattcttatgaaaaataaacctgaagaactcattcaaaaagttgaggcacgagcaaaagaacttcacaatgcagcatcagtaggaaatagtaagttaggacaataaatgttctcacaacaactacgaacctatgattttatcatttttattataatcataatgattataatacattttttttgcttaccagcacatgcaaaacatctccctccaatagagaataaaagttcacaatctcaagaactacaatcaaaaccaggatgcaaaccttcaacatcttcaaaaataaaactgagtgatagtgactttgaagattatggtatatttgaagactatgatgaactttgcgataaaccaataaaagaccctttagaaccttggaatcgtttttggttctattttaatgatttcttctacttacgaattaccaagccactatataaagggtatgaagttattactcctgaatcgttccgtcaaggttttaaaaatgttttatataatctccaaactcctatcagattgtttaatagcctattacaaggaaaaattggacaagcttggattgaactaggaaaatttatggttaattcgactataggttttggtggatttattaatataacacaaaaagataaaccacttattcctatagatcctgatactgctgactttggtcatactcttgctatatggggatttggagaaggaatctaccttatttggcctatacttggaccaagtacaattcgtgatacttttggtactataggagatgcagctgtaggtccttttgcatggtttgtaaaaccaataggtattgttcctctagaatatggactcacaactgaactctttttaacttttaacaaagttaacacagttattgattcttatgaaagcattacaaaaagtgctattgaaccatatgttgctcttagagatgcatatgtaaaatatagaaggctaaataatggatgtatatgccgtgttcaaccttaataattcataataatatttaattagtgttactcactgtggtaactacatagggaaagtttgtaaaaatatttttaataaccaatcgccaacgatattggagtgcttttcttttgggacaatatgtaaaagaatagacagtctcattagttgacttattttctgatattttttctggagtgattgtagcaacctctagaggaataaatggacagtcgtcacagtagccaaaatcttcaagttcagggggaatagaaggtatgctactgggttgaagttctaaagaaaaagaacgtatattttttacagcccctttcatagcaacaacaattcttaaacagctatctgttgcaaaagttacttcagcatgactccatgtaaatagattctgctgatcttgagggactggcttactttctttaccacaagaaaaacaaaataaactaagaaaaagtaaaactagagacaattgcttatgttgcatgtgtcgttccatataataatttccattcaactaaagatttaagtgcatctaatggtgtaagtgtctctggattcatttcttttaataaggtgacaacaggatgttcaactaccttaacatcctgtttgcttagttcttcattagcattttgtactacaccaggtaacaaattcagtaaggagcggggttgttggtgtgtttgttctaattgagttaaaataatttttgccctttggataactgactgaggtactcctgcaagtctagcaacctcgataccataacttctatctgcagggccagggatcaatctatataaaaaaacaagttcatcattccaatgacgaatagctatagtcattgtatgaacacctgttaatttttcttcaagtgcagttaactcgtgataatgtgttgcaaataatgtacggacaccatcatgatctttacaaactaagtcttctgcaacagcccatgcaagtgcaagcccatcaaaagtactagttcctctaccaatttcatcaagaataactaagcttcttgacgttgcttgtctaagaattcttgctgtctccatcatttcaaccataaatgtactttgtcctctagcaagattatctgaagcaccaacacgagaaaaaattctatcacatataccaatctgtgcctctgtagcaggaacaaaggatcccatatgagctaataaacaaataattgctgtttgacgcagcacagtagatttaccagccatattaggaccagtaatcaaaagcattcttcttgtttcatccataacaagatcattaggaacaaaaacggatttaccaataatagattcaataacaggatgtctaccttcacgaataaaaatattattattagttaataaggtaggcttattccaattatgtcgtatagctacatctgccaaagattgccataaatcaagttgagctataagacttgccataaaaagtattcttggacggatagaaacaagttcctcacgtaatttttgaaatagtttatactcaagtgtattacgtttttctgttgctgaaagaagtcgctcctccaaatctttcagttcttctgtagtataacgctctgcattagctaacgtttgacgtctgacaaagtgagagggtggggtgcctgcagactttgtgagttcaaaataatacccaaaaacacgattaaatcctattttaagtcttggtaaattatttaccttctgctctttttcaagtaaagcttgaagttttgattctccatgttctaataaatccataagttcatcaagttcagcattaaaacctaacttaaataacccaccttcaacaatagaattaggtggattttcatcaagagctttatcaagtttttcagcatagtcagatatattatcccactttgttaataattgtcttaaaattgttggcattgtggataagatagattcatctatcgtaatatatctattatctttaacatttatttctactattaatgcatccttaactcttggtaagataagaagtgtattttttaatgcaaggagatcttttggagatgtacgatttaatacaatacgagtagataatctttctagatcatagatagctttcaatgcgtcttgaagtttcttcatattttctttatataatattagccattccaatacactttgattttctaaaatagttgtaatatctctccaggggtgatgaagtcgttcctcaagaagtctcccccccataggggtcaaagtatgatctaaaacatgaataagtgtaccaactcccttttttccattaactcttttgaaaagttcaagatttttttctgttatttcatcaagaataacatatttcccaatatctaaaggtttaaaaggcattaaatgatttacatcttgtaactgtgtttgttcaagataagcaactaatgctccacaagcttgaacaagtattgtatgcttttcaagaccaagtgcttctaagtcagcaacaccctgagcttgtaaaagtctttttactgcttgtggatattcaaaatgagttttatacggtagtggaacaaattgtatttctataagctttgctgtagcaggaagttcatatttttcaggaaataaaagctccttaggaagtattttttgtatccactgccaaagctcagattttttctttacttgtataccagtccataatcctgtagaaacatctgcccaacaaaatgcaccaatattaacctcctcatcccaatacattgctcctaaatatgtatgtgttttaggatctaaacttgtttcttctgtagttgtagcagaagtgaaaactcttgtaactttccgttgaacaagtccttttgattcacgaaaatcttctgtttgctcacaaagagcaactttatatcctttctgaataagttgatgaatataactatctgctgcatgccatggaacaccacacataggaacaggattttcagcacgaggatttcttgctgtaagagctatttgtaactcccttgctgcagtttcagcatcttcaaagaaaagttcgtaaaaatctcccattctataaaaaagtaatgtgtctggataattactttttatactaagatattgctctaacattggtgttatacggtgagatgattcattcatagtcttaagtcagattggataaataaagattaaatactaataaaaaataagcctagttacaatatggaggataataatcaattttctaaaaatgattgctctaattctttattttgtgtttcatagttatttttttctttagttatatgttcaatatctttttctagggtccgaatacgtatgtttgcaagtgcaagatgagcagaaagtcttaaacgatcccaaacaagaagtgcaagagtaacaagagaaccaattaaaaaacagataaggagtaatgcataaatgcttattggtttagagagcataggttcaataaaaaaaaggtctagagtaagaggtataacttgagaaagagcagactgattttggacaaaaaacatcataaccaaaaaaaagattataattgccagaaaaactttcacgtacttcatgtagtagctccttgaaaacgttaaagtgatatcgtagaaaagagtggtttaagtttattataagtagaagtaatgtgttcagaaataatctttgtttcactaagtacagccataaatgaagaatctccaacccatcgaggaagaacatgaaagtgtagatgatcacaaataccagcgcctgctgcctcaccaagatttaagccaatattaactccttgaggacaaaatttttctctaagaattcttgtacattgttttaacaaaaacataagttcatatgactcctcatctgtgagtaactcaaattcacttatatggcgtaaaggtgctataagaacatgtccattaatataaggaaatttattcatcataacaaaagtattaattcccctatacagtattaaatatttttcatcgtcagatacacttatatctgatatacaaaaaacacacttatcttctttcttacgcgaaatatattcagatcgccaaggagcccatagaggttgcattatatgcatccttattttttattttatttaaataataataataatatacatgaatgcgtttcacagcaagttttgtctatataacaccttaaaattaaataataaatatcattaatcttcgtcaataactaagataaattatacctcaaacaaagatagtctaattcatcttcttttgtatgtacattgccatcaagtttttgtttaagaacgtcttctaaaataactttatattgggggcctggtacaagtccaagtttttttaaatcatttccagtaatatatggcttaataaatctccataatgagatatattgagaaataaagtaggttacagaggaggaataagaaaaagcttgaagaaaaagtaatacttctaaagttagcttagaaagtaaagtaaatatagtagaaactggtccttctttttcaattttcttttcatgtaaaaggcaacaaagagtactatccatgtcttgagccatagaaagagttaaagctatttttttttgatatgctgattctactcctatcttttggagcagagctataatttgttcttgtgaaagagaagaacacatagctgtgagataaataatcattatatctggctgattttcagtcaaattcaaggaatgataccattgtaatatgttggaaatgttataaaaaagtgtcttttgttttgacgtaagagaaaaacgtttatctattgctgttaatacaccaagttcatccattcgaataatacaagcatcaggtttattttctttaaaaatcatttcaaactcatgtagcaacctttgaccaaagattttttctattacattacactttaaggcataatgcatatatttttctgtttgctggcttatcctaaattgatagcgctgttcaaaacgaatagctctaataatccgtgtaggatcttctataaaacttaaagaatgaatgacatcaatagatttattctgaatagctttttgtccatggaaatgatcaataagccttccaaaatatttttggttaagttgaagagccattgcatttatagtaatgtctcttctgaaaagatcttgctcaatggatgtaggctcaactaaaggaagagctccaggcatagcataatattcaaggcgtgctgtagctatatcaatagagcactccttctcagatgtaaaaggatacctcacattagcagtcataaggttattatgggtataacctacaacccctttaagctttttagctaatgcctcagcaaaagaaagagattcaccttcaacgacaatatctatatctgttttttctactatagataaattattaagtaagatatctcgaacaacccctccaactacgtatacattcacatgcaaaaaatcacccaattttcctacctcacttaataacttgaataaggtagtagaaagatttgattgaagtaacgttaacatgtctagataacataggtgttcatctatagaagtttcttcaaataaattacttttatctatctgagacaaccttaaaagccttactttatctatagtagtagccactatattattttcaataatagggataatcggctgttgagtctcagtaaaaatagtaaaaagttcttcaattgatgttgttggcgtggctgtgatgatattactattcataaattccttcacaggttgatcgcctaatccataagaaatagcttttgagactgtaatattatcaatataccctatacattgttttgtttgattatgaaagatgagtatagtatcaagtgaatagtcaaacatgacttgtttaacttttgaaagagatacacactcttcaagacctataggtgaataaggtatagttacttccataggattatccaacatagctaagagagttgaagatagcattggctcaaattatatacataacctatattaactatagatgtattagaaatattgatcatgtagttatctcactagagacataatttgaacgggggtgaaacatactatggatatattttaaacgatctgactgtacatgtgtatatagctcagttgcactcatatctacatggccaagaagtagttggacagatctcaagtcagcacctccttcaagaagatgggttgcaaatgtatgtctaaatgtatgaggagatattgacttattgatactagctaataatgcataacgtttgataattttccaaatagcttgtcttgtaagtcctttcccagatctatttagaaaaagaaacttttctataggagtaaacataggacgaattttttggacataatgaataagaagtttcatagcagaagagtgtagtggaatgtatcgttctttacctcctttaccaaaaactttgataatgcctttgtcttgatcaaaatctaatacatgaactcctattaactcagatactcgtattcccgaagcataaagaagttcaagaataactttatctctaaatcccaatttatttgttatatcaggtgtagtaagaagccttaacatttcatcttgagacaatatgttaggtaaaagagatggtagctttggtccatcaataagcagagcagggtttgacaaaagaatatcttcttcaacacaccaatgaaaaaaatttcttatagaagaaagtcttcttgctagtgttctagaggagtctccacgttttcgtaaccatataataaataacataatatattcgtcatcaatagagttaaagttacatccagcatcttgaaaaaataaataaaaaacatcaatatcttgtttataagcttggattgtattatgagaaaggcctctttcactgataagcttatcaagccatttccaagcaagctgactagaaaatattgtatccataacttttacttagggtatagaagtaacttcaaaaatattaagacctatttgataaaagggtattataattagcgtagttaaataaatacataaagaagtctaaaaatatataacctataaaaataaaaacatctaactatatctagaaatgtataacttatttttgtaatattattttaatttgttaaaatgtatgaagaaaatactaaaaataaattctaacatgactaactataaaacatcatatataagtctaggaacaaatctaggtaaccttgacgacaatctaaaagaagcaagaattagactaaatactaataacaaaattatacttaataggatatcccctgtctataacacagaagcccaagataattgtaatcaaccatggttcaaaaaccaaatcatccaattagccacaatagatctgacacctcatgaactgttagatatacttctaaatatagaaaccagtatgggacggatacgaagcaatgatccagaacaacgttatggtccaagatgtattgatttagatttattattatacgaacaagaaacttataatgataaaaaactttgcttacctcatccaagaatgctgcaacgtgcctttgtacttgttcctctctatgacattaatccagcacttgcatttccgaatggacaaacgctaaaagaggcattgaaaaatatttcatatagagtagaggataattttatctaccaataacataacaaaaaaggaaaaaatagatgttatggagaattttgctagttggattaataggttatgcactgtatagaatgtttatacatgatcgtcaaaaaaaatctaatgattcacaaaaaaaaaaggaacaaatggtagctactggagaaatgacaaaagatcctacttgtggtgcctatgttgatacagaaaataccatatccgtacgaaatggtgaaactgtctatcatttttgtagttatgactgtagagatacatttctaaaaaaaatagataagcttcttgaaggtaaggaatcctaatagattaaaaataacaataattattaataaaaaataataagctatctatttatttatattttctttttaaagggtgtgactttgtttattcctagccaacttatgtcataattgtagcctagctagatttaatacaggataattcaattatattgctgtaattatatatagtaattcatactaatatattttttattttaccagaagggatacattgtgttatgtctaacttactttttacaataaaaacacaatataaacctcaaggagatcaaccagaagctataaaacaaattgtttctaacatccaatctggagtgaaagatcaagttcttcttggagttacaggatcaggaaaaacattcactatggctaatgttattgctcaatgtaaccgtccagcacttattcttgcacctaataaaacactagcagcacaactttataatgaatttaaagaacttttcccatacaatgccgttgagtactttgtaagctactacgattactatcaaccagaagcatatgtaccatcatcagacgtatatattgaaaaagattcatctattaatgatgatattgataaacttcgtcatgcagctacacatgccttacttactcgacgagatgttattatcattgcatcagtttcctgtatttatggacttggttcaccagaatattatgcacgacttattattcctgtggaaaaaggccagcagattaacatggatgaaattattacccgcttagtagatattcaatatcaacgaaatgatatggactttcatcgtgcaacatttcgtgttcgaggtgacgttctagaaattattcctgcatatgaacatgaacgtgcattacgtttagaattttttggtaatgaaatagaagaaatacgagaaatagatcctctaacaggagaagttcttggtaatgttggaaaaacagttatttatcctgcaagtcactatgtatctgatcgagataaccttattcgagcaatgacagatatccaaaaagaactttgtgagcgcttatatgattttcaagctaccaataaactagtagaagctcaacgtcttgaacagaaaactcaacttgatttagaaatgatccaagaatttggatattgtaatggaattgaaaattattcccgtcacttggatggtcgtaaaccaggagatcccccatctactttactagactacttcccaaaagattttcttttctttattgatgaatctcatattgctatcccacaagtaggtggaatgtttaaaggtgatcgttctcgtaaacaaacgcttgtagattttggatttcgtttaccctcagctcttgataacagacctcttgagtttcacgaatttttaactcgacttaatcaagtcatttatgtttctgccacacctggaccatgggaactagatcgctctcaaggcattattacagaacaaatcattagacctacaggactattagatcctgaaattgaagtacgtcctattaaaggacaaattgaaagtttacttgaagaatgctaccaacgagttaattcacatgaaagagtattaataacaacacttacaaaacgtatggcagaagatttaacggactaccttaacaatatgagtattaatacccgctatcttcattcagatattgatactttagaacggatggccattataaaatcattgcgcacaggagaatttgatgtcctagtgggtattaacttattacgtgaaggtcttgatatcccagaagtatctttagtagctatcttagatgcagacaaagaaggttttttacgctctacaggttctcttattcaaacgtttggaagagctgcacgaaatgtttctggaaaagttatactttttgctgatactatgacaaaatctatgaaagcagctatcgacgaaacacgacgacgcagagctctccagcaagaatggaatacaaaacataatattactcctaagaccatccaaaaatctgtagttactccttttgatatgatatctgcaaatacttcttcaaagaaaggttgtagaaaaaataaacattctatggatacaaaagaactttttgttattacagataaaacatctccagaagatattaccaaatatattaaacaactggaatacgaaatgaaagaagcagctaaagaacttgaatttgaaaaagcagctgtattacgtgatcgaattaaagttacacgtgaacaatttttactcatgagttaatatagatgaggaaaatgttgtgtctataaattcacctcaatattctttaccttctaaaaaagaaaaacaacgtgtaagagaacttcgcaaatttattaatcatcataattatctttattatacacttgatgatcctgaaatatcagatagcgaatatgataaagcatttcaagaacttctaacactagaaaatacatttccatctttaaaaacaaataattcacctacacaaaaagtaggaaataatattctaaaaaaacttgaagaacaaccacataggcaacgtatgtatagccttgataatgtattttctaatgatgaatgggaaggattcttaaaaagacttgcaaatgcacttccagaagtaccattctcattttggtgtgatccaaaaatggatggtcttgccttagagctaatttatgaaaaaggtcaattaacaagtgcgcttactcgtggagatggagatattggagaagttgttacagaagctgtcagaacaatttctaatattcccaaaagattaaaacactctataaatgctccagaacttcttgaaattcgtggagaagttgttatttcacgagcagattttaaaaaacttaataaagaacaagaaaaaaagaaaaaaaaactttttgctaatcctcgtaatgctgcttctggctctgtaagacagctagatccaacaattacagcttcacgtcctctcagattcttagcatatggtataggagaaatacaaccatcatctttaaaatggaatacataccatgaattaatgtcatacctaaaagaatatggttttgaaacaccaccaaaaggtaaactttgtatctcatctacagaagttcaatcctattatacaagactacaggcacaaagatattctttacgttatgaaatcgatggaattgtcatgaaattagatgacatacagtcacaagaaaagcttgggtatacttcaagggcacctcgatttgctattgcatggaaattcccagcaacacaagtacaaacacgacttctacagattcatatccaagttggacgtacaggtgtattaacacctgtagcagaacttgaacctattaatgtaggtggagctactataagcagagcaacattacataatgaagatgaaataaaaaataaagatataagacctggagatatggttattgttcaaagagcaggggatgtcattccagaaattgtttctcctattctttcagacagatcagctaaaagtaaacctttcgtctttcctaaaatatgcccagtttgtcatgaaaaagtatatcgtattaataatgaagtagcttggagatgcattaacctttcatgtcctgcgattcgtctacaatctatcatctattttgtatctaaatcaggattaaacattcaaggaattggacagcgcttaatagagttacttgttacttctggatgtataaaaacacctgcagacttgtttactctcactactgcagatttactaacatacaaaagaatgggagcaaagcttgctgcaaagactattcaagctctttctttagcaaaacaaacaatgtctcttcatcgtcttatttgtgctctaggaatcagacatgttggagaacaaacagcaaggatattagcttcttcattcatagatttagatgcactatcttctgcatctttggaagatcttcaacaattatcagagattggtcctgaagtagcaagttctatccaagccttttttaaaaataaagcaaatattcaaatgataaaccaatttcgagagatgaatatttggcctatacaacaagtaaatgatacaaccacaaaaggtttttttacaggtaaaaaacttttatttacaggaactcttgaaagaccaagagctgaaatgaaacgcttagctgaagaagcaggagccattgtaatgacagggatatcacataagttagactatgttatagccgggaaaaacccagggtcaaaacttaacaaagcacaagaattacatatttctattcttgatgaacctacatttttacaaaaacttttaatagttctttaaaaaataggagaacacaatggatctttctatcattgttattggcgcttctggtcgtatgggaaaaacaattattcaagttgcacaggagcaaggtattattattgatgctgtaatagatcgtcctactcgtctaacatctttagcatcatataatatagctagtgatagtgaacctgataaaattttttcaaggtatcctcaagcagttgtcattgattttaccacaccagaaacatctatatctatggctcaagttgctcaaaaatatggtaatcctattataatagggaccacaggatttacactagaacaatttgatacacttgaaacattagcaaaaacatcccgaatcttttggtctcctaatatgagcattggcattaatgtactacttaaaactttacctcaaatggcacaaatcttaggaaatgaatataatatagagatagtagaagtacaccataataagaaaaaagatgcaccaagtggtactgcaatgagaatagcagaaacattaagtacttctcgccattgggaccttgaaaaagtagcttgctataatagagaaggtattgtaggtgaacgacctcaagagcaaattggtatacaaacaatccgaggaggagatgttgtaggagttcatacaatatactttattggaccaggtgaacgtattgaaataacacatcaagcagattctcgaaaaaactttgcacagggcgcattaaaagctgcagagtggatcataaaacaaaaagcaggaaggctttataccatgatggatatcatataaatgaatacaaatatagctctattacaattacatactataacaggagatattatagcaaatacacaaaatattctgcaacaagtaagtaaagcaaaaaaagatggagctacagtatgtatcactcctgaactcagtctctgtggccatccagacctgcatgaaataccaacaataatttctacctgtatcaattctcttcagcagatagcaaaagagtgtaatggtggaccatcgattattgtaggaagtattgaaacaacacctactaatatatataataccacttttcttatacagaatggacaaatccatacactatgcaaaaagccttttactcaattttatccttctataaaaaaagaagagtatattctaattaataataataataataatggattctgttttactagtataaataaacagttattccttatagttacaggatataaaacactaatcaattatgtatgtaataaaataatctatcaaaacgaacaattaaagaaagtagaagctatactttgtccttcttcagaaccatttattgcttcgcaaatccctcattttttttatgagctaacgtcaatatctgaccaactaaataaacctctatatttttgtaaccaagcaggtgaagacaaaaactatatttttttaggaggtagtcaatgtattaattctcaagaaacaaaaaacaatcaatctctactttttcaagaaaattacatagttgtaaaaaatcattcatctgtttctttaaaagatatgtcctttaactctaataagttattatgggaagctcttatccatggaatccaacagtatgtgaaaaaaaatggattttcagatgttgttttgggactttctggtggtatagattcttcaattgtagcagccctagcggtagaagcattgggagaacatcgtgtacatggtatattaatgccatctccttggtcaagcgaaggaagtataactgatgcagagctgttagctaataatttagatgtaaaaacatatttgcttcccattcatacattaatagatagttttactcatagtctttcagaactttttataggatatcccccagatgttacagaagaaaacattcaatctagaattcgaggggtacttcttatggctatttctaataaatttggatggatggttctatcaacaggaaataaatctgaacgagctgttggctactgtacattatatggagatacatgtggtggtcttgctcctataggagatctatataaaactgaagtttaccacttagcccaatggtataatcaatcaaaacaaaaagacattattcctactagtgtattaacaaagccaccatctgcagaactccgtccaggccaacttgatcaagatagtcttccaccatataaagaacttgactttattcttcaaatgttactctcaaaaaatccaactaatatagaccaagaacttcttaacaatcctaaactaaatgatataaaaaggcttatacaaaaaaatgcttttaaacgtatgcaaggaccaccaagtcttgttattagtaatttcccattatagttctctagtatgatgatgtatcttaaaaataacaacagcatttttattaataaaaatgctgttgttatttttaataataaacttcattactattctaagattctgttttattggaaataatacttcttttttttcttaagctgtctcttaaccaatcataccatacttgtaacccttctcctgtacggcaggaaagactaatgatctctaaaggctcatttaacttacgtgcatgttgtgtagctttctctatactaaaattaacataaggcaatagatctatcttattaagaattaatactcctgcacgatggaataaaagagggtatttctctggcttatcatctccttcagttacaccaagaacggcaacaatagcatcctctccacaatcaaactccgcaggacaaacaagatttcctacattttcaataaataagatatcaatttcattaaggttaagagatgtaagggcttccataatcatattactatctaaatgacaccctccatctgtattaatttggacagcttttacaccagtagcagcaactctttttgcatcattatctgtctgtaaatcaccttcaataacagccattctaaactcagatgaaagatcacttaaagttctttcaagtaaagacgtctttccagcgccaggagaacttataatattaagagttaagatattatgctctgcaaattgcttttttaacatagctgcaagtttactattcacttcaagaacattacgtaccacaggtatttccattaacttactcctattctacttcaagatgttgaatataaaattctcgacctgtctcaacattatatgccacctcttttttgcaagaaggacatgtaataaaaaaaatcttttgtttatcttctggggtaaatagagacaaacagtttgaacatcgaagcataagaggaattttttctatttctagtattgctccttcaagacttgttccttcagtaaaaattttaaaagcaaattgtaatgagtcaggaacaatatttgtaagctcaccataacaaacctttacacgttgaagcttattgactccattctttgacatttcttcctgaataatagaaagtatacctgtaactaatgacatttcatgcatacaattatgttatataaaaaaataaatggcgtctacttttaatacaaatacattgctttttcttatatccttctataaatactacttattatataaaacaaattttttgatctattaataagttagtaaaaaataactgttatgataacaactctaatataaaaatttcttggcttttctctataagtaactatagttatttattagctatactaaatataacaaatttaatactaggtgtaatgtgacaaagggtacttttttaggagtctatgctagttatagtaataagacagctaccaatacaaaaaaggctttaaaacattattggtttgtatgggaagatagcaatggatatctagttcaattattagataatacttatcaacccattgctgaaccacaaactcttcctcttgaaatttttaaaaaaaattttataaatcaacctcacatcctagcagcacctataacttcactacacccatcaagtaaaaataacacagaaaaaactataacaaaatatcacaaacaatataaaactacgcttaatacctctcaggtaaccaaaaacaactttaacgttaaaaaagatatgataatagagcagagtgaacaagtaaaacatattgatactcaacttcgctctgaatttactacggctttagaacgttggaattctggtgataagctagcaccattaaaaacctttgaaggactttcaaatgttcaagaaggtattgtaccagaacataagcatatgtttacagactttggtgtcaatttaagaaaaaatagtttacctaaattagctatacttcattttaaacgtgcagtagagttaagtcctgaagatgctcatgcacactttaatttagcccgtatttgttatgaattaggcaaccttaatgaagcagaacaacacttagaaagagcactttctatttctcctaatttgaatgttgcaataaagtttcttggatttattcatgaccaaaaaaaatactcttgatataaagagttaccctagcgttaggagctaacaacatgtttcgtatgattgttttttttactgtaggtatcattatgcttattcttgcttgcttagctgcacttgagttcatacaagattttcccaatagctatcaagaagatggacaaatggttacaggaattatttcaaaaataataggctctaactgtgataattcttcaacatctgatataaataataagaaatccatagatagagataaagatacattactctcaagtagtaatagaaatacaatacaagccggtactccacatcaagaaaataacataaaagaagatcttcaactgactaacaaaaatgaacaaacaactccagaagaagaagaagaaagtaaatttatttggttaacagaagctccatcagagcttaaaaaaggagaaaaagctataacacaaacaagattgtctattggtaaggatatatcttttagaattactgctgatgatgccatcaaagctcaatcaatgatgttaaaaaatccagataggtttgttttagatcttcaaggaaagtggggtatttcccttccacctattccacctacaaatccttggttaaaaaaaatacgcttaggtactaataatggaaatacacgacttgtctttgatcttcaaaaaaaaccatctaaaactgaaattaaacaattagatacaaataaaattgaaatccaaattcattaaattgcatattagacaataagttataataaatttaaaccatatgctcgttaatcaagtttgcttaaacttagtccagccatacgagaaagttcggcttgtttttcaaaatctgtaagctgcttacaacgagtaaatgttatattttcatttatatctttaacaattaaaaaatgacgagatgccttgaccgcaagttgtggccagtgtgtaataactaataattgctttttatcagcaagacttactaatttatctgcgactttaaaaagagtatgaccaccaatacctgcatcaatttcatcaaaaataagcataccttcatcttcacttgactgtattgaaacaactgcaagtaaaaatcgtgataattctcctcctgaagcaattcgttcaagaagctgaggaggttgaccaggatttggtgcccataatatttgggccttatgttcaacacatccagaaaataattcatatggtataaagtctattatcacattaagatagtccgaaaaacctaagtcaattaactgtgcttttaatgcatgacaaaacttattagcagctttctttcgtaattcataaattttctcaagtattacttgaagttttttgatcaatatagtatattgtttttcaatctggcgtaagtctagtacacaactatctaaaaaagataacttatcctcaatctcttctttaaaagaaaaaatttctggtaaacttcgatggagctttcttttaagttgtgaaagttcaaataaacgtgcttctatttcttcaatatttttatttttttctgatgtaactagtgaaagtttttgtaatttttgtgctaactcgttcaattgttgtctacattcaattatagtagggagactatccatgatgctttgatcaatagacagaaaacattctaagtttttctcaatgagagaaagatgattaatcaaacctccttcttccccctgaagaagttgcaaaatcatcaattgttttttttgaagaattgcaatcgaacgaatatcttcttttagtaattctaattgttcatcttcattaggaattggttttactttgttgatatcgtatagatacgattcaaataaatcacgtcgttcttcaatctcttgacaacgatatatgagcttctccttcttttttaataatgttttaatttcttcaattaatatatctttttgctgaaaaagttctggatgttcaacccaagcatctataattttttcttgatacaaaggttgaagtaatttttgttgaccatgttgacttgtatgtgtaagcaatttaggctgcaattcttttacagtgttttgagacgtcagtttatcattaagataaaaacgacttcttcctgtagcagcagaaagttcacgtcgaagaataagctctcctttttctggatgaacaaaaagtgcttcaatttgagctcgttcttttccttgacgaaccatatctactcttaacttatcgcccataagaaaattaattgcttttaaaataaaactcttaccagcacctgtctctcctgtgattacattcataccactggaaaattccagttctatatcatcaataagagccaaattttgaatacgtagatactcaaacatcattctttttactcactaataaataaagaaaggatattgactcaaaaacaattacaactaacgtgctaaccgtggatcaaatgtatcacgtaacccctcacctaataggttatacccaaggatagttattaaaatagctaaaccagggtaaaatgaaagccaaggagctatttcaagtgtatctttaccttccattaacatatttccccaactaggatctggaggttgcaccccaagtcctaaaaaacttaaagaagattctactaatattgctcctgcaatacctaatgttgctgaaataaaaacaggagtaagtgtatttgggagaatatggataagaagtatacgtgtagtacttgcaccacaaagcttagcagcagcaataaaatctctttctcttaaagataatgtttctgctcttacaagccttgctactcccatccaggatgtaaggccaataataatcataatatttgttaaacttggttcaagaaatgcaataacagcaagaataagaaaaaatgaggggaaacaaagcattgtatcaactactctcattataatttcatctgtaataccaccaaagtaacctgcaattaatccaaaaaatacaccaatgacaacagcaatacctacagcaatgaatccaactccaagagaggctcttgctccatataataatcgagaaagtacatctcttcctaatgcatctgttccaagaagaaacgtattagatggaggttcaagcactgcattaagatgtaattctgttggatcatatggggctagcagtggtgcaaaaacagcaataacaaccataaataaaacaataatgagtcctattagaagaattatatgttgttgaacaaacctcataatataagtcatcttatggctccctgacgaatacgaggatcagctatgccataacaaacatcagccaaaaaattacctaaaagagttaatattgctcctaatacaagatttcccatgattaatggataatctcttgccataacagctgtataaaaaagttgaccaagtccaggtaaagcaaaaatactttcaataatgacactaccaccaatgagtcctggaacagaaagaccaagaagtgtaatgacaggaagtagggcatttcttaatgcatggcgaaaaataactttccatgtagaaagtcctttagcttttgcagtcaaaataaaatcttgacgtaacacttctaacatagacgctctcataaagcgagaaatacctgctatgctgcctacagtcatgacaattattggcaatactaagtgggaggcaacatctttaatttttccccatagagaaagatatgaaaagtctaatgatgtaattccagaaatagggaaccattgtagatcaaggccaaaccacaacataagtaataaggctaaccaaaaacctggcatagcaaaaccaagaaaaacaagaatagttatcaacttatcaaataaactatcctgtttccatgcagataatacacctaaagggatagctatcattaatgaaattgctaatgatagaacattcataaatactgttaaaggaagacgttcaaaaatcttcacaataacaggtcgtgcatcagcagacattgatgttccaaaatcaaatcgaataattcttgataaccaatctatgtattgaacatatattggtctattaataccataaagagactctaacctttgtttagtagtttcaccagccattggatttaatgttgtttgtaagtctgttggacttcctggggctaagtgaattacaataaaactaacaatagtgattccccaaaggactactagtatccatagtattttttttataaaatataagataagtgattttgtagactgatacatcatatataacccattacataggacacgttattgactttaatgtattttaaaatgtttagtttttatttatacagaagtagactataatcaataaaaagtactatagtaaatgtattggtaaaaaagtaattattaaataattcatagtagtcttttattcactcttaaaaatccaagatataagttctttcttttctatttcccattcagaagacaaacgaacatgaagaaaatttttatagcatatatcaataaaatggagacatgtctctataagataaattttttctaaaaaaacagcatctggctcatcagaatctaaagatacttttggtgtttgaaagtttccaaaagaaaaattctcagctttaagtgtcaattgccatgaaagttcatctttttcaaaacgtagtagagcacgtgtaactttttttcctgtttgtaatccaattcgtgcttcccttaaaggagaataaggaccaaaaactgttgctgtttcaagcgattcaccttctccaccttgaacaacaactctttgttccatagaaaaagtaaataattgtcctttactatccttaaaacccattggttttgtttcacttataaaccataaccaagtaagaaactcttgccctagaagaatatctattccctgtccaagatattgttcactcatatctatatatctctaaacaaattttgtaggttcaagggtatctatttgaataatagaagaagtatcaagtaatgatacagccaaattatatggtgtctgtaactctaagtgtaaatcgaatgtcaatgtgaaaaaagttgtgaataaatcaatcaactttatatgagtagaactaagatatactatattagttgtggttgaccatacaacatcaaagacagcagggataggtaaaaaatgtttaaaaagacgaagccgtacttgttcatgtaactctgactttctttcctgagaaagaaactttttccctgtgagttgaagattctttttttctttttgaagtgctatagctaagtgtttttttaaaacagctggtggaattctacgggtctctaaacgtaaagcaaaggctaaatattctcctttttctggatggcttatattccaatttacatcaagcatatcatcaaaatttgtccaaccccaagaccgctcttgacttgtatcatcaatatcttgaaaggcatattgttgaagcttttctggaattttttgccatagttctgaagaaaccttttctattattttataccgtgtaaaactacaacttgaacgaagaaatcccatctagtactacctataattataatttagttaatatgcttacgcatccaaaaaatatttggcaagcataagttttaaatgtcccataatgtatattatgtaaacttttattcatatctctttttttacaaaaaaaaaaaaattccctaatataaattgtcaataatgccgacaagagaattgcaaggtgttcagacaagattttattaaagaagggctttacaatgagataccattattctttatcagttattctaaccatacttcttacattttctatggttacgagtacacttgcaattccaaggacagaaaaagatttacagtatattgcaaacaatcttacagagacacctgtaaaatatggtgatattccatctatcactcaacctgaatatatatcagtaaatgatgcaaaccttactcttgaaggacgtgatcctgtatttatagtattcattccaggttcacaaccacgaatctatcctcaaagaattatggtatggcatgaggttgttaacgagtatatcaatgggaaaagttatgtcataacctactctcctatttctggttcaatggctgcatatgagtcaacaatagaaggaatgaatcttatttttgatactgaaggaaaactttttaatagtacaagcgtattaatcgatagaaacacaggaagtctatggagtcaactgataggaatggcctttgacggtccacttaaaggaaaaggattacgatatattgtttcttggtggacaacatgggataaagccaaagagatgtatccaacagccttagtcctagctacaccaagaggaacaaataaaccctatggtagggatccatatggttcatatgtaacccatggcaactattatgacgatgaacgtattgtatatccagtagttcaacaagataaaaaacatcaacttcatcctaaaacaaaggtacttggtattgaaattgaaggcttacccttagctattgatgaagcttatgttaaagagaaaaaagttgttaacttctactttggaccatatgcattagttgctttatatgattctcgattagatatagtgagagtctttaaccgtgaagtttgggataaacaaatattgtttactcaaaatccacaaggacttcttgtagatattgatacaaatacaatatggaactatgatggaatagctatacaaggtaaactaaaagatgcttctatctctgagttctttggtataaatgcattttggttttcttggtatgcttttaatcctgagtctcttcttgtaccaggatcaacggttgtacctagctcagcacttataaaaaatgctttatttctagaataacattactttatattctggatacacaagatagttatagacccagcacaaattgtctttctaagaatactattgagggaatatgtataaataattccttcaatagcattcttttttataaacgtctgaaaaaaagaaaaacctttctttgcagtacaaaaaaataggccatagtttataacaaaagaaggaatatctaagttacgttcaggcacacgataatcaacaagtattgcataggaaaatgttttaagtgtatcaacaagttctgagtgaatttctggtgctgtctgactaaaactaaaaagaaatagtataaggttcctctttatagattgatattcctttaactctatagagtcattattctttatcaaagaagatatcttcctatattttttgatacaatgagtagaagtttcataaagatgccatttagtatgatcaaaaatagtaatctttgatgtaggtatcaaaacgctactactatcaattaatgctattatatgagaaaatatgaatgaatgaaatatttgttgaaaagtaaacatgttatagagattcttctatcatctttgtaaataaattacgaatattctgaaatgtattacagttaggaagcgtgtctaataatacagagatgctacttgaagatgcaaatagtctttttgtaataggaaatgttaactctcttatccaagaaagtataaccattttaaaatcattgagatatataagatctaaataacttggtgttcttccttccaaaatatcttgcattaccttatggttccactttaaaggttcatcttttaaaaaaagggttacttcttttttttgtgatgtaccatccatgtgtgatgaaacaacacgcaagatatctaacttatcagcatcccttaaaattgtagcagttagctgaattttgttatctaactgtttaggtaataatttacgattatgtagtaccatagctgataaacatactttttgtataatttttatttcttcttcaagaaatccatacttttttaaaagttgaacacttaatgttgcatgatttatagactcccaatcattaaatgttctccacttgataaactgaggaaatctccctatatcatgataaagagccgctaataaagctcccctactcactatattagaaaactcttcatattgaagaatcatttttacattatctaatacatgctgagtatgctcgtactttagtttaagtaaataatgtgagtctactgttatgtattggttaacaaaggattcaaaataggctttatgagatgcaatatctagattatgcactgtaatctttcttgtatccataatgtatattaaaaaaatccaattaaaatcataacaaaaggaacgttgagcatttcttctttttttgttagttagttagttaaataaatatatatgaaagtcctgtaaacttttaataactctttataattatttgataagtaattaattacatattaccaatataaatacttcaactactttattaacacaagataatgtgagaatatttttatgtctaattttgttcatcttcactgtcattcagaatatagccttctagatggtgctattcgcttagatgccctgtgtgcacgtactaaagaatttgggatgcctgctgctgctgttacagatcatgggaacttatttgcagctacacatttctattctatctgtaaagaatatgggataaaacccattattggctgtgaggtatatgtaacaaaagatcatgctgataaactttccaaattttccaaagccaggcatcaccttatcttactagcaagaaataaagaaggataccataatcttgtcaagcttgtaacacgtggatatcttgatggattccactataaacctagagtagataaaacattactaaaacaatttagtagtggtattacagcattatctgcctgtttagctggagaattaccacgtacaattatgggaaaaaacatatttgtagaaaaaggtggtacatttgatgatgccatttctattgctcaagagtacgcttctatctatccaggacaattttacttagaagtacaagcaaacatgttacctgagcaacaaaaagttaatgaaaaactttatgaattagctgaatatacaaacttaccattagtagcaacaaatgattgccattatcttaatgcagatgatgtagaagctcatgatattctcctatgtgttcagacacaggctaagtttaatgatactgatcgaatgcgttttaatgctacagacctatactataagtcatctgaagaaatggagaaagcattctcccatcttccaatagctattgaaaatacaataaaaattgctgaatcatgttctgttgaaatggatttttcaaaaaatctttttccagtctacgagttacctaaaggggtaacgcctgatgatgaattccgacgacttgcacgtgaaggtttacaaaaacgattagaagtatacccaaataaaaaacagttaaccacagaaaactactggaaaaggcttgaacaagaacttgatattatatgtaaaatggggttcccaggatactttctaattgttcaagactttattaactgggcaaaagataataatattcctgtaggacctggtcgtggttctgcaacaggatctcttgtagcatgggcattacgtattacaaacattgatccacttccttacaatcttctctttgaacgatttttaaatatagaacgtattagcttacctgatattgatgttgacttctgtgaagataaacgtggagatgttattcgctatgttatgaacaaatatggtgtaaactctgtagcccaaattacaacttttgggaaaatgaaggccaaagcagtagtgcgtgatataggtagagttttggatatgtcttttaaagagacagataatatcgcaaagttaataccagatgatttgcatatgactattcttaaagcaatggaagttgaaccaaaacttcaagcattatacaatgaagagcctcatattaaaagacttcttgatatctcaatgaaacttgaaggccttgttcgtcatgcttctacccatgccgcaggtgttgtagtctcagataaacctatggatgaataccttcctctatatcgtggtaaaaaaggtgaacttgttactcaatttgatatgaagatggtagaaaaagttggacttgtaaagtttgactttctaggcctacgtacaatgactctcatccatacaactctcaaaacaataaaagaccaggggaaaattcctccaaaccttgatacacttcctttagatgatcctaaaacatatgagcttctttctaaaggagatactgatggtgttttccaagtggaaagttctggtatgcgtcaatacctccgaatgcttaaacccaactgttttgaagatctcattgctatgcttgcactatatcgccctggtcctcttggttccggtatggttgatgaatttattaagcggaaacatggaacagtaacaatcgaatatccccttccatctttaaaggattgcttaaaagatacatatggcgttattgtttatcaagaacaggttatgcaaattgctcaaattgttgcaggatattctcttggagaagcagatcttttacggcgagccatgggcaaaaaaaatcctgaagctatggcaaaagagcgcactcgctttgttgaaggtgccataaaaaataatgttactgaaagtattgcttctgatatctttgatttaatggaaaaatttgctgaatatggttttaacaaatcacattcagctgcttatgcacttatttcttatcatacagcctatttaaaagctcactttacattagaatttatggctgctttattaacatcagaaagtggtaatcaaaacaaaattcttaaatacactgcagcctgtaaagatatgggtattgatatactaaaaccagatatccaaacaagttgccgagaatttatagtaaaagataattctatagtttttggtttatgtgccataaagaatgtaggtgatgatgctatcgagaaaataattactacacgaaaaaaagatggcccttttctttcattactagatatgtcttttcgggtaaacctaaaaaaagtcacaaggcgtgtgttagaaagtctcgttaaaggtggtgcatgtgatagttttggatgctcaagagctggtatgctaacagccttagataaaattattgctagaacatataaaaaaattaaagatgagcagtctaatcaaggctcattattagcatttgcacctaaaatagaatctgtatctcttccagggattggctttacttgtgaagaacaaaatatgcctgaatgggatgaggatgaaaaactgctttatgaaaaagaggcactaggtttctttctaacaagccatccactacaaacatatagacaagaaatttatcgcttaggacttcaaccacttgaagaagtaagagaaatgaatgataaaattactattaaatcagctattattgtcaataatattagagaaattctgaataaacgtggcaatcgtatggcctttgttcgcgttgaagatctcacagcttctgcagaagttacttttttctcagaagaattacaaaaaagtcgtgaattactatcttcaaaccaaccactattactcactgcaactattgattctcgagaatcaacacaaaacgatactattgatgaaagtgacgacacccaattacgatccattaaactcagagcaatttctgtagagagtctatcaagtgcttgccaaaatagtgaactacccatatcctattatgttgataaaaatagacttacaacttctggaatagaagaattaaaagcaatacttgataaacataaaggacaaactgaagtccatctcattttctctcttgataatattaattgtcaagtacgtctcggatcctcttggaatgtttctcctagtccagcatttcaacaagatatgtatcgttggagtatagcaagtgaataaaaaaaggaatagataagttatgtcaaaaccaacttggcacctaaccgtacgttcagaattttgtgcagctcatgcattacgtcattataaagggaaatgtgaacggctacatggtcataactatggtattaaaattattgtaggaggacatgagcttacttctgacacagagcttcttattgactttacagagcttaaagcaatacttaaagatgtacttgaacctttagatcatagatatctcaataatattcctccctttgatcaaataaacccatcagcagaaaaccttgctagatatatttggcaaaatgttaaaaaacgtctcccaccaaacgtctatatggttcaagctactgttgctgaacgtaatgtccaatctgcaacgtatatggaataacttgtttaagcacctatgctctactcaataaatcataggtgctctcaaaaataagaatatgtaaagtaagttagtagctataattaagatatacatcttattcaatataagctcaaaaattaatctaacttatcctatttcacgacttattatcaatttgctccacaaggaaagtctctagaaccacacccttctctaccacaaccacctatagagtttggtgaaaaatgagacttgcagtctgagtcagatatagtaactctttttatattagcagctgaaagaatccgttgtgtattctgactactacagttaggacatgataaagaaatagattcaaaatgtgttacctcttcaaatgggtgtccacattggatacaaatgaaatcatataatggcataaattcatcctttgttcttgattcattataaaaatagcaatactgattaaacaagtaattcattgtattataaaagcaagaatgtatcttatgtagatatacattaaacaaataaaaatggctaccctccctagaataaaagaaaaagtaatatgttgttaatctcttatagactaataggttattattaatgaaagatgagcaaaaagaagaaaaagacaaaattatctatacaagtacaatgaaagaaaaaaaacgtcggcatcgtttgtatgaatttcttttagcttttgcgctcattttattaattcttggtggaacatggacacaacttgccttttatggtgttgactcttggatttttattgttcttttaaatattaactccatcttcatgcttatagtgcttttccttgtcacaagaagtattgttaagcttatcatggagagaagacgaaaagtttttggtgctcaattaaggacacgtcttgttcttatttttgtatctttatctcttattcccacagtaataatgtttcttgcttcaaataaagttgtagccacaagtgtagattactggtttactaaaaaagcagaaagctccttacaagcagctcttgatgttggccaaagcttttatgtggctgctgctcagagactaagaacacactctgagtctattcttacaactataaaaaaagataagcttatttggggaggctctggaatagatactttacttcaggacaaacaacaagaatatggattaacgtttataggtattatcaaccctcaaggtatagagcaacattggtatggacaagaaggtacattaagtatctggaaaaaaataagagaacgtattgactggaaccatgtggcaagtaacaattttagttcattactttgggcaacagatcatgcggactacgtttttggtgttcttgctattgataatgggagatctggctatcttattacagcagaaagtattggacaaggattgctcacaaagcttgatcgcatctccaacgggtttgaagaatatacaagcctcaaacagctcaaaaagcctcttaaaatctcattcttactcatccttggcatactgagtatgattatcatttttggttctgtatggtttggttttcgactttcaaaagaaattaccgctcctattctagcattggctgatggaactactcgtattgctcaaggagaacttgatgttagacttatagatgaaggacaagatgaacttggactattaattaaatcctttaatagaatggctaaagatctgcaacaaggtcaaacaaatctcaaaaaagctaatgaacttcttgcagaacaaaaagatacacttgaagaacgtaataaatatattgaaacagtattagacaatattacaactggtgttattacacttgatgtttttgggtatatccttattgctaataaagcagcttgttctatttttaatacgtctcagcattttttaaagggtcgttgtccagctaactttcttcctccccaatataaaaacatcttctattcgatgatcaatcaattacaaaaacatcctgatttacactggaaaacacaagaaaattttattcttggtgatcgccaatggaaattagttatacatgctgtagctattactggaatcgatggcatccaggcatatgttgttgttattgaagatatcacagaactagaaaaaatgcagagaatggctgcttggcgtgaagttgctagacgtattgctcatgaaattaaaaatcctctcactccaatcaaactttcaggacaacgattagataaaaaatttggttctcagattcaagatcctgtttttcaacaatgtacagaacttattgttaaacaagttgaaagattacaagatatggttcaagaattttcttcatttgctaaacttccagaagtaaaacttagttctggtgatattcgtcctgttattacagaattacttgaactttttatacacaaccataatgagatcaagtggaatgtatatattccaaatacacttcctgaaattttaatggatgcatcagcgttacatagagcattgttaaatgttattacaaatgcagtagaagcacttgagtatagtcaaaacattgaaaaaaaatgtatagaaataactataacccatgatcatacaaaagggataatatctataaaaattgaagatagtgggataggtcttgctcccaatgaaagagaacgtatctttgatccatacttctcacgtaaaaaaggtggtacaggtttagggttagctattgttaaagctattattgatgatcataaaggaactattaaagtttttggttcatacttaggcggtttaaatattgaaattgaacttcctatagtaacttcacatgttgattttactcaatcaatataaaataaataatatatagaaagcctcttaataaattaagaggctttctatcattgacttcattctatagaatttatttctttttttgaggaatagatgaacgtccagagtgatcataacttgtaacttgacctgaacccaatggcttacgtcttggattttgtttaaggtgttcaatagcacgatgtatatcatttactaaaagatcggctaaatcatgatcaaaaccatgacgaacaaggactctcattacaacaagatcagtccgattagcaggcattgaatatgctggaacttgccatccacgagttcttaaacgatctgaaagatcatataaactaaatgggtactttttttcatctttaagtgtccatgttaaagctggtatacctgttttaccaccatacaaaattttaaaaattccagtctttgtcaactcattggcaaggtaatctgttgtatcataacaagcctgatgaatacgacgatatccctcacgacctaagcgaagtaagttataatattgacaaactatttgtcctccaggtctagaaaaattaatagcaaatgtaggaatattacttcctaaatagtttacccaaaaaataagatcttcaggtaaatcagttttctctctccatacaacccagcccatacctaaaggtgcaagtccaaacttatgtcctgaagagttaatagattttacacgaggtaagcgaaaatcccatactagctcaggctcaataaatggtgcaagaaatcctccacttgctgcatcaacatgaatgggaatatcccatcctttcttcttttgtaatgcatctaatgcattactaacctcttctacaggttcatactgacctgtatatgttacacctaatgtagggaccacgcctattgtattttcatcacagcgtttgatggcttcttctggtgacataataagtctatttttttccatgggaatttcacgtaactcaatatcccaatagcgagcaaatttatgccaacagatttgtacaggtccacatactaagttaggcttatctgttgattttccagctttttttctttgtgccctccatctccactttaatgccataccaccaagcatggctgcttcactagaaccaatagctgaacatcctattgtatttgttggatctggggaattccaaagatcagctaacatatttacacagcgcatttccagttctgctgtctgtggatattcatccttatcaatcatgttcttagcaacacattcatccataagtttatggatttcaggatcaacccaagtctgacaaaatgttgcaagattttgccgtgcattaccatctagcataagctcatcatgaacagcctgataaatatctctaggtctatgctcatacagtggcatttgatacttaggtaaggtttgactaagatcatcttctgcaaaaacatcatctaataattcatgacgtaccacaccattactcatggatgatttttgtgtcctattccccatagatcctctttttgttccatgccccacaggcattttttttactacagcctttcttgcagttgccatgtaattatctccttcataagtaagctgttatttaagaaaatgcttaaccattagttattcttgtgatcgctgttctttccatgaaagttttttcatgctatttataattaaaggcagtccaataaaaacgatcattccagatgcaacaagagttacatataattctggatttccaacaggtagatttgttggagggaaaaaacccactattgtagcaaatgctactcctaaaaaacctattcctgctactataaacattccaataattccaccaggaattttatatactcgaggaagatcaggttgagtaattctaagataaatagcagcagcaaacattagcatatacattacaagatacagtgtaactgtcattgcagataatacaaagaaagcaacacttacattatctataataaaatataagcaagctaaaatagatactataatagcttggattattaaaatagttactggagaaccatgcttatttaccttagctaaaaaaggaggaatttcaccttgttgtgcggtagcaagtagtcctctacttggtcctgtgacccaagacataactccaccaatagatccaaaagccataagtaatccaaggataggggtaagaatacttaacttatagtgagcaaaaagtacttgaaatgcctgcataagcccagcagttaaactcaattgatcagctggtattacaaaagctacagcaagtgaacctaataggaataaaataaaaattattatagcagcaataagcattgcaaaaggaaattgacggcttggattttccatatccacgacttgcacagcttgtacctctactccagcaaaaagaagaacaatccctgcaagaaatgcaatactaccaagacctacgatatgaggaaacagcacaggatgatgatgctcaacaactgtttgtcctgaacttaatgttattgtttctataaacaaagcattatcatttccttgaaatatccatagtgcacctaagacaataataagtgctcctggaagcagtgttccccatacaacaccatatttagcaacagagtttactgcttttgatccattcaaagccacaacggttgcacaccaatagacaattagcgtgacaatcccagtataagtaccactagcagaaagttcaggagacataaaaaaatatgctaaacatgatgatgcaaatccaagcactgttggataccagacaacgttttgtatccactgtaaccaaatagctgtaaagccccatcgagaaccaaaagctgcttttacccaagcatatactcctccagacttactactaaaagcacttccaagttctgcagataccattgcagcaggtagtaaaaagataacagttgaaaataagatataaaaaatcattgaaaggccttccttagccatcattgggagcccacgaagactcacaacagctgcaactgtcataagagcaagagttgtaacagttacatgctttactgaatttctttccataagaaaaaccccttttaagttacaatataactagtatgctttctattaggttacatcttatttttattatgttataaaaataatgtataataactgtaaatttgataagtatattctatataatatcgtatgtattagatgcatattattttcattacaatctttatatgtatcattcaagcgtatttatattattgaataatcttttatcattataaaatataataatatgttatttaatatattatttagaaaaaataaatatacaatgaatatttggaatgttgtttctattggtataggatcaatggtaggagctggaatatttgccctattaggccaagctattcttcttgttggaaaaaatgcttttatttcttttattcttgcaggaattatatctttactatcaggttattcatatgcaaaacttgcatcaagatacccatcttcatctggtattttagagtattataataaaggattttcatcaaaagtgatttcaggaggattttctcttttatacctgtttactcttgcaatatctatttcaatggtagctaaaacttttggtttatatcttgccgtaatgatatctaataactaccaattatctataccagatagttatctttcagacatcttttctacaatcattatcattactattttccttttaaacacaaatattgctaaagaagttggaaaagctgaaacaacccttgttggaatcaaagtaattatcctaagtatattagtcattgcaggtctttcaactatagatattgatatcattattaataaaccatcaagttcttcatttagtataataggaagtgttggattaacattctttgcttatgcaggctttggaatgatgactaatgcttcaggagaagtaaaaaatcctaaaaaaacaattcctagagctatttttattgctatcctttttgtcatgtttctttatactaccttatgtttagttgtacttggtaatattcctttagaagaaataaaaaaacatgcagatacagctattgctattgctgcacggccagttttaggtaatgcaggattctttataatctctgttgtagcgttacttgctacagcttctggtattaatgcaatgatgtttagtgggataaggattgctaaaggtatggctgaaaaaaaacaactaccatctatctttttgaaaaaaacaaaatttataggtaatggtacaattggaatgacatactcaatcataggaattattataataacaaacatttttaacttgcaatcgatagcaaatatggctagtataatatttttgttatgctatttagctgtatttattgctaactggaagcttaggaaagaaactcaatctttaaaattgcttattgttattggtattgtttcaatgtctgctattttactttcatttatatatacaattattcaaacaacacctatgacttctattcttcttttaatatttttagtcttttctttccttttagagtattttttgataaagtatgttacataattgattaataaatagtaacttattatagtttttatatatctttctatataacttgtaattttttgttagcctagctagattattttgcttaatagcttgaaaaaaacatttcttcttgcattatataaatatttgcgataggaaccgttaagcagattttatattattaaataatacattcttatcgtaaacaatatcaatatgttaagattcttctgtattcagagtttctgtatcaagtaggcttgtacgtgagttttctcgttctggctttagccagttttacccaccttaaaacagtaataatggactcctatgcggaaaaagaaaactccccctgttgaagaagttcaagaaggcactactatgagccttactgaacttaagactatgaatatgccaaagctaatggagcttgcagaggattatactatagaaaatgcaagttctatgaggaagcaagaacttatctttacgcttctgcaggcttgtgcatcacgtagcggtggcatctatggagatggtgtattagaaattttatcggatggatatggttttttacgctctcctctctctagctatatgcctggtcctgatgatatttatgtctccccctctcaaatccgaagatttcacctgagaaaaggagatattgtatcagggcaaatccgcccaccaaaagaaggagaacgctactttgcattacttaaagtaaaagaaattggatatgaagtacctgataatgcaaaacatattgttctttttgataatctaacacctatttatcccaaccaacgattattgatggaaaatagtgataaaaattattcatgtcgagttattgacttgatgtctcctattggacgaggccaacgtggacttattgttgcacctccaagaactggtaagactattcttttacaaaatattgctaattcaattaatgcaaacaatcctgatgtatatcttattgtcttattaattgatgaaagaccagaagaagtcacagatatggagcgtacagttaacaatgctgaagttataagctctacatttgatgaaccaccacaacgtcatgtacaagtctgtgaaatggttcttgaaaaagcaaaacgacttgttgaaagaaaaaaagatgttgttattttattagactctattactcgtttaggtcgagcatataatgctgtaacaccttcttcaggtagagttctttctggaggccttgatgccaatgcactacagcgtcctaaacgttttttaggagcagcaagaaatattgagggaggaggcagtctaacaataattgccacagcccttattgatactgggtcaaggatggacgaagttatatttgaagagttcaaaggtacaggtaatatggagatctatcttgaccgtcaccttgctgaaaaacgtatatttcctgctattgatattaatcgtactggaacacgtaaagaagatcttctattaccagaggatgtattaaatcgggtttggattcttagaaaacttcttgcaccaatgtcgtctattgatagtatggaatttctccttggtaaaatgcgaggaacaaattctaatgaggactttattaacgcaatgagtaagtaataaagcaatgaataatagcttgtagttaatattttaaagaatacttcattccattaaccgatcattaactaaacacaaaaaagtctgttaacaactaaacagacttttttaatttaaacttagtaacaatcaggtatcaattttaaagggagagatctctctcaaccgctctataattgcaggtaattctttaacaactatattaacttcgtcagctgtagaataacgagacaacgaaaaacgtatagatccatgtgcatatgtaaatggaacacccatagcacgcaatacatgtgagggctcaagactaccagaagtacatgctgaaccagaacttgcacaaataccatgttgatccattaataatagaatagcttctccttcaatattcctaaatgaaatgtttgttgtgtttggaactcgattatctatatctccatttacaactgtatctgtaatagtaagtatctgtttttctaaattatcacgtaacacctttatatcatcaccattagttttttctaaataatcctgagcaagttcagctgctttcccaagaccaatcacataaggtacattctctgttccagcacgacggttaaactcttgatgtccacctcttaaatatggtctatatcgagttcctgtcttgacataaaatgctcctatccctttaggtgcatgaattttatgccctgataaagaaagataatctatatttaaggccttaagatctacaggtatcttccctactgcttgaacagcatccgtatgaaacaatacatctttttctttcacaatttcagcaatttgttgaataggaaagatagttcctgtttcattattagcatacataatagaaacaatagctgtattgtgtgttatagaagatcttaattcatctaaatctagtctacccttattatctacatctaagtaggtaactttatatccctttgattcaagattgttacaaacagaaaggatagccgcatgttcaacacgtgttgtaataatatgcctcttttcagggtggagctgtatagcagaccatatagcagaagcatcactctctgttccacaagaagtaaaaaagacttcttctggttcagcaccaataagggatgcaacctgctctcttgcattttggatatatcttccaacagctcctccaaaagtatgcatgcttgaagcatttccataatactcactaaaaaaaggcatcatgacttcaacaacttcaggggctacttgtgtagtagcattgttgtcaaagtagataaccgtattcatgcattaacctcctcaacaataatgtcagaatcaacatgctcatgaagaattttctctataaattgtgaaagtgtaatttgacgagacttacagcctgtacagttacctctcatagcgactgttactaatggtccattaacatcaataagttctacactaccaccatctgtttttaataccggatttatttcttcatctaaaagatgaagaattttttgcattctttggacatttgtaagaacaggtttagaggttgtttctttttttaaaagaccttggagttcatcaagaataacttgaatatcttctaaacaatctccacaaccaccaccagcttttgtataatcagtaacctcatctactgttttaagatcattttctgccacagttttacgaatatgttcgtctgagacaccaaaacatttacatacaataacttcatcatgacaatgtggaccactagtagcctctcctctccaattttttaaagctgcttcaagagcttcttctcccataacagaacagtgcattttttctctaggaagaccaccaagttgtgctacaatatctttattagtaatttttgatgcttcttcaacagttttaccttttaacatttcagtcaaaattgaacttgaagctatggcactcccacaaccaaaggtaagaaatgaagcatcttcaataacttcattttcattaatttttaaaaagagttttaatgcatccccacaagaaaggcttccaacttcaccaatagcatttgcgtcaggaagttctcctgcattcttaggacgaagaaaaagctctttaacagtatcagtatattcccacattacttattatcctccgatttgagcatgtatcttttcattgtattacaagctttatctactctatttaaatatagtttaattctgtgtatcatttatgtaaacataagatcaaatgcttttaatggaagagggttatgaatatttttattttgtgaaaaaaacaacatcattactatagtataaaattatatttatatggttagagaacatcaaaaaaaataatatggacttcttataaaataagattagttcgtgtatggtatctcaataaatgtactatatttttaactaagataaatataactagttcataaaattttaataatctagtaattaaattgtgaaaaaaacaacagactattttaggaaatatttagtaaaaaagttaacttgagcttgctaaataactagctaaagtaataagctgttattcatagcaacttagtatagtaataactttttagaacttgtatatagtttttgattggaatgaaagaaaagctatcttgtttattatattaaagttatacctatagtaaaaatttttactataggtataacttagtgctgtaataataaaaaatattggcctagttgtactaataaatgaaaactatattaaataatctgactataatgaaagtaagtactatttctatagtattatagctacctgataatatatgctatcccaataaacctattgctttttttcttcattatgaccaacaactcctccagctattcctccaagagctccaccaaggagagccccaattgtgccacttcctcctgcaatcgcacttataccagcacctacaagtgctccaccagcgacaccagtcaatgctccttgttgagttttagtaagatttgtacaacttgttaaaagtaaaaataaagctaatataactacagatattcctttcatattatcctctcaccaagtgttactttgtatttggagccataaattcataccataatacccatagaacatctttattcttttgtgtgggatgctctttgtaccatttatcaattttatgttggatgttcatccaagtatcatctttaaaagttttaatccatttttggacaaaaagagatggttttcttccttctttatgagctatttcttgttcgataacgacgacactagatactccataaagaaaagaaagcttctcgtttgttgatgatttctcccaatcacgaccagttaaatcacattgtacattatttgctattgcaacaggtgtagttagtaagcataatgcaaaaaatagactacatatcattaaagcatatatcttcataattcctccttagatacacaataatgtattaagatataatgggatagtaatatagtctattatagtaatcaatatctttaaaaaaatattaaaacataatcttaatagaatatatactataatgtcttagctactcttgcagttctattttcaaaacgtcggattgtaagatgacaaatagctgttgctaatgcatcgcttgtatctataggccaatctggtttcacaccaagagagcgtcctaccataaagcttacttgctcttttgtagctcttccatgaccaactaacgtctttttaattgttgtagcttcataatctttaattaatagcccttgatttgcacaagcaaccacagcagcacctctggcctgtccaagttttaatgctgttagtggattttgagctgtaaaaacttgctctacagatgcttcaacaggtttatatttcataataatagaacttatttcctgaaaaatatgtgcaaggcgctctgcaaatgaaccattacaagatggttggataacaccacaacaaactaaatgtaatactccagaaacctcatggacaataccccaacctgtatttctggagccaggatcaataccaataacactaatcactatctatcccttattactgttagtctaaaaggcattaattagatataaaaaagtaatcaactatgtataggttataattcattcattatttcatcagggatatctacatttgaataaacttgttgaacgtcatcatagtcttctaatgcttcaagaagcttaacaacttttttagctgtttctatatccacagaaatcatattttgaggaatcatagcaagctcagctgactgcattattagtttatctgattcaaacgcttctctgactgtattaaaatcagacatagaagtatgaatttcccatgtatctccttcatcatgaagatcatctgcaccagctgcaagcgctgcttccataagttcttcttcagaataggcagttttttcaaaaacaaaaacgcctttacgctcaaacatccaacttacagagccggattctcccattgacccaccattttttgacattatatgtcgtaaatctgctacagaacggttacgattgtcagtagcaacttctataagaactgctacaccaccaggcccgtatccttcatacataatttctgttatatctccaccactatcttgccctgtccctttacggatagctgcctctattttatctttaggaaggttaatagactttgctgctgcaattgcagctcgtaaacgaggattacctgaaggatcaccaccatttttagcagcaataatgatttcttttgcagcttttgtaaattctttccctctcttagcatcctgtcgacctttacgatgctgaatattggcccatttactatgcccggccatgaaatcctcctaattaacattcttctattacaatacacatctttacttttaagaagtagtaaatcttttaaaacctaatccaacataaaatatttctttactttttgtacgagagctacaaggtttaaaagatgtaactctctcaaaatgctgccgcatttcttttacaagctctatagtatcagctcccataaatattttcacaataaaactaccttgttgtaatagatagcacttagctatagcaagtgcctctaggcataattcaagagatctagaatgatctgtaatttttacccctgtcgtttgaggagccatatcactcattataacatgaaaaggaccttcttttattagtatattattaaatgagtctgaacgatgaaaaatatcttcttgaaaaaaagaaacattagaaggtaaagggatagttattgtttgaatatcacaagataccactctccctgtttttccaactttttcagcagcaccaagggaccatgaacctggagatgctcctaaatcaagaacactcattcctttttgaaataaacaaaaacgattatctatttctttaagtttataaatagatcgtgcaggatatttttcatgtttagctttaagaaaataatagtctctatacggtttcatatgtgtaatatttttacatagatgctataatatatagcctatttatagcataatggtttattctatcatcctcaaaggggaatattatatatgagttctttgtattgtaatataacttacaatgatagaaaagttgtttttgatgagttaggtagaaaaaaaacattggcttctggaaaagacgactttgttgatctttttggtaactctataaaacagataagttttgataatcaccctatattattacttggtattggaccttttcccaatgcttggcaacaactctttattaatcaagaggaaaataaaaaaattttttggatagaaagtcctttgtttgaaaaacaaatgccagaagaatggcataaatgtattccagctcattggaaaaaaatatcccttaaagaactacttgaacttcatacatttctaaaactatcagattgtcgtatctatcgatatctcccttcatatcgccttttttcaacattttggggcatggttgttggaaaactacaattaacacatcttaattatgcaccatctctttcatcttcttctatcattctatcaggaactgaaaaagaacttttaacctacgaacttaatatagcctgtcaacaaattggttttactccactatactttcctcatcaaggaactctatcccaactttgtcaaatagttaaagaacaacaaccaagtttatttctttctattaatctgcaaggacttgatagtgaaggttattttttctacttattacaagcagcaaagatccctgtagcaatttggttagtagataacccatggcatgtactttctaaactccgatcaccttggtggaaagaagcaacactttttactactgatcatagttttatttatgaacttcataagcatggtgcacaaaatgtgtatgctttacctctagcagcatggacaaaaacattactgcctaattctaccaattcaacaattcattctttaaacccattagtatttattggtaatgcttccttccctaacaaaaagaaatttttttctgggttacaactaccaagctcaataatatctcaagcaaaacttcaactaaataacaatgatcctccccatgtccattggtgggttaaaaagcttgctattaaacaatactggcctgataaaaagatacgtttagctggacttggtgctgaggagtgttcactactcaaacgtcaactatggctaactattgctgcagaaaaaggacttacgctttttggtaatcctgagtggaaatatcttcttccccctaaaaccgatgtcaggagtcctattgattactataaaacagtccctcatgtatataatcaggcaaagtatactcttaatgttacaagcctccttcttcctaaaggacttactcaacgacattttgacgtatggatgtttgatggatttcttatcacagacgcaacaccaggattatcccttttcccaaaagaattaaccgaatttattgccatacaatcagcaaaagatcttcatagttgtattgaaagatttgaaaaagatacgactctccgattacatcttatgcatgcttggaaaaagcatttaatagattttcacttatattcaaataggttacaaaatattttatctttattacagattaacatataaaaggagcatagatgtataaagaaaaaatagttgatgtagctattaatgtctttgcaaaaccataccaaacttcactttctatactttctttactacgacattctggatctattattgataaaatctattttcaatttgaaccatatgggtcaaaatatgacttatatcaaccatatattatagctgattatcttaaagaccaagctatttgctttcagccacagcaatggatagctcttagttctgtagacaaaaaccaacttcataatattaattacaggcactcaatacgctatcaatatgcttgggaacatacaaacaaaaaatatctttttattatccataatgatgtctttttttttaaagatattcttacaccacttatacaaaatataggctcacattttgccattggccaacttggacaatgttggaattgtcctgcatctcatatacaaattgtgcaggaaagcatacctaagctttctgcatgtcaccaagagagataccaactttttcgccccacatttatagaacttaaaaaactttatactgtagctaaacaaaagaatatttttgttcgaccctacttagagaattcggagtctatttttcaaatacaaccatggacacttcctgaatgtcgaattaatgaatgggcatgtcttgtaaatatggatatttgtgctccattgacaattcccattggtactgtattaccttttggagctttttaccaatgtggacctatctgtcttgatacttcagttgcttggtttaaaggtatgcatgaacataaccttacagcaaaacatatggatgtaagcaaatatatgcaacattggataggtactggaaaaatgacgcgtattaaatatgtaaaagctgaaaaaaatgcttcttatttactaaaaaaatacttccctcattttgtagattggtgcagaacaaaaaatgtaatcttttaacattaaaaaagtgcaaaaaatgtaataatatctttttataactactaggataatctcttaatgacaaatatttctccatattttattaatttatttagtttgactttattaatcttaactaataaatagtattaactacaaataaatagataatagttatataatagaattagtaagaacttaacacagctcttgtttataatgagggagtatcagcacgttaactaactattgtataaactctaactaaaacccaaataataacttcatatatgttaacggagaaaaatgctatgtcaaagcagtttgaaatatataaatgtgaaaagtgtggaaatatcgttgaattgctttttgcctcaagtggtactctttcctgttgtggtcaacctatgactcttatgaatgatagtaatacatctggagctaaagaaaaacatgtacctattattgaaaataatggttcaggttgcaaggtaactgtaagtacagtaatccatccaatggaagaaaaacactggatcgaatggattgaaattgttacaatcgatggacaccattgtaaaaaattccttaatcctggagatgaaccaatagcatactttaactatccattagagcaaattgcttatgccagagaatactgtaatcttcatggattatgggaagtaagcgttaattagttagtaagtattgactactttaacatcctactataacggagttcttgatgacaaagtatgaatgtgatgtatgtggctgggtatatgatcctgaagagggagatccagagcatggaattgctccaggaacagcatttgaagatattcctgatgactgggtttgtcctgtttgtggcgcaggcaaagctgacttttctcctatagactaaaattaaagaatccatgggaatgtatcattcccatggattcttaataatatttttactaatgtaacctattaatgttacagtaaaatttactatataagtcctatatcttaatatatacagatatgttgggcatctattcttaaataaaggaagagcataaaatgaaacctgttgaaataactaacgatatttactggataggtgctgtcgactttaataaaagaaattttcatggatatagccggtcacctcaaggtacaacatataactcataccttatctgtgatgaaaaaaatgttatttttgatacagtagatgaagaatattcaggagtaatgttttgtagacttgctaaacggctccctgtagataaagttgattatattgttattaaccatacagaaaaagatcatgcaggagctttaagtgagcttgttacccactgcaaaccagaaaaaatttttacatcaaatataggtaaaaaattcttagatgcccaatttgacacaagagagtggcctattgaaattgtatcaacaggagactctatctctattggaaaaagaacaatacagtttctagatactcgcatgctccattggccagatagtatggtatcttatatccccgaagaaaaacttcttataagtaatgatatttttggccaaaacttagcaacatctgaacgctttgcagatcagtgtgatccatcaagtgttaaaaagcgtactaaagaatatttctataacatcatcctccctttttctacacaagttagaaaaacattagataattttaaagaaatacaacttgatatacaaatcatagctccagatcatggtgtcatttatagaacagctgaagactgtgatagagttcttaatctctatagagaaatggcagaacaaaaattaaaacaacgtgctgttattgtctttgaaacaatgtggggatcaacaaaaaaaatggcttatgctataggctcaggttttgatgaagaaaatgtcccctactctattattgatatacaaaaaaatcaccatagtgatgttatgactgctttagctgatgccagtggtattatcataggctcagctacacataataactcctaccttccaggaattgcagatctacttcactatatgcaaggacttcgtcctaaaaatcttattggaggtggctttggctcttatggctggtctggtgaagcagcaaaagatattcaagcaatattaagttcaattggtgtagaaacaccatctgaacctctaagagggacattcatacctaaacatcaactactaagagattgttttaattttggaaaaactattgcacaggcactaaaaaataaaggacaatattaaataaaaaaagtcagtgattatctttttataagatgaatttaactactttaaacttcataaaaaattagttattatttaatttgtagtttttagtgctaaacgcatttttacctttaactaaagataaaaggggaattgcatggatgttgttatgctgtcacggctccagtttgctgtagctgttttttttcactttatctttgttcctcttacacttggactaacggtcattcttgctttaatggaaacaaagtatgtgaagactggtgaagaagtgtataaaaaaatggctaaattctggggaaaactattcttaataaattttacgttaggagtagttacaggtattacccttgaatttcaatttggtacaaactggtctaagtattctgaatatgtaggtgatgtttttggttctttattagccattgaagccacagcagctttcttccttgaatcaatatttattgctgtatgggcctttggttgggataaaattgggaagaaaatgcatcttacggcaatatggttagtagcctttgcctctaatatgtctgctctttggattatccttgctaatggttggatgcaacatcctgtaggatatgtattaagaaatggccgtgctgagttagatgattttatggctgttttcttaaatccatatggttggggacaattttttcatactatttttgcttcatggatgttatcagggttctttgttctaggaatctctgcttggcatctctatcgtaaaaatcaaatggatttcttcaagcgttcagttaacatagctgctccatttacattaatatttgctattattgttgcattattaggacatcagcaaggtcaatctgttgctcatcatcaaccagcaaaacttgctgctatggaatgtcactgggaaacaggaagtgatgtacctatgtatcttcttgtttggccagatgttgaagaaaaacgcaatattatccaagcacttcctattcctggattattaagttttcttgcagacaatacaacaagtgctgaagttgtaggcctaaatagctttccagatgacgaccttcctcctattttacctaccttcctttcatttcgatttatggtagctactggtctactattcattctttttgcatggctagcttggtggtatagagataggcttgaatatcaccctaagctactaaaatgtcttatctatcttattccactaccatacttatcaattatggctggctgggcagtagctgaaataggaagacaaccttggattgtttatggacttatgagaacaaaggatgctgtttcccctattccagaatcttcagtctggatttcccttataagtttcattgtagtttactcatttcttggcattttagatatttatctcctagccaaatacggacgtaaaggtccccaggcataaacctttatactagggagaatcaggagaattatatgcttgaaacaatatggtttgttctttggggactgctttgggcagtatactttgtacttgatggatttgatctaggaatgggttcactcatgccatttctagcaaaaacagatactgaaaaacgtataatttataatgcagctggaccctattgggatggaaatgaagtttggcttattactgcaggaggagctacttttgcagctttccctaaagcgtatgctgtcatgtttagtgcattatatgctcctcttcttattatactctttgccttaattttccgggcagttgcatttgagttcagaaataaaatagatactcccttctggcgtagtttatgggatttatttctatttttaggaaattttattcctgctctactactaggagtagcatttgctaatttatttatgggaattcctattgatagatatggtgtatattatggcaatctactaatgctgttaaatccatatggtatcttaggtggtattttctttgttatcatgttctgtgtacatggagcactatggcttgcactaaagtctgaaggcctacttcatgccaaagctgttgtaacagctaaaggattgtggtttattcttgcagcattaactatagcctttcttgtcatgacttattactatactaacctttatgacaattatgaaattacaccagcgcttcttgcatttcctgttatagctgctctttcacttatctttatccagcttatgcttaataaagaaaagctcttgcttgcatggatttgtagtgcgttattcatcttatgtgtaacattctttggtgtactaggaatgtatccaagtttaatcatctctagtataaatccaacatatagtgtaacaatcatgaatggggcatctagtcctttaacacttaaaattatgttaggtgttgtcattggttgtatacctattgttattgcctaccaggcatgggtttactatacttttgctcataaagtaacatctgaatctatccatgctgatgatcatgcttattaaaagattatataactagaaaaaaaggctgtttatatacaaacagcctttttttctaatcaataaaagtattgcatatgaagaatactctaatagatacttctatcatacagtaatccattagaaaaaattttactatatggtatgcaatcagctattatatatatatataatttattcttcagtatcagaagtcggctcagttgctgatgttttaacacttaattgtgtatgtacagcagaggatttatcaagttgaagttcagtagcaaggccttcaagtccttttctccccataagagctgcaccatatttttcattaggttcccatgcaaacataacagctgtaccataacacgaaaaatatcttgtaccatcaggatgaaacgcaacgttttcactatagcctacaattgcatgtgctcctttagataaagctcgagatgccataccaaaaaaagcatcatcagcatcatatgctcttgaacaaactaatcctaaaacttttgaaattcttttaccttcaactgtatcagtggtaacaacaggaaattttccacctaaaaaaagttctttagacttttctaaaataggatcttttttcaccttggatttcttttttctctttgctctgttagcattaaaaaaaaacatacttcactcctttattataaggaacgttcatccaagctaatcaaaaactatgcctaactaataaacaatgtaatatcctattgttaaaaaacaaaaacaatattctcaaaaaaataatgcaaaaaaatgactattttcttttttatcatacctgaaaaataactattcaatcgaataaaattatgctaacttcatctaagagttatgaatagtacttttatatgaagtaaaagaaagtttttttactataactacattaattaattaccattaataaaactatagtaaataaatattgtaagctaatataattatagtgcatatctataatagtgtattaacaaaattatatgttatatttataacaaggtataatccataaattgttagagatgttaaggagtatctcagatggctgctaagatgaaaaccatggatggtaatgctgcaacaacacatattgcttatgcattaagtgaagtggcatgtgtttttccaattaccccatcatctgtaatgggagaaactactgacaactggtcagcagctaataaaaaaaatcttatgggacaaagagttcttgtacaagaactccaatctgaggcaggagctgctggtgctgttcatggctcactggtagcaggagcactaacttgtacatttacttcatctcagggtttactccttatgatacctaatatgtacaaaatagctggagaacttcttcctgctgtcttccatgttgctgctcgtgctattgccgcacatgcactttccatctttggtgatcagcaggatgttatggctgtacgccaaacaggcttctcactcctttgttcaagttctgtacaagagtgtatggatctggctttagtagcacacttatctgctattgagtcacgtgttccattttgccatttttttgacggatttagaacatctcatgaagtccaaaaaattaatgttattgaatatgaagagatccaaaaaattgtaaattgggaaaaaatacacatattccgtaaaaacgcaatgaatcctgaacatccatatcaacgtggaacagcccaaaaccctgacatctactttcaaaatagggaacgttctaaccccttttataatgctgttcctgggattgttattgattctatgcaaaaagtattttccatcacaggaagacagtaccaactctttgattatgttggtcatccagaagctgacagaatcatcattgctatgggatctgcctgtgaagctattacagaagtaattaatactctaaataaccaaggacaacgattaggacttattaaagttcgtctttatagaccattttcagtagaacatctacttcgtgctattccaccaacggttgagtcaataacggtccttgatcgaaccaaagaacctggagctcttggtgaccccctatatttagacgtttgtactgcgttcatggaaacaagagatgtaaaacatcctcatattatttctggtagatatggtttaggctcaaaagacttcactccagctatgattaaagctgtttatgataatatgttacccaacaatcgtaaaaatcattttgttgttggaattaaagatgatgtcactcatacaagtcttgatatcagtgataactttgatactgtcccaccaggaactatccagtgtaaattttttggttttggttcagatggaacagttggagctaataaacaagctgtaaaaattattggtgacaatacagataaatatgttcaagcatactttgcctatgattctaaaaagtcaggtggatttactgcatcccaccttcgatttggggatcaccctattcgttcaacctatcttgttacccaagctgactatattgcttgtcatcatcctgcctatgtcatacaatatgatgtacttgaaggtatcaaagaaggtggtatttttgttttaaactctagttggaacaccatagaagatttagaacgcgaacttcctccaccaatgaaacgaactattgctcgaaaaaaacttagattttataatattgatgctgttaaaatcgcttctgaagttggtttgggtggtcgtattaatatgatcatgcaaactgcatttttcaaacttgctaatattattccatttgaaaaagcaatagaacttctcaaacaatctattcaagagacatataaaagtaagggagaagatgttgtaaaaataaactatacagctgttgataatactgtttctgccctgaatgaaattcaagttccttctacttgggctgatgcatcaactgaatttgttatacctagatataagaatgtaccagaatatattaaaacctttgttgaacctattcttactgaaaaaggggatatgcttcctgtttcaagctttaccccagacggaatagtaccacttggaacagcagcctatgaaaaacgtgctattgcaattgatatcccagagtggattgctgataattgtattcagtgttttcaatgttcttatgtatgtcctcatgcttgcattcgtcctgttctagccacagaagaagagttaattggggctcctgaaacctttgttacaaaagatgctattggtaaggagcttaaaggactcaaaatgcgtattcaagtctatcctgaagattgtgttggatgcggctcttgtgctgatgtatgcccatcaaaaccaaaatcacttattatgatgccattagaaacacaacgacaggaacaagttattaatcttgattttgcccaaaaacatatttctcttaaagataatctgatgccaagagatacactaaaaggctctcaactccaacaaccacttcttgaattttctggtgcatgtgctggttgtggagaaacaccatatgtgaaattgttaacacaaatgtttggtgaacgtatgttcattgctaatgccacaggttgttcaacaatatggggtgggtctgctcctactgctccatactgtactaacaaagatggacatggaccaacatggggtaattctttatttgaagatggagccgagtatggacttggaatatctttagctattcaacaacgtcgtgctaagcttgcagagcttataaaagaagcattaacaattgaaggtatttctacagaactcactaatgctttgaatggatggttagaacatcaagaagatgtagatctttctaaaaaatttgggcaagatattaccacaattctttcaaatacacctacaaatcctatttttgcacaaatcttagaaagagaagatttatttactaaaaaatctttttggataattggtggcgatggttgggcatatgatattggctttggaggccttgatcatgttattgcatctggtaatgacataaatatcttagtccttgatacagaagtatattccaatactggtggacaatcttcaaaatcaacaccccttagtgctgttgcaaaatttgcagcttctgggaaaagaactaccaaaaaagatcttggtcgtatggctatgacgtatggctatgtttatgtagcatctgtttctatgggggcaaataaacaacaattacttaaagcttttaaagaggctgaagcatataaaggtccctctattattattgcttatgcaccttgtattgaacaaggcattcgtaaaggtatgggtaaatctatggaagaatcaaaacttgctgtagactgtggatattggcctttatatagatttaatccagaattagcaaaacaaggaaaacaaccacttattttagattcaaaagctccagatggtaatttacgtacattccttgctggagaaaatcggtatgcacaacttgaaaaaaatgatccagaaacagcaaacaaacttcatgaagaacttaataaagaatataatgatcgctatcgcctattaaaacaattgtcagaacttacagttacagcatcagaagacccattgttacaaagataactagaaatacaattagaacgtcctatttacatactttctaaatgtattcatactacttttatcttatgtaaataaaggtgataggttatggctaataagctctatattactgctacagaaaaacgtagtggtaaatctgcagtaacccttggcatgatgcagctactcatgcgacacataagaagtgtagcatttttccgtccaattattgctaatatagatcctaataaaaaagatcatgatattaaccttatccttacaacgtttaatatcgccatgccttatgaggatacttatgcatgttcttttaaagaggctagaacacttatagcagaacaaaaatctcctgttctaattgaaaaaattatacaaaaatacaaacatttagaagataattatgactttattctttgtgaaggtactgattatcttagtaatgattccgcatttgaatttgaacttaatatagatattgctgctaaccttaatatgccacttgctgttattgttaatggaaaaaacaaatctattgaagaccttatttcttctactgttacaagctcagagcttatttttgataaaggacaagatattgcttgcctttttattaataaaacaacattagccatacctgaactagagaattgcaaaaaggctattagtactgcaataggctcacaggtccctattgctatgttccctaataattctgtcttaagtcgaccaacagtatctgatataaaacgttggatgaaagcagaagtaatatatggtgaagaatgcctaaataattcagtcgaagattatattataacaacaatgcaacccaataattttttggaccagttacaacaaggtcttcttattataacatctgcagatagatctgatattgtccttgctagcttagcttcaagactttcaatgacatatcctgatatagctggtattattctcacagggaagtttgaactttcctcacatattactcgtcttatcaatggatggcaatctgttcctgtccctattttaaccgtatcccaaaatagctatcaagctattatgacactctcagaactttacggaaaaattaatgtttcagatacacgaaagatacatatagcactcgctatttttgaacaacatgcagacagtaatgctattacgcaacgtgttattgaaagaacttctgacaaagtgtctcctaaaatgttcgaatttaaactcattgaacaagcacgtcgccataaaatgcgtattgtccttcctgaaggaacagaagatcgtatcctcaaagcagctgaagtactttcacaaagagaagttgcagacataactcttttaggagatatccctacaattcataaaaaaatttcagatcttggactgtctctgcataatgttcagttaattcaaccaaatcaaaaccatgctctatttgaaaattatgtacagacatattatgaattacgtaagcacaaaggaataactttagatgatgcccgtgattggatgaatgataccacttactttggtactatgatggtttataaaaatgatgttgatggtatggtttcaggagctactaatacaacagctcatactgttcgtcctgcgtttgaaattatcaagactaaacctggtgcatctattgtttcaagtgtctttcttatgtgtatgaaagaccgtatccttgtttttggagactgtgctgtaaatcccaatcctactgcagaacaacttgcagacatagctattagttctgcacaaacagcacacgtctttggtattcctgtcagagtagcaatgctctcttattcaactggaacatctggtaaaggtatagatgtagatattgtttctgaagctacaaaaatagcacatgaaaaagcacctcatcttatattagatggtcctattcagtatgatgctgccattgatcctgatgttgctaagacaaaagcaccaactagtgtggttgctggtaaggcaacagtattcattttccctgatttaaatacaggaaataatacatataaagccgtacaacgagctgctggagcaattgctattggaccaattctccaaggtctaaaaaaacctgtaaatgatctttctcgtgggtgcactgttacagatattattaatacagttacaattacagctattcaggcacaagcagaacaagggttaataacaatagactaaattaactaatatatatatataagaatacactataataaagtatagctttagtagtatggttctcttctctttattcttaatgaaaggaaatttcaatatatgaaagttcttgttattaatacaggaagctcctcgttcaagtatcaacttattgatatgcctatggaacaagtgcttgtttcaggtttagtagaacgtattggagaagaagtaggacaaatggttcataagatataccctaatacttctcaggaaaaaaagtatactacaacccagcctttttctactcatgttgaaggaatgcaggctgtagttgctgaacttatcaatccaaaacatggaattctccattcagtaaaagaaatatatgctattggacatcgtgtagtgatgggtggagagacaatgaaacaccctgctcttattaatcaacatgtaaaaaatattattcgtgaatgtgccatcttttcacctctccacaacctttctcatcttgcaggaattgaaactgctgaagaactttttccaggtattcctaatgttgctgtttttgattcagaatttcatcaaacaatgccaaaagtagcttatctttaccccctgccatatgatatttatgacgactacaaaatacgtcggtatggtttccatggcacatctcatagatatgttgcacaacaaacagcaaattttcttaacagacctataaaagagctaaactttataacttgtcatttaggtaatggatgttctatgacagcaatcaaaaatggaaaaagtattgataccagtatgggattaactcctcttgacggactaatgatgggtacacgttgtggggatattgatccagctattgttccattccttatagaaaaaacagaaaaatcagcaaaagacgttgatgaattaatgaataaacaatcaggtctcaaaggcatttgtggaatgaacgacatgagagatatacatgaagcttgtgcacaaggtaatgcaaaagcacaacttgcacttgatatgtttatctatcgaataaaaaaataccttggagcttattatgccatcctagggcatcttgatggtatcatttttactgcaggtattggtgagaatgatactattgtacgtgaaaaggtttgtagtggattagaaaatttaggaatttttcttgatagctcacgaaataatacacatagttccacgctacgattaattagtacagataatagtccaatacctatctttgttgttcctaccaatgaagaattagaaatagcaaaattaacaatacaactggttagtaatacacaataacttttgcaataccttatgcttatcttaacttaaccagttttcaacacatttctgtatatcttcaagctgatcaggacaaaaccagataatacgcttatctgcattaaaccatgttagttgtcgctttgcataactacgtgtattttttaaccaacgctctttagcttcattaaatgtatattcaccttttatagcacctaaaagttccatataccctatacctgaccagttttgaacatctttattaaagtaacgcttataagtagttataacctcttttattgctccttgaacgaacattttatctatacgtttttctagcaatggtgctaattcaattaatggaattttaatacctattctaagaacagttgcaggatatgcttcagttacctgctgatgccaccatgtaaaagtttttccagtttcataaaagacagtgagagcacgaagaactctttgtcgatcatttgggtgaatagaattagcatacaaaggatcatgcactttaagcatattgtataaaaaactaattcctttttcttcagcctgtttttccatagttaagctaagttcagtagaaattggtggtatagtaacaatcccatcaaacaaagcacgtaagtataaccctgttccaccgactaataatggtattttggtatgacatactgaatcaagttgctctgcagctaatgttgcccatcttcctgcagagattttctcatgtaagtctaaacaagcataaagtttatgaggaattaaagaacgttcttcaaaagttggttgagctgtaatgataggaacacctttgtatagttgtcttgaatcagcattaataatgattccatcatatcttttagctaaatgaaaggctatttctgatttacctacacctgtaggaccaacaatacaaataactttacgatagttcatgatatacgaatatcattagtcacataactacacatataactactagttaggttattactaaatttgacttggattgacagtattttgttttcaaacatattaacacattttctggaacaaaatctgttacatcaccaccaaggcttgcaactgtcttaactacagttgaactaatataaagccatttgtagtctgaaataaggaatattgtttctatctctggacaaagtttacggttcatcaatgatgtttgaaattcatattcaaaatcagacacagctcttaagccacgtaaaatagttttagcattttttttttcaacataatctacaagtagaccagaaaaattttctacatctaccatatgatcagaaaaaaaagttgtattaatcatagatactcgttcttcaatagaaaacaaaggctttttgcctgagtcttgtgctactgctataataatcttatcaaataaatgtttagctctatgaataatacttatatgaccattagtaagtggatcaaatgtcccagggtaaatagctaaacgtatttttgtgtcttccatataagtaaccttgtttgaccgtaggatctatttgataatagctcaagctgtggatgtaactgaaaaaaattaatacgtaatgtggtttctacttctgcaataatataaccctctggagcaatccatcctttttccacaacacaacttatagttgtttctagcctattcccaccataaggtggatcaataaatacaagctgatatagcttaaatagtgagtcttgatttagaaattggattacatcctgttcaacgacacttacttgctcaaatagtctgagtttctctatgtttttatataagcattgcactgccttaggattattttctataaaacatacttctgcagcaccacgactaatagcctcaaagcccaaacttccactacctgcaaacagatcaagaatatatgtttgatcccaaacaatacctcttgatgtaagcatagaaaataatgcttctcgaactttacctgttgctggtctataaccatctccttcaattgtcttcaatatccttcctctaagagaacccgtcataattcgcatatctatctcacatttactatataatattaaaactatagtaacctactatagctttaggattaacttggaatacatgttacttattatcctaacttttatgaatgtaataatgagtgtaataataataataattttattaactacttgttataatttaaaaaagactctatttcctgattaagctcgactagccgatcgtacatacaaatttgtgtttcccatggcttttgagcaatattcttaagctttaaattaatattattaaaattattttttatagtatcagtaagcttactccattcaactggttgtatgtttttagattcactaacaataactttttggctttctgctgtaagctctaactgttctaaataactaggaatgtacacagttagcccatacttttgttgtataagctttgaaaatacttcttgagccttttcttccccatgtacaaggagaacttccatttgtggttgatacattctcccaatccaatcaagtaattgttgttgtcctgcatgtgctgaaaatccaccaagtgtataaactttggcttttatagctacatcttcaccaaaaatacgaacagtttttgctccatctacaatttttcttcccaaggttccaacagcttggtaaccaacaaaaactatacttacacctgttttccaagcattattaaataaatgatgtttaatacgccctgcattacacattccacttgcagaaattataatagcagatccttttaactcatttatttctttagattctttaacacttggtgtatattttacagagagaccatctaatatggttttaaatgatggatgatcattaaattttagatagctattatatgtttcaaatatttttgttgtttgaattgctaatggactatctaaaaaaataggaatatcaggaatacgattctgttgttttaataaataaagacaatataaaatttcctgtgttctacctacagcaaatgcaggaataatagttttactattatgtgtccaactataatgaatagcatcaactaactcatcaaaagttgcttgatcaattttatgattacgatctccatatgtactctcaataaagagaaaatcagcctgtggaggggtcataggttcatgcattaataaactatctgtccgaccaagatcacccgaaaaaactaaacgtacttctttaccttcttctttaatgacaagctcaagaaatgctgcacctaaaatatgtcctgcatcatgatatgttacttgaatacctggatgtggttcaaacatggtattgtatgatacaggagtaaataatggagaaacattttgtgcttcctcaactgtataaagtggtaatacctctttttctatcttaccatgtcgtgcatactttttattcttccattgtgcttccatttcattaatatgtgcactatcttcaagcatcaaagtagcaagatctttggttggagctgtacagtagatccgtccatgaaaaccttcttttacaattttaggtaaaaggcctgaatgatcaatatgtgcatgtgttaataaaataaattgtaattcttttgcatggtagtgttgtatttcaaaattacgtttttcaataattgaatttccttgaaacattccacaatcaacagtaaacattatcccacatgcttcaataagatagcatgaaccagtaactgtttttgctgcacccaaaaatgtaattttcataaaatcttacctaacctaatctctaaaataaaatataaattagaatacaaaataagattcattagagcaatacatacaaagattacttctctaataagtaatcatgaatagcaataataaaactgttagttcaaaatagaaattccttctaatctactaaataaggtttcatctttatttagattacaaagctcattgcctaagtctaaagaagaaataataacacgtccaaggatgtaacgtcctttatgtccgttatctattgtatgaactccccataaatcatgtagcattacaggcgtgtcattatacattccaagatataagccaacatgtccctgaaaccctatcaatgttacaaatggaatagcctgagttttcatcacagaataaaatttctcttttgaaacatgttctaagttgataaaatgtctttcatgtacttgttgttgtgaattccttggaagccaaactccaaaagggataaaaagatctgagatcatttccgagcaatctctacgaccaaaaagacctccccacccatatggttgtccaattaaagactctccaatagatgctagtaacttaggtgttagtacttgtggcataggtaaaacattatgttttggagtctctgcagtgataatatgtgcattaccatattgatcacgaacaggaactaacaacatagcagtatcaccagttagcttaaccataggtagtacagttcctaaaaaacctgcacctccatgcacacctgaagcatcttttaataatactccatcataaataattgaagcttgtggtaacgataaaaattgttttatgatatcagaattcactttagcaacaacgttatctctcacccacccagaaacaaaaggtgtttctataaaaacccaagcttcatcttcagatatatgtgttacaactactggtgtaccaagatgaatatttgcttccataagataatcaaaaggaaaaccttctcctgctaaagaaggatttctgaaaaaagggcttactgttggtgcagcacgaacagctgttctttctgttataatacccttatagttgcatgaaggatacgttgaacgtgcagcatttttttccactgctttccaatttttttctgtccatggaagaaggttttcagcccaccatgtagcatgcgattttgtattaggataagaaaaaataatatatgcatcatgaactggaaaaattggttctgtagaatcccatggttgaaaaaaacgttttttaaaaaaattatatttttcctccaattttttccctgaaataagtgttacttctcccaacaagtcagaatagactttcaaactttgagggaataccattaaatctttaagcatacctggttgatacgaagaaacacattgttctgtaggcttagataaaacatatccattggataaaaaagtaaaagacattatgctacacaaaaatattactataatacgaaaaatcattataatatatcctggttagtaattatataaagataacatatctagtatgtagtgaataaaaaactctaatacaaaatttatgttactataatacaataaaactattaattcaaaacagaaatccctgttcttttatcaaaaagaagcgagtctgttatacaaagttcagctcctggctttaatgatgttataacaatacgtccaagaatatgacgtccttcagatccgctttggatagtacgaataccccaaacatcatgcaacatagcaggtgtgttattatacatacctagatataaaccaatatggcctttaaaccctattaatgtagcaaaaggtatagctttatctttcataagctgatacacttcatcttctaaaagttgtgttgtatctatatagttccaagcatgaatttgagcttgtgaatttcttggaagccaaataccaaaaggaataaaaagatctttcataagttcagagcaatctctatgaccaaagctaccaccccatccatatagttgtcctaacaatggattcccaatatctgctataaaagatgctgttaattcatgaggtataattgttgtgtgtatttttgaaacatatacttctgtaatacgagctctacgatgttgatcccttagtggtgctaacagaactaattctgtaggtgttgattttattataggtaaaacagtacctaaatatcctgttgttacatgacgtcctgaacgtccatttagtgctacattatcatgaataattgctgcttgaggtaaagaagaaaaccacttgcttatattatcagaaattaatgcaacagtatgctcaggaacccatccagatacaagatctgtttctataaaaacccaatccccattagtagacgtatgtgttatgaaaactggtgtaccagcatgaagatttgactctataagataattaaaaggaaaaccttcacctgcagtttgtggatttagaaaaaatgagctttgtgttggtgcagcatacacagatgttctttggataagaatacctttatccttacgagaaggatatgttgaaattgcagcattttttttcacttcatcccagtgaatatctgtccaaggaagaagattttcagcccaccacctaatgttttcttttgtattaggacgatcaaaaatactataaacagtagaagcaggtactgaggctttatccttactccatggttggaagaaatgttttttaaacaaagcatattcatctaacattctatcttttgttatgagtggatcttggggtaaaacagatgagtacacttgtaagtcttgaggaaatacttctaagtcttttattgtgcctaattgtggagaaacacaattaaatgtcttacaacctgtgagacaaagaaataaacttatcatacaaaaggctatgtaatttttatatctcatgagtcccccttaattatagtttttgtaacattccatttaccagtcttgctgaaagccaagtatgtcttttttgagttttattattttttatagctatagctaatgcctttgactcaccaacaaatacaacaagatttttcccacgtgtaacacctgtataaactagatttctctgaagaaggacataatgttgtgtcataagaggaataacaactgcaggatattcagaaccctgagatttatgaattgaaatagcataagctgcaacaagttcatcaagttcatcactaggataagaaacaagtcgttcatcaaaattaaccacaatacttttttcttccatatcaatatatgtaattctgcctatatctccattaaacacatctttttcataattatttctgatttgcataactttatcaccaaggcgatatatcttttctcctctctgtaaaaactgagatgtgggattaagttcttcttgtaatcttttatttaaacttgcagcacctactgttcctttatgcataggagttaatacttgaatatcattaataggatcaaacttaaatcttcttggtatatgattttttacaagatctacaatgagatcagctgctttatctggatcagattgacgtataaaatagaagtctgaaagagcctcttttgatgattcaaggcaaggaacttctcctttattcattagatgtgcattacatacaatctgactttctgctgcttgtcgaaaaacttctgtaagttctacaacaggaagcagctgagatataataagatccttaagtacattacctggaccaacagaaggaagttgatagatatcaccaacaaaaataacagtagcacctaatggaatagcctttaataaatggtaagtaagcataatgtccatcatagaagcctcatcgactactaataaaccacaggctaatggcatatcttcatttctaataaagccatcatttctagggctatactctaacaaacgatgaattgttcttgcttccattccaatagcttctgacatacgttttgctgctcgtccagttggtgctgcaagtaatattttagctttattctctttaaatacttggataattgcattaagtacagttgtctttcctgtaccaggacctcctgtaaggatcataatctttgatgtagtagacgttactatagcactcatctgttctggagctagagtgatattaagtttattgataacctgtgaaatggtatcatctgtatttttaaattgtactgattttggtgaatgtagaattcgctgtaaataaaacgcaatttgagattcgtaatggtgatagcgatttaaataaattccaatatgttcatccaatgcttcacaaacaattctttcttctctcttaagatgttctatagcatcctctatgcactgatgatcaataccaagattatgactagtaagctctataaaagcttcttttggataataaacatgtccttcatccatacactttaaaagagtatataatattcctgcttgggctcgcaaaggattatctttttcaaatcctaattttgtggctagtgcatctgctgtaagaaaccctattccatgaatatccattgctaatctataaggattttcttttactatatttaaagactgctgaccataatacttatatatctttactgcataagtaacactaataccgtaaggttgaagaaacaccattagttctcgagttgtctgatgttcttgccaacactcagtaatttgatctaattttttctttgtaataccctttattttaagaagttcttcaggagaggtatctaatatatgaaatgtttcttctccaaactctgtaacaatactctcagctgtttttttacctatacctttaatcaaacctgaagaaagatatcgcttaatgccttctactgaagcaggaagacgaatttcaaatgttgacatctgaaattgtctcccaaaacgtgtattattcacccattgtccagaaacaagtattgaagcgcctggttgaggattatttaaatacccaacaacaggtactgtatcaatatcatctgagttctctggtttaaggcggaataccgtatatccattttctgaattatgaaaaacaattcgatcaagtataccttgcagtactatctgctcttttatatctaattgtgccatatgattaattagtctagtaagttagctataagaactataaatacagtataaactaatataaaaaaagatataaaatttcttttactacttctttatattgacaccatcttcatgattagtatagataacccaagttatcgaaaattctttgttgaaagaagtgatatctagaacgggcggttagctcagttggtagagcgtcggccttacaagccggatgccacaggttcaagtcctgtaccgcccaccacattcctttacttttcaataatacgtattatattatatctattcttttatccctcttatttcaataagtctaactattattttagaaaagcttaaattatataacatatactacaaaatctgtattaacctactataagatctaaataaaaaaattattttattataccacaaaaatttataactttttacatctgctattttattttttcctacatacacttatttacattagactagatatagtctaattctaatatagagctacatttaaatttaattattttatcaatagctaacagttgtaatactacttataagtcacaactatttttaatacgttaacttattttatatatagaatattttataaacgtcatttatcttgaatataaggtacattaattaattaattatataaaaatattattaaataatgaaaaaaatatatacatctattcatatcctttatatattaatcgtaactagttatatattaattatattatattattttataacacataaaaatgtatatgctaatacaacaaataatttatatagtataatcagtttatcctctcctactaatagctataaagaacactataataatgtgaacaatcaaaaatacaaaaaaaatatacaaaaaaatatagagtatcacagctcagctgaaaaaactcagaagatatcagctaaatctactttgccctaccctcaaaaaatagcagatcctcctatacattcttttctacaaatgacttctgttgctattccacttatagtaggaggattatttcttaataactctagagcagagaaaaatatccataatttaagaaatgattatgtacctaagtttaactttcattatgaagattatctccagtttgctccaggtgcagctatgttaggattaaaattaggtggtctagaaggaagaagttcatgggcaaggatgctttttgctgatgctatttctattggtttaatgttacctactgtagaaataataaaagtacatacaaaaaagaaacggcctactggttcttcgcaccaatcttttccttctggtcatacagcaaatgcatttatgttagcaacaatgctacataaagaatatggggaaacacataaccgatggtatagcattttaggttatacagcagctacagctacagctattggaagacaactcaacaatagacattggcttagtgatactatggtaggtgcaggtataggtatcatgtcaacagagataggctatcttctaacagatcttatttttgaagataaaggtattatccgacctattagagaaccaaaaactatagataaaaatagaaaaccttcatttttaggtctatatgcaggtattaatcaaatgtcaggcaaaacaaaaatagacagtgtagaaatatctacaggaactggtgctaatgttggtatagaaggagctttattttttaacccctatataggagttgggggaaagttttctgcagcaaaccttcccatattaaaagatggaaaactccaaaaagaaagatacatagatatactttctgggtatgggggactatatttctcttaccctctcacaaggagaattggcttaggaagtaaagttcttgcaggatataattattaccgtcaatccaaatcattaccatcttcttcaatcaaaataggaggaaaaaaagggttaggtatttgtactggagcttcaatacatattcttgctaatgacagcttaagcgtatcatgtttccttgactataattttatacaatcacctcttccaaaagacaaaaagttgagagctacacaaaccttaggtctttcaacaaatattgctttttaatatattatagtttggctaataattaactctaatataataaagatgtctatctttcttatagaaaaagtaaaaagaatgataaaaattattaattatcctcttggtaacaatataaaattaactatgtttgataaatgtcccagactctagttctataaatgcttcctgtaactcatcatttgtattcataacaataggaccaccccatgcaattggttcctgtataggtttaccagaaactaatataactcttgcaccatctaaccctgtttgaataaataaatcttttcctggattaaataaaatagcacgcttagctggtataagagcagactcaaagccacactcaccctctacaatatatgcaaatactgtatgttgaggatcagttgcaacttgccaaactttatctggttttaaagtaagatcaaaaaaattaatattaacatattctcccttggttgcgccaggaacatctttgtatttacctgttacaacagcaactgtaccagcatcttcttctaccttagggatcatctctctagtaatatctctatatttaggagctaccattttatatatacgtggtaagttaatccataactgtaaccctaaaaacctttctgtagccttaggcatctcctgatgtaaaataccactgccagcagtcatccactgacaacagccatcaagtatactcccttgattacctaaactatctttatgctcaacattaccttgaatgagatatgtaaatgtttctatccctctatgaggatgcataggaaaaccttttatataatcttcaggatttcgtgagtcaaaggcatctaacataagaaatggatcaaaattcttaactgttaatgatccaagaacacatacaagatgaacaccagctccatcaactgacttataccctgtaactatttctttaatagtacgatgtgacacctcaaccttcctttttatatatcttacaattctttaacagtatattaattaatgtaccttagtaagagataagaagaaatgattatacactataaatgactatattataatatataaaaatttaattaaaaatttttatattagttattatgttacatgtaacataataactaatatagtaattattaatgtaaaaattattgttatatattactaaattcagaagatgtataactatatctatcacataataaaaggaaggtagctacagtagttgctagtactatccaataaataaatctatagtctggtgttggtgttacaataaaataacctaagtaataacacacagcagagcttgaaagcatttttacctcaataccaagtaggtcatttcttttcaaaacatataaaaatagtattcctgctagaggaatccagaaaataggtagaaaaagaatgggcaatatattttttgttgtattaacatatgaataaagtatatctgatgcccttcctttttcaaaagtaaatccataattatttttatgcatcacaaaatatgacacacatctaggtgtctttatagggaatcgactaaaattattaaaaagtcttaattttgcttgaagatatgcccatggctcattcctcataacagaataccaattttcttttaataaattatcagttagttgaactattgaataaaatttccatcctttatctaaatggacgataggaagctcttccacaggaaattcatgtacagtactttctttaaaaaaaagatttttccctactattcttgaagtagcagcaatctcatctattttcatatgcattgtagggcattctgattttgcatctaacatatatttatttataccccttcctatacaaaacaaacagatcaaaataatacaactaacaccaaaaatatatatctttttccaattaggaaaaccaatcgttacaaggtaatacactattggagcagaagccataatagcattatcccttacccaaaaagcatatagaaaaaaacatagtgctaaaaaaaatagtaaataactgtaataagattgtcgttggatatgtattcctaaatgaaacaaagcaaaggcaaagaaaaaagcatatgccattcctatatctttccataggactcctgagagcccagcaataaaaggtaataaaggtaatataagccaaatccaacttattctattctttttactatacattaaacataataaagccgttgctccaaaaaacataaaagtatggaatagcaacataggaataggccccttatacacaagaataaaacatgaccaaacccatgccataatggggggatgccaatcttcatatgtatgagttactgcctgctcatattgagatacactatcaatactcattgcacctggccaataagctcctaccaaaaaagccatttcacataacagtaatactataaacaatattcttttaatatttaatgactgctccataaaaaataaaaaagagcctaacctatttttatccatcctattttccttacaaaactataaatattttctgtttatagtttgctgaaataataacactattcatacattgtttacttatagaaaaaatatgaagatggtattgaagactgctctgttcatttattactattgttatattctaatgaatacaaattacatactatcatgagactagttattgttgttgatataatagatcaatagatatctaaaactaggtgttattactcctttattaaactgaaatctataactattttcccacattcctaaataataactcatcttcttttttaaaggaaaactactaaaaattttttaaagatttcactttgctttcagatatgcccatggttaattttttataactcaatactaattttttcagatcttcattagttaacatcacttttctataaaaattgatcccttttacctaaggtaactcaggtagatctttaacagataaactatgtattggactttctataacaaaaagatttctttaaacaatataagattttacttctgtttcatctgtttttataattgaagtaggatttatttgttctgcacctaatataaagttattaatatattttcctataaaaaaacatagtagtattatacaacttattataaaaaaaaacttttttataataagggttaaaaattcttatagaatgatacactgtaggtgcagcagccataatgacattatcccttatttaaaaagcatatagaaagatggaataggactaaaaatagccatatccatcttattctactttttatataactcctataaagtaaaatattgctccaagaaacatactaaaatgaaataagagcattaatgagatgtataatataaaaaatggcaaagactaaattcataccataatgggaggatactagtatacatatctatgcgacaatgcctgatgatattgttcaaagctatcccacattatggcacctggccaataagctaagagtagtagtccaactccacctaaaaaactatgtatttaaacaaggggctcaaaccataagaaaatatcatatccttactaatttgtttcatgatattctttttctatattaatattccataatactgacttatctatagaaggatccattaaacacttcactgcttgcatagcagcaagcatagaatgatccatattattataccgatgcatgccatttcgaccaatgggatacatatttgctatactatccaaaaatttttgtacttcagctattctaaagtaggtaccaaagtaagcaggatatgcttttttcactcgtagtattgtaacgtcttctacatctaagcatgtaataaatccaagagaaataagttcttgaatggccatctgtttaaacgcatcatcactcatactccacaaatgagctccttcattagcaaagtattcaagtcctaaccataccttttgaggatcagaaactaaataaggactccaattattaaatatttggacacgtccaataacaacatctgattcttgtatataaatccaattatcctttataggtactgaatgattactttcacgatcattatcatctcttaatcttaaattttttactaacagaccaactgtaataaaatctctatatacaagaccattacttacttcttgtactgatgatggtgcatttttacacatttcaacaagttcttttaaaggaattgaagaaataactgcactacagtctactctagattgttcaccattattacagttttctatatatacagctgttacttgagaatcctctatatctaagccaactactttatgatttaataaaagtgtagcacctagtgcagtagcttctttagctacagtttcccataaatgaccaggaccaaacttaggatataaaaattgctctattaagcttgtatctgtatttttttgctcaattgttttatcagattgaaaaattttacggatagcatgacgtaataccctagctatagaaataccttttatacgctgtgcaccccactctggcgaaatatctgaacaaggtaccccccatactttttgagtataatcacgaaaaaatgttttatataactctcttccaaagcggttaataaaaaagtcttctaaatttttttctgactttataggaaaaaaacaaactcttatatatccaattcccattttaactacacgtagtatacctaatttttttattgtcgaatattttagagaaataggatagtcaaaaaatttacggagataaaatattcttgataaccgtctacgaatcaacatgactctatcttctttttcaggatctggaccatgaataacgtcttcatctctgttatattcctggctacttgaagggaagtccttcttatcacttttcccttgcaacggcaggatatccaaccaccatttcatgacttgagcagactttgaaaaaaacctatgccctcctatatccattctatttcctttataaacaatggtacgcgcaagtcctcctacctgactttctaattcaacaataattactttatgttttcctgagcgaagtaattctaacgctgctgtaagacctgctggaccagcaccaaggattataacaggatcactcttcataataatattctcattataataagtaggatagctaaagtaaaaaaatgactttaattgtcagaagtcaaatattcaagaaatataaatacaataatgtataatagcctattatctatattcgtgatatataaaatgttatctagataatgttagctatttttgatattcatacttgcctagacagcacagttaatattcatatctatttttaaatttattgataaatataaaaagtacctctgcctagttttagctatatgtattactccaagttgatacaactaaccttcaaaacatccattaaaattagtgaattacaaaatcaaagcagttagataaaaaaatatttaacttaagataataaaacaattttcgatcttttttcccaaattaggacttataatctattggagttcaataatgaacaattttattacttatagccaacctactctcccagctggatttgtagatgtacaaaaagtaatacaaagcatattagttgatctaaaatatgtaggaagcgataattttgtaggaagacccattccagggtataatacaaatcgggtcatattatcaaaagaagctactgttgctcttgcaaatgtacaaactgaattgcaacaatttggtcttagtttattaatttatgatgcttatcgaccaacacaagctgttgacgcatttattaactggtcaaatgaaccagaagataaaaaaataaaacaaaagtattatccaatacttacaaaaaaagaaatatttgatcagcaatatattatgaaaaaatcttctcactcacgtggcagtactgtagatttaactattgtttcatttaataatacaacaaatcaaaataacatgttttatactcctcttgatatgggtggtatttttgattttttcggtaaagagtcacatcctgacttccaaaatattaccccccaacaaaaagcaaataggctatttttacgtacaattatgacaaaatacggcttcactccaatttctaatgaatggtggcatttcaccttagctaatgaacctttcccagaaacatatttcaatttccctatagaataaaaattctataattaatgtgaatgatagtattgcattataatgatcagtaattaattattactaattctctactataaatacttatttttctttttttgagaactaacttcttataaaaaaagcaaatttatccttagtaagataaaataattactcaaaactcaaaaaaatctggttgagttgtttaaacaactcacgtagaattctatttcttaactatgttattggtatagagtaaaattaaaaaataaataggcttataagttagttgtaactttttatcttatttggaaaaagagcaaaatccccttcaaatacattttatatctagtaactaaatcgggatgtaatgtaaaaataatactaataatgttaactaatcaaaaaaatagtaatataataagtaaaaaagttggctaagttaaaatgcattatatgcaattaataataaaactaaaacttcctctctctagtacgctagaggcaggtgttatggctgaggtagctgctcttcatatcatatgcagttagtttatacctacacctattaattaaagaaggctgttatcttatgattaatgtaacagaaaatgctagaaaagagcttgaaacttactttacaaataaagaaaaaagtcctcttcggatatatcttgcttcaggtggctgaagcggaccacgattagcattggctctggatgagccaaatcaacaaactgatacaatacttgaagagggcgatttaacgttttgtattgataacgaactactttcttctgtgaaatctgtaaccgttgatatgaattatatgggatttaatattgaaccagaaattcctctcaatgtagaaaatggcggaggtggttgtggtagttgctcttcaggtggatgtggttaacttataataacaagctaggattacacttaaactatgtaattcctagcttgctatatgtttaagatactctctaggtccttcaacataaaaatcttttccttctgtatcccctaccacaataactggaaaatcttttacttccatagctgctaatgcttctggtcctaactctggataagcaataacagtgtactttataatatgttgtgaaattaaagcaccagctccagcaatagctgcaaaatatactgctccataagtttttaactcatttaaaacttttgcagaccgtttacctttaccaatcatacctgtaagaccttgctgtaacattgctggtgtataactatccatccttccacctgttgttggaccagctgaaccaataatatgccctggtttagctggagatggaccaacatagtacaaaatttggttttcaagtgaaacaggaagtttttctcctttttgtagcgtttctatcatacgcttatgtgcagcatctcttgcagtatatatagttcctgaaatcaaaacatgctcacctatatgtaaagaacgtgtaacttctttaattaatggagtagttatagtccgatattctgccattcataactccttaacagcaagtttattataaccagacctctgtatgacgagctgaatgacaattaaggtttacagctacaggcaatgaggcaatatgtgtggcaaaaaattcaatatttactttacaggctgtcattcttccaccaaaaccaagtggaccaagccccatcttattaatctcttgtaataattcatcttcaagagctgcatattgtggatttttattatgagtgtcaatatcacgtaatgcagcttttttagcacagattgctgctatctccagatctccaccaatcccaatacctactactagtggtggacaagcacttgctcctccctccattactgtttcaagtacaaaccgctttacaccatctataccgtcagcagggattagcatttttagtttacttttattttcagcaccagcaccttttactccaaaccttatcattaatgtatcgccaggaacaagacgagtatgtataatagctggtgtattatctcctgtatttttacgttcaaataatgggtcagctacaacagattttcgtaaatatccagaaatatacccttttctaacacctttgttaatagcttcttcaaaatctcctccagtaataacaacgtcttgaccaatctctgtaaaaataacagcaagcccagtatcttgacaaagaggcatcatttctctttctgcaagttctgcattattaacaagatgttgtagtatacaactttctagtggtgatgactcattatgaataccatttttaaactctgtcaaaactgggtgaggtaatttacaacaagcatctattgctaattgagcaacagtatcttctattactgatacatgaatttccttcatgtgaacttattcctatatacttataatttattgtagtaaaaaagaaaaataaaataaatagaatcagaccatttataatggctactaatgttctaataactaatttcagtatttctgaaatatcatctatggattataataaatacaaatttggtaaagggtcaatggaattagataaaaaatttagtttataatcctgtaaaatagtattaattttttatagataataagtctattatcattactccttctgagatccagttcttaaagctgcaatagttccagcatactacttttatccattctctgttctccttgtctagctggtatagaggtttcaggtcctccagctatcatatcttcttgtaatggaaaaacatcttccatcattatttgtcccatatgagctccagtaggtgtactttgtgcatatgaaacatcctgttgataatgaccttgtccattacccattacgttcatttgttgatactgaggggcaggctgcatattcctattattattattattattattaagtgccattgcctgtggcacattctgctgattattcatagataaattgtttggaggcattgttggagagggtatattttgatttactacaggctgtggagcattccttttaggactactctgtggctgttgcatagaaaaagtgtcttcaactggataaggcctatttgaagaaaaatagatagcatttgcagcagactcaattttactaagttgttcatagaattctttatattttctattcaatgttcttactattctatcttgactaaaaactatataaaaaaacataagaaacataccaaaaaaacataaagctactgcaattaataacataggactactcctacttagagtaaaaaactagctttattcaggttgataatatactttgtatatttataatctacatatactatcaactttaaatcagatcagaacatatgatagtctttttttatataagttcaaggattctatcttgagatattattacatagaagtgacatactttaaaaaaaatttttatatttatagtaatctagtatagataaaagatatataatctatatattatatcacttaaatattactttaataaatatatactacaatgaataaattatcatacattttaattgtgagctatctcaatatagatatataataaaataccatcattattcctatcagctatagtttataacataaagattaattacaaagaatttcattagttttttgaaaaaagagtaatgaaataatataactagatactagtatgttatgataacttgctcgtcaccaacattttgtttctcaatagaaccaataatccatgcactaacttccatagactttaagatattcatagctcgagtaacagaatcattgggtattatgagtacatatccaattccacaattaaaaacttgtaacatttctgaccaagataaagaaccttgttcctgcaaccaataaaaaataggaggtatatcccaactactaaattgaatatttgctacaactgattgtggtaatactcttggaatattatcataaaaaccaccaccagttatatgaaccatacctttaatagaaatatctttaataaggttacaaataatatcagaataaataaatgttggttttaatagtacttgtttgaaagtatcccgagagccaggtataatattgtcaggctcaatagcacactgattaataatttgtcgaacaagagagtatccattagagtgaataccagatgatgctaatccaataatggtatctccaaccttaatagatgagccatcaattatcttggactggtctacaatacctacacaaaatcctgctaaatcatattcaccttctgtatacataccaggaagttctgctgtttctccaccaagtaaagcacatcttgcctgtttacatccctcgctaataccataaataacttgagtggctttatccacatcaagcttagacgtagcaaaatagtcaagaaaaaataaaggacgtgcaccttgcactaaaatatcatttacacacattgcaacaagatcaataccaactgtgtcatgcttattaaagtcaaaagcaaattttaactttgttcctacaccatcagtagaagatactaatactggattatcaacctgagtaagattaagcttaaaaagtccaccaaaaccaccaagatcagaaagtacaccttggatatttgtttctgaaacaaacgatttaatatttgagatcaaggcattacctgcattgatattaaccccagcattagtatatgcttgtgaacgaattaaagacattcttatctcctagttattcatagtagcagtatgtattattataaaatatacaacagtaaggtgtatctcatgaataaaaaaaaatccctatacctattattcataggatattgctaccaatttcaaataaaacgattactgttgttaatgactattataatagcaaatactatatttggatttaaatatattatttgtatatcacatgcctatacaataacaacaccaaataatccgagtatctttataggaacagatattaaaggtgataaaattattcaagttgtaactccaatatcagatatggaacaacaacctaccccaccacttattataatacctaaagtttctgtcccttgggaaccaactgttccaatagttaaaccacttgatacaattacaccagcaacaccaaaagtccaatcaattaatcccatgaaaaaatgaatagtacttaggactcaaataatgactaaaaatccttttatcactagaaaaaaaaagatacattatgtaaataaaaaaaatttacaatcttgtaatgataaacaaaagaatctaactaaccaagatgaacttactgatagctacaactttttccctgtacaagaagaaccatcttcagatgaagaactttttttacaacatataggacaaacacagaaaatacataacaaaaaatatgtattaccttatcataaggaaaaaatatctaaaaatataactataaataaaaattctaggaataaattaacgttagatacaaaaatagataaaacaaataaccaaaaaacaataagtagtaataaaagcactattcagacttcacaaagcaatattcttttaccaaatgataacctaactgaaaataatacttttcttacagcagttaaagatgttgttcctctttcaggaaaatcacgtattactacctattgtagaccaacaaagtggactcaaacagatataacttctctaaccacaaataaaaaacctattaaatttaatatcgtaaaaaaagaagaacagttagaaggacatatagaaggctttgataaaaaattgtttacacaacttcaaagtggactttttcgtccaaaaacaacattagacttacatggttttaacatacaacaagctttttatacagtagtaaaatttttacacacagcctatataactggtcaacaacctgctctaattatatctggacgtggaaaaaattcacctcaaggtatacctgtgttaaaagaaaaactttatgaatgggttacacaagagcctctaaaaagagttattcttgcattttgtactgcacatgctcgtgatggtggtactggagccatctatattcttctaagacagtacaaaaaaacatggaatattcactgggaacaacgtccactagatccagacctattataaaatcaaatagtctactttactaatctaaagaactagttaacctcagatactagcttaactagcttgtttagcaatatttaaagactttgttaaatgagaaactttacgtgcagcttttttccaatgaataacaccttttttagctgctttatctatagtagatgtagcagttattaaaagttgctctgctttttcatgctcattacttgtaatagcagtatgaacagattttattacattttttatacgagtctttactgcacgattacgtaatgtacgctttatactctgtctatgtctcttaatagcagacttatgattagccacaatttcctccaatataaattataaatataggttataaaattggtcttttaactactaactttaaaaacttctgtcaatatatgaattaattcattatatctgtaaaactgaaaaatctgcaaggctttcaatatacaaaagtaatgctttaagaaggtttaatctatttcttcttacttctatgtcattagacattatcattacttgatcaaaaaatgtattaatagctggttgtaattttagtaacatcataaaaacaggtaaactagctgtttgactttcttgattaaacttatttactgctatcattagtttctctgccaatactttttcagcagtatccttaaataaagagggattccaatgtccagttaatacaatttccgtttctttatcttgctttttaatgatattaataacacgtttaattgtctgaactaattgggaaaagtcttcatgttggctcaataaaataaagctatctaatctatcttttatagaccataattgacttgtctgtgtacttactatagcctctactaccaatgtatcataccctaatgccaaaaaataattttttaaccgtgctataataaattcatgtaacttttgtaatacatcctcaggagctaatttccaagatacatttacaaagttatcttgagctcttgtataaagctgatgtaaattgattggatattctttttcaatcaaaatacgaataattcctaatgcgcatcgacgtaatccataaggatcagctgttcctgttggaattataccacatccaaagcagcctacaagtgtatcaattttatcggctatagaaagaatagcaccaagatctgttacaggaacgtcagtatcaggcccagaaggtaagtattgttcagcaatggctgttgcaatggactcagactctcctttgtgtcgagcatatattcctcccatcacaccttgcaattctgggaactcttcaaccattttagaaacaaggtctactttagaaagtgaaccagcttttctagcttcttcagcattactagttggtatatacttagcaatccactcacatagtagactaactcgatgttctttctgagcaatactaccaagtggatcaaggaaaataagatgagtaagtttttcttgccattcatcaaatgaactattgatatcttcattccaaaaaaatcgggcatcttcaagtcttgcttgtaaaactctctcccaaccttgcttcactaatgcaagatcaggaggagtcatatttaacactgtaagaaaataaggtaataaattaccctggctatctaagataccaaagcttttttgatgggtttctatacttgttaaaagcacttctctaggtaagttaagaaagacagaattaatagttcctaacaaagggtaaggatgttctactaatcctatgacttcattcaacaacctttcattccaattgacaacccctcctatgagctgtgcttccttatttcctaattgaagaatactatcttttcgactattaggatcaagtattacattcccaacttcttttaataacatgtaataatctgtagaggaaggcacttcaataaatggaacattattatttcttagtccaacagtatttctatttgaatgaatcccagctaactcaaaaggtacaatatctgaatctaataaagccataatccaacgtattggacggataaaagtaaagggattatttccccatcgcatacgttttggaagaggtaaagcagtaataatttcaggacataacctagctaaaacttcttttgtagggataccaccttttactttcaatcctgaaatatattctcccctatctgttgatatctgtgaaagtgaacctatggttatacctaaattttttgcaaatccttcagcagccttagttggattgccatctttatcaaaagctatatttataggtggacctataacaacctcttcacaatgaggctgaatcatatcaagccctttaatacatacaacaagtctacgtggtgtggaataatcagatacttctgtaggtcgataacccattgattgaagagaatctaaaaaacgaactccaagctctgattgaagttctagaagaaaacgagcaggaagttcttcagtaccaatttcaagaataaaagtagccatactatctaaatctctccactacccttgagcagcataggataacccattttttctcgttgtaatgcatagagttttgcaatactagaggcaagtgctcggactttacttatataacttgctcgttctgttgtggaaattgcaccacgtgcatctaacaaattaaatgtgtgtgaacacttaagacaataatcgtatgctggccaaacaaaacctttcttaataagctgtctacattcattatcaaaatctttgaaaagtttaagtaacatagaaacatcactttcatcaaaattatacgatgactgctctacttcattttgatgatacatttgaccatatgtaacatattcattccactgtaaatcatagactgaatctttttcttgaagatacatagccaatctttctaatccatatgtcaactctacactaataggttctaggtctatccctccaacctgttgaaaatatgtaaactgtgtaacctccataccatcaagccatatttcccaacctaatccccatgctccaagtgtaggagattcccagtcatcctcaacaaaacgtatatcatgaagtgtagagtcaattccaaggatttgaagacttcctaagtattgttcaataatatcatctggggatggctttaatactacttgaaactgaaagtaactttgtaaacgattagggttttctccataacgaccgtctgttggacgacgagatggctctatgtaagctacactccatggctcagggcctattacacgcaaaaatgttgcaggattaaatgtaccagctccacattcaatatccataggctgtgcaatcacgcatcctctactagaccaatatttttgtagcataaaaataatatcttgaaagtacatgtagttccttatttaactagtaaagaacactagatgcctagattccatagtaaaactaaacttttaaaaatcgtcctttggaccatgtaatacctaaatgatattcaacaaacgcattaattatctctgtacattcatacttttgagctgctgctgactttgtattttcagaaagtttccaatcatatggcgatgctaactgaacacgttttagaagttcaaggctttcatatcctatagcaattggagtttttatataatttatacatattgaacatacaataattccatctgaaatcccaaaaaaacctttattattaattagcctaccacattttgcacaattagaaaaaataggtgcatatccttgttcagaagctatacgtaagcgaaataaaatagggataatttcataaggttgagtatttttttcaaagaaatagaataattctttcattaaagtataaacaggtggtgcagcatctgaacttacaccaacaacttccaaaaatcgtatacaatttataaatgcaccaaatctatttttatttgttcgtaattgtataggcccattaattagtgatgcttcttgtaagtttaaaaaacgaccgtttcgacttgtttggactcttacttgtatctcatttaatattccaaggcacccacagaaacgtctacggctacgatgacctccaaatgcaaaggctgaaataacaccatgctgtgaagtaagtaatttaacccatacatctgattctctaaatgagcctaactctagaataatagcattatctaaccattccatgtgactagttttgggaaactaaaggaagagtgatcgtttttacttgaccagagcgacctactggtggaagtttttctccattatactttaactcaataccacctgcatttccaagttttaaaacaagacttttactaaatgataatgcaactagttgtccttgttgaacataaaattgacgagtttctgtcttatctgctgtagagtgtacccaacagtcttctaatcccttaagaacaactatatttttcttcccaggtttattcatatgtacaggttctacaacactcttatcagatacatcagacttatcagacttatttgtcatatcagtagattgagaaaaacttttttcatctaactgggctgataattgggaactactatcttctttagatgatagctctaattctttcttaattactatgtgatcctgaaaattctctggtatttttgtcactactacagaagaattactttttatattttcctgactctgctgctgtggtaaagataatgaaccttcagattgattttcttcttttttttgattgggtaatacctcttttttaccactatctgtcatttgagctattacatcaaaagaactgaaggttatatcactagaataaaataaccaactacctgctaatatacataaaaaagttaagatacttccccaaacatatggcgaaaaaaactttttctttttaaaaggataatcctctccctcatcatttgttttttcagtatgctcaattcgataaaaaattgatgttaactcatactctggaatatctaaaaattgagcataagaacgtataaaccctttagtatatactaagtgtggcaatgaatcgattgttccttcttctattgcttgtaaggtatgaatagatatttttaaataaatactaatatcttcaagtcgatatcctttttttactctttcttgataaagaagagaaccaatctcttttaatgcagaatgtacttcttggctattatctatatgattctccattagggcctctttagcaagctaatatctaatatcaactactgcacgtttacgaagttgatcagtatattctttgaatcgttcttcaagttttggctcacgaagaatttcttcaatataaggggtcaaagtttcaagtgtctgaggctctccttttataatattaataagctttaactgaccttgtaatccatttatatcaattaaagatgtaacctctcctggcttcatagttgaaagttgttccaaccactctggatttaagtcttctatatctatagagccaagatcgccaccctcttttgcttttggaccaacagatactttttttactacttcttcaaaagatactgaaccagatttaatacgagcagcccaatcttttgcattaatatcaggaggataaactaatattgctaattgtagctgattattatttttaagtttatcatgattcttttgataataatcttctatttctttctttgtaacaacaatttttctcccaaccattgctcctagaaggcgagaacgtaatatactactacgaatacgttctttaaaactatcttctgtcagatgttgcaactctaactgatattgaaactcttcaggagtaagttggctcttagcaataaagttatgatattcactttcaacttcatctttacccacattaacatggagacgctctgcctcttgtgtaagaataagattactaatcataccttctaatatagctttttctaactgttcaacttttgctttatcagcaggattattaggattaagttgttgtctaaaaatttctggagcagtttcagcttgtagatcaaataaggtaattatttctccattaacaacagcaacagtcttattaataaactgttcagcggatacaggtaatatacttataaataataacaataaaaaaataaaaaaacgcaatacttctctcctaacaatgcactaattaaccagttgtactaatttgtgcaataataatgtaaaacttagcttcattttaaaaaatatgcaatgtattaaaagacataacttattaccaatattaactatatacccttaataacatgtaaaataatacaacatcaacaactcattctttatatatgatattaggttggaattgaggacaaacttttatttttgcttgtggaataacttgttctaaccagtcttcataagcttgttccatcttttgttctaaaaggatgagctctattcgagaatatgcttcaataatgtctgcctgatgtgcaggatatcttttccgtaaaaaagcatactgataaatttcaccttctttatggcgaggagtatattctccaggtttaattttcataagatcttggcgcattttcgctggaagtcgatctaaagcaactcttattatgtccccttgttcaatatcattcctatcacaatctttatgcttggcttttctctgttgactgttttctacctcttgataccaaataatttcaactttttctggaataaaaaattctgaataatgtttaaagtagtattcttcaatttcatctgaagaaagagtaaactttggacgaaggatatgatgttgaaaacgctgaaaagtaagtcgttgcttcataagttgccgccaggtttcaatatctaaatattcttcctgaaggcttttttcaaagtcttctccaacataatcttgtttaatttcattctcagcaagcaatacatcttgctccgtaaccttaagacctagttttcctaattcttgtgacattaatgtatatataattagtgtatataaactatctccatactgctcctgtaaaaaatgaacttctggtttttctctaagtggtaaaatatttccagaaacatcatgaagtgcttcaacttgttgtagtgtaataggttctccattcactatagccattacacctgatggaaaattttctacagcatatagagagaatggaaagacacaataatatagtgtaaaaataataaatatatacagccagttaaacatattttactattttattacatgtaattaaaatatttatttattgttttatgctatcataactaaatacaacactaagctcttcttggagagaaataagtctatcctctattggtaaagttgtattaagctttatttctagtgtagcaggcggagaaagctttactttatccggctgtgctgaaataaatagcattaacttatcaaaagatacaacagtttgtttttctggccatactaatttaatcttatcctcataaatttcagcttttattacctgtgactcagtaagaaattgcttaaaatttaacacagctataaatgctttaagttcattaggcaagacaccaaatcgatcacgaagttctaactcaatttcattccgagccataacactttgagcagacgatagtgctttataccaacgtagtcgctcatggctatctgaaatataattttgtggtatatgcgctgtcaacccaagagttaactctgtttctggataagatgtaacaccttctccttttaacttagtaacagcttcttcaagcatttctaaatagagctcaatcccaactctactaatatgtcctgactgtgcttctcctagtatatttcctgccccacgtattcttagatcttccatagcaacttgaaaacctgcaccaagataatcaagttctaaaatgattcttagacgttcacgagcttgttctgaaagactttcaagatcagaaataacaaatactgcatatgcttgcctgtcagaacgaccaactcttccacgcagttgatatagttgtccaagtccaaacatatgtgcttgatcaacaatcaatgtatttgctcttgggaaatcaaggccagactcaataatagcagtacatacaagaatatctaattctgcatgccaaaaagcatgaatattttcctcaagttgtttttctggcatttgcccatgtgctacacctacacgtgcttcaggaactaattcttttacaaagtttacaatttgttctaatccttggacacgattatatacccaaaagacttgtccttctctagctagctctctttcaagaatttctttaagcttttctttattttttttaataatagcagtggctacaggtttacgttcaggaggtgcagtttctataacagaaagctcacatataccagacatagataactgtaatgtcctaggtattggtgtagctgttaaggttaatacatctacattttttttcatttttttaagtttttctttgtgcttaacaccaaatcgctgttcttcatcaagaataagcaatcctaagttaggtaaagaaactgagtcagaaaggagcttatgagtacccactagtacatctatctgaccgcttgatgcagctttaaaaatctctttttgtttttgaagaggaacaaatcgactcaatagacctacatttataccaaaccctgaaagacgtgaacggaaagtataataatgttgttcagctaggacagttgttggacaaagtaatgctacctgacgaccttcagaggctgcacgaaaggctgcacgcaatgctacttctgttttaccaaagccaacgtctccacaaacaagtctatccattggttcactcttttccatgtcagctaagacatcctgaatagctcttgcttggtctggtgtttcttcaaaaccaaaagaagcttcaaactctctgtataaatcaccaactggtgggtaggtaaaaccctttgctactttacgccaagcatacatctctattatatcttcagctactttttcaatagactttttagccttatctttacttgcttgccatgatgtgcttccaagtctatcaagctgagggaaagattcattaacacttttaaaccgttgtgttaaagaaagcctatcaacaggaagataaagtttatcattaccagcatactctaataacaaaaagtcattagatattttacctatatccatcctaataaggccaccaaaacgggcaacgccataatttttatgaactaaaagatctcctggattgagatcatcatatcgactaagtcctttaaaagattcagctggagcctgtctgcttttcccagtgtgtggttggagaacatcttctcctaaaataaggatattaaaccaagaaagatcaactcctacacggaatggactaataatagcaaaacaaccctgctgtgttggatggtactctaggaatggtgtaacaccatcttgctctgcaaggttaaggaacttatttctacttcgctcagaagaaaaagacaggattagttgatacttatcttgcttccacttttttattgcctgtataagatgttgccagggtctatcctgttcagcaactgtaggaaataacatttggaaactagaaatagccttttctggtaactctactacttcttcctgatcatcaatatcaatatctagtgactcagtatgaactatagtagattgacaccataactcctttacttgaagagtattacgtatagctaaatctaaaggttgtataaatccactttctctttttaaacgatcattccaactattctccatggaagtaagaatatcttctgcttcatgaaggcttggtaatatccaaaccttatctttattaacccactgctctattgtagtagcattttcataacaacaacctggtaataaagaaaaatctttttgttcaagcaaacgaaaaagactgtaatgttcattctcagtaattacattctctttaagcaacttgttccaatagctttctatagtggctatatactcagtacctgaacggacagggtagactggaagaataatagcattatcgatgtatcctttagatcgttgagttaatggatcaaaaaagcggatttcttctaatgtttcaccaaaaaagtctaagcggagaggatagtgatatcctggagacataatatcaaaaatatcaccacgtcgtgatacttctcctggatttgataccatagacactcgatcgtatccccaagtaatagcttgttcaagaatgatatctggagaaagctcttctccaactgatagttgaataacttggttatcaaaaaaatctagaggaacttctttaggaagcaaattgtctatagtaagaataaggccttgtaccttaccatatctaagtgcatagagagcagcaagacgctcagcccaaccttctttacttaaagagcgtgatgtaaaaggagaaagtgttacccatgtgttgttaaatatattattagattttaatacattatgtcccccttctgatgtaaaaacagatataagggaatgtaaagttcctaactcatctctattacgtgctataagtaatacttttgcaccatgtgcaatgagatcaacactaagttttacttgagtagcaagtcctgctttttgtaatgcaatacgtttattttgacaacgaaggagttgttttaggcattctttatactccacagacagtccttatccaccttaaaagtatattaacatatttataagctatttaataattatacgttaacctataggaattgattactttttccgtacttttttcatataatgtatttgtatatactttaataacagaataccaataataacacattcactaaaaagaatatgtataagtttatggccatctttaaaataaacaaaagccaaccaacgaatatttgttacgtcaatatgtcgcagactaaaacctaatccagcagcacatataactatacagaaagatgtaataatccaccttatattaaaatggattttccatatagaagattttatataaaaatatttttttatacagattaataaaactattaaaataataagaaaaccagtaataaaaaaatttaatgtagacgtcaatacacttacacatccaataagtaataaaactaatgtataatacagaatatatttccttttatattttaatccaatagaaaaaaagaataaaaatatactaactacccctgtaataatgcctcctagttcaatcatccagacaggaagcaacatttctaatagtttcatattataatagcgaacaggaaacacagccataaaacataacatgatacctgtagtgaaaataataacagaagtaattgttggaatatgtatccttatatatctccccattttgtttaagaatttgatattctcttgtgtttgttggttaacttcatacataagatacatagctgcagcaattattaatggtatgagataataaataacacgaaagcataatagtgccgcaaggatagcctggggagtagtgtttgttaaatgaataaccacgatctcaagtactcctgcacctccagggacatgagttaagacaactgcaaccatagccattaagtaagttggaagaaattgtataaaagatatacctgcatcttctggaaggagtacatataaacatgctgacgctgctacaagatctgcactagcgacaactgcttgagctatagcaatattaaatggaggaaatgaaaactctttaccaaaaatatgtactggtttatgaatcagtttacaaataaaaagatatcctgcagctaatgcaaataaaacaacacctaatggacgaatatcttcagttggaaaatatactgccagctcaggaggaatagctggtggaacaaacataaaaatcagtcctgctagtccaaaagcaccaacccaaaaagtaatggcaagcataaggacaagctttacaatttccataggagaaaatccccaagacgaataaagtctatatcgaatggtacttcccccaagtaatgcaccaaaattataacttactgcttgccccacaaaagaaacaagtgctaccttctttaaaggaagtcttttatgaatgccttttaatgcaagccaatcatacccaacaagaattatataatttaagatagctagcaaagcagataaaaacaaactccaataagaaatgctttcaacactcattttaagttcggaaaaactatatttactaacttcgcgatataataaatatacagcaccaataaaaatgcatgcaacaagcataatccccattgtatgcgtcattttcttaataattcttactatatcctttaacatgtattctccataattttgcaaaacaaagaatgtaatgtagtcattatgaaattatatattatttcaaccttaacttcatatacattatcaactaactttattataatatatgtaaatctaatagtatttatttctatctcactaactataattttttcctttctaccctggttgacctgataagataactacactattgttacttaggtgattgattcaccttttaacttacccgctgtcaaggcagcgggggtattttttctaaggtgttaggagaccaaagcatgagcattcctatttcacaacaaggttatcaaaaccttgaaaaagaacttgatcgacttaagaaagaacgtcctgctgttatccaagctattaaagaagcacgggaagaaggtgatcttaaagaaaatgctggatatgatgcagcaagagaacgtcaaggtatgttggaagcaagaataaattatattgagtctcgtatggcacaatttaatattattgatataacaacactttctggtgataaagctatattcggagctacagtaactgttgaagatatcgactctggagaaagaaaagagtttacattacttggccctgatgaagcagactatacaaaaggatcaatttctattcaatctcctgttggtagagctctacttgggaaaaaagttggtgacgaacttacagtcgatgtcccacgaggtcgtattagctatgaaattatagatatccaattcaaacaccaataattttacattacctttactaaagtactatttagctacaactcagtcaaagcaatttcttaatatgaataacaccccttggacattttcgattgttacatttggttgtaaagtcaatcaatatgaatctcaatctatacgagaagcatggagtaatttacatggagaagaagtagctacaccacagactgcagatattattcttcttaatacatgtgctattaccgcaaatgctattactgatgcccgtcaattgatcaataaacttcaccgagaagcacctaactctaaaattattcttactggatgtgcaacagatttaaccaatgaagccctatataaacttcctggcgtatatacctttattagtcaaaaaaataaaacacaacttctttccaatcttccacttacacaattaaaccaagatcaattacaaactaacactaatacatttccacaattctctatcagtaattttaatcgttctcgaccgatagttaaagtccaagatggttgctctcactcatgtacatattgcatcataccatcaacaagaggcaagcccaaaagtcgatcaccaaaagaatgtcttatagaaattcaacaacttcttaatgctggattcagagaaattattctttcaggaattaatttacgtcaatatacagctactcaacaaggatgcaaagatttttgggaattatattcatttttagataaaaaactctctccaacttggaagggtattgcacgattacggataagctccctagatccagcacagctcactcaacgtggtcttgacatactttctaatagtcatatggggtgtcaacaattacatctttcaattcaaagcggaagcgctgaaatactaaaaaaaatgcaccgttcacattatactcctcaataccttttagatactacaaaaaaactctctactatttggcacaagtttggattaggagctgatttcattataggcttcccaggtgaaacagaaaaacatttccaagaaacagtcgatcttataaaagaactacctcttacctatggacatattttcccattttctgctcgacctaatactattgccgcaacccttccaaaccatattaaaaaatctgaaagtcaacaacgtgctgctacaataagacaactcattacacaaaaagaaaaaatttttcacaaacaactcctcaccatgtcaacattgcatatagctcctgaaggtggaggaaaaacaggaggagttgatgaatattacactcactgtcatttaacagagcctgtcgaaacacgtcaacttctaaaagtaaaacctctatctctgacaaaaaaaggcttattagtagaaatattaccccctcattaaaaaactatatttctcttgtttcccttcaaattatcacttactatatattaagaaattatttatccagtatagcctaacactggttagattataaaggaaaaaacatgttacgaagtatgacaggttttggtcgctgtgttgttgaagatagtgattggacccaaacatgggaaataaaaagtgttaatagccgatatcttgatcttaaatggcgcttaccacttatagcacgctctttagaacaaaaatttgaaaaaattgtacgtaaatatgcatctcgaggtagagttgaacttaacctcaccatacaacaaatagagtcacaagctacacctctttgttttaatgaatcccaagcattatctatgcttaatgccataactgaattagcaaaaataagaggagatactttttcacctgactatatgcagttactttctgtttcttctttatgggaaaaaatcgaagatgaaaatgataacaatatagaaggcagacttgaagaaggacttatagctgctttagaagactggaacgaatctagagaaactgaaggttctattctttacaaagatctttcacaacgtatttcaaaacttaaagaatggttatcacaaattgaagatcaagctccttgtataaaagaagaacgttttttacaactaaaagagcgaatttcagaagcccttgaaaaagctggaggtttattagaggagactagatttctccaagaaattgttattcatacagataaactcgatgtcacagaagaattaacgcgtctttctagccaccttgatcgactttacgaaatccttggtaaaggttcagatgtaggacgtcgactagactttactcttcaagagtgctttagagaaatttctacatgtggaaataaaatccaagatgcccagatatctaaagttgtggtagaatttaaaaatgaacttgaaaaatgccgagaacaagtacaaaatttggaataattatgcaacgtgaaaaattaatccatctaggctttagtaactttattattgcttctagagttattagtattgtgaatcctgcttcatcacctatgagacgactacgtgaagatgcaaaaaaagatggacgactcattgatgcaacacaaggtagaaaaacccgctctattcttattactgactctaatcatgttatcctctcagccattttaccagatacactaggacaacgttttatacaagaggaagaacatgactaaagaaagttctgttttaaaccataaagcttctggaactgctttagtaatatgtgctccttctggaacaggcaaaacaacacttattcaaaggcttagaaaagaatttccctgttttgcctattctatctcctgtacaacacgccctcctcgtaaaaatgaagaagatggtaaagattactatttcattagccaagaagaatttatagctcgaaaaaatgaaaaatatttcgccgaatgggcttatgttcatggatacttttatggaactcctcttgctccaatacttactattcttaataatgggcaagacattctatttgatatagatgtacaaggagccgcacaactctaccttactttaccatatgctaagtatatctttcttcttcccccaaccatggttgagcttgaaaaacgattacgctcacgtggaactgatcgagaagatattatccaacatagacttctttctgcaactcaagaaatacgacaagcacactggtttgatacctggatcgtcaacgaaaacattgataaagcatatgatgaactaagagctacttatttagcatccaaattatctccaaagtttcaaccaactcttattacatctatcttagaaggatggtaagaaataatggctaagcttatcgttgccttagattatacatatgcttctgaagcccttgccatggctaatatacttaaaaaacatgttgaatgggtcaaagtagggttagagctctttactcatgaaggacctagtatcattcaattattaaaaagaatggggtttaaggttatgcttgatctcaaactttttgatatcccaaatactgtaaaaggaagtgttcgctcagcttgcttaatggatgtagatatgctcacactccacattttaggtggagaacacatgattaaagctgcactcaatgaagttcaaagttctatacaaaaaaaatcacactctcctcttctctttggagtaacaatacttacaagtataaaacaaggagaactcccaggatataatcaagatattgcatctatggtgcttaatcttgcagcatatggtcagcaatggggtcttcatggtatagtttgttctggccaagaactaacaaaaataaaagcattatacccatctttatcatgtttgacaccaggaatccgtatgtcttatagtcaaaaagacgatcagcatagagttatgactccaagtgaagcagttaaagcaggaagtgactttttagttattggtcgaccaataacacaagcagaacaaccaataaaaatagtagaagacattatatccagtataatgtaaaaaagaaaaaataaagctgttttttagtactgttgacatattatattgttaggaaacaaggaaatatgtatgagtgaacagcaacaagcaaagcgtatccgtggagttttttcctcacaagaaatccgtaaagttggtacaggaactacaacacgcaagacagttagtaaaatcttctggtttgttgaacaagctgaagatggtaatatttttatacagtcaattaatacaaactatgtacctacggggttacctaaatccataactatggaagaacttctttcaaaatattcccctgaacctgaattttatgtacaatctgttttccctaagatgcaacaacttgcagaatcacttaataaggctgatgaaagtcgtgaaaaaggagaaacatttactgctgaatttgaatatgaaaatgcacttaaacttgatgaagaaaatgttagagcaaactttggaataggacttacttatctttcacgtggagaatcagaaaaagctgataatatctttgaacgtcttgtacatcttgatgctgcatttgaagagcaacataaacatctatttaatgagtttggtatcaatttaagaaaaaataaaatgtataatcaagctgtagattattatactagagcacttgagcttacaaaagcagacgaaaaccttcatattaatatggcaagagcgctatttgaacaaaaaaactacacagcatgtatagatcaactgttccaagcactagagctctctccagaaaacactacagttatccaatttttaacatggttagataataaaaaattagttcctcaaagccatcaaaaaaaagttactgataccatacaatctataacaactaaaaatagttctaaaaaagatgactaattccttaaagaaattatcctcaacatagagtatgaattagccaaaccaactacacttccatgaaaaaatggcttactgctcctattagttcccaaatacctttacactgggccaatattctccatattccagaacctattcttatcctcctttggcaaagaggtattacctctttagaagaaatgaatatttttctttcccctaaacttcagtacttagcacacccaaaacactggagtggaattgaagatgcagtcgaacttttaaataatgctatagaacaaaaacaacctatcattgtttggggagactatgatgtggatggagttactggttctactgttattcgtgaagtactaacatttcatcaagctcaaattattgtacatctcccagatcgcaaaaaagaaggctatggggttaatatacctgtaatagaacaattagctctagaacatccaaaagcacttctgattactgttgactgtggaattagtgatgttaaagccatataccgtgcacgagaacttggatttacagtcattatttctgatcaccatctccctcctacatctttacctccagcacatgtaatctgcaatccccgtataggagaaaatccttgttcataccttgcaggtgttggtattgcttttttcctgatggcagcacttaataataaacgtgctgagcaaacgggtcagcgtatggatatgagagatgttcttgatcttgtagcacttgggacacttgctgatatggctatgcttagtggacaaaatcgtattttagtaaaaaatggacttcttaaaattgctgaagctaagagacctggaattgcagcattgaaaactgtttctggctttactcctttaacacatttaggtgctgggcaggtaacattccaccttgcacccagaattaatgctgcaggtagattaggtagtcctcggatagcacatgaaatgctttatacaacctcaaaagactttgctattgaacatgcaactcttttaaataagataaatgaagaacgccgtagtgaagaagaatatatttttaatgcagcattagagcaagctcagttagaaaatcaaagacaaggacttgttcttcatggttctgactggcatcaaggtgtccttggaattgttgcatctcgtatcacagaagctgttcataaacctgttcttatactctgtactgatggtaaaatgctgaaaggatcaggaagatcaattgctgattttgacttataccatgggttatctcaatgtgctgatttatttgaacgctttggaggtcataaacaagctgcaggattaacattaccaattaaccatcttcatattctaaaagaacgatttgatactgttgttagaaatttttttggagatacacctattacacctattcttcatattgacatggaactcccttttcaaaaagctactaactttaattttttaaaatctctagaattattacaaccttttggaataggaaaccctgaacctatttttagttctcttcctttacgtatccaacgttgtaatacatttggaaaacataaagaacacattaatatgttagtagtagaagaaatctcaggcatatcccttcaagctaaaggttggagattagcaaaaaatatatcttcatccttacaaaactctcgaatccaattagcttatactccatcactcaacttttataatggtattagtagtattgaacttgaaataaaagattgggttgaactttaattaccctttatcaataatgaatatagagagagcatgttactaatagattatttagcatatactattcaacaggtatgatatctaaattagtccctgttaatgaacgtactccagtagctgtaatttctaatgtatgttcaagaccaactgttccaagaccaggaagacttatctttggctcaatggctataaccataccctcctgtaaaggttctttaaaacctgctgcaaatacagggtattcatctatggttaacccaatcccatgtcctaaaaaaggtacagcatctttacctgtacccataaatgttgcaggactctctatagattgagattcttttttagcaacattccatacctcttctggagttacgccaggttgtaacattgaaaaaactttttcataaattgacttacaacaatcttgagctcttttaattttatctggaatagaagaaacaggaccagaccaaaaaatttgtgttttatcagtttgatatccttcaagcataaaccctatatcaactgccaataacatatgtttcttccaaatcaccccagcatcccccataaaaggaaccgcaggatgaatgcctcttcctgtaagagcaccattaaaataggatggataattaccagactctccaacagatacataaccaagaaataattcttctccaggattattacaacgtaacataccctgatgtccatgttcaaaacaatgtttccaaataagatgggctatctcaagttcactatgacctgaagataattcttgagggagtatatcttcaagaatacgtttatggcgttcaccacaaatacgaatttttttacgttcccactcagatttaattgatcgcaatttttcaagaataccatcacatgacaaacagttaataccaggaacacgttgttgaaacatttctgccattgtccaagtaaatgctttcttttctatagcaatagtagaagataaaggactcccggcctcctcacaaatcgttctaatctctttatatgatttaaattgataaatctgtttaatgggtgattcaacttttgctctttcaagaccttttctaagaagtaatataggctctctattatcattaggaatccacaaaagcccaacacctaatgtcccagttaaataataaatattaagacgcgagcaaacaagcatcccacctacttgtgggaaattctggttcatagcatctctacatttttgaatccttgattgatactcacttataggaaattgttctaatgctgttatcatcgtttactcttttataactgttatatagcttattatatctaacctgttgctattagataaaaaataacaatattatagctaaataaaaatacgtttattatttatcgttatagtattactgttacactaaaggagtttatatgcaacacccgtcagatagtacacttaaagatattctctctcaatcaaaaactattgcaattattggagctaaagatgagcctaatacccctgttggtcgggtaggacaatatctcatcaaagtaggatatacagttattccagtccatcctatacgcaaatctgtctgggggatcccagcatatacttctattacagaaattcctgtgcatattgatattgtggacctattcagagcaccagaattttgtcctattcatgcacatgaagtcataagcttattacaaccaccacaacttttttggatgcaacaaagtattattagtccagagtcagtaaatattgttcaacaatatggaattacagctattgaaaacctttgtattatggctgaacataagcgattatttaattaagtaattctattgctcacatcctaaaatattaaaggatcaagttttgcattctacacatgtatataacttgtatattgagttatcacaaaaaggattatagtaaatgagcattctagtactaagtgaaataactaagcataacctatctatcttctaaaattatcgagagagccatggaggatgcatgatccttgataaatattataaaatcttgcatgttgataactctgcatttcttgatgacataaaacgttcttatagaaaattagcatttgctttacaccctgatttaaatccaactattcctcatgctacggctaaattccaacaactaaatgaagcttatgtaatattattaagagcatacaaaagtaatacttctaaatctcattcaaaaactactacaaaacagtctactactaatgctacacaacagaaaaataaagagagggataaagcttatagaaaaaataaaacagagtatataaaaagtactagcaaaaaaactcactctaaaaacccacataagaatagtatatttgaagcatctattgatgaaaactttgatgaaaagcaaaaaatattacaggatattttgaatgacgactttgctaggaatgtatttgaagatatttttagaactatccaaaataagcaaactaaatcttcaaacattcaagattcatccactcaaaattcatcacaaaataaaaagccatcaattataacaagactttttcaaaccataggacaaattactcattcatttcaaaaaggacaacaccccaatacttcatctccaaacaatgtaaaagtcacatatgggggaaaagatgctccaaacacagttaaatcatggttgaaaagtcaaatagatgaagaacaaactattgaacttcctgctaccgcacttaggcctggatcacgaatccgtttaaatattcgacaaggattctcagaaaaattaaaagtacttgatcttacgttaccatcagattttacctttaataagcaactctattttaaaggtatgggtaaaaaacttggacgatggcaaggagatctctatttacgttttatacctaaacgatcataataaagaagaactaaacgttatcaaagaaacaatgttattataggagcattggactcatgaatatccttatatttggacctaatggaagtggaaaaggaacacaaggtgaacttatacagaaagcttttggtattacacatattgaatcaggtgttatctttcgtgaacatatctcaaaaggaacagagcttgggaaacaagcaaaatcctatatagataaaggtgaactagttcctgatgatataacaatccctatgattttagaaactcttcaaattaaagggaaaagcggctggttattagatggattccctcgtaacattacacaagcacaaaaacttcatgaagctatgctcaaaaaaggtgtaaaacttgattatgttatagaaatcacactacctagagaagttgcaaaaagtcgtattataggtcgacgtatttgtaaaacaaacaataatcatcctaataatgtttctattgatagtattaaacctgatggaaacaactgtagagtctgtcatggagaactcattgttcgtacagatgatcaagatgaggaagccatcaataaacgacacgatatttattataataccaaaacagggacactatcagctgctcattacttcaaaaatctttctgaccaatatgaaacccactatattcttgttaatggacaaaatactattgaagaaatccgaaaaacacttctagaagatcttggtatatcctcagaagtttcttaacaaactgtttctgtgttaataataattatttctttatgatagaaataaaaaataaatatttaagtaatactttaacataatatttctattttttatataatttcctccattcatctaaaaataaaagagatgtctcaataggtgacaacacacctgattcttgtcttattgcaaaaattatatcatcaaagttgctatctgtagttatttttaatttattaaataactccttaagttcttctttatattctgtagaaactgcatcaggtaatgacataatagctctctcttttggccaatcaacagcatgttctgaaatataggataataaatccctcattctttgttgataagtatgctcagtaagaactctacgcctaccacgttcagcaataacaaatcgttcttctgggcgtgcaagaaaatattgtatcttttcctttaactcttctatagtagtaaacgtagctatctcattctctgaaaaaagttctgataacagttggcgttgatcaacgagctgaaaagcctcacatgaggctatctcaaatgttctaggattgacaaagtctccattagaaacaaatggcttgtgttttatatatgaatgaagattaatattgatttttgtaccattataaatttttacagcatcttctggagagatacgcttaccatcacattgaacatttggtctaagaaaacaatcattatcccaatcatttccccatattttaaattgaaattgagtaagttgtcgaaatgctacacgacgattaggatatccagctcctaaaaatgaaatgtctgatccatattttttttgatccataggagaaagatccataggatgatgaaaagtaggaagtgcagccattggtaaataacaactattagcaacaccaacagatgcaagctcttctaaaaatggctctttctggattacaaagaaaaaatcataataaggagcaaaatttctccaatacgtaaataacctaaagtcttcaacaaaccacattgcagtgaggatattatctcttttaaagcgttttagtatttgtcgagttactggtgcctgtgcaagacacaaaactaaatctgcttcaatttctgtggctttaacataaatagcttgtgaaatgttttgtaaaaatgatgcttcaagctcttctaacttactatttcgaatatgtagacccttaagggcagtaaatgatccccaaaaagaaggtgaatcaaagacttctacacaatgtccaagatcttttaaggcaatagtacagtattgtcctataggtagagaaccaccataaaaaggtaatactactagtatgcgtaatatttgttgtttcatattcatctatctggcaacatccagtctgcctctgaataaagattcatagctaaacgaccatcagctatttctggaaactccttagaagatgctatagtaatcccttgatactccattaataatgctctctgagccattctaacagatttaacataggtattttctctatcatttttccagataagccctaactcatcaaaagaagactccaaacaagccattgtagttgataactgttcctttataccaacaatagatttatggaattcaggactactatatgctttcaaacattttacatttaaattgcatggcttagattcaatacatggagcacagtctatgactgcttgccataccttatgaccttctccataaggaccagtttcccatgcccaagctgaagacaaaaacataccacaaacaggaacaccaagtcttgcagctaaatgcataatacctgtatctggtgtaacaactaaatccaaatcagatacagcttcaaccagctcattccagttagtttttcctgcaagattttcagttttttctataagtttacttggtaaatatgacattaaagtacgtccaatagaacgctctgttttactaccaagtaaataaatcttctttcctgatgtatgctcaaaaaaaatacgtacaagaggagctaatatttctggaggtagagagcgtcgtgcttgacgtcctgcaaggacaatacctaaaccttttcctccagattttgccacaggattaacatcctgaggtataactggatttggagctaacataccccaaaaatcaactaaatttagtggagaaactttacgttgtgctgtccatctgaaccccatctttatccatttttcagtaacaggttggccatcctttacaatataacctctaactttttctgaaggaaatagtgtagcaaaagccatattcacacctgagtagttcagattgtatatttctgtaaactccaaaaaatgaagttcattaaaaactctataattatctctaataacctgctgtactccactgtagtgtgcaataattccatgtacaatacatttagggtagatagcttctgctaactcaacaagtgttttatctacacaaagatgaacttccccttctctaagtagtgaagctataagtcttgcagtttggataatatcaccaaatctagctagttgaatgactaaatagcgcttcataacttatgccttgttagcttacttatcgaaaaagtagtctcccatatcaagtatagttattataacgtttagtttaagataatacacctatatattacatatatctttagagaagttattgttataatcatctataaacttaatgtattacttgatataatatgtctcttttataatataataacataatattagatagttaccattttataccttgaatgctagtataacttattattattattattatttatcttatgaatactaggacaatatttattcataaaaagataataaatgatactggatttttcttcttatcttgtttagcgtataaaaatacatatagttaagaatagttgattgtgggtaaaaaggtattaccatcaaatataacaaaaagaacatgtaataatcagatgtaaatatcatactatgcagtattatcctctctttattgatcttacttctgcaaactgtcttattgttggtgctggtaatgttggtagacggaaattgtatagccttattaaagctcatacaaaacatattcttattgttgatcctttaccaccaggacaagaacttaaagcattgcttaaagaaaaaactgtatgttacaaacaacgaacatttattactgaagatatattagaaaagacgttagtttttgcagccacaaatgataaaaaacttaatcaatctattgctacctattgtaatttaaaaggtattttatgtaatattgctgatgcacccagtaaaggaacctttatagttccttcaattgttgaaaaaaatggtatttctattgctatttcaacaaatggtaatagccctgctttatctaaaaaactacgtaaagatattacagaatggcttggagatcgatacacacctatagtcacacttctatcaaggttaagaccactagttcttaaaacatctaatattaccttagataatacaacattatttaataacattcttgattctgcactctctgatgctattcaacaaaaaaatcgtcttcaatgcgaagaaatattaaaaaatacacttcctaaccacttacaaatacatattatggaattacttcatgagctggtctgaattacttccaataatcattgttcacttttatgcactaggcacaatcactattgtatctggagtattatctcaaactaaatggttaactagaattgctttctggcttatctttttaggggttataactcatactgctctactcattttactatgggaaacacctttctctactttcacacaacctgtttacatgtttattctttcatggcttataatctttattgctcttattatttggatttattgtaaatatgaaaccttgcttcttcctatggttccactggctcttctcatatttctatttgcattattattacgccataccaaaatgccacttcctcctgcacttccaggtataacctttgctgtccatattactgctatgtttttaagcattggtctaacatctcttggttttggagctagcattcttttcttactacaagaaaaaagtatcaaaaagaaaatacctctaataggatttcaaaaagatattccagctcttacaatccttgacaagattaatgctttatctgttatgataggttttccattatttagtataggaatattatttggtattgtttctgcccgtctaacatggggtaatctttttgtttttgatcctaaagaggttataagtcttattgcctggtgtttatatgcatggcttttttaccaacgctttactcatggatggcaaggacgtaaacctgctatattagctatttggattttctgtatttgcgttttttctcttgttgtggttaacttttttacagaaacctatcacaatttttacgttgagaagatgctgagaagatatggaacaacatatttatcttataggcatgaaccatcgtacagcaagtattgatgtccgagaatgctttgcactaacggagcattgctcaaaagacgattgggcaattccattaataaaaggtattcaagaatctcttatcctttctacttgtaatcgtgtagaaattcttgctgttggtgatagtaacacacctgaaattattctttctgcttgggcaaaagtaaaaacacgttctatagaagagcttgttccacacacatatacttaccaagggcgctcagcaatttcacatctcttctgtgtggcttcaagtttagactctatggtgttaggcgaacctcaaatactaggtcaattaaaagacgcatataaacttgcaacaatagctggagcttcaaaaacaatccttaatagacttcttcataaagctttttctgttgctaaacgtgtccgtacagaaacatctattgcttctaatgcagtatcaataagctatgctgctgtaaaacttgccaaaaaaatctttggtactatgaatcaatataaagctatgcttattggtgcaggagaaatggctgagcttgctgcaatgcatttaatgcaagcaggtattcaacaactaaaaattgttaatagaacatatagtcaagcacaagaactagcttctcagtttagaggagaagctattccttttgaaaaacttgttacctatcttgcagaagtagatattgttataagttctacaggagctcctcaaaccatcattcacttcaatgatattaaaaacatactcagtaaaagaaaacattatcccatgctttttattgacattgctgttcctagagatattgatcctaatgttcatcagctagataatatctacctttatgacattgatgatcttaaagaaattgttgaagataatattgtacaacgacaagatgaagctataaaggcaaagcatataatacaagatgaaattgactctttttgtgcatggttacaagctcttattttacaacccactattgttgacttacgaaaacgcttttctacttatgcagaagaagaacttgaaagaacattaaaaaagattggtcctgttgatagaaaaactcgagaagcattagaaactatgatcgatgctctcattcgaaaacttacccatgatcctataagttatttaaaatgtgctcatcgaactattgacactaaccatataaccttagcacggcagatgtttaacctagataaaattcctcaaacaaacaaggctgttaatgaagactaacaatggatctaggtatcttttcttccctaacattaactatgatacaatccttttacttctagtaataataacgtatatactatttgagcaacattaaacttatcacttctaccattcaaggtttatctatgggcttcttttcctccttaaaaaatgcattattatcatctaatagtaaggtaactaattctacaaagttaaatatagagctccaaccatccacaacaactgctaacaatggctggaaagagcaacttattatatcattacggcaagcaaaacctcagctctctctttggttagatttaacacttaaagggatcactcatgcaaatgaacaactatgggaacgtgttacctttttacttgttaccttaggagtttctgaaaatgaagccagagcttttactcaaaactttcaacaatggtcaatggatctaggctatacaaaattaagtgattttcgttctgaacttcaatatagattatctctcactcttgaattagaagatgaagaaagtgagcaaaatagattactaaccaaaatacatacaggacttgctaaaacaagagaacatcttagccaaggactaaaaactgttttttctcatcataaaaaattatctaacgacttttgggatgaactagaagaactttttattctttcagatatgggtgtagaaacagcagaaatgttaacatcccgtcttaagatacgggccaccaaagctaatatttctataccagaagagctttctcctttacttgctaatgaattagaaattattttaaaaatttctcctcgtgttttagctatcaatcctcctgaagttatcttgcttattggtgttaatggggtaggtaaaacaaccactattgcaaaactagcatatcgaatgcatttacaagggaaaaaagtcctacttgctgcagcagacacattccgtgctgcagctatagaacaattagaagtatgggctcaacgtattggcattgtattttataccaaaggaacaggagctgatcctgctgctgttgcatgggaagctgtagaacatgcaatccaaaaacagtttgatgttgttcttatagatacagccggacgtctgcatacaaaaacaaacctcatggatgaactctcaaaaattcgtaatgttattgctaaaaaacatcctggagcaccacataggacaattttaattattgatgctacaactggacaaaatgcattacaacaaacaaaagtctttaaagaatccacaggaattgatgaaataattgtcactaaacttgatggtactgccaaaggtggtgtagctattgctgtttctctacagtatggtattcctattacctatgttggccttggagaaaaaatggaagatctacagccattcaacggagaaaaatttgctaaagctttacttaatatttaatattccaccctcatataactataattagtatatctcatactatttaatgatcaaacaaaagaaataataatggcatacattcttcctggatcatctttagatgcagatctttatgcaattacagatgatgcactttcttttaacaggtctgttatagaagttgttaaacaactattagatgctggaataaggattatccaatatcgtgaaaaaaataagtcttcaaacagtatgcttaaggactgtataacgatcaaaaaattaacagaagaagctaatgcatgttttattgtaaatgatcatgtagatattgcagtactatgtaatgctgatggagtccaccttggacaggatgatctcccagttgataaagtacgggagcttataggaaaagaaaaaattattggactgtcaacccatagcccacaacaggctcaaaaagctattgaaatgggcgctgactatattggtgtcggacctctctaccctacaaaaactaaaaaagacgtatgtgaacctgttacaattagctatcttgattgggttgtcagccatatagctattccttttgttgctattggtggtatcaagcaacataatatccaagaagtcattcaacatggtgcaaagtgttgcgcacttgtctcagaaattcttagtgctcctaatatacctttacgtatacaagaattacgtcaagctatactattggctcatacatagtgatagacctcttatataaaattcttaatatcctcttttcttcttatagtcattataataagtaattctttagagtctatactaatataaaggtagtatcttttataagttataattcattgaagaatagttatttttctaatagtcgttttgaaattgcttgagctgctttccttccagcatccattgctaatacgacagtctgtgcaccagtgacaatatcgcctccagcaaagacattaggaatagatgtttccccaacctcatctgtgagaatatatccttcatgcgtaagtttaagaccttgtattttctctaataatctttggtttggtttacttccaatagcaataatagcaagatctgttgtatattcaaacagctccccttttataggtatagcacatctacggccagaggcatcaggttctccaagagtcattctttgcaaggttacagaacataatttgttatttttatctttgtgaaaagcaacaggagctactaactccataatgtttacaccttcttcttcagcatatgcaatctcttcatctcttgctggcatttctgactttgtacgtctatatatgatatgtactttttctgctccaaggcggatagctgtacgtgaagcatccatagctacattaccagctccaaaaactgttacagaacgtcctagataattattttgtaccgatagtaaacgttccttgtctgactgattgacttttatatcttttagatacttggtagctaaaaaaactccagaaatatcttcaccaggaatacctaactgacatgatagtccagcacctataccaataaaaatagctttgtatccttcatcaaaaagatgttgaatagttaaagtatcccctataccctgtgtactaaatgtcacacccatactacgtaatgctttaatttcatcactaacaaccgtattaggcaaccgaaaagtaggtataccataggtaagtatacctccatgttcatagcatgggtcaaaaattgtaacaccaatgccctgagctataagataacctgcagccgtaagtgatgccggtccagaaccaatacatgcgactttacaatgtgtaactacaggaggctttgcatcatattcattcaaaccaacatataatccaacttccatatttaatatagaatctgctacatatctttctaaacgaccaatacatacaggattaccttttgcctttagaacacaagaaccttcacactgtgtatcttgaggacaaactcttccacaaattgcaggtagactattagttgtgcgaataattctgtatgcttcttttaaatctccacttaataatgcagcaataaattctgggatacgtacctgagcaggacaagcttgcttacagcgtggtctcttacactgaagacaccttgatgcttctatctttgcttgttcatctgtatatccaattgcaacttcatcaaaattacatatacgattactaacaggaagacatggtgtaccactactcaacactcctcctacttttttatgaagaattgtcataattataacctaataaacagaatagcattcttaaataacaaaaaaattcaactctaatatagaatgatcttttctttctaacataaaaaataaccttcttactcttagctagaaaaaatagattttcttctatgttgcaactttaactataatataagaagataggtataatacactctatacccatggttaaaaatagttatatatgacctaacattaattaacaatatctaacttataaaaaacctttttatgaatgaaacgtttactgtatatttagctccacatggttttttacaagaacttattgatgaaataaatacaaatattatttgtagtaaaggtcatcttatacttgtaaaaggttctcctaaaaaatttgcatgggcacaaaatacatggttaagtccaagatttatcccaataagctctattacagatggagcaaaaaaacttttatctattcaaagaaattggtggttacattctgaaaaccatcatcgacgtgcaacattaattcaacaacaattaccttatgtttcagccaaaaagcttcactttggagaaatacctcctcaaacacctcttggaagttggactttatgggaaaaagacatcatcctagcatcaccagactgttcatcagtatttcctgatggagttattacatttcatgaaaataaaatagaaccaccaagtagagcatatcttaaactttgggaggtttttacacgcttttcttttgttccatcttataaagagttatgtattgatcttggggcatctcctgggggttggacatgggttcttgctaagcttggtagtagtgttattagtattgataaagcaccattagcttcacatatatcttctcttcctaatgtagaacattatacaggaagtggctttagatttactcctcttcatattggtaatgttgattggatattctcagatatggcttgttatccaaacaaactttataactttatccaaccatggattattaataaaaactgtcacacaataatctgcactttaaaacttcaaggaaaacctagtaatagtactctttcttgctttaaaaaaattcaatcatcttacctcatacatttatcatataacaaacatgaacttacatggatctattctactaaatacccattagtaatgttgtaatttatatttttatcaaataaaataaatataataacaagttaactaaacctatctttattaagaaatatataatactactataaacaaattttttataacatataatacattaaatctatgactaaggtttttattgacaataagaagaatacgttgcaaaaaactctgtagagtttggtttactttataaataatggagcagtttatgaccaaagcagaacttgttgatatgatccatgcaaaagcaggacttcccacaaaaacaaaaacagaagaaacctttgatgctattattaaagtccttaccgaagctattgcttctggttctcctgtcacttttactggatttggaagttttaaactttcacaacgtgcaccacgaaaaggtagaaatcctcggacaggaaaagaaattaatatacctgcttgtaaggtcgtaaaatttacaccaggtaaggctcttaaagaagctgtaaaacaataatttgacctttaccaggcaatcattctatctgtaataaaagccattcaaattgaatggcttttattacagatagtgtaatagtaaaatgacaggaatctattaacctaacaatatgtataatcaactattagatatgttgtaatagtatatttataattactgaataaaaactacactactaccaaaagtcatgctataaacaaaaaatactatagcaaaaatcatagataacttatgtctcattggattattactcaatgcaatttttgtccaaataagagctgaaatgaggcctaaaccaacactgactgtagctataggccaccctataactataagagatattacaacgttatacagcataaatactatgaaacttattaaaaatatccaagcaccataggccgcccaaacaccacaccagtttgcagcaactacatagtaatcacggccaaaattatctttattgcgtcgtatccatagccaaactaaagcaattccagcagcagcagcagcttcaataaaatgtgtaataaatacaataagccataatggactcgtcaaagatggaaaaatcaatccaactataatactaaaatcagtctcacgttctaatgctacaaagtctcctgaaaagatatacccaaataaaaatatagagatgattataaagctagaataacatattcctgataaaaaacttaatagtatatataaaataggcgatccaattaacctataccataaaacaatacaaataagctgaaagataaatcctagataaaaaatactacacgttacccaaaatatatattgatatattggaagaaaatgttgaatatcagaataatatattcctgtaactaaaagtaatataagaacaaagatacttgttaaaataactcctaagtacattaattgatatgcacattgtatatagagcttactttgtttaactataccaaatactatggtaaaacaaacaataattggcaataatgcagaagctagcaaaaaaaacaaaggaaaacctatagataaagttagcttatttagaaattcaattgctagataagattccattgtctctccaataaatcaaaataattttagttaatttcctaaattaggtatcccccatacgtaggtaagttttataacatctactaataggagaattactatccaaaaccaaagaatcactttgttcagcagcatgctgccttggaatctttaattttctaggtatatttctttgatttacttgttttttataaactaactgccttcccatacacaactgtaaatcaaccttatcaaaaaaagttctatccataaaggcatttactctctcaagtaactcttccttcatataggctagttcttgtaaagccattgtatcctctccaccaacaatcaatgttttttcacgtctacccaaaggataagcaataccttctaagtatggtcccattaccatactccaattcctccatagttccactaaaagtttttcttctgaaccactacttaaatctaataaaaatgtctctatctgctctttaatagaagacattctaaggattcgtttattatattccagagaaaaatgtttctttttcataatggtgaaaatatataatacaaaatagtagcaatacaataaataattttatactgtcttaatctataagagtaaatattttttactttaattaatattttttaacttaaaaaatattactttttattttagttactatttttttataaaatttgaatattataattatatataataaaatttttatataaaaaactatatcacaataaatagatagaaaagtgtatctttattttgtaaataaatgtacaatttaatacttatatcagtatattgaaatacattttttttctttctttatactcttgcttcaggagaaacacttatgcgctaccacacgcatgtttcagatcaaacactacaagccatacaaaacaatgagtggctagaaacaaatattttgggagattattcttcaagtacgcttagttttaaaaacactcggaaataccatggattacttattgcaaatcttgaacaaccacatggacgccacttacttgtttcaaccttagaagatgcaataataactaatgacataacttatgaaatatcttctcgtgaacatgaaaatattgtttatccagatggacttaaacaccttatttccacagggataacctattgtcctcaatgtatatatacattagacgatatacaaatctgtcgagaaataatgctccttggtgatcaaaatacaacacttgtacgttataccctctatggtgctaacaataagcgtcatacattaagaattaggcctttattagcctttagaagtatacacaagctatcaactgccaacgacatattacgtaaagatgtagaaacagtctataatggtttttcaataaaaccttatgagtctcttccaacactatttgttcaatcctttgatccacactcatttatttatacaccaaactggtactatgctattgagtaccctatagaaaaagaacgtggctatccttacaaagaagatctttttgttcctggagaattacatatagacttgcaaccctatgctcctgttatcataagttttagtactaaactcctaactacaactgaaaatcccattattttatggaataatgaagtaatacgccatcaacaaattaactcttcagaacactctattacaacgacactatataatgcaggcgaacaactttttacgactatttcaaaagaaaatagcaatattgttgctggatatcattggtttgattcatggggaagagatacctgtattagtttgccaggtctttcattctgcacaaataatattgaacttggtaaaaaggttatcaaaacagctattgattcaatgcgctatggtataatacctaatatttttggtggaaatgacaaatcacatgctttcaattgtattgatacttcactatggtttatttgggccattcaacagtttatgctcactgaacctcaacaacaagaatggatttacgaaaactgctggagtgccataaagtctattattactgcttaccgtgatccaacaatatctggatgtactattgatgaatcaggccttattgctgcaggaaccccaataacacaactaacttggatggatgcatccattaatggaatccctgtaacaccaagaaatggatatcctgttgaaattaatgcactatggtataatgcattagccttttcaggataccttgcaaaactctataaagaaccatttgatacttactatcaaccacttgatactatgcgccaagcttttaaagagcggtttctaacaaaagggatatattactacttaggtgatgtatggaataacaatctattagacacttctattcgtcctaatcaactatttgctatttcacttccttttcctattcttgaaaaagaatatcatgcagatgtattacgtactgtaacaacgacattacttacaccctatggattaagaactctagacccatctaatcctgcctacaaaggtatctgtgagggatctcaagaagaaagggataaagcatatcatcaaggtacagtatggccatggcttcttggtgcatatggtgatgcattactccagtcagcagccttcccagaacttgcattacaacaacttcttttctttcttactccactgtttactattcaccttgaagaggcaggtataggctttatatctgaaatttttgatggagatagcccacatcttccaagaggatgtattgctcaagcttggagcattggagaatgtataagacttctctaccgtagtgaaaaagaattccctactgtttttaaaacatggaagaattatttagcttcttataaagaagcgccactttatgatacaacaaccttaacaagatatttaaaataacttggaggagcataaattatgcgtattctcatgtttggttgggaatttcctccatatttaagtggaggattaggaacagcatgttatggaatgactcaggctcttattcgatcaggagccaaaattgtctttattcttcctcgatcagaacacagctcacgctatgtcgaacaaaataaacattttcctaaaatacgttctgctgctgatgtttgtattacacaacataaacaacttggttacttcactcaacaatttcaagaaatctggaagaaaaacttttctatccgtcctattaaagcaacacttcatccatatgtttcctttagtcaaacactttctgcttattattctactcagaatcatttaactgaacacaatgaattctctacagttagttcagcatgtgctttacctccttgttctggtggatatggtccacacttaatggaagaagtattccgttatagccaagctgctgcacaaatagctatggaagaaatgtatgatgttattcatgtccatgactggatgacataccctgctggaatcatagctaaaaaaattagtaataaaccacttattgcccatgttcatgctacagaatttgatcgatgtggtgactcacctaatcaagatattctaaatatagaaaaggttggtcttgagcgtgctgatcatattattgctgtcagccactatactcgtaatcttattatgaaaaaatatcatattccaggagaaaaaattagtgttgttcataatgctgtacttccagcatctggaaattatacatggcagaaaaaaagaaattcaaacaaaaagtatgtactcttccttggaagagttacacatcaaaaagcccctgaacactttataaatgctgcatatcttgtttcaaaaaaattacaaaatgtatgttttatcatggctggtagcggggatatgttaccctcaatgatccgtaaagtagcttcattacgccttgggagtcgtttccactttactggctttttacataaccaacaagttgaacatatatattctcttagcaatgtatatgttatgcctagtatttctgaaccatttggaattacaccacttgaagctataagacatggaacacctgtaattatatcaaaacaatccggagttagtgaagtattaaagagtgcactccaagtagacttctgggatatagaaagacttgctcatttaatttgctctttacttacatatccaaaacttgagaaatcaataatgggactagcttataatgaactacaaagtatccgttgggaaaattcagctcaacaactttgtcacatttactctaaatttaacaaaaatggacaataactatgccctctatttgcttttactttcaagtacatcaaccttttaggctaagaaactattctttttttgaaattggcgtaaatcctttctatgaggatgaagaacataaccgccatgtgatgcataaagtagcaagaggctgttacttaccaatgaatagacttttgctaaagcttattcatcaatatgatcaaaaatttaaaataagtttttctatatctggaacagctcttgaacaattcgaacgctattccccagaagttattacaacatttcaagagcttgcagatacaggctgtgtagaatttctaacagaaacttactatcattctcttgctttcatgttttcaccttatgaattcaaagaacaagtgacacttcatcagcaaagaataaaagagctctttaaaattaccccccatgtattccgtaatactgaacttatttacacaaatgaactagcaaaatgtattgaaaacatggggtacataggtattttggctgaaggagctgatcatattcttaactggagaagtcctaattatgtttatcgtcctctgggctgtaataatcttaaacttcttcttaaaaactatagactttctgatgatatagcattccgtttttcaaataaagactggataggatatccattaactgccgaacgctttacacaatggattaacgattcaggaggttcaaatgaaactattaatctctttatggattatgaaacctttggtgagcaccaatgggcagatacaggtatttttgcctttatggaagcactaccacattatttgctacaatcaaataatcaatttttaacacctacagaagttgcgactacattcacaccagttgcagagcttgacataccatatcctgtttcttgggcagatacagaaagagatctaacagcctggacaggtaatgagatgcaacaagatgctattgaacgtctttatcgtttagaacctttagtaagggaatatggatgtgaacaaattcttaatacatggaaacgactacaaacatcagatcatttttactacatgtgcacaaaatggttttctgatggagatgttcataaatacttcaatccatacccatcaccatatgatgcctatattaattatatgaatatacttacagatcttgaaagcagaattaccctacaaccaaatagtaatacttattctaaccaacataccatgaaagcacattataacgatgtaactcctcttttatcacctacaacttgcttcaataatttacaaaacctataaggaatagttatgcagcaggcagttgaacaaacaacactttttgaagttagctgggaagtctgtaataaagtcggagggatttatacagtagtaactaccaaagtccctcaagcaataaagacttttggagacaattattatcttattggacccaacttaggaaataatgcagattttcaagaaacagatgaaccttgctgggaaacattaagccaatcacttgctataagaagtcttcattgtcgttttggtcgttggaatattccaggaaatcctaaggttattctagtcaactttaaagatagatataaccaaaatcaattattatatgaattttggaatagatatggtgtcgactctatgacaggaggctgggactatattgaaccagttatgtttggttcagcttgtggcgaagttattaatatagcagtcaaaacacttgtagaacctgttggtggaacagctgttgctcattttcatgaatggatgtgtggtagtggattactcactattaaacaacttgctccagatgtaggaacagtttttaccacacatgcaactattcttggacgatcaatggctggtgcaggcattgatatttatgaaaatctctcacaaataaatccacaaagagaagctgctgcttataatataactgctaaacaatccatggaatctattactgctcgtgaggcagattacttcacaacagttagtgaaattacagctgatgaagcagaagcttttcttggacgtcgtcctgatattattacacccaatggattagatttacacatcatagctgactttagtaaggacacttctcttactacaacagcaagacaatccatccttagtcgagcttctcaatttattggtcaacaacttcctaatgatacacgtattatgattatttctggtcgatacgagtttcataataaaggatttgatgtctttcttgatgcactaggaaatgtcgaacaagcattaagaaactcaaataaatatgttcttgcattatgtacagctattggaggacatactggtgtcacaaagtatgccctagagaatcatcttgaatcaaatatgattactcctcctatgccactccgtattgtaactcatcatgtttataatatagagcaagatcctattattacaaaatgtttgagattaggactcacaaatcatgaagaagaccatgtaaaaattatatttgtacctgcgcttcttaatggtcaagacggtttctttaatatgcaatatgaacaagtactgccaggatgtgaccttggggtattcccatcatggtatgaaccatggggatatacacctcaagaaagtgctgctcatgccgttcctacagttacaactgatctttcaggttttggaatgtgggtacgtaaactccaagaaaataaccatgttacagatggtatttctgtcatacatcggctgcatatgccatatgacgatactgttaatgcacttcaatctgttatactggaatatgcaacctgttcatcagaaaaacttatgcaacatcgaatagctgtgcgtaaagtctctgaagaatgttcatgggagaaatttttcccatattatattcaatcatatcattctgcacttgcaaaagccaacgagcgtatcagcatacatgaaccacaaaaacaaacaaacacacttgttattacaggtgtatcaaaaacacctaatcttagaatgcttacagcaattaaccaacttccacaaaaacttggacgactcagagaagttgtgaataatgtttggtggacctggcagcctgaagcagaaaccatcttcactttactgagcaaagaactatggaaacaatcaggccataacccactcaaaatgcttgaagatatatgccctgcagcccttatggcagcagaaaaaaatacagaaatacaggaatgttataacgaattgatcacaaaatttgatgaatatatgaagaataaacctcacacaactgatccttctatttcatcttaccatcctattgcatatttctctacagaatatggcttacatgagagcatcccgctctactctggtggattaggtatcctttctggcgatcatcttaaggcagctagtgacttaaacattcccatggttgctataggacttttatacaaaaatggctatttccaacaacgaatagatgctcaaggcaatcaaattgctatgtatcctgaaaataacttctctcttcttcctatttctcttgtaaaaacacttcaaggagatcctgttagaatagagctagatcttttcccaggaagacaactttttgcacaagtatggaaaatgcaagtaggtcatgtaccactctacttacttgacactgatattccacaaaatattctagacgatcgaagaattacagcacgactttatgaatcagatagagactgtagaatacgacaagaaattctattaggaatgggtggtgtaagattattgaatctacttaagattatgccttctatctaccacatgaatgaagggcactctgcttttatgattttagaaagaattcgtaacctgatgctttggttcaatctaccattcaatacagctcaagaatgtgtacgtggtaatacagtatttactacacatacacctgttgatgctggtaatgaacgatttgatcctagtttaatggaaaaatatttttcagattatgcaaaatctgtcaaccttacatggaatgacttcatgagtcttggcagattttccacaaatgatagaaacatgtttgaaatgacactccttgctattcggaatgcaaataaagtaaatggagttagtagattacatagccaagtctctaaacatatgtgggctaataattggaaaggattacctgttcctgaaatacctattggatatgttacaaacggagtacatattgcatcttatgttggagaacatacacgaaaacttctcaaaaagtatgtgcatgaattatgggatagcctacccacatcccatgaggcatggaaaaatgttgcacaaattcctgatgaagaattatggaaagctaggttagaacaaaagcagcctcttcttaatgtaataaaacatctggctatgtcatctaacctctcctataaaatctttgcagaagaacagcagagtattatacaacagctttctgaagatgtacttattattggatttgcaagacgctttgctccatataaaagagctaatcttattcttgctaaccctgacagattacaccatattctgaacaaccctcaaaaaccaacaattcttgtttttgctggtaaagcacatccagctgatcaacaagggattgatcttataaaacaagtaataaactatacaaaagatcctagattttatggtaaaatattctttatagaaaattataatcttgctattgcaaaaattcttctacaaggctgtgatgtttggcttaatactccacgtcggccatatgaagcatgtggtacaagtggtcaaaaagtaggtgctaatggtggacttaatcttagtattgctgatggatggtggtgtgaaggctacaacagtcataatggttggacaattggcaaagaaatcgtagacatattacctgaatccgagcaatgtgactatagtgatgcagaatccttatatagccttttagaagaatctgtacttccactatattttaaaaaggacacaaatagcttttctccttcatggatagcaatggtcaaaaatgctatgcaaacccttatccctgaatttaatgctgaaagaatgcttcatcaatatttagatgattattatcttccacttgcaaaaaatcaggtaacctttagaggtgataactttgctattccaaaacaaattaccaaatggaaacaaggacttgaacaacgctttgctaccattaaaatacgtaatgtccaaattgaaggtttaacagaagatactgtgctttatggagaacctcttactattactgtaacgcttagtcctgaatcaatgaaagttgatgaacttctagttcaacttgttataggtcctggaaaagataatacatttacagaaatgccagatgtgttaacactcatggtatcacagcaatctggtaaagaggttacattctctggagtatataatattaaatataatggacctaatgtttatggaatacgtatcttacctacaatgccagggttactttcaccatatgaaacagggcttatcctttgggtataaaaagttcacataagataagaaggtatggtaattaccataccttcttatcttattataagtaataactatgtatttatactggttttttgacaatttctgttccaacaccttgatcagtaaataactcaagtaaaatggaatgttccaaccgaccatcaagaattaccactttttcgacaccttgttcaatagcttctatacaacattgtagtttaggtatcataccaccaaaaacaataccatcactaaacagtttaggtgtatcctctaaataaatagattgaataagctttttattaagatctaagataccttctacatctgtaagtaaaagaagtcttgtggcttttaaagcacctgcaatagctcctgctacttcatcagcattaatattatatgtttgtttattatctgttccaacaggagcaataattggaatgaagcctttttcaatcaatgtatatagcaatgatgtttcaatatgaacaactcgtccaacattcccaagattgataatttcaggaggttgattttcttttgtaagaattaaatcatttttttcagcaagaatgaatgctccatcttttccagaaagtccaacagctttagctcctgcttgatttacttggtttacaatttctttattaacagaaccagctaataccatttcaacaacatccatggtggctttgtctgttacacgtaatccttcacgaaattcagactgaatatttaatctagataacatattgccaatctgtggtcctcctccatgaactacaataggatgaatacctacaagattaagtaatgctatactttgagcaaaggattgtttcagcaatgtatctttcattgcatgaccgccatactttatgacaatcacttttccttgaaatttttgtaaatacggtaaactttcaatcaacatatgagatcgaagtcttgctttctccatatccaccttatattcactccatagtattaaagaataaatctgcttaactctgtattagcacgtatatcttcaagatatgaaacgacatactcttttgttacttccaatgtagttccaaacttttctggtgcatcaaaagagatgtctgcaagaattttttccataattgtatgtaaacgacgggcaccaatattttccgtttgtgtattcacatcttcagcaaatgctgaaatttcttttaacccatcatctgtaaaaacaatttttacaccttctgtttctaataatgcttcatattgtcttgttaaagcattatctggctcagttaatatacgataaaattcgtttttacctaatgcttcaagttctgctcttaatgggaaacgaccctggagctcaggaataagatcagaaggttttgataaatgaaatgctccagcagcaataaatagaatatgatctgtcttaatcagaccatatttagtatttactgcacttccttcgacaataggaagcaagtcacgttgcacaccttctctagaaatatcagaagagcgatgctgtgatgcacttgcaagcttgtcaatttcatctataaaaacaatacccatttgctctacgcgttcccgtgctaaatctgtaagtttatcattatcaacaagtcggttagactcttctcctacaaggtgttcccaagcagcacttactttcatttttcgacgatgtgttttttgtggaaagatacgactaaatgcatctttcatctgattacctatttgttccattccaggaacgtttaaaataccaataggctgtgtttgttcttgcacttcaatatcgacttctcgatctttaagatgaccttgtcgaaaaagacttcttaatttttcacgtgtagcatcacgattttctcctataggaagtaacaaatctaaaagtctttcttctgccaaaacttctgctcgttcacgtactttttctgcctcttctttcctgacaagattaatggatatctccataagatcacgaatcatagactccacatcacgtccaacatagcctacttcagtatacttggtagcctcaactttaataaaaggagcatgacataacttagcaagtcttcgggcaatttctgtttttccaacacctgtaggtcctatcataataatattacgtggagctacctcgtctcgtaatccttcttgtaactgttgccttctccatcggtttcttacagcaatagctaccatgcgttttgcttgctcttgtcctataatatatttatcaagttcaacaacaatttcacgtggtgtaagttcattcatttgtgttccttccctagtacgtagttaaatttatacaatacatatgaacatcaagttgtttataatccataattcaaaggaacattacctacctaaatatgctttttgaatctctggattacctaataagttcttagcagtatcttctattactattctgcctaactctaatacatacccacgatttgctagttttagtgctgctcgagcattttgctcaacaataagaatagtaactccaagtttattaatatgctgtactgcattaaaaattgatttaacaataagaggtgctaatcctaaagatggctcatcaagtagaagcaagcgaggctgacccataagggctctaccaatagcaagcatttgttgttctccaccagaaagcgtaccagccaactgctcttttctctcatataatctagggaaaagttcaaaaatccagtctaatgtttttcttatcaaatttttatcttgaatagtaaaagcaccaagttgtaaattttcaaagacagtcaaaacaccaaaaacacgtctaccttctggagattgacaaacaccttgtcgtgtaatcatgtaactaggtaatgaagagagatccttacctctaaaaacaattgaaccctttgttacttttacaatcccactaatagaaagtaatgtcgttgtcttaccagctccatttgcacccaaaatacttacaatttctccctcatttgcataaagagatacaccatgtaaaacctcttctgcaccatatcttgcgtgtaaatcatttacttctagaaacattaatatattccttaaataaacaataagataaaggcaaaatcatacattagatctagtcatcttgaccaagatatgcttggataactctaggatctctttgtatattctctggatgaccagaagcaattaatgttccagactcaagcactaaaagtctttcacatacattcattacaagatgcatatcatgttctataagaagtatagtaatacctctttctttaattgcatgtatgagcttaattaaaacatttgtttctggatcattcatgctcccagcaggttcatcaagaataataagttttgggtcagaagctagggccctagctatctctagtaaccgctgattaccataggaaagactttttgcctgatctatagaataggaagctaacccaacaaattcaagttcacttatagcacgctcaatagctgcttgttcttcctgacgttgtgaagaaaaacgaaacatacagctaaagaaacctgattgcattctacaatgcctaccaataagaacattttcaataacagaaagatatgggaaaaggcgtatagattgaaatgttcgagcaataccaagatttacaatagcataaggcttcattccttgaatagattgtcctgcaaaacaaatctctcccttattaggaatagagtttcctgtaattaaattaaatatagttgtcttaccagctccatttggccctataagacctataatacttccctgtttaatttcaaaagaaacattgtttacagctatcaacccgccaaaaaattttgttacgttattaagagaaagaagtgtcatatagtattcctaattctgtctaggagcaataggtgatccaaaatcagaatgtttcttatgtaaaagatttcgaatattatagacacgaggtaatggtggtaataaaccttgaggtctgacaatcatcataatcatcattgctaagccaaaaataagcattctcgcatctgcaaggctccgaaatatttctggcaatgcaataacaaaacatgttcctaaaatcacacccaattgacttccacctgataaaataacaataacaaaaataatgacagattcccaaatagtaaatgaagttggagaaataacagtcatcttacttgcaaaaaggttcccagctattcctgcccaaaatgcaccaacaacaaatgctaaccacttatagtgaataatattaattccagaaccttcagctgctacctcatcttcttttatactattaaaagctctaccatatcgggatgaaaataaccaagaaaaaaggagcatagtcaaaagaacaataccccatattagataataaaactgagtagttgtacgaataactatatcaccaatagtaggacgagatataccaaaaattccattagcaccaccagtaataccacaaatatcattagtaagtgcaattcttacaatttctacaataccaatactaacaataagaagataatctcctcttaaggaaagaatgggccgtactataataagagcaaaaaaagctgtagtaaaaccagctaaaggtaatagccaaagaatagggatctggtagtatgtattacaaatagcagtaaagtaagctccaacagcataaaatgctgagtgccccatatgaaaaatccctgtttggccaagaataacattaagagataacgcaagtaaaacataaagaccaacatttgaagcaacatcaatccaataattattaaggaaaagtggtaagatagcaatacaaactcctagtaatagagagcaatatcgtcttattctactcataatttgtctgctaccctctcaccaagaagacctgttggtcgaacaaccaaaatgataatcaaaataaaaaaagcaacagcatctttccacccaatagaaagataagaggcagctaatgtttcaactactcctaataataaccctcctaacattgctcctggaatatttcctattcctcctaaaatagctgcagtgaatgcctttaaaccatatagccagcccatagtaaaagaaatttggccataatacatacctaccattacacctgcaataccgccaaggccagcaccaataaaaaaaacaagagaaataattttgtttacattaatacccataagccgtgcagtaatttgatcaattgcaacagcttttatagccattcctatagatgtcttattaacaaaaaaatataaagttaccatgaggaaaaatgaaatagaaataataataagtcgcatgaaagaaatatgtaccccaaaaatatctaaactaagtgaagggaaaaatgtttctggatatacataaaaatttccaccataaataagcataatagcattctgtaaaaaaatagatgcacctaaagctgaaacaacagcagataatctatttgcttttcttagaggacggtaagctgtacgttcaagaagaacgcccaaaaatgcaactataacaaatatagtaaacatcactaaaccaatagcaataggttctgcaagtgttgataaacctaaggaaaataaaagagtaaatcctatgtatgcaccaatggtaaaaagttctccatgtgcaaagttaatcaatttaagcacgccatataccatggtataaccaagagcaactagggcataaattccccctattgctactccattaataatctgttgaaaaaattcaatcatatagtagagcttattgacaaaaactaaaaagagttagttagactattgcattatttttcaagaataaatgttccctgttcatcaacataatatactttataaaaattccctatacgatctccctgctcatcaaaagaaattggccctgtcaacccaggaaaatcctttagtgtatgttttaaataaaatgcaatagatttaggagaatcttttccttgctttaaagcttcaataatcacattaaatgcttcaccagcaaaaataggccaaatagcgctaggtaacttatgatattgttttttgtattccataaaaaatgcttttgcttcaggtgtattaaagtcatatgctgtaggaggactcaaaaaaaagtatcctttagcagcttgttttcctgcaattttaacaagatctgtattatttgttgcatctccacccataattggaacagaccagttcatctctgacttttgacggagtaataaaccagcctcagggaaataacctgtgaaaaaaatcagatcaggatttgttgtttggattttagttaatatagcagtataatcctgttcacctggtgtaagcgcatcaaaaaatacaacagagctaccttttttttcaagttctctccttgtctcttgtgctaacccttttgcataagaagaattatcgtgtagtattgctatagacttatatcctttttgactaatgacatctgcggctactataccttgatcactatcacgagggcttgtacgaaaaaatagtggtaatcctttatctgttaacctattacttgtagaacctgtagcaatttgtacaattccagcttcattaataatattttgtgttgcctctgtaatagatgaaccataagtaccaataattgctaccacaccagaggaaacaagtttttgagcagctaatgctgctgttcgaggatcacttgcatcatcctcaataataagctcaaccctttttccattaactccacctaaattattaacattttctgctaataattttacaatattttgcatctcttgaccttcatttgcccactttcctgtaagtggacacattaagcctatacgaatcacttcctcacaaaaagcatttcctacaaatatattaacacatatagctagtaataatattctcaaccatttcttcatgcatactccaactatatacatagcttataacaacaatacactaaaaaataagacatactaaatataatacatattcatattttttaatacctatattagtctacctgatatatcaaccaaaaacatggctatatatgacacagacaccaaaataatagttacattttttaacaaactatcctagcattatgtttttataataaaaatattagaaatgataaaagagtatagtttatactcttgccttacctaaaaatccaacatatactcttctaatatatgtttgttccctataatcaatctatcgaattattaataatagaaggatatttttaactcatcctcattatggatagaggtatcccatgctgattcattgtccacagtgtcatttttatcgtgaacttaatacttcccaaattccagataatgctgttatggcaacatgcccaaagtgtcaaactcgatttcgttttcgtaatcttgatagtgaatatgttgatccaagttcatctaacactattcacctattacagcaagctgagtcaaaaacatttactaatccacctacaaacaatactagtatatctcattctgatacagagtgtttaaaaaactcctctagtgaatacaatcaacaaaacaactataaaaatgtacttgaaaaactaaaaaaatatacattaactaatcaaaccaggcagcctacagatggttatgtagatcttattccatgggaacatccagaaaaatttgattttttttctagtttttaccaaacaatagtaagagttatgtttaaccctgcaacattttttggtaatataagtaatgcaacaagttcattattaagacctttatttttttatatcttagtaagactttttcagacacttatggatggaatgtggtttatggtgagctttcaagctcttgaaccatcaataacagagtcatctctccatgatttattaagctccattgcacaagaaatgacaattccaatgacacttataatgacacctgttacacttgctcttcaacttggaatctatgttttattgttttatcttatgattagattcattcaacctgaacaaacatattttcacacaatattccgtgttattgcttatagtgccgctccaactattgtttgtattattcctattattggctctcttgtaggtagtatttggttttctatatcctgctttattggttgcaaatatgcattaaaactttcatggactaaaactgccttagctcttatacctctttaccttatagcaatggctattgggcttcaaggagcaaaacagtttatacacattgctggataaacacataatatctaaaactgacagaatctatactacctagttaagatataagactatttattatactgtaattcttcaaacattctttctattagatatacctgtgattaatacttttaattattactatagcctagtatagcagtactttttatttataacatatttttatattatttctctatataacaatagcataaatataccctataggctatactctttatattaattaactgttccatcatacctatggagttagctatgcgtatagttgtattactatgtgttatacagttatgtatccttggaacagcttgtgaccttacatctaccggaaaagctttaagaaatactatacatataaactcatatggacaagctgaagttattcttgataactggataaatactagtcaaattcaagtatatgtctatccccaatctcctccagttgaacctacaaaagttctttttgttccatttagagtaacacaacaaatggaaaattttttgactgttggtaacaatatttcacgtattatttggcaaaactggttacagaatagcatattttctacacttgaatttctacagaatggaacagcatttcgtccagatgtatccctcactattgctaaacaaaaaggtgctaacttagtggtaggtggatatattacagattttattgatggaggcttaagtggtgatacacgtgtttctattgcaatagaaatttatgacgtatcaacaggtaatttaatatggtcattatcacaagcaggtagtatacaagcagctagtgtaaatgattttattatctttgctacaaaaacccgtatgccaacaaaccctagtgctgcagtcatcaaccttcttgcagaggatatgggtaaaaaaattaaagagtggacaaacccttcatttcaagaagaaacatggcttatgccagaaccattagcattttgataaaaacactttccttcatatagtacagttactacttatagaaacctatagcatatagtaacaaaaagttatgatattgtttttatctacaatttattatatgctaaaaacattaatttaatatattaaaaatattaattcatgctaaaggaacataatggaagaatgctctcctattgaccttctctctactaaagaaacatggcgactatttagaattatttctgagacagtcgacggctttgaagcaatgagtaaagcaggcccttgtgtatctatctttggatcagcacgggcaaaacctgataatcctctgtataaagaaacagaagccatttccaagcttcttgtttctgcaggttttggaattattactggtggcggaccaggtttaatggaagcagcaaataaagcagcttttgaagctggtggacgctccattggattacatattcatctccctcatgaagaaggatgtaataactatcttacaatacgtacagaatatagatatttttttataagaaagcttatgtttgtgaagtacgctcaagcctatgtcgtaatgccaggtggaatgggtactatagacgaattttcagaagcatttgttcttacgcaaacaaagcgtatccatcctttccctattatactctataatagccaattttggaatggattagtcgattggatgcgacaaacaatgtctaaagaaggttttattgaaccatcagagattgatgctcttcttaatatctgtgatacacctgaagaagttctcaaaattattcaagaaaaagttcccactgcaataacacataaaaaaaataaacataagcagttacattcatatccttaatatctaatattccttaattgaacttaatacaacttaagatatagttagttatttttcatcaaataagaatggattataaaccagaaaaaataatgtgttgggggcctataccaacaccaccattaggctggacttgggacaacttaatggatgaagcacttattgaagcaaatcaatgtacaaaaaaaaatgaagtacctgttggagccattattgttcataaaaatggtaaaattattggtaaaggtcataatgctccaataacaacttcagatccaacagcccatgcagaaatacttgcattaagaaccgcaggagcagtccaacaaaactatagattacaagattgttttctaattgttactcttgaaccatgtttaatgtgtgtaggtgctattatacaagctaggattgatggtattgtatatggggcagcagaactaaatacaggaagtattacttcctgtattgctggttttgatttaccttttaataactataagccatggcatatgggaggaataaaagcaacacagtgctctcagttattgcataacttcttttataaattacgaaaataaaattatcagttaaaatttaaggatacctaccctaacgtttaaaatatcttgtttgtacttaaccatctgttgtgattacctatataatatgtaatacataaaaagtagataaacactatagttttattttttccaactagggtgttactaaaaaaatatttttttctttgaaaagaagataatacttttaaaacttttattttataaatgaggatattgtggcgaaatcagctgaagaaattactattgaatatgaagaggcaggtcaaattcttgtcaaagaacttgataaagtcattctttctaaaggagcatggacaactatactctttcgatatcaagagtttgatccagaaactggtggatatgggccagaaaagtatagtattcgtcgttatcaaaaagttgcaggcgaatatcgacaaaaatctaagttcaatatatcaagcatagaacaagcaaaaaaaattattgaagcactcacccattggatctctgaatcataacaataactcaatcaaaaatgataaagggctatattttccaatatagacataataaactagaacaaaaacataagtaactttaatcaacaaatagatattctatttattaaaaacttataatacattctcttaacacagcataaaaagcagattaatatattatagttttaagcttataaataaaaatatggatgtattatgtggaacgctgaaaaagttaagcagcttgctgagtggtatgtatcaccacaaggttcctttgcattagaacaagaatataaactattccaaaatctgatatctatatggccaagacgtgactataccttacttaatattggttgtggagttggtgcatttcttgaaatgttctgggattatggatttgatgttactggacttgataataatttagaagtattagaactttcttctaatcgactaaaaaatcgtgcagaattccaattaggtgccttagatgatcttccatttgaagatgaaagttttaactacgcatcattagtgactattttagaatatgttgaagatccaaaaaaaattttagcagaagcatttcgtgttgcatctgatggtattattgttggattcacaaataaatggtctataaatcatatcattaatagtacattacagctgcttcataaaaaaccaaaaaaagacagtcaatgggtgagtccttggcaacttattcgtctaacaaagcagctttatcctgaatgtagaatttattgtcgctctactttactaggtcctaagcgtacttgggatgtaacctcttcatggtctaaacttaaccgtattattctttcttttcctatagggacatacgttggaatgcgtattgaaaaacgcccaaagcccacactgactcctttacttctcaaagcaaaagaacaagcagtaaatgtatataatgcattaagtcctgaagcaacaagcactattcaacataatagaactaacaaataataataactaaaaattcattgcacctatctagtatttttcttttactgtatctaactactttatctattaattagattaataattaaaaattaggtgtatcaccaacggcaatagaaagctctctgaataaccgtaaactttcttcagcttcagttgcctccagtttatgtatagcaaatccagcatgcacaataatataatctccaacagttactggttctggaagtaacatacctgaaacagtcaatattgttgtactatcgccaaccgtagcacgaataatatcattatccaacagttcaataacttttacagggatagcatgacacatcaacttatcctttattctatattattttaaacaaacttttaccctcttgtatcacataataattagtaactatatggaatacaataactatatctatgaaaatcattttatccttttcttatatcctaacatattatttataaaattgatagataaaaatagtattaatatacctctaacaagctcaaactataaaaaagaatactccttacaaaagtaaagagtattctttatacttgttataagtttaataaataaggaagagttagttgctatcttcagttaaagacaatgttttaaaaaacgtttgtccatttctttgtaattgtaacataataacccctttcttcttagcatctccacaaataatatttgcaaggtcatcagccgattgaagaggttttaagttagcagaaaggattatatcttgctctctgataccagcttctgacgctggcttattaggctcaacgcttacaactaacaagcctataccaagcttaacatcaaaagatttagactcttcttgtgttaaaggacgtacagataatccaagagcacctggtaaagattctggtgagctttgtttttgacttgaagttgtcttacgctctcctagtgtaatggatatatctttactctttccatcacgccaaacttttaatttcacaacagaaaaaggaggtttagtagcaatagcttttaacaatgagcttgcactatcaatttgtttaccatcagcttgtgttacaatatcgccaactttaagaccagccttatcagcaggatctccaggaacaacagaacctacaagcgcaccttttgcctgagataatccaagagctttagctgtattagtatctacatcctgaattgttacacctatccaacctctacttacctttttatttgtctttaactgctctataatacgatctgccatactacttgggatagcgaaaccaataccttgcccacttgccataatagctgtgttaatgcctacaacttgtcctgacatattgattaatggaccaccactattcccaggattgatagatgcatcagtttgtaaaaagttatcaaatggtccagcatgaatatcacgtcctttagcacttaatatacctgctgtaactgtatggcctaacccaaaaggattaccaatagctagcacccattcaccaacttccatagtatctgaatttccaaatataagataaggtaatgagtctttacttttaacttttaataaagcaagatctgtttcttcatctctacctatcacttctgcaggtagtgattcttctttgcctgaggtaccttcaagatttactctaacagaatctgctccttctatcacatgattattggtaacaatatatccatctgaagaaatgataaaaccagttcctaatgaacgttgtttatgtatctgactatcaggccctttaggttcaaattgttcaaaaaagcgttcaaaacctgggggaagaccacgaaacatttccatagggaactctgtacgaccacgaggaatttttttttctgtactaatattgacaacagctttactagcatcttttacaaggggtacaaagtttggtaaggcactttctgcaattgttggaaccacagttataataaacataagagttatgcatattatcacctttaacttacaaaacatataactctccttaaaactatcaaccttgaataattagggattaaaaataagataaacgtatattataaatctagctcttatgaaatattatcaaggatactaacttgcctcaatatttgagtatataaatataacttatgataatgataacaaaaaatatgtaacaaactccatttttataatcagctacataaaaatggttaaaaaaattgttttaataaatcctcaccacgttcaatagtattcacctcattatctttactatcaaaatattctggaactgtacctacataaaaaggtaatacaacactattggtactattagcagttgctctattccctgtctgagtatctattgaagcaaaagtaatcccatcaggaacaggaaagtcactttcaggatattttttcaatactacttttgaatattctgtaaaaataggaagagcagcaacagcacctgtgccatctttacctaatgtctgtggatgatcattaccaacataaacacctgtaacaagatagggtgtaaatccaataaaccatgcatcatgctccccatttgtagttcctgtctttcctgctagaggacgctcaagtacttttgcttttcttgctgtaccaatattaacaacattttttaatagtgaagccataatatacgcattctgtggtgaaataacaggatgttgttctatttcctggcggtaaataacagtattattagaatctttaatagaaagaataaaccgtggcgtggctaagttaccaccatttgcaaatgctgtataggcatttacaagacgaataggagttacttcaactgcacctaaactaatagaaaaaaattcagggaaattaccattaaatcctaaagccttagctctttcaataacagcaggtaatcctatagactgtgcaattcttactgtacataaatttcttgaaagtgcaagagcattgctaaataacattggtcctttaaaatttttttcgtaattacctggtctccaaatatccccactttccataaattctactataggtgcatcaagcaccatagttgcagatgtataatcatgatcaagtgctgcagagtatacaattggcttaaatgcagaacctggttgcctcattgcctgtacagctctattaaattggctctttccaaactcataaccaccaatcatagctatcacatcgcctgtatttggctctatagaaattaatgctccttggatttgtggtaactgttgaagagctaaaggaataggtttagaagtatctagtgttttagaactatacctatgtgtagagtctgggccaactccagatacccatataatatctccaggatttaaaacactacgtgcatctttgataggagcacaataagctgatcgaacttctggattaggtttacgtgcccaacccatagtctctacactaacaaaccctttataaatgctactaaggaatacttctgcaccttcttgactaactttactaacaattgctttagcccatgcaccaccatcaagtttttcaggtgtaaatgtagcattttctaggtaatgctgaatcattgttgaagaaatgtgctcaataggtcctttccaaccttgtcgtttactaaaattttcaagtccatttcttaaaacatcatatgccacaagttgtgcctgaggatccattgctgtctggatagtaaacccaagttcataaagtgcatcttctccatataaagggagcacaattccatactgagaaatattttctttactaagaaaggaaacaagctgcttacggacttcttccatataccaacttgattcagctcctaacccttctttcattgaagaaaaatatagtggttcttgaagagcctcctcatattcagcctgggtaatccaaccaacatcatgtagcctacgaagagcataacgttgtctaatttttgcagcctcaggatctttatagggattataccgagaaggtgcttgtggaagtcctgcaagaagagcacattcagctaatgaaagatctttagcatgcttagcaaaataagtccttgcggctgcctcaaccccataagaatgagcacctaaaaatgtctgatttaagtatatagttaaaatttcatctttagaaagatatttctctagacggtaggcaagaattgcctcttttatcttacgctcataacttctttcagggcttaacaaaagacgtttaatgacttgttgagtaatcgtacttccaccttggcgtgttgtccctgattgaagatttattaaaaaagcccggataatagcaagcggattaacaccttcatgttcataaaactcagcatcttctgcagctaaaaatgccttaggcaaaaaaggagacatttcgcttaatgggataagaaaacgcttctctcgatatatatacccaataagtgttccatctctagcaagaactgttgttactaaagctggtctatagtcattaagctttgtaatattaggaagatctctactaacccaaaaataaagacctattagtcctataatagatagtaaaataataccaaaacaaaaaataacaatattcagaaaaaactttttcatgtcaaagctgataacctgtttcatccttgacgtaaagaaaaagtagtaacatatcaaaataaataattataagttgaaatactattaatatataatacatactaagattacaatagattaaaaaatacaaaattaacaataaaatacatattaacgctttagttcaagtgctttttgtagcattgtgtctgctgttgtaacagatttactattcatctgaaaaccacgttgaataataatcatattaaccatttctctgctcatgtctacgttagaagtctcaagttgattcacactaagttttccatagttagatgttcctggcaatccaaactctggcccacctgagtcaagtgttgcggaataatggttattcccttctcgtcttaatccatcctcacttgtaaagcgtgctaaaggaatattataaaaatcaacaacctgactattactatacttaccttgtaatttcccttcagaggtaattgtgacatctactagatctccctgaggataaccatcttggctatatcttcttgttgaagatgatccatttcttgctgtagaattaccgctggatgtttgtattggcatcattgatggcaatttcccaatatctgtacctatggcagcagcggatgctggagctcctgcccacatattctgttggcttttaattccaaagtctaatgttaaaggctgtattcctgcaccaacaaaatttgctgaaaactgtggtaaaccattgactaatggtgctggttgccatgcatttaaatcttttgttgcagagccagtaggagtaaaagctgtcatattttttaattcgccattacttgaaaatgtcatagttccagacattaagagacctgcactatctgttcctgatgcagcacttccatcttcactaggattcatagctacaaggtattcaaatgttttacttcctgttgaagagggtgctccatcaaaatatacagttatatcgtgagaatttccttgttgatcatatactctcataggttgtgcatatgagtagtttgatgtagaaataggaggtgttccatttcctttccagctctcaagaagtgcaaagtatggattagcttcactttgtgttttatctgtactatcaccaaggtttaccacagcgtttaatgctgtacttgtttttgcaggagactttgctactgtaggatcattaaagtctaactgaattggttcaagggtttccttttttatgttaggattattagatattcttgagcccattaaagtaaatccgctaggatcatttaaaaaaccatcttgagtaaaacgaaaattccctgctcgtgtatagtgtactttatcctctaatgtaacctgaaaaaaaccttttccaccaatagcaagatctgttacactattgccaggttcaaaagcaccctgtgtaaaaattgtgcgaacacttccaacctgtgctcccataccagcctggtttggcccctgacttccagtagaacctattgctaaatcttgactaaacaggtcttgaaacactacctgttgctgcttatacccaatggtatttgcgttagcaatattattggagacagtacccaaccctgtactatgggttttcatacctgttgcaccaataaacaaactccccatcatgataacatctcctaaaaatagtttcatgcggcaaaatgtacctacacatctctatataaagcagaagccatgccaagaaatttttgcctattatatacttatctataactttttgtaataaaagatttatttttaacttgtttaccaactatctctactttaacaatgatacagaaaatacacttattattagtagtaacaaggctaataaccaagtaaaaaatcaaataaaatttttataaaactttatgaaaggtatgataagtatctacttgcgaactgtatatataatacgttattaacacgcagttaaaaatatattgaattattctttcattcttaataactcgttaggtatcttactatgcaagttgtaacaaacacagacctcaaagaatttcctctctatagtcgtggtaaagtccgtgatatttactctattgatcaaaatacccttcttattataacaacagatagaatgtctgcttttgatgttattttacaagaacctattccttataaaggtatcatcctcaaccaacttactctattttggatgaaaaaatttcaacaccttgttccaaatcatataatagaaagcaatgtagataactttcccagcaaccttgagccatataaaaatttacttgaaggacgatctgttttagtaaaaaaaacaacgccattgcctattgaatgtattgtccgtgggtatatctctggatctggctggaaagattatcttacaactaattctatttgtggttatcctcttcctccaggactaaaagagtctgaaaaattagcaacagcactgtttacaccatcaacaaaagcagatttgggtcaacatgatgaaaatatttcaatagaaacaacagagcatctcttagggaaagatactactacattagtagcttcactttctctccttatgtttaatgaagcttcggtttgggctgaagatcgtgggattatcattgctgacacaaaatttgaatttggtatacttgatggacaagtcatactaatagatgaagtactcacaccagactcatcacgtttttggcctacaaaaaactatataccaggtaaaagtcaaccaagttttgataaacaatatctaagagactggcttgaaacacagctatggaataaaacatcccctgcccccaacctacctaaagatgttattcaaacaacctatgataaataccatgaagcctatactattttgacaggagaaaatattggtatataaatgcgttgcaaatataaaatactatgagtaagaggtccctatgctcttaaaaaataaaaaatgccttattcttggaattgctaataacaaaagtattgcctatggaattgcttcatcttttaaagaacatggtgctaagttagcatttaactatgttaatgatgctatccaaaaacgtgtggaacctatttcacaggagttaaatggagattttatcttccaatgtgatgttagtaaagatgatgaaattaaagaagctgtaaaactggttcaaaaagaatgggggcatattgatgtccttgttcattctgtagcttttgctaacagagaagatttaacaaaacgttttattgaaacatcacgtgatggttttcacttagccttagatatttctacctattctcttatcacattatgtcatgcatttgaaccactctttgtccatggctcttctgttcttacgatgacatattatggtgctcaaaaagtaattcctcattataatgtaatgggtgtagctaaagctgctcttgaatcttctgtacgatacttatctgtcgagttaggcgaaaaaaacatccgtattaatgctatcagtgcaggtcctattaaaacattagctgcctctggtatttctgacttcaaaaaaatttttaatcatatagaagaacattcaccattaaaacgtaatgtaactatcgaagatgtaggtaaatctgctgtttttttagcttcagacctatcatcaggagtaacaggtgaaattctttttgttgatgctggctacaataatttaggtatttaacaatacatgctttatacaacatattgtgagttacaatagccataacacatttatattctatataataacagtagaataataatagaatattttttatgacctattgtatctatacaatagtaaatagattaatacatataagactatattctttttgagaacaacttaaaggagcggttatggctttagttacaaaagaagaagtacttcaataccatagtgaaccccgaccaggtaaacttgaagtatttcctataaaaccatgtaaaacacaaaaagatctctctatggcttatagtcctggtgtagcagaagcctgcctagctatttctgaagataaagatacttcatttctatacacagataaagcaaacttagttggaatcatttctaatggttcagctgtattaggacttgggaatattggtccagaagctgcaaaacctgttatggaaggaaaagctatcctttttaaacaatttgctgatatagattgttatgatatcgaaattaaagcaacagagattgatcatatttgtgaagttattaaagcacttgaaccaacatttggtgcaattaaccttgaagatattaaatcaccagaatgctttgccattgaagagcgactaaaaaatgaaatgaatatccctatatttcatgatgatcaacatggaactgcaattatttcatctgcagcacttcttaatgcattagaaattgcaaacaagaaaattgaagatatccgtatggtcatttctggtgcaggagcagctgctattggatgtggacgtctgtttaaaattcttggtgttactcctgaaaatattgcaatgtttgactctgaaggtcatattaatgtctctcgaacaaaccttaaccaagaaaaaaaagaatttgctacacaaaaaacatatacaaccattagtgaagcaatagatggtgcagactgctttattggttgctctgttcctggagtcatcactgaaagaatggttgaaacaatggctaaaacacctatcatttttgcatgtgcaaatcctgttcctgaaattggttacaatgaagtaaaatcaatacgacctgacgctatcatggctacaggacgctctgattttcctaatcaagtcaacaatgtccttggattcccttttatttttcgtggagcaatagatacatatgcaacaacaattaatacagaaatgaagattgctgcagcttatgccattgcagcacttgccaaagaatctgtacctgaatccatatgtatggcttataatgttaaaaatcttaaatttggccctgactatatcattccaaaagctcttgatctacgtctacttgagtgggttgctccagctgtagctcaagctgctatagcatctggggttgcccgtaaagaacttgatattgccaattatgcattaaccctacataaacgtctatctgcagcacataagcgtcaagaattacttcttaactcatatggcttttatagttgaaaactaatataacccactctaactaatgtactaatgcttaatttattcattctatgtaatcaaagataaacaagttacttttttattgttataattatatcttgacaaagatatataaagacatctaaaaagttcctaacttaaccttgtctattcaattgagaatagaccataagtccataaggggattttttatcatgagaaaatttgaaacattattacttttatctccagaactttctccagatgcacgtgaagcactactagtaaagcttgttagtattattgaaaaaaataaaggacaatttactgtaaatcactggggtatgagagatcttgcttatcctgtacaaaaacacatgcgtgggtattacgttcttcttgaatatacaacgtatccaaatattatagaagaattagagcgtattatacgcattactaatggaatatttaaattcatgacgattaaacttgaagaacacattgaagaaaaacaactcgaggaggtagtataatatgacttttaagaaaaaatttgctcctcgtcgtaaattctgtcgtttttgttcagataaagagcttcctttaaattataaacgacctgatatattaagagactatattacagaacgaggaaaaattattgctcgtcgtattacaggaacttgtgcaaaacatcaacgtttgctttccacagagattaaacgtgctcgacaaatggcactacttttctttacatctagtcactcttctgatgtaaaaagaaagagtaatatttaggagactaactatgaaagtcattttacgttctgatgtggaaaacttaggccgtcttggagatattgttacagtaaaatcaggatatgggcgaaactacttattaccccaaggtcttgctatgcttgtaacaccaggaaacatgaaagtatttgaattagaatttaaaaagctacaagaacgaatgaatgatatacgttctaaagcagatgaattagctaaacgtatttcaggattaattgttactgtactcatgcgtgctggtgataatgataaactttatggctctgttactacaagcattattggtcatgcactagcagaacaaggtatagatattgatcgacgccgtattttgcttgatgcacctattcgtacacttggacaacatactgtacgcgtacggctacatgctgatgttattgcagaatttattgtaaatgtagcctctgaagaaaaactgtatgacgatactccagacagaaccgaaacagaagaatctacaaaagaactccaagaagaacacgcagagtaactcttcatctcttaatgtaaaaaataagaatgattcttccgtaaatcatgtatcacatgatttgcttcgtagagttcctccgcataatgttgaggctgaacaagcagttcttggtggcatttttttacgtaatactgtttttcatacattaatagatattgttagagctgaagatttttatattcccagccatcaaattctttacacaactttttgtgagttatatagaaaaagtgcacctattgacctagtctctgtagcagcttttctaaatgaccaagggttgcttgaacaagttggtggtgcttcctatttagcagaattagcacaaacagtagttagtggtgctaatgcagaatattatgcaacaatagtaagagataaatctcttcatcgtactcttattaatgcctgttcaacaattataacaaactgttttgatccttcttgtaatgtagattcgcttcttgatgagtcagaacaaactattttttctatctcagagcgcacggtaggaaaagcatttaaaagctctaaagatcttatttctaatgtctttcaagaacttgaaaaacggtttgaacgtaaagagcaagttactggaatcacaacaggctataataggcttgataaactcacagctggtctgcaaccttcagatcttattattgttgctgcacgtccatctatgggaaaaactgcctttagtttaaatatggctatgcgttctgctatccagcaaggtactcctgttgctatttactcacttgaaatgtctatgaatcaacttatgatgagaatgttatgtgcatggggtaaagttgatctttctcatttaagacatggatatctaaatagtgatgagtggagtagactttatcatgctgcagatgttctaggacaagcgcctatatttattgatgatacaccagcactatctcctcttgagttacgtgcaagaactcgtagattgaaaatagaatcagatgttggtcttgttgttattgattatcttcaacttatgcgtggtaataaacgtactgattctcgtgaacaagaaatttcagaaatttcacgctcacttaaatcattagcaaaagaaatcaatattcctgtggtagcattgtcacaattaaatcgtaaacttgaagatcggacagataaacgacctcaactctctgacttacgtgaatcaggagctattgagcaagatgcagatgtcatcatgtttatttatagagatgaagtctaccataaacaacaagataatgctaaaaaaggtacggcagaaattattataggtaaacaacgtaatggacctattggaacagctacacttgcttaccttgcaaattacactgcatttgaggacttagagcctggtctttcggcttcaccttctgaaacttatagcaacatagcttaattctataagttacccatcataatttaaaagtatttggttagtattagttattaaacaaactggagccttacaatatcttaaattaattaaaaaatgttaactgactaacctatatgataatatataaaacttgattaacttaaaaactaattaacatatataatataattcatttagataaataaattatcactcattttttgatggatatgcatcctactactctatcctattttaactaaccaaattacaatttatttatttatccataaactaagattagttgcaaactcagtttcagtatatgttggtgtattgtacatacctgcagataacctttgacgtgaagcttctgctaaaataatagctgctgcaacagaaacattaaaactttgaaccataccatacataggaatataaagttcactgtcaactaatcctgtaagttctggagggacgccagcatgttcattacccataataatagctgttgaaccagtaaaattatgtgataataatggttgagcttgtgacgtacaacttgtagcaattactttatagttatcctcttttaacattctaataagtttattagcagactgatggtagatagtttttacccacttttttgctgaagcagaacttttactacctaactttgggaaaggtgtatctgtgtaataaagatgtattgtatcaatgccaaaagcatctgcactacgataaatagcagatacgttatgtggatcatgtatatttgctaatacaagtgtcaaatttttttgtcgtaacgaaaggacatgtttaatttttgctaatcgttctgaagtaatattttttcccacatattttctcgcttaaaataaattgcctactcaacatacaaagtattttttaggaaatagctatacgttgttgttctaatgcattaatttctaattcaagtttttcaagcttatctataattctgtctgtttgatcttttacttcactaaattgcttaagaagttttgctgtttctattccacttccatgccctgcaggagtggctaatagttgttcaagattatgctgtttttctaataaaatagaaagctcttcttcaagacgtttgtaagctatttgctttggctttatcgtattatacagttcatttctctttttagcttgttctctttttaaactttttagttcatcacgactataactaataacgctattttttttatttttttgggtaagacaatttttttgattatcctgagtttcaactattgttacttgctttaacccctgttttctagcttcatcatactgtaaaaaaccttgctcatatcgagtaagtccttcagaagaaagagcccaagcttcgtctgttacattagaacataaataacgatcatgagctacaacaagaagagtaccactaaaattactaagtgcattaacaagtgcttcacgactctctaaatcaagatgatttgttggttcatcaagaactaaaaagtttgctttattaagaaaaagagacgcaagtacaagcctagccttttccccaccagaaagcatttgaatagtgcgatcaaaatatccttgtccaagaagaaataatcctagaacactcataagttcttcttctgtcattttaggatcagaaagtctccttatttctccaaggactgtacctgaagtatttagtatttctgtctgatgttggctataataacctaaccgtacccctgatcctagggttagagaacctcctgtagattttagttgtcctgcaataatcttgagcaatgttgattttccacagccattaggaccaacaagtgcaatacgttgaccatttaaaagactaaacgtaagagaaggccataattgacgaccatctggaaaagaaaatgataatgctgctgcagaaagaataactttatcagccttaagaggggttggccatataaacttaagctcttttcgcttgatttcaggtttatattcttcaagctcctgttcaagcttttttgccatcttttgccgagacgatgcttggcgtgcctttgtagccttagcaccaaaccttctcacaaattccattttcctttcaatttcatctgtaatacgttgtgtttctcgtgctttttgttcttcaatttcttcacgtaacaccataaattgtgaaaatgtgagtttccgaaaaactggcttcaatccaccaaggtataaaatatgtgtaccaacattatccatgaaaaccctatcatgagctacaaatatgagtatccctttatattctcttaaaaactcttcaagccactcaacagattcaatatcaagatgatttgttggttcatctaataaaagaacatctgcaccagcaactaaaactctagctaactttgccctttctctccaaccaccagacagtttagaaagtggtaaatcaaacatattatcagtaaaacctaaaccagaaagaatctcttttgctttatattcaggatgatatccatatagagtttcaagctctgtatgttttaaacttagctctgataacttctttgaatcatttgcttgaatagcttcttcccatgtagcccaaaagtcatgccaatcaggtagaacttcaagaacccatgtaagtaaagaaacatccagagcactaggagctaattcttgctctacatatcctatacgagttccttttggaataatcactcttccagaatcaggtatatcaacttcagcaataatacgtaataacgtagacttaccacatccatttggaccagaaacacataaccgaataccagaatcaatatctaacgaaaaatctgaaaagatatcttgtccaccaaaagacttagaaaaattttgaatagtaattttcatgtattattcatctatatgttgaacgtcagctttcattctcttgttacgagcagcctcttgttttcgctcacgggttcctaatattttatatttattccaagaagaagaatgctcttgatgacgtgcaaaaataagaaatcctgtatgagctatcattctatcttcaggtctaattcgatcaataataggcttccaatgacgaatcaaaatttcacaaatctctatattatcaaatggaccattatctaaaccaagtaaaagttcatttatttggtttgtagtaggtacaaaaaaagctaacgatgctccaggagatactgccttaggaataaatgttaggtattcccagggtgttctcacatcaagaaataaggcatcagcccctgttacctgaccaaaaccttctgatatatcttgatgatgcatagttacattatctcctaatccagcccattgtaaattatgctttgcaagagtataaaattcttctcgtgcctcaaaggtgtgtacatgcccagttgggcctgaaaaccatgataatgccatagttaaacttcctgaacctgtgcctgcctcaataactgttcttcctggcccaacaccaagacgtatacaaatataacttatatcttttggataaagcacttgtgtttgtcttttagtatttctaataatatcattaatagtaggtcgttgaatgcaacagggtgtaccaagtgtagtaaaaatttcagtcccatatgatgcatgtacaatgtcatccaccttaagaatgccatcttgtgtatgtatatcctgatttttttcaattcgataaagtttagatttacctcttggtgttataatacaaacaagatctccatatgctggcatataatttccttttaatacttactatataaaatttaattctactatgtagtcatacaaggtataaaacaagttcctagaatatataaagccttataccttgctaataaggcttaacaatactatcttaaaaaattatttccattctaagtagtgaggggaaaattgtgaagaaattttttattatactatttgttattattattctacttatatcaggtatcgccatattcatatataccaataaagataaaattacgttagctatttcaaaggctgttgagtctgccacaggacaaccactttacacagatagtataccaagtctttcttttttccccacccctgggattgaacttggaaaatcctcttggggaaaccctgatactaatgaaatttctgtagagctaataaagtgtgtctttagattttctctcttaaaattatttactggtactattgctattgatgaaatattttttgaacaaccttccattattatacaaaagaaaaatgcacaaaataaaaaaatacaatctacagctgcagtaacttcaactaatgccattaatcctcaagaagataaaaaagcatcctttcaacttccagaaataagtatttcctctgtcaccataaaagatgggatgttaaaattttttgatggacgtaaacagataatacttaccggactacaattaactgcaaaaaatatttatcctcaaagcacaggtaaaatttctatacatactcaagcgttatttcaaccagaaaatatttcctttgtaacagaagggaatgtatcaattattcttgataaaaatatactttctatagaacatataaaatttattattaatcctaaaactggattaacagtctcaactcccataactatagaaggaaatggacgctacctttttgataaaaatttgttagaaaaatcagatatacaagtaaaactagatcaatttaaaataaatgctaatggttcgttagaacttaataaacttcaaggaacagcagtaattaatgcgtctggttcattaaaaaaacttgctagcaccttaggaatgatgcttatcactcctgaaacaaaaatttttgagaacttctctgctcaaagtaaagtacaagttaatggacaatatattcaactaacagatctcaaaattatgcttgatgatagccaagttaccggaaagctagctctaaatcttcctaataaactttctggaaatctttccctaacaactattaatcttgatcaatacctacctatatcttttgctaaacatacaccagtaacaaaaaatctaatacaaacatcatctgtaactactgctcaacatactataaaaaacactcaacaacaaacaatctcttcttcacttccaacattagatcttaagttaactgctgatagtattattatatctaaattacatatagaaaaattaaatagtcaactacatggtaatccatcaaattatgtccttgatccatgtacttttattttttacgaaagtcctatttctgtaaaaggaaaaggaaatcttactgcatctaacccaagatatgaagcaacaattacaggctcacatattaatcttacatcccttcttagtgatatttctaaaacagctataatcaaaaaaggtactgttgatctgtctgcagaaataacaaccacaggatcaaatagtatacagttaaagcaaacattaaatggtaaagccactattgaaggaaaagatattaatattcaatttggtgcattacctgtccaaagcccagaacttactcggatatcacaacaacccttcacagaacttaatggaaaattaaaagctgttaatggaactattaatatagaacaatttattcttaaaggaactccagttgctgcagcagcaaatggttcaattttacttcctaataacactatgaaaattaatgttgatattgctgtaaaagatactgttattccacttcatatatatggtgacttatcaaacccatcatatcgagttgaccctgcaagactattacaaggtgctataacaaagatacttaataaaaaagaaaaggatatttttgataagcttcctttaccccaaaatgcaaaagagtctattcaaaatacagcagaaaaagtctttaacaaaattttcggccgataatataactttttaaacattgcatcataataaaaaaagagttgcaagaccaagaaaaataaaaaaaccaaaactatctgttatagctgtgagaaaaatactagaagcttgagcaggatcacgccctatataacggaagaaaagaggaatagctccccctgcaagggatcctgcaaccatatccgtcataagagcaccacccattacacaacccaatacaacattttgtgtcatccacattacaataactgaaacaaaaagccccataattaaccctgaagtaatacctattttaccttctcgaaaaacagcaagccatgctcttttaacttcaaaacgttctgttgcaagttgacgaatcataacagctaatgcctgctgacctgtattacctgcttggttagcaaccataggcattaagactgccaaaatagccatatgtgcaatcgaaccctcaaataaataaacaacaaatgcagacaatgcagaagttaacatattaacaataagccaaggtaatcgcataaaaacagatacataccatggggtatctacggtttcatcctggcctgcccctaccattcctaaaagatcagaacttgcttcatcttgaatgatatcaataatatcatcatatgtagcaacaccaagaagatggccttcatagtcaataacaggtatagccatcaagttataatgactaatttccttagcaacatcatgtttatcagtgtcataataagcaacaataagatcttgatgctttaaagcatgctgtaatacagttccaggttttaataacattaaatcccttaaagaaagaacaccaacaagtctactttcttcatcaataacatatgcataataaataatttctttatactctatagtagtacgaatttgtgtaatagcttcatcaacagtaatgtcttgtttaaacatagacacttctgtattcataatcccgcctgctgtatttgggtcaaatgataacagcttgcgaagttcttctgcatctttttcaacaaggttatctaataatgcatccctatgctccttatctatttcatcaagaacatctgttgcatcatcaggagacatttctgaaataattttagctgcatctgcaggatcaagatgttctaatatatctccagctacatcctcactcaactctgcaagagcttctgctgcttcctctacaggaagattttgtactaaagaaagttgtttctcagtagagagtgtttctaagtattcagctatatctgctggatgtataaagtctttattattctttaaatgatttaatgaaattgctactgctgtataatcagttagtcgagaaatattctccctagttaaactatgtggacgtattttatgagacaatttcatattactctcagataataaacttaatcttttagggcatccaaaactgcttgacgaaaattgccatgatacttaattttaatgattcttattaactataaaaagtactattatagtttcaattcttaatctgtttctaagcaaagttagggtatatgatccaacttcctatccggcaagaaaaatttttataaatataatctctagtcttaattataagtaaaaaaattatatgcattgcccaacattttcaaaatactttcaaggtaaaccttataatcttcttataacaatgctcaaattagctcttgaagaagacgggatagattttacttcaaaaggaatattttcttccacagaacaaatccatacacaaattattgctaaagaacagacatgtgtttcaggactgcctgttatccctattattatgcaattatcttctcttactcataatgactatgtattaaatatccttgtagatgaaggtcaagaagttcctataaatacacctatagcagagattattggccctgcctttactatactccaaacagaaaggactatactgaattttattagtcatctctctgggatcacaactactactaaaaaatatgttaatgctcttaaaggctctgatattatactattagatactcgcaagactctgcctggattacgttatccagataaatatgctgttctgtgtggtggtggcatgaatcatagatgtaatctagaagaattattactaataaaggacaaccatattgataaagctggttcattaacaaatgcagttaaatcattacgtaacacatataacccttgtccgcctattgaagtagaatgtcgaaaccatagtgaagtcattgaagctgttgaatgccaagttaaccgtattatgcttgataatatgtctatagatactctttgctcatcacttatggttatccctaaatctattcaagtagaagtaagtggaggtattactcttaataatctcaaaaatattgtaactagccaatataagcctcactatgtctctgtaggatgtattacaaactctgcatcagctgctgattttagcatgcgtgttataagggagaaaagggtatgagtcgctttttgaataaagaagaaaaaagtaaacatataacaagcctaaagtcatcacttggaaatcaagtttctatattaggacatcattatcaagaacaaggagttattgatcactgtgactacacaggtgactctcttgagctagctcaacgtattgctcatttggactcagaacatattgttttttgtggtgtttattttatggctgaatctgcagcattacttgcaaaagaagaacaatctgtttaccttcctgaacctgcagccaattgcgttatgtctcttatgagccctgcatatcttatagaacgactatttaaaaaacttactgcttctggaagaaaacttattcctgttgcttatgttaatactgaagtcgatgtcaaagctattgttggaaaatatggtggagcgacttgcacttcctctagtgctgataaagtattaaaatgggctctaaatgaaggagatggtgttttttttcttcctgataaaaatttagcatataatactgcaaaaaatataggtattcctaaaaaaaacttacatattcttgatatccgaaaaaaaggggatgttgcagatcttgaagcatctaaacaagccgatattattgtttggccaggactgtgtgccattcacgcacgattccttatgcaacatatccatttagcaagagaaaattatcctaattgtactattgtagtacatcctgaatgtacaccagaagttgtaaaggcttctgatgcagtaggttcaacatctttcattattaattatgctaaaaatgctcctgatggttctcatattgttattggaactgaaattaatcttgttagtcgtcttaaaaatgaacataaacatagaataaaaaccactccacttagagcaagtgcatgttcacatatggctaaatgtaaccctgataaactttataccacactacatagtattgctaataataatgcaacaccaatatcaattgaacaggaaactaaaacgtttgctcgtgcagcacttgaacgtatgatgcaaattattactgtatagaactatatcaaaaccaatgactctaagtaaatagtcaaggtattatttatgaatcaacaccgatattactctcaagtacttattattggtggtggcattgctggagtaactacagcacttgtcttagcagatgcaggatttgaaatcacacttattgttcctagtaaagaacttgatggtggtaattctcagcttgctcaaggaggtattgttttccattcacaagatgataacaaacagcttgaaaatgatatcctcaatgcaggccatcaacataactatttaaaagctgtacgtttcctttgtaaaaaaggaccagaagtagttcatcgtctattaatagaacgtataggtattccatttgaaatcgataaacagaaaggaacatggagtgttactcgtgaaggaggacatagctctgctcggattattcattgtgctgatcatacaggaaaatctattatggaaggtcttctaaaagaaatacaaaaaacttctaatattcaaatccttactcatagaacagctatagaccttattacaacacatcatcatgcaaaactgaaagaatatcgttataatcctgagaatcagtgtttaggagcatatgtttttaacgaacagacaaatgaagtagaaacactacttgcagattggacagtattagcaacaggaggaataggacaaatatatcttcatactacaaatacagaggcttctataggctctggtattgctatggcgcatcgtgcaagtgttaaactcactgacttagaatatatacaatttcaccctactgctttatatagttgtaataaaacacaaaaatttttaattactgaagcattacgtggtgaaggtgcaaagcttacgaatacacaaggtaaagcatttatgaaaaaatatgatacacgtgctgaacttgcacctcgtgatatcgttgccagagcaattatggaagaattattacatactggagaacaatgtgtatacctagatctttcaaacgtatcacatgatattaccaaacgttttcctactatctataattattgttatcaacaaggtctttcaataaaaaattctcctatccctgttgttcctgcagcccattatttttgtggcgggattcttactgatacccaaggacaaacctctctttcaagattgtttgctgttggagaatgtagttgtacaggtgtacatggagctaatcgccttgcaagtacttcattacttgaagggttactatggggttatagcacaggattacatatttcccgaaaaaaaaataaaaagaactttttatctacacgtattatcaatgctattccaaattgggagtgtacaggtaatgaaaaaaatgatgatccagcacttattacacaagactggacttctatacgacacattatgtggaattatgtaggaatttgccgaacaggtagtcgactcaagagagcttttgaagaacttagggatctttcaagacatcttcatgatttttataaaaatactcctatttcaaaaccaattatagatctctttcatggtagtcaaactgcttatattataacccaaaaagcacttctcaacacaaaaagtataggttgtcactaccgtataaattaatgtaggattaagtataacctttagtttctctcatatctttttatgaatgtagacttatccttctagcatccctgcatactgaaataatgatcgaactacaattgtttgtaataactgtataataatcaagacaacaataggagataagtctaacccaccaacaagtgtaaaaggaagaaattttctaactttataaaaaactggctctgtaagggcataaaacatacgaacaatattattatatggatcaggtcttacccatgttaataatacagctataatgacaatccaaaagtacaaagaaagaataatatcaagaacccttgcaatacctaataaaatatttccaaaaacaaacatagtccctccaataaaatcttcctcaaatgttctataacccttaatatcttataattccctataaactctaaggaatatagctagtatccaataccatttttttacttattgataaagaccttgaagggcatcatataagtctgaaaatttctcaatatgtattgatgcagaaagagatgtattgcaataagctattaatggtatagaagcagcacgagctgctccttcatcagttaaactatctccaataaaagctactttagaaggttcagtattccatatttctagtattgttagaagtccttcaggatctggttttgcaggaaaaagatcagatgttataataggatcaaaaaatccatttaaatctaatgaaagtagcacatcatttattcctttggaaactcgatttgtattaataccaagttgtattcctctactttttaaccaatgtaataaattcatcaatcctggctctatcttaaggtgcggtaatacttcatttttataagaaaaacgttgtgttacttcttttagtttttctctatcttcatgtgcaataagaaagttcatagcatcttgcacagaagccatctgcacataatctgcttcttcttttgtcatattaggataaccaagctcttgaagtattttattaaaataacctacattaatacttttagaatcaataataacaccatcacagtcaaaaataattcctactataccctgaggaaatatattttttacttggttaaataacgagttattatatgacatataaatccttatcttaatgttatcttatataacaaatggaaacactttctttttaaaaagaacaggtgtaattacatagtaaaagatatatttaaatatagttagattaattccaaatccttgacctatagatattgaatagatattctatactgataattggaggcaatatgtatggtattggcatgcaagagctcttagtaattcttgtcatagcagttattatctttggcgctaaaaaactccctgagattgggggagggctaggaaaagctatacgcaactttaaacgttcaagttctgaacctgatgaaattgatatcacccctacgactaataaaactgataaagttgataatgataactagctaataataataataataataataatttatattatactatcatatagtaactctattcttatgctatacctacagtaaaaatatactataacttgcataggatacagtcaaagttatacattacaaccaattaaataaccttttccaactaccatgaatttgttctctttcagcttgtgactcttgtttcctgtataaaaaatatgctgctaacgatctttcttttgtatactcagacacactaggaacatcagaaaagttttctaaaataaaggtatatctcttccatgctggaccatacttacccatattccaaaatacattagcaatataaagttcatgttctaccataatcaatcgacaagctttcatttcatttacagcagcttcagcatagggagaatcagggaaagtttcctgaactctttgaaaatactcataagcttcttgtatagacgttgttggcctatcaatagaaataaaagtttttaaatttgacattccaatttgatataagacatatggaatatctggatgacgaggatgaagcgtctcaaattctttataagcttctacagcttcagcgtacttttcatcaaaaaaaagagcatcaccaagtgcacgctctgcttcaactgtatatggactaagtggataattatcttttaatttttcataatactctgctgcttgtgcataatgtttttcttccattgcatcttttgcattttcataaagttcttgtgctgtttgttcaggcctaggtactgcaaaataatcaattataccacaaccaggaagataaactaacattataactaatactacataacgaatatacatataaattaaacatccaattgttcaatatagctaaaggctgctgttgctgctgttgctccatcaccaacagctgtaaccacttgacgacattgctttgaacgtatgtcaccagcagcaaaaacacctggtaaatttgttctcatctcactatctgttaaaacaaaaccacttgcgtctaaagcaagttctgaaggtaaaaaatcactttttggctcataaccaataaagataaataaaccacttacttcaatctttgatatcacttgtgttttaacattttcaacttcaagagcttcaagctcactttcaccatgaagcatagtgatacggctatctaaaataagctttattttattagtagtagccattattttatcttgataatgtttatttgcacgaaatttatcacgacgatgtattaaatacaatttttttacaatacgagaaagatataacgcttcttcaagggctgtatttcctccaccaacaacggctacaacctgatcacgaaaaaagtttccatcacataatgcacaatatgaaacacctcgacctctaagctcgctttctctctgcaaccctaacattttaggggaagcacctgtacaaataataatacttttcccaataatgtctttttcaccgactgtaagcttattttcacctggagtatgaataaaagaagttacattatcattataacgagtaagtgtatatccgtcgagatgtgctgaaaaaaagtcagctaactcccaacctttaatacctaaagggaatccgggataatttgtaacctcttctgttttcagaagttgacctcctggggcaagcatttctattagtgctacagataatcctgaacgacataaatataatgcagcagttaaacctgcaggtccaccacctacgacaatactgtcgtattgcttcatgataacgccttttctttaagcatagtaataatacttgttttagagacagctcctgtaagttgctctaccacttcaccatttttaaagagaataagtgtaggaatagctttaataccatactgcccaggtgttatcgtattttcatctacattcaactttactacatgtatatcacttgcatactcaagagctatttcgtctataataggaccaatagcacgacatggcccacaccaaggagcccaaaaatctactaacactggtttattagattttaaaacaatagtatcaaaatttgtatctgtaacttgggcagccataggttcctccttaatagagaactatcatcttttaataaaaacaactgttatactttagaagctagttataaaaactgtcaagatgaaagcattactatgttataatttcattgatgatagtaaaattatactttcaccatgtcatctggaatatgttgtcctcttggaatagcagaaagatctaatctatgacaatatcctttctctgctaataactctccataataagctatcattactgcattatctgtacaaagcttttgttcaggtaacaatatttttttattataattgatagcaagattatgcatagcttgacggacaaaagaatttgcagctaaccctccagcaacaataatagtttttatctcattagtatatttttgaagtgctctttccatctttatatatagtgtttcagaaatcgcaagtaaataggaggaacaaacattataaagctcttctttaatggctactttactattatttgaacaataacgttgaccttcttcaataagttgaggatattgctttagatacattgcagcagacgtcttaagaccactaaagctgaaatctagttctgaattatgtatatatggtcgaggaaacaaatatggatctgggattccttgttgagctaatttatcaataataactccaccaggataaggtagccctaacatttttgcaaacttatcacaggcttcaccagcagcatcgtccaatgttcttgccaaaagaataaaaatatctggagcatctattttataaatgtgtgtatgacctccagaaacaaggagtcctaatgctggatactctataggttcctcaatagctgccacaaggagatgagcatgtagatgattaatacctattaaagtcttaccagatgctaatgctagaccttttgcaaaagctaacccaacaagtagtgctcccaataaacctggtccacgtgttacagcaataacgtctaagtcagctaaggtaaccttcgcatcttccataagtttatcatataatggtccaaggcacctataatgctctcgagatgcaagctcaggaacaacgccaccaaatagagcatgtaaaggtgcttgtgttcctaagatagaacctatacattttccattttcaacaagggcaacagcagtctcatcacaagatgtttcaattccaagacataacataagaataataaataatatgatgtaataattaaataaaatagtgaattaagatgattactagttaagaaataggaaaaaatatggtagattatatatagatatattacttatactttgcatagatgttagcaacagcctcaacatctttcttagatcctatgactagtggaactcggttatgtaaacttaatggtacataatccaaagttctataaaggccatcagttgcagcacctccagcattttcagctacaaaagcaagtggtgaagcttcacataaatagcgtagctttccatgcattttccccttacgattatcagatggatacatgaagactccaccataaagaagcgttctatgaaaatctgcgactaaagagccaacatatcttgctgatcgtactttttctttagaagatggctgcttaaaatacattacagcttcacgagtgggtgtatcccaataatcccaataaccttcgtttactgaatatataaaaccttcgtctggtattttaatatcagtatgtgaaagtaaaaattcaccaacactaggatctaatgtaaatccatgaacaccttgtccagcagtataaacaagcattgttgatgtaccatataaaaaatatccagcagcaatttgttctgaacctggctgtaatacttcatcaagttcaacatctccagttttaccaggcttacgacgtaatatagaaaaaatagtcccaacattaatatttacatcaatgttagaagagccatctaaaggatcaaatataaggatataatcaccacgagggaatgcagctgaaactttgatcaactctgcgtgttcctcagaagccatagcacataagacacctgagcgttccattctatacagaaggactttatctgcaaattcatctaacttttgtactttctctccctgtatattaatatcacctgtccccccaagtacatcaagtaatcctgctttatttacacttcgagaaataattttagctgataaaattaagtcatgaaataaagatgtaaaatgtcctgttgcttgaggagccctctgctgctgcaaaaggagatgttcggtcacagtaacttcagaagacatgtcttctcctaataaagacgacaaattaaattacacatacagattatgtaatggaatactacctattacgtaacagaacaaccccctgcttactcatattttaactgaattagctatggattttctgagttttctaataacgtattttgagcctctatttctgtattttcttgcaaatcaacaaggaaacactgattagtttcttcaaaaaactttccagatacaggtgttgcaaaaactatttcttgattacctataaagtgagataaccaaaaaaattctccattttggttagataccctaccactaaccgaattttttagtaatgattcccaattttctttagcaaggggggtatcttcaaatgaaaactgccctgaccataatacagcttctggagaaaagataactagagccttactatatggtgaatataatgataacttctctatgtcaaaatatacaacaaaaagtgctttcatatctgagtcaacatatacaggtacagaaaaaaatactttgggtccaatacttgtttcttgaactgctgctcgaatatcacgcaacatctttcctcttggcttagcctctataattttggctaaatcagatttttctaatagattctctggctcttgtgctattagttctccgtttggttcaataagaacaactccagataaccaaggaaatgtatttaataatgctataatactttcatcagatgggggtttgtctgagttttgaaggtaccgttgaagagcttcaagctgtgtatcaatacccatcattcttgaagctagaataacatctttttcatctaacttatcagtatctgagtaattaatacaagctggtttattaatatagctaccatagaacttttttgtccttttccatgaatttgaaacactctgaataccacaacctgtgataataattgttagtcccagacaaagaactataaaaatattacgggacattaataactcctgatccctagaatataaatttaaccttttgctcttttttcaagacgtgttactaaggcctctaacatagcaataacttcagcctgatgattgatattataactgttcgtagtagaactactaaaactagacgcattcctagcctgtgctaacatttcactaagctctacttttcttgcatgtaaagaaactatctcttcatgattagtagcttgagactctaattcttgataaatttttattgcacttacaatatctccttgttcagcaaggacttctgccattgaacgtgtacaaactggaaaagaatcatccttagatttagatactactgccatatcctccggacgatcaaaaaaaagctcttcactatcaccgacttcttctatgtcaactatatcattactagactgaactataccagatgactgtgagcttgtctgtagtgaggcaaatgactgtttagtgttagaataatgtgaaaactctgttgattttctttcagataatccttttaaaccataagataaaaattcttttagcgtcaaatctgggtataatacaagagctgatattaaacccatataaagaccaaagtcacctccaacctgtgcaccagattgtccccatgctgcccaaaaatcaggatattgattaaaaagattagcaattaaaatgctttcagatgagcaaccttccatatctccaatactatatagaagatgtattaaaaaaagtcttgcttcaagaaaatctggatgatgttcaagaccatgtcttagtgtctcaagtgcttttgtaacatctccagactcaaataaaagctttgcaagagggaaaaaaactctagagcttggttcttgttctaatatttcctgaaaccattcgattttgggggtcatttaggtgactcctaggacctaattaatctttttttattgtaattaaatataatatttcattatcttttacaaaatttagatgttgccttatcatcttttcaatataactgggattactatgcaataattgtatctcatgacttaaccttgcaatagtatcatcatatttctgtaactcttgagtaatagatttatgttgcaaaatcaattcccgataagaaataagactgtgagcaccccaaactagtctaactacaagtataatatttaataagatagctatcgataatactccaagctttaaaaaagctgatctactagatacactatacacacttgttatccttatttatattgccaatttttataaaaactatagaaatactttactcctgaaagtacagtgagaataagggctatgtaaagtaaaaaaagtcctatcttataaaaatctataccaaataaggaatagtgtaaaagaagaggaacaatagcgaccatttgaagaattgttttaatttttccataattatctgctgcaataataattccttcatctgctgcaatagctcttaggcctgtaacagcaagttcacgaccaatgataataatagttacccatgcaggaacccaatctaacttcacaaacataataagaatagaacaaataagaagtttatcagctaatgggtcaagaaatttaccaaaacttgtcaccatattttctttacgagctatatgaccatcaagataatctgtaacagaagcaatacagaaaagtaatgtagctaaaaaacaagttattggaccttcaaaataaagtaatactattatgggaataacaaaaacagtcctgactaaagtaatagagtttgctagattaagtattatcttcatccaaatcatcctctttcacattgctctgatgttttagcaaaactttttcctcaatcttcgttatcttaactctactaatatactagcaactattaacaacatattataataattaagttattacctactgttactaatacaaaaacagctttaatattaaatgagccttaatgcgtttaatgtagcttctgtaagctgcaaaaatttttctttagcttctgaatgttcttccatacaaacgactggcttcccacagtcagctgcaactactgttaaaggatcaagagatatttgacctaataaaagaagattttccttatcagcaagttgaacaccaccatcttttttaaaaatttcaatttcatgaccacagttaggacaagaaagaccactcatattttctacaatacctaaaataggtgctttaatttgacgtaaaaaatccaaagcttttcttacatctgccaaagatatttcttgtggagttgtaacaacaatacactttgcgtctggaatggaattaaggacagccatatgctcatctcctgttcctggaggggaatcaataagaagaaaatcaagatttccccaataaactccacttaaaaactgcctaatagctcctacttttttaggtcctttccaaacaatagctgtatcttctttttctaaaaaagaatccattgaaactacacatagcttatcattataaaaaacaggaatcatacgtccttgctcatcaacttcaacatgtcctgaaagacctaataaacgtgggatgctaggaccatgaagatcaacatccaaaataccaacacggaaacctttttgcataagagaaacagcaaggtttactgttacagagctcttaccaacaccaccttttccactcataataaaaagtttatgctgaatagtatctatatttttttttaattgcttatcttgcatagcaggtgaaagaggaatattcatagatagttatcctttaatttaaggatgttaatagtgtatggattcaatatataaaaaaatagaattccactagtatatatttaccaaccataatctcccacaaggtcaacaaaagcaacattaccaataactgttgatgtaacagtgttattctttttggttatacacatcaactcttgttctcgtgggttttgaccgacaggaataaccataactcctggatctcctagttgattaagtaatggtaaggggatatttggaccaccagcagtaacaataattctatcaaagggagcatgttcctcccaccctaaggtcccatcagaaaggcaagttctaatttttctatatcctaacaaaaaaaataattcttttgtttgaaaatacaactccctaacacgttctagactaaatacctcaagacctatattggctaagatagctgtctgataaccagaaccagtaccgatctcaaggacacttaaacctggagtcggctcaaggaggctagtcataatagcaacgatatatggacgagaaatagtttgcccataacctatagggaggggatagtcgtcatatgcacgactttgtaatgcttcaggaacaaataagtgtcgatgtacattacgcattgctgtaagaacataagagttagtaattcctctttgttcaagttgtgtaataaccatacgctcacgctgacgcctcaaatcgctagccaaaggaaaattattttttgatgtatggtatctcaacatttatccaaacttttttgaaaagaacctaaactaaatagtacaatatcaacctttaatacctaactcaatagttaattatagtagaatattaatgctatctatattttccttattgtttttatagaatcactatccattcttttataattttttttttactatgttagtatatagagttatcttaaccaaatctcttttctaactatcacttaacaaaatgttgcttattataatatttattactaaccagttacataacctatgttacttgctgatttgttttactctcatcatttttattttttaacttcacataatcttatatgaacacactgatagttgcttttctaaaaataataccataaaaattttaaaggaaataacagccagttactaagtcttatttaatcttttgagagtgtatatgtccaagacaaaacttcttgttataactataggaatagccagtattattcttgccgctgctacttacatttttttcaaaaacacagatccacctattatatctatgattcaacctacacaatatatttctccaagacaaccactaacacttactattacaagtaaatactcgcctctcaaacttattcaaattatagtgaaacaaaatgaatacacaaaaacacttatcaatcaacctatcatcaatggacaccttatagaaacagttgatatagactttaaaaaatcaggcctccaagatggaccttttgaattaatagttaaagcacaagactcgtcctactcaaactttgggaaagggaatatttctaacaaaacatgggatatgaactttgactctcaaccaccacaaattacaatccatagtcctaccccatcactccataaaggaagtgctacagctattgctttcactgtatctaagccagtagcagttataggggttcaacttgaagaaaaattttttccagcatttcagcaggctaatggaacgtattattgcttctttccattcccaattgagttttctccaaaaacatttaatccaaaactttttgcacaggatcttgcaggtaataaatcttatatatctgttcatgttcactcattagagcgctctttcaaaatagatacattaacaatcactgatacattcttagataaaaaaatgcctaactttgaacaaaattttcctgatactcaaacacaagttgaacgctatattaaagtgaatagtatactacgaatcgaaaatgaaaaaaaacttattgaaattagtaaaaaaacatcccctatgatgttatggtcagggaaattccatacactcccacgtgcagctgttaaagctacctttggtgaaaatcgaacatatatgtatcaaaatcagaagattgatcaacaatttcatatggggcttgaccttgcctcaacagcaaatgctcctatccctgctgcaaatgatggtatagtggtctatacaggcgacttgggaatatatgggaacattgttattattgatcatggattaggattacagacactatactctcacttaagtaaaattacagcaaaagaaggtgacgttgtaaaaaagggtgatctaataggctatactggcatgacaggactagctggaggtgatcatctacactttggttttcttgttggaggcattcaagtaaaccctattgattggcttgatccaaagtggattaaaaatactattataacccgactcaataataatgtataacctttatagaacattattctataagtaaaactaaagcttttctatagataagattagttgaaaaaaagtcctaataattattgacatattgtcttgacatatctttgttgttcattttactagttaacggctttctaaacttcgtaaataaacacacactaacagcggtctggggtgcccctatctaagaggtagtaaagacctgggttattgtggaagtaaaccccttaacgtttcaggagaatcttatggcttatgttagcatgaaacaaatgctagaaactggtgtccactttggtcatcaaactcgacgttggaatcctaaaatgcgtccttatatttttggagcccgtaatggtattcatatcatagatcttcaacagactgtaaaactttaccgtgctgctcatgataaaattgtagaaactgttgctgcaggtggaagtgttctctttgttgggactaaacgtcaagcacaagaagctattgcaactgaagctactcgagcaggacaatattatgtagctaatcgttggatgggcggaactcttactaacttctctacaatacaaaaaagtattgaacgtcttaaccgtcttgaaactatgttctctgatggctctgttaacagataccaaaaaaaagaaatattaactctcaaccgtgaaatggataaacttgagttaacacttggtggtattaaaaatatggaacgtctaccacaactcatttttatcattgatcctcatcgagaaaatattgctgtaaaagaaggtcgtaaactaggaattcctattatggctgtaaccgatacaaactgtgatccagatcttattgactatattattcctggaaatgatgatgcaatacgagctataaaactttttgttacagctatggctgacgcctgtattgagggtgaagctttacaaaaagatactaagaataaaaatcttgaggaagaattaaaacaaatagctacggctgaatgtaataaagaatctacctctatagagcaagagcttattatagcttctgaacaaacagaaacaaaagaaaataatattgaagaatcagtatcagaagtagttattactaatgagtctgaactcatcacagaataattttataatgccctggagatagattatgagtatcagtgcatcaatggtgaaaaccttacgtgaaagaactggcgcaggaatgatggattgtaagcaggctcttgaagaagcaaatggagatatggaaaaagctatcgactggttacgtcaacgaggcctctcaaaagcttcaaaaaaagctggaagagcaacaacagaaggtttaattggttgtcaagtacttcctggctcaacatctgctgtacttgttgaggtaatgtgtgaaacagattttgtctctcgagatgaagtctttaaaaaatttgttgatgacattgtttcgcaacttgtggcaaattttcataataatgatgttgatctgcttgatcaaccatctggaaataaaaatcttagtattagagatctgttaaatgaaactattgctactataggagaaaatattgtcattggccgatctataaagatggagttaacacctgggaaaaatggtatgattggacactatgtccatactaatgggaaaattgctgttttagtagaactagcaacagaaacaaaagaaacagcctcatcacctaagttccaagagttagcaaagaatatagctatgcaaattgctgcaacagcacctcttgctcttaattctgaaagccttgatcctttaaaaattgatcgtgaacgtgaagtatatcgtcaaaaagcactggaagaaggtaagccagaaaacatgatagaaaaaattgtagagggagctgtaaaaaaatatctaaaagaagtttgtttattggatcaaccatatattcgtgatgataaactttctatagctgaacttataaaaaaagtttccaatgaaattggagaacctatatctattatagagtttgttaggatccagctaggcgaagaatagctttaagaaataaaaagggggcgtttgcccccctttttatattataacttaggataaaaaaatattttctatagtattatatagttctaaacagagtctctatgcatactttttctaatgctcacgtccttatcacagggggtcttggatttattggttctaaccttgcgattcgtttagtaaaagaaggagctaaagtaactattattgatagtctcatgcctatgtatggagggactatgtataatattcatgacattgcagataaagttagaattaatatctctgatatacgtgatccctatagcataaaagcactagtaaaaaatcaagatattctatttaatcttgcaggccaaacaagccatatagactctatgattgatccatatacagaccttgatatcaactgcaaagcacaactttctatccttgaagcctgtaaaaataacaatccttctattcgtattatttttgcaggaactaggcaaatttatggaatacctcaatatcttcctgttgatgaaaaacatcctgtgtaccctgttgatgttaatggtatcaacaaaatagcaggggaatggtatcatatactgtataataatgtatatggaatcaaaacatgctcattacgtctaacaaatactattggtccacggatgcgtatccgtgatgatcgtcagacatttttagggatatggattaaaaacgtactttgtgggaagcctattgaagtgtggggaggagaacaattaagagactttttgtatgttgatgattgtattgaagcacttcttttagcggctaaaaatgaaaatacttttggaaaagttttaaatgtaggaggaaaagaaccagtctctttacaacatgttgcagaattacttattgaagttgtaggtgaaggaagttatataataaaagagtaccctatggatagaaaaaaaattgatattggtaactattatactgataatacattgatatctgatatcctaaactggaaacctacaacatctttacgtactgcactaaaaaagacaattgcttattataaacctattcttaatgaatacctttaattcatgactaacacttactctattcctcaagctaaccctagcatttacttccaacagtatcgtgaaactattataaaaaaaatagaggaagtacttaatagtggttgttatattaacggagagcaagttgaactttttgaaaagcaatttgcccaatattgtaatgtaaaacatgcagttggtgtagctaatggaaccgatgctatagaacttacacttcgtgcgttgaatattggccctggagatcttgtttttactgtttcacatacagccgtggctactgttgctgccattgagcgtacaggtgccctccctgtcttagtagatataacacaaaatacatatacaatgtgtcctgtaagtcttgctgaaacacttgcagctgcttataagggaaagtatcctgggaagccagcagccattatccctgtacatctttatggagaatgtgcagatatgaatgaaatacttcatgttgcaggacagttacctgttattgaagattgcgcacaggctcatggagctaaatataataataaaaatgctggtagtataggtattgcaggaacctttagtttctatccaacaaaaaatcttggaacacttggtgatggcggttgcatagtgacttctaacacactcctagcagaacaaataaaagcacttagagaatatggttggaaacaacgctatataagtaactttcctggaattaactctcgtcttgacgaacttcatgcaagtattcttaatatatttcttccagtactcaataaatctaatgaaatccgtagaaaaattgctaagatataccatgctgaactgcaaaaattaaaaaatatacaattaccattagaaaaacccgatagaacacatatatatcacttatatgttatccaagtagataatagggatatgttaaaaatattcttgagtaacaaaggaattactacaggtattcactacccgcaacccgttcataaacaaccagcatatatcaatagacttcccctttcaccacatggactacctgaaacagataaaatttttccaaaaatattgagccttcctctctatccaggcctttctgaaaatgatatattgtatattacatcaactatacaaaaatattttgattcatcctctcggaataactaaatgaatatgtcttcaactaaggatattcctcactcaaaaattaccccttctattacaggccttgttttaacatataatggagaaagactgcttgaacattgccttacttcacttcaattttgtaaccatatccttgtagtagattcttttagttctgatagaacaattgaaattgctaaatctcataatgtgcaatttatacaaaataaatggaatggtcctgttgcacaatttacttatgcttttccccttataaaaacagagtggatcataaccattgatcaagatgaaatatgctcccaagcacttcaaaatactattataacagctattcaaaatgtatctcaaaatgtatgtggtttttatgtcccacgacgttcatggtattatgatcgctttcttaaatatagtggttggtatccagactatcttcttagagtctttagaaaaaatggaatttatttttcccaacaaggtgttcatgaaaaaatacatcctcatacacataccaaaaaacttataggggatatccttcattatccatatagtagtttttatcaacacctcgaaaagattaatagttacgctcaatatggtgctgaagatttagctaaacaaaaaaaatctggtggaatttgtatagctatttctcatggattaggacgatttatacgaatatatatcctaaaaaaaggatttcttgatggaaaagcaggttttatcaatgcaattcatggagcatattatgcatttctaaaatatatcagaataaatgaaggaacttggggagctccatataatcatcaatagcctttagagagagttatattatgtctcaaatgacatacaaaagggtactacttaaactaagtggtgaatcacttgcaggaagacaacttactggtattgatccagatacagtggctgtactttgtaatgaactttcaagcgtaattgaattaggccttcaaatagcattagtcattggaggtggcaatatttttcgtggactatcagcttcagcaaaaggtatggatcgttcatcagctgattatatgggaatgcttgctactgtattaaatgccttagctattcaagatacactagaaaaaaaaggacaccctacacgtgttctttctgctattgctatgcaagaagtgtgtgaaccctatgtaagacggcgtgcaatgcgtcatcttgaaaaaggaagagttattatttgtgctgcaggtactgggaacccatattttactacagacacagctgctgcactaagatgtatggagcttaaatgtgatgctcttattaaagcaacaagagtagatggtgtatatgacaaagatcctttaaaatttgatgacgctgaaatgttcaaacatctaacctatgaagaaacattacgtcgtcatatcaaaataatggattctacagctatcacattagcacaagaaaataatatccctattattgtttgcaatatgtttaatggaagcattaaacgtgctatacttggtcaaaatccaggaactactgttgaaggagaataagaaatggatacagataaagataaaatatttctagatagtcaagagcgtatggtaaaagcaattacttcccttgaaaaagaatttacaaaacttcgtacaggaagggcttccacctctattgtagatactatcaaagttgattattatggaaccccaacacctataaatcagttagcatctattgctatccctgatagtagcagcatcactattcaaccatgggataaaactgcatttaaccctattgaaaaggctatccttaaatcagaattaggtcttactcctatcaatgatggaaaaattattcgtatcactttaccaccattaacagaagatcgacgcaaagatttagtaaaacttgctcgtaaatatggagaagatacaaaaattgctattagaaacattcgtcgtgatgctaatgaacaacttaaaagacttgaaaagaataagtttatatctgaagatgaattaaagggatttactgaagatatacaaaaaatgacagataactatataaaagaagtggaaactcactgtaaaactaaagaaaaagaaattatagaaatataaaaatacttataaagttataacgctcctttcaacatatgtctaatccaataccaaaacaccttccctctcatattgctattattatggatggcaatggtcgatgggcaaaacaacgtggtatgaatcgcacagagggtcataaacaaggtgcattaactgcaaaatcaattgtaacaacatgcagaaaaattggtatcaaatacttaaccctttatacattttctacagaaaattggggtagaccaaaagatgaaatacattttctctttcaattattggtttcatttttaaaacaagaagttcacttattagaagaaaacgatatttgtcttactgtatatggtgatctcacaaaactccctttactagcaaaaaaagccttacaacatgccattgcaagaactaaacattgtcaaagtatgactgtaaatttagcaattaactattctggacgcacagaattactatatgctgtaaaaaaaatgttaactgacagacttaacgccaacgatcttaatgaagaaatattccgcaactatctttactctaaacaacaacctgatccagatctgcttataagaacaagtggagaaaaaagattaagtaactatttaatatttcaaacagcttatagtgaacttttttttacaaatacactatggcctgacttcacagaagaagaactttatgccatcttaaaagaatataatgaacgaaaccgcagattcgggctcacacaggagcaactacaacaatgaatcaagaaaaaaactttccaaggatcattactggcggtcttcttttacttctcctatttactatgcttatcttatcaggagtttatatttttttactaacacttctatttacactccttgcaatgtgggaattctatgccatgttttggcatggagatgaaggcataggaggacgtttgatctcccttcttatgggaggaatcattctcacaacaggatggcttagccaggaagcattacttcctatcattggtatttcttttatttttattacagtttacactcttatcactagttcacatagtactgctctttatttcaaacaagttggtattcttctttttggtattttctatatacctatccttcttgttcctattctttggtgtacacctttggaacaattctttcttatttgtattgtagctatttctgatagtgcagcttactttgttggtcttacttatggtaaccataaaatttggcctaaaattagcccccgaaaaagtattgaaggaagcgcagcaggtcttattgcatgcattattatatcaagtatattaggagttattacaggtaaagcaaatatactttcatttattattctcacttctatacttgggattgtagcacaacttggtgacttttttgaatcagccctcaaacgtgctacacatcttaaagattcaggtacaattctacctgggcatggtggtattcttgatcgttcagatagtttattatttgtcataccaacatatgcacttttaaaaagttttattgtctacttttgaataaaatactatttttaccccttaactaatttttagttaatattactgtatggtgtagtttaatgtttacctatataacatctcttccttctcctgaatgggaaaaaagttttccaagaacaatttccattcttggttcaactggttcaattgggacaaatgcactagatgttataaagtcacataaagaactctttcatattgttgcattaggtggagggaaaaacgttcaactacttgcaaaacaagcaatacaatggaaacccgactatcttgctgttcaagacgaaacttcaaaagaagctcttattcccttactaccaatcaactataaaccatctatatttgttggtcagcaagggtatgtaaaacttgcctctcttcctgaagttacaacggttctttctgctcaagttggtgccgcaggacttcatggaacagttgcagcagcaaaaaacggaaaagttatttgtcttgctaataaggaaacattagtattagcaggaaaactaatcaaaaatctatgcttacaatctggagcagtcatcttacctgttgactctgaacataatgctatcttccaagcactatacacaagaaatcctaaaactgtacaaaacattattcttactgcatctggtggaccatttagaaataaaaaatatgaatttttaaaaaatgtaacaccagaacaagctattaatcatcccaactggaaaatgggtacaaaaattagcgttgactctgcaacaatgataaacaaaggtctagaaataatagaagcacactatctctatggattaccatcagagcaaattaaaattgtagtacacccacaatcatacgttcattcattagtagaatttacagatcactctcttatggcacaccttggtactgctgatatgcgtatgcctattgctcactgtcttgcctggcctaactatcttaatgttggagttgaaccatttgttctttctaaaattggaaccttgacatttgaagagccagatttagattcttttccatgcattaaccttgcaagagatgctcttgttgcaggaactagtgcacagattatattaaatgctgcaaatgaagtagctgttgatgcattcctaaaaaaacaaattggatttatggatatacctattttgatctctaaagcattagaagctgactctacacctgaaccaacgacacttgagtcaatagaagcactggatcaacaaactcgtcatactataagtcaatggatagaggttcattaatggattttttacaaacttttgtttcacaatggaataatgcccttgcggtagttgttgtacttggtgccttaattttcttccatgaacttggacactttatgatggcacggatattaggtattggagttaaaacattttctttaggatttggaccaaaaattttcactataggaaaaagaaaaacaaaatacagcttatcacttattcctcttggaggatatgtatctttagcaggagaagaagatgaagatgaaaataaaaaaatagaacaatcatcacaaataacagatgaattatttttgcctacagaaaaattttctaatcgtcccccatggcaccgattacttgttgttcttgcaggacctgttgcaaacatactccttgcttttttcatttattggggtgtatcatgggtacaaggtagtacatttctactccctattattgggacaatcacagaaaatagtcctgcagaacatgcaggacttcttccaggagatattattacacgtgtagatgggatgcctgtttcccaatgggatcaggttgctgaatatattgctgaaagccaaggaaatgaagttactataacgctttctcgagatgataaactccttgagtttcgcttaacacctgaagaaaaatcacgtacaaatctctttggagaaaaaaagcctgcatggttaattggtatcagtgcacaaggagatatagaaacacgtccactatcctttcttgctgcttcggttactggtttaaaaaaaacatggttttctattagttttacatgtgaaagtcttttaaaattgttccagaaagttgttccattggacagcattggtggacctattcttattgctcaactagtaggtcaacaagcaaatgctggtatcatacctttactcctcttaacagcacttataagtattaatcttggggtacttaacttactaccaatacctatccttgatggaggacatgttgtattccttctgttagagatgatattccagcgtcctattagtcccttcatcaaaactgtatctatgcgtattggtattgttcttcttcttagccttatggtctttgccacttggaatgatattatgaggctcgtttcatgagagatttaactctcactttaggaatttcagaacaacatcttcatatagtttttattaaagatgaagaaatacaatatataaaagaacgttctataacatctaatgggactgagatattaggacctctcatcatagagtcactggaaaaagcacagttttctctacaacaaatttctcgaattgcttgtattgctggaccaggaagttttactggtttaagacttgctctaaccactgctattgctatgagacgtgctttgtctattccattagcaacactgaattatctacatgtgattgcagctagcgcatgggcactcccagagctgcagaacatctcattacttcctagtttacttagagtcattacttatgcacgtcaaaagcttttatatatacaagattttttagtaactaaaacttttcctatgccaatagcaaagccacgaatatcttctatagaagcatccattcaaacaaaagaccctatactttttatgggctcagggatacaatacaactactcgttttttgcagaacatgctcttattaatccaaatatactattatttcaaaaaaaaatctccatttctccatatgcattacttcaactagtaaaaaacattcctcatgaagaatggaaacataatgatcctgaaccactatatcttcggcactgtgatgctgtagacaatttatcttctattagtttaaaacaaggtaaaaaccctgaagatgcttgttcaacatttaaaaaaattgttactcaaccacctctattagttacataaaaatttttatttaatatttttttagtattttttataaaaaactagcttaaaagaaataaatgattattatttatttctgtttttagaatatatttagaactactccactatatactctttaaataaaaataatcttttttcttcctatcataactctctactattaataactaccccaattgttcttaaagaagtaattatcctcaaagttaactcaactgaaaatttaacaattttgtgaaagaagatagtgagttaatccttactcatagtctttttaaaaatctttctagctcttttgaactaagatagttagaagaatctattgcttataataagaagaaaaaagaaatagaaaataagatgtattcttttcagggagagtaaaaaaactgatggtaaaacaatacctctggcagacttaactcattataaatatgctgttaatatgcctgttgggactaaagtatagtattagaactttagaggataagttaattactatcaaaaagatggtacaaaaacaacttcacctaattaatcaagaataatttcttgatgtatctatagtaataactttctaatcttacttaatgaaataatattttatattatttttttaactataacagactatagtctgttatagttaattccattaaactatacatttatttatcatatattgttaaataatacttactcttttatttatattatactctaactattctaaaaatgctatgaatttgaaagtattatctttattcagtggttgtggtgggttagatttaggtgtagaaggtggatttttagtacataaagaatgcattcatgctactagtgatactccatggatttgtttacctaaaaatagatttaatgtcatttttgctaatgatattatggcacaaagtaatgttgtctggtcttcaaatttcacaggtacatttcaactaaaatcaatagcagacttattgaacgaaaattttcaatttcctaaagcaaatcttgtgattggaggctttccctgtcaagatttttctgttgcaggaaaaagagaaggattaaaaactcaaagaggctctttataccactgtatgactgaagtcatacaacaagtttctccagaagcattcattgctgaaaatgtatatggtttattttatattcctggtgtacgtgaaaaaattacatctgactttgaacaaattggatacaccgtcttttctttccttttattttcaaatgagtatggagtaccacaaataagaagacgagtattttttattggtctcaaaactgaagctcttaaaagaaaagtttctattaatgagattattcctcctaaaactcatcaaaaatttgtttcagtgggaacaatttttaaagatcttcaagaaccagaatatactttggataaagaacaacaaatttactcaaaaagcaaattctatggctctcaatgggaaggaaatagagaggttgatttatctttgccttcaccaacgctacgagctagtggcccagaattcagaagattatctaaggaacatggtgggaaacatttagatgaattaaaagatggaaaaattgaacgacggttaactgttagagaatatgcaagaatccaaacatttcctgatgacttcattcttatgtttaataaaaataacgaagaaataatttcaatgacatctgcctatagacttattggaaatgctgttccaccattacttgcataccatgtaagcaaaagactagatgagctctggtttgatattttttaattctatggtttctttttatcatctatagattaactaaaataacatagcagattatttatgtataaaccctatatagcatgtactatatagggtttatacataaattctggtgggtcgtgcgggattcgaacctgcgactctctgcttaaaaggcagatactctacctgctgagttaacgaccctttttatgaactgggtttttatagaaactctatctaaacatgtcaacccctgacatttctaactaacttcatattttatcaataattatatatagttatatattcataataaaatttcaataaaaataaattgtaactataaaggaactaatctaaatttagcccttgagtaccagctactataacaaagttaagatagtccccaagttacatagacagtatcacgccaagagtaaaagtctgtaaaaaatctttctaaagaaaatgaagacttctcgcctgtttttctattttttacttctataataccatttgcaagacttttagctccaataataacttgtattggaaaacctaacagatcagcatcattaaactttattccaggccgttcttcacgatcatctaaaaaaacctctatcccttctgataaaaaaaattgatatatttctgatgctttcataaccactgattcatctctaggatcaagattgatcaacataatttcaaatggtgctaatggaggaggaaatataataccatacttatcgttattttgttctatacatgcagcaataacacgagatacgcctatcccataacatcccataaccataagttgctcttctccattttcatcaagaaaaaaagcattcattgatttagaatattttgttccaagcttaaaaacatgacctacttcaattccttttgtaagagcaatttctctaccacatgaaggacaaccatctgcatctgtaataagtcgtatatcagcaaaagtaatattctggacatctctagctaagtcaacatgaagaatatgtttatcgggtttattagctcctacaacccaatcattataaaccattaattcatgatctgcgataataggtccagcagtaaatcctacaggtccagcaaatcctacaggagctcctgtccactgatgaacttgttcaggagttgccatagttattactgtagcatccagcatatttttaactttgacttcattaacctctctatcacctcttactaatactgctacaggcttattatctattgtgtataaaattgtcttgataatttgttgctcaggaatagtaagaaatgtgcttaccgctttaattgtatgttgaccaggtgtaacaacctcttccatgctcttctctaaagttaaagccttagtttgaggaggtaaagttgctgcatgttcaatatttgctgcccaatcacattttctacaaaaggcgatagtatcttctcctgaatctgctattaccataaattcatgagaaaaatttcctcctatggaacctgaatctgcctctactgctctaaaatctaatgccatacatgtaaaaatagctttataagcatcaaacattgtatgataactgatatcagctccttcattatcttgatcaaaagaatatgcatctttcatgagaaattcacgagccctcataaggccaaaacgtggtcgaatttcatcacgaaactttgtctgaatttgataaacattaattggaagttgacgataagaacgaacttctcctctaagtaaatgtgttacaacttcttcatgtgtaggtccaagacaatactctcgatcatgcctatctttaatcctaagaagttcttttccatattgatcccaacggcctgactctttccataagtcagcaggttgaaccataggcattaaaatttcttccgcacctattctattcatctcacttcttataatagatatcgctttattaagcgtctttagccccaatggtaaccatgtataaatacctgaagtaagtttacgaatcattccagcacggattaataatttatgactaagcaattcagcatcaccaggtgcttcttttaatgtagggatataacactgcgaccaacgcataatgacctcaaattattataatagtttaatacaataaaaatagtatctgaaaatggatagttacttttcaaactgtttcttaatatgacctgaacaacaaaaaagatttattttgttatattaaatattgtgagttgaacgtcgagctcgaaaacgtttttcaataccacggacaacagcacttttgtatcgtgcccattctggtgctacaagctcttctggaagagggtcagctacgactctatgaatcacaatatctggacgtaacctatataatgattcaacaacaagatcagaatagtctgcttcagttaatggataatagttacctgcattgaactctttttcaagtatagtatttttacaaacataaacattatggaatttgattccatgaataggtaaactatttagtctatctattgtttgcaacatatgggtaggggtttctccaggaagaccaaacataacatgtgcacaaacttgaaggcctgcatttgcagcttgaataatagcttgttctgagcatttagaagaatgtccacgtttaatctttataagtgtttcatcatgaagactttgaacaccaaattctacccatttttctaaataaggcatttctacaattaaagataattttttatttgttaaacaatcaggtctagtacctacagaaatacctgcaacatcctgtaaacccttaatttgagctaagatagaagaaaatttacttaatggtccgtaggtattggaaaaagattgtaggtaggctataaaacgtatatattgattggaaatagaaaagtgtttgtgccaatagttccattgttcagttatagacataccggataaaccaaggccggatcctgagccagacacattacagaacacacatccaatgttggaatttgaacgctctctatttggacaagaacttccaacatctaaaggaattttctgaccacgacatccaagtcgccgacgaaaatgcattgcaagattattccatgtgttcatctttctattgacagcagaaaatttttagaacatcaagttcattagttctaattaactatattaattacggtgaagtgagcaagtatttatggcaaaaatattggattttattctaggagcattctccaacgatctcgccatcgaccttggtacagctaatacatgtgtttatgtaaaagggcaagggatagtccttcgtgaaccatctgttgttgcagttaaaaaggaacaccgtggtaacaacaaagttcttgctgtaggtcaagatgcaaaaagaatgcttggacgtactccaggtaatattgaagctattcgacctatgaaagatggagttattgctgactttgaagtaacagaagctatgttacgacactttatctcaaaggtacataactctcgccgacttgtacgtcctagaattatgatctgtgtacctactggaataactcaagtagaaaagcgtgctgtaaaagaatctgctcaaagtgcaggagcacgtgaggtctaccttattgaagaacctatggctgctgctataggtgctcatcttcctattcaagaaccaacttcaaatatggttgtagatattggaggtggaacaacagaagtagctgttatttcactctcagggattgtctattcacgttctgttcgagttggtggcgataaaatggatgaagctattatggcccatgtaaaaagaaaatataacctattaataggtgaatcttctgctgaagagattaaaattaaaataggttctgcacaccctatggatcctgaacaacaaatagaggtaagaggacgagatcttgtcacaggtatcccacaaaatattataattacgtctgaagaagtccgtaaagctatttcaggtcaggttgatagtataattcaagcagtacgtattgctcttgaacaaacacctcctgaacttgcagcagatattgtagatagagggattgtccttacaggaggaggagctctattaaaaggtttagaccaacggctacgtgaagaaacatcacttcctataactgttgttgaagatccactctctactgttgttgtaggtacaggacttgctttagatagtattagtttcttacgagaagtttgtattgactaaaatatctgcttatctctgtttctttatttgtaaaaattatttaccataattaaagcaggttatcataaaataaaatataaacatgtccttcacaatcatagactggaagaatgatgccccctaagcgtttattgctcatttctgccttaattctgcttatttatttaggaggctacagttggaaccagcgtacgcacttcctagatacaatagtaactaatgtaggattagaaacttcagggtatgtcattaagtctgttttgtttgtacaagatgctattttagatgcttggaaaaaatatgtagatcttgtcaatgttcgtgaagaaaatgacaacttaaaaaaagaactttctaaaacaaaaagagagctattccttgcatcagaggagcgagcagaactggatagactccgtgacctactgaagatttctcctcctataggttggactatacaaggaactcgtgttcttgctggaagaatgggctccaatgctgctcttgccaccatagtcattgatcgtggatatcttacaggggcgataccaggaacacctgtaataacacaagacggtatagttggacgtgtatttcgtgctggaccaacgacttcaactgtactccttcttatagatccaggaagtcgtattgctgttgtaagtcaaaaaaatagagtacaaggtattcttgtcggctctggagcaatgtcacctttagaggtacgttttgtttcacgaaatagatctatagagcctggagaacttcttgtcacttcaggcctagatgaagcttttccaaaaggtatccctgttgccaaaatatcaaaagtaactgactcagatatgtctccatttcaaacagttgaagcaacacctctagtgcctatcctaaatattgaagaattactccttcttcaacaaccagtataccataaccaaaacttttcctctattgatgatgtacaacaaactgaaagtgtgagtgtgctaaaatgaaattccgcaatactctttggtgggtactctttttcattataagcatattattacaaaaaacattcccaggtattgatacccttgttataggactacttatatcactagaagaaagaagtcccttacaaactttatgggtattacttaccattattattatccaagaaggatgtggaacacttgattttggggtatcaattttatggtatagctgtgtaattggactattttttatcgggtgttggttatttgaaacaaaaaactttttattcattattctattaagtattgccataggaataacaaagttttttgttattactttaatgagtcatctacaaaaccttcctgacaatactagcttaatcattaatgaatgtatgctgcaggcactctatatccctattgcctggaaacttatttcattaacacgttcatgggtgactaaatatgaagctgaagcttgatcctgaaggttatcaaccaccaagaagtggaattttacttttacaattccttatcggagcacttttttttgtttttgtacttcgtttttggtacttacaaattcataaaggtacagaatttgctcggcaagcacaaaataacagacttcggaatgaacgtgtctatgcctctagaggacttattaaagataaaaatggtatattacttgctgaaaaccgtccagcttttggtcttgcattagtgagagaagactgccctgatatcacaacaacccttgcacaagttagtgtttggatggatacaccccttgagcaactaatagcaaaatttaatcaagataaaagaaaagttaaaccatttgaaccaatcctgttgtttacagatattccttttgaacaagttgcaaaaatagaatctcagcttatgcattggccagggcttataactgtagctcactccaaacgctattaccctcaaagccatgaatttgcacatatacttggttatgttgctgaagctaatgaaaaagaacttgctatggataaagtactctcattaggagatactataggaaaacaaggtcttgagtatatccttgaaccacgtttaagaggagaaaaaggtgaatatagtgttgaagtggatgtactaggaagagctttaggaaaagtattagttaaagcaccccagcatggtgaggatattcagcttagccttgatgcacaacttcaacaaaaaattgtctcattactagatacacatgctgcttgtgtcattgttatagaacctcacacaggaagactccaagcacttgttacgactccagcatatgacaacaatctttttgtacgtggactttctcaaaaaaattgggaaatcctaagagataatccacgtcatccactacaaaataggactattcaaagtacatatcctcctgcttcaatatggaaacttcttatgataggattattccttgaagaaggtattgccccttcaactcatataacctgtacaggtagtgttactcttggagatcatatatttcgatgttggaaaaaacacgggcatggctctgttgatatgaagcgctctcttactgactcctgtgatgtttacttttatattcttggagaaaaacttggaattgataaaattgaaaattttgccaaagcctgtggatttggttctctcacaaaaattgatctcccttatgaaaaagtaggacttgttccttcacgctcttggaagcgtagccggtttggtgataattggtacaaaggggaaacactaaatacatctattggacaaggatacaccttaacaactccattacagatagctgtttttgtttcatctcttattaatggtggtaacttaatgaaaccattactgctttcagaagataaaccacaagttttagggaaaatcccattctctgaagaaacactagcttttattaataatactatgagacttactgttgaaaaaggcacagcaagagttctaagacgtaatgacgctatcattggtggtaaaacaggtacagctcaagttgttaagcttaaaatggttggagaacgaagactcaaagcagatgaagtaagttacatggagagagatcatgcatggattgcctcatgggggaaaaaagatgatcaagaggttgtcgttgttgttatgatcgaacatggtggaatggggagctcaacagctggtccaattgctcgcaaagtttatgatattcttttttcaacaaaacaagagcatagttaactctatataaggaaaattatctatatggagccaatagatcgtagactcattacacatataaactgggggttattagcctacacaggaatactttttttcattggaacaagtaatctttattcagcaagtggtatccgcttagaaaatggaatcacactttccccattttaccaacgtcaaattgtatggggaggatttggtttacttgccatgattgtatctatgagttttgattatagaaaactacaaagtcttgcccttcctttttttctttttacactttttcttctaatacttacacctattcttggaaaaactatttatggtgctaaaagatggataccacttggtttattcaacttacaacctagtgagttagcaaaactagcggttctaattatgggagcaagaatgctttcacttgatggagcacctctttcatgggctcaactaataaaaatgttaattattggagttattcctgcaggccttattgctctacaaccagatttagggactgcactcacagtttttgctattcttggaggcatggtttgctatcatggtcttcaacctcatgtactgcgtatttgtcttattattattccattattaattcctcttagctggtttttccttcatgattaccaaaaacaacgtattgttacttttttagatcctactaaagatcctcgaggatctggataccacattattcaatcacagatagctattggttcaggacaattctcaggaaaaggttttcttcaaggaactcaaagccaacttcgctttttacctgagaaacatacagactttgctattgctgtatttggagaggagtggggatttttaggctgtataactcttatgggattgttttgtcttttcctattaggtatttttaacacagtaaaaggtgcaaaagatcgttttggaagtacattagctgccggaatttttatgtattttttctggcaattctttgttaatattggtatggttcttggtcttatgccagtagttggtattccattaccatttctaagttatggcggtagtgcaacgcttgtaaactttattttaataggccttgtacttaatatttcaatgcgtaggtttgtattcaaaagttattaataaaactagggtggagaatttactgtgagtaaagaagaaatcaatgcatttcttggttctggaaccacttatcaaggaaatcttattttccaaaatgctgttcgtattgatggatcctttaaaggtgaaatacaatctgaaggttccttaatcgtaggaaaagaaggctcaatagaaggaactcttgatgttggagaactcattctcagtggcttttttatgggcgaagtccgtgcaacaagaaaagtgacagtccataaaacaggaaggcttcaaggaacactagtgtcccctgccttgattgttgaagaaggagccattattgatggtcaggttgtaatgcaatcacctatgccagaactatctgaataatatataaaaattaaatctacttctttgacagaaaagtatctttcagctaagaatttggtaatttagataactattttcatctaaggagtattacgtgatagagcttaatattacgttactcattcaattaattaattttctaatagcccttattgggattaactatattcttgtccaacctattagaaatagtatataccaacgccaacaagtattctcatcaaaagaggtatacattagtgaacttacacaccaagtaaataaagaccttcttcagtatgaatttataattacaaaaactaaagaagaagctatctcctactataaacatgaacaagaaaatactgaacgtttgaaaaatactatgttaaatgaagcacaagaagaagcaaaaaaacaaactaaagaaacacaaattacaataatgactgaagcacaagacgcaaaacaattactagaaaaagaaatcgttccttttgctcataatattgtaacgaatttactaaagaatgtataacttctaaaaggagttactctttgaacaccttcttctcctttattctttctaaagatggtattattacaattgcagggattatactatttagtattcttattcactttaaagatccttatcatccctggataaatcttttagggagatttggaaatcttagtatatttctttatattctctggcgtgcagcaggtaaaaaaattattcaatttttttctcaacaaaaaaacaatattattcataaacttcaaacacttgaattacaaaaaaatgaggtagaaaaaaacttagctgctatacaagcacaaatggctctccttaatgcaaaacaagaagctattcgtgaagaaagccgtattcaagccgaaaaactcaaaaaatatatgtttgatgaaacacaaaaagaaattgaacatattcataaacaaacacagcaaattatagaaacagaatcaaaagaaatagcttataacctaagatcacaacttgcagatcaaatagtaagtaaagctgaaaaagaattaaaacatcaattggatatggctagtcacttcaaactaattgataatgctttaacaaaggtagtactctcttgattggagatatcattgcacaacgatacgctcaggctttatttgatcttgggaaagagcaaagtcttcatgaagtggaactgtatgatacagcactttcacaaattgaagaattacttatgacttcaaatgagttaacctattttcttcatgcccctatatttacaatatatgaaaaacaaggcgttctattaaaattattagaactaattgatgcagcacaacctatcaaaaatttttgtttgcttcttgcagagaaagaacgtttacctcttcttacgcaaattattaatagctttaaagtacttcttgataatgccaaaaacattgttcatggccaacttataacagctattactttagatgaaaaaaaacaatctgaacttcttatctcactagaaaaacaaacaaatagaaaacttgaattactgtttcaagtaaatcctgacattcttggtggcattgttcttcatattggagacaaggtttttgatgccagcctccgtactcaattagaatgtataagaaatactatcaagaaaggtgaaacgaatcatgcatattaaagccgatgagattagtacaatcatcaaagaacaaatccaaaattacagtcaacgtattgaaactacagaagtaggaacagtattatctgtaggtgatggaattgcacgtgtatatggtgtgcaagacgtcatgtcaatggagttgttagagttccctggtaatctattaggtatggttcttaaccttgaacaagataatgttggagttgcacttcttggtgatgacacaggtgttgaagaagggtcaacagtcaaacggactggacgaatcttttctgttcctgttggagatgctgtaactggccgtgttcttaatccattaggtcaacctcttgatggtttaggtcctctcaatgcaactgaaaaaaagcctgtagaagtaaaagcaccaagtattattgaccgtaaaagcatttatgaaccattagttacaggaattaaagccattgatgcaatgactcctattggccgtggacaacgtgaacttattattggtgaccgccaaacaggaaaaacatctatttgtattgatgctattcttgcccaaaaagagtctggagtacactgtttttatgtagctattggacaaaaagcttcaacagttgcacttgttgcagacacactacgtaaacatggtgcaatggaatatacaactatcattgctgcaacagcctctgatcctgcacctttacaatatatttccccatattcaggttgtacaatggcagagtattatagagatcatggacaacatgctttaattgtatatgatgatctatcaaaacaagctgtagcttatcgacaaatgtctcttttacttcgccgtccaccaggacgtgaagcttttcctggtgatgttttctatcttcactctagacttcttgaacgggcagctaagcttagcgatgaacttggtggaggttcacttacagcacttcctatcattgaaactcaagctggagatgtttctgcatatattccaacaaatgtcatttctattactgatggacaagtatatctagagccaaatttatttaatgctggtgtgcgtccagcaattaacgtcggtctctcagtatcccgcgttggtggtgcagctcaaacaaaagcaatgaaacaagtttcaggtacaatgcgtcttgatcttgctcaatatagagaactagcagcttttgcacaattcagttcagatcttgacaaagaaacacaaacaaaacttgaacgtggtgcacggcttgtagaactattaaaacaaccacaatatcagcccatgcaacttcctgaacaagtaatcgttatgtttgctgcaacaaaaggctttatggatgatatacctattgatcacatccaaaattttagcaaaacacttattgaatatatacaaactatgaatccaaagattcttgagaatatctccacccaacaggcactaaacgaagagttagatcaacagcttacaacagcaattacagaatgcaaaaaaacctttttacctatgaataaaaggtaattatatggcatcactgaaagacgtaaaaataaaaattgctggtgttcgtaaaacaaaacaaatcacaaaagctatgaatatggttgcatctgcaaaacttcgtggtgctcaaataaaaatagaacactttcgtccttatgcagaaaaatttcaagacgtcattagtaatcttgcaactcgttcagatgaaacagtgcataaacttcttgaaaaacggactaatggtacatcctgtatttttattcttataacatctgatcgtggcctttgtggtatttttaataccatgcttattataaaagcacttgaacttgcaaaacaaaaaacaacaaaagggaaaaaagttagttttatctgtattggaagaaaaggaagagatgctatcaaaaaaacacactatcctattctttcagattatagtgataaattcacacgtgactatcaacttgcatctcacataagtgaaaaagtgattgatggttatctaactgtcaatatggatgaagtagtacttatctatggacagtttattaatgcaatgagacaaattgtaggtttctctactttattaccaatccatccaaaaccattagataaagaacaactagaaaaatatagtgaatatatctacgagccaggagtagcaatacttttatcagaattactaccaaaatttgtaactactcaaatctatagaggattcctggacacagatgcaagtgaaaatgctgcaagaatgacagctatggataatgctacacgaaactgcgatgaattaataggaaatttaacacgtctctataataaaacacgccaagcatcaattacaagtgaacttattgatattgtaagtggtgcagaagctctgaaataaaaggcaagggagcatctaaggtcatgagtgaaaatatcggaaaaattgttcaagtaattggagctgttgtagatgtaagttttccaaatggaaaacttcctcctattcttactgcattagaaatacataatcctaatagtattgatgctccaaaacttatttgtgaagttgcccaacaccttggtgatgatatagtcagaacaattgccatggatgcaacagaaggccttaaacgtgggatggatgttttagatactggccatcctattatggcccctgtaggaaaagcttcccttggccgtattatgaatgttgttggtcagccaattgatggacttggagttattgatacaaaaacataccttcctattcatagaaaaccaccaagttttctagatcaaaatacatcagttgaaccacttgaaacaggaatcaaagttattgaccttcttgtccctttcccaaaaggtgggaaaatgggactctttgggggtgctggagttggtaaaacagttattttaatggaaatgattaacaacattgctagacaacatggaggaatttctgtctttgctggggttggagaacgaacaagagaaggaaatgatctttatcatgaaatgaaagaagctggggtacttgaaaaagctatattagtatatggccaaatgaatgagcctccaggagcacgttcacgtgttgctttaactgcattaacttgtgctgaatacttccgtgatgaagaacatcaagatgtccttctttttattgataatatctttcgttttatccaagctggatcagaagtttcagcactacttggtcgaatgccctctgctgttggttatcagcctaccttgggcactgatcttggatctcttgaagaacgcattacatctacacataatggatcaataacctctgtccaagctgtgtatgttcctgctgacgacttaacagatcctgcgcctgcaacaacgttttcgcaccttgatggtacgcttgtattatctcgtcaaattgcagaactaggtatttatccagctgtagatcccctagattcaacatcacgtattcttgaaccaaactttgttggggaagaacactatacagttgctcgtggcgtacaaaaaatacttcaaaaatataaagaactccaggatattattgctatattaggtatggatgaattgtctgatgaagacaaactagttgtaagtcgtgcaagacgtattcagcgttttctgtcacaaccatttcatgttgcagaaactttcactggaacagcaggagaatatgtaaagcttgaagataccattaaaggttttaaaggtattcttgcaggagaatacgatcatctctctgaaagtgacttttatatggttggtaatattgattctgccgtagctaaatatgaaaaacgaaaagaatcaaaataggagttaacacatggagcaatcactccatcttgaaattatctccccagatcataccattgttagtgatcgagttacatatgttaacttacctggagttaatggtgaactaggtatcttaccaggacacatccctttaatggctgcattagacattggaaaacttcactatcaacaagattcaaaaaattattatgtttttatttccgctggatttgctgaagtctctaataataaagtaacagttcttactgaagctgcagaaaaagccagtgaaattgatgtggctcgtgcacaagcagctaaagagcgtgctaaagctcgtctcttaaaagctgaagaagatattgatatggcacgagcagaagctgctatgcatcgtgctattatacgattaaatatttccagcctttagtaacaaaaggacttttataatttactaagtaaatatagtacaattaatttaagatagtatattttatatagcaaacatgaaaaaacattttttctatataaaaagactttctattatattagcacaggataaaatatggctgaaatcttaagtgttcaagagctaacatataaaataaaatatgctgttgagacactattaccctatgtttgggttaaaggagaagtaacaaactactcctgcccaacatctggtcatatttacttttctttaaaagacaacgagtcatatctccattgtgtttggtttaactctatgcagcgagagacagaaacatttgatcctcttacaggagaagtctttcaaaatggtcctcgtttatcccttgctaaaacaattactaatggtcaaaaaattatttgtgctgggacaattggtgtctatccacctaaaggtggctatcaactacttgtagactttgctcagtcagaaggagttggagaatggtatagtgctttagaaaaacgtaaaaatgaattacaacaacaaggatattttgatcttagtaggaaacaaataattccacataatcctaaaaaaattgttgttattacatctccagctggtgcagctattcaagacttcctacgtatagctaaagagcgaggaacagaaaagtatattcgtatttatcctgtcacagtacaaggagaagaatctatccatcaaatagcccaagctattcatacagaaaataattccaactgggctgaagttattgttcttatacgtggaggaggagcttctcaagatcttatggtatttaatgatcaacagttaatagatgctatctacacatcaaaaattcctatacttgcaggtattggacatgagtctgatatctcttttgctgaacttaccgctgatcttagagctgcaacaccaagtcatgctgcacaattactatggtcagaacgaacacagttaaaacaacaagtacatgatatggaaatagcacttactaaagctgctcattttcaattacagaaaattcaatatgtattcaataaattgaatactaccttacaatggctttcacctttaaaaaaacttgaacgtaatgagttacagcttaactctatctatgaaaaactaaatgctatctttaattacaaattgaaattaaaaaatcttgaccttatacaatatacacaactcccctcatattctattgtaaaaaaaatatcatattataaagaacaactatcttttttacaaagaaaactttataggtatatccattcaattttattaacaaaaaaacaaaatactaataataacaaacaattactaataaataatttctttcaaaaatatcaacaactactatataactatgaaaaacttcatgttactcttaaaatgttaaaccctcatcttttactaaagagaggttatgcccttatatatcttcctaatggtcaaatccttcatagtatacaagaagctccagagcaaacaatacttacaataaaacttcctgatggattactctctgtgaaagttatttcagcatgatactaaattggagtataatatattatgagatacttgcaacaacatgtttactatatattattttttctcctacctttttgtatagttacaaaagtttcagcaaactcgtcacttcaaattcaaatccctaataaagtccaacaaggaactgctattttagtctctgttatttctcctattcctgagtcaaatgctatcttcctatggcttaataaaagtataactgtcccatttaaaaagaaaggacgacattgggaagcgcaaacactccttcctatcactgttgatatggcaaaaagtgaaatcttagctgttcgaacaagtaataactatattcaacaatctatccatatagaacctgttcactggccaaaacaatatattagtctagggaaaaagaaacaaaagtttgttactccatctaaaaagcttgtagctcgccttgagcatgaacgtaaaatgataaaagaagctttatcaaatatatcctgtaagcaatactggtcaaaaccttttgtacgaccagttaaaggaatcattacaagcccatttggaggtcagcgtatatttaatgggaaaccttgctcatatcatcaaggtgtagacttacgtggtgccataggtacaccaataaaagctatggctgcaggtaaagtcaccctttcagcagacttatattattttggtaaagctgttttcattgatcatggacaaggtatttatactctctatggtcatatgtcacgacgtgacgtccaagtaggagatatgatcaaggcaggccaaaaaataggtcttgtaggagcaacaggaagaacaacagggccacatctccactttggattaaaaattcttggacacccagttgatcctatatcactctttcctgaataatgatatggtatagttatgacagtaaaaaagcatccatcaaataaaaaaaatgagtgtagttttgaagaagctcttcagcgattacaggaaattgttaataaacttgaagatgcaactcttccacttgaaataagcattcagctttataaagaaggtattacactatctcgtctatgtaaaacacagttagaaaaagcacagcatgaagtaaaaattctcactgatgatgggacatttgaaccttttgaactgcctaatctaaactttgttggagatattgaatgaactttctccatcacaactatcaaagtatattaaaacaacgtgttacacttattgaagattttcttaaaacatgtattcaagaaaataatatctcttctacccttcaacacgctatgaactatagtttacttgcaggaggaaaaagactaagagctgtattatgtatttcttcagcagcactttttgatcttagccctacctctattttaccttttgctgctggcattgaaatgatacatacttactcactaattcatgacgatttgcctgcaatggatgatgatgattttcgtagaggtaagccttcttgtcataaagcctttaatgaagctttagctattcttgcaggggacgcactattaacagatgcttttaccttcatgagtacattaaactctatagtaccatctaacaatatattagttgccattcatgaaatagctcaagcagctggaagtaatggaatggtaaaaggacagtcgatggatatagagcatactggtgtatccgatgtgtcttttaatacactatgcataatacatgaatataaaactggagccctatttcgtgcatcatgtactacaggcgctatgttagctggagcaaatgaatctgcaatttatgctttaaaatgttatggggaagcactaggtgcagctttccaaataactgatgatatcctaaatgttactgcagatagtataacccttggaaaaccaactagaagtgatcaggaaaaagggaaaataacatatccttccctactaggacttgaaaaaagtaaaaaattagctgaagaaaaaatacatcttgcaatatctagtctagatacttttactggcgatgaagttttatttcttaaagaggttgcaaatagtcttttaacaagaactcactaatttttgttttttattaaaacatcactatataaaaaataatcaatagactagaagaaaatcttaaaggttttatatgacacaccctcctgacactatagtaaaatctatcctttctcatatatcaaacccttgtgatatacaaaaactatcccttcaagataaactcactctagcagaagaactccgtagtattattataaaaactgtctctaataatgggggccatctcgctccctctcttggagtaattgaattaaccctagctctgttagctacatttaatcctgcagaagataaactgctatgggatgttggccatcaaacatatgcttggaaactgcttacaggccgtgcacataacttttctacgttacgtaaattaaatggtctcagtggatttcctaagataacagaaagccaatatgatcactttggtgcagggcatgcagcaacatctatttctgcagctcttggtatggctatggctagagacctacaaggccttaaacatcatgttattgctattattggagatggatccttaacagctggtatggcttttgaaggcctcaaccaagctggtgctatgggaagaagactcattgtagttctgaatgataatgaaatgtctatctccaagaatgttggtgctctttcactttttctcagtagaaatatggagcgaggttgggtaagaagagttcgccatgaaattaaagattggcttaaatcaattcctagtattggtgacgaagtagcagaatatgctagtcgtactcacaggagtcttaaaacagtttttacaccaggtattctttttgaagcatttcgtttcaactatattggtccagtgaatggacatgatatagaatcaattgaaaaacatttagctatggcagcttctatcgacgatcagcctgtcctcctccatgttcttaccaaaaaaggaaaaggttatgaaccagcagaaaaaaatcctgctagttatcatggattaggagcctttgatatccaaactggaattcctaaatcaaattctcaaaattcaccacctacgtatactgaagtttttgggaaaacactttgtgaacttgcagaaaaagataaacgtattgttactattactgcagccatggccagtggtactgggacatcactatttaaagcaaaatttcccactcactttactgacgtaggtatatgtgaacagcatgctgtaacctttgctgctggattagcatctcaaggatataaaccatttgttgctatttattctacttttgctcagcgtgcttatgatcaaattatacatgatgtctgtatccaaaagctaccagtcactttctgccttgatcgtgcagggattgttggtgaagatggagctactcatcatggagcttttgatatatcctttctaagatgtataccaaatatttcaattttagctcctcgagatgaagcagaactccaatctgctatttacacagcactctcttttaatagtccattggctatacgttatcctaaaggtaatggtgtaggagtaactttacctaatgagtcaactcctcttccttttgaaggagaattattaaaagaagggcatgatgctattatcatagctataggaagtatggttatgcctgcgtatagtgcagcacaacaacttcaagaagagaaaaatctttctattgctgtttttgacagtcgatggatttctccattgcctcaacaccaacttattgaattagctaatacatttaacaatattcttttaatagaagaaaatgctcttgctggaggattttcttctgctgttgtagaactttttgcagacaaccaatgtctccatggtcaacgtatacaacgaataggtatacctaattactttattgatcatggttctcaaaaagagctcaaacaatgtttattgctaaccgttgatggaatcaaaaaaatgcttttacaaatgttacaaccagaataacaatagtaataaattcaagttactatgtattctttatagttgctgtaaaaataactttatcttgttctaattttactaaaacatttccaggaaattgaaaaaatttttttctttcacctttcattaatgtattatctaataaaaataaggtgcttgctcgaccttgaccaatattaagtctacggatagcttcaatatacacacgaagtcttaaagattttggtaaagttattaattctgatcttggtatccaaaaatattctggtgaaccttctatcttggaaaaaacatctgtaatcattttatcccaaaactcttcatcctccttagctaatgaccatagcatatgagcaacattggaaaattttggattttcctcttcaaataatggtaaaatagtatgccgaattctatttcttttaaacgttatatccttattggaattgtcctctacccaactaatattttgtgaggaaagaaaagatactaacaatgttcgccgagtagtaagtaatggccgtagtaaataacgctttttatccactgctttcattcctgcaagacctggccaaccagtcccacgcaataatcggagtaatatatcttctgacaagtcatttaaatgatgacctgtagctatccactgtgcaccatattctttccttacttgttctaaaaaacaataccgttcttgtcttgccgtttcctcaataccttttttatattttattgctaacccagaaatatcaactctagaaataatacaacggcgatctaatgcagcagcaaaagacttaacatgattagcatcatctttgctctctgctcgtaactggtgatccatatgtgcaaagacgacatctatacctaaacaatgtaatattaatgcaagagccatggagtctactccaccagaacaaccaacaataacagtaccctgtatattctgagaaagattttcttccaaaaatcttttaatggataaacaaagacgagcatgttctgaagggagatcctgaagagaagtaggaagtttcctatgtatcatctttatatctctcttataaaaacaattattttattagataaaatatctagaatatatttaatagatatctcataaaaaattattccttgccagcactgaatatttaagataaacaccttcatctattggagaggtgtccgagatggcctaaggagcacgattggaaatcgtgtgtgcgctaatcccgcaccgggagttcgaatctccccctctccgccatcttctttaaaatagaactttttttacatcttatttcctagtacaagtaggtttaacaccccagcaattgtgggctttctaaggtttttccagcattagacttgtgctcactttctccatttgccattttaccaaaaaaaatatcccttttatcctctccatctccgatacatgcaaacactcctgtcgaaagtatacctattctcaatgctttgttttgcctaattttaagaggagtactgtttcttaaaccttcagtttagagagcagaaaacagagtaacaagcaagatacaaaacaatcatttattgcatctcaacaaagccttaactataagctaacttatttgaattacattaataacggaaggtaaattttgatgatttatggtatctgttacaaacaattcagcaaatcctgcttggcttattctatctatgcagtcttcagaaaatatagcataggtaatacaagcgcctacttagttttcaccactttatattaatatcttcaatgtgttacatagagtatagccaacactatctactaatctcatctacaataatgcaatctttctcagtgatatcgcctatcatatttgacataatacacttcccatcagagttacatgccttgttaatcattgaaagaccagtcccagacttcaaggccaacatcatggctcttagcaagccaccaacatcaggggatgcaacaatacaattattacttacctgaaattcattatcaaaaagatctgttggatcaaaattcttaaccccaattttaaaaaacctttggattgttttgagtacatatctacgtagccactttgtcgatgctgctagtttcaataagcctcacaactaaacttgctgatatcaggccatattcttatgatggcctatttgcttacctagccgaaatatggaattctaataactactattaaaaccgtctctttttgccgtatctgcagtaataacagctccatcagatgatcatttacaggtctagttgagcagatctagttgagattattgtataattacatctctgccatattgatccttgtttacttaaactttcaactcttgatcaacaagcttcttagtgttgacaataatagtcgcatccaagtttacctgttacctacttaaaaaggattgaatggctgcttcgcctaggattatcataacttacctccatgtataatatccgcaaattctcttgctttatcttcgaatacacctaccccggaggtttcaagtattgaaaccagtttactccctataatcacaccatcagcaatttgactcacgtatctggcctggtctatggatgatatgccaaatcctactgctatttttgtattaggtaaggccttacataaactatacaactcctcttctaaagtattcgataaatcttgttggatacctgttacagaaagtcttgagatataataaataaaacttggctggagcgttatataaatcggtagccttgctagatctgttgtgggcgatacaagcaacacaatttctaacccaacctcttgaagcatagcataaaaatcctctccttcttctggaggaaggtctataattagcactccatttaccccagctgctttagcttggtgaagaaatttatcgtagccgaaagccaagataggattaaggtaagtaaaaagtatgattggcgttttgcaacccatcccccttattacttgtacttgttttaatacttcaccaaagttcataccatttcccatagctacctcagcggctctttgatttacagggccatcagcaataggatcagaaaatggcaccccaagctctattatgtcagcaccagctcgtgcaagggccataatagcttttgttgacacttctaaattagggtgtccacccataataaatgggataaatatagacttgtagttgtcaaatgctgcttttatcatttttatcctcctaataggttgctaaggtttctacatccttatcccctctaccagaaaggactatgagcattatgtaactttgcggtaaaaatggagctactttaatagcataagctatagcatgcgcactttctaatgctggaataattccctctagctttgcaagtgtaaaagccgcattcaaggcttcttggtctgttgcataagtatattgaacacgttctatatcatgcaaataagcatgttccggccctacacttgggtaatcaagtcctgccgaaatgctatgcgtattactaacattcccatggtcgtcttgcaaaagatagctcttagtcccttgtaacacacctggtttgccaccattaaatctggccgcatgctctccaagacacagactaataccaccagcttcaactccagtcatttttacttgcaaatcttgtaaaaatggatgaaatagacctatagaattactacctccaccaacacatgcaactaattcatctggtaactcatcaatcatttccaatagttgcttccttgcttcaattccgatgattctttgaaaatctcgcactattgtaggataaggatgtggacctagtgctgaccctagaacatagtagctatctttaatattgctaacccaatcgcgcattgcttcagatgttgcatccttaagagtttgagaaccattatgcactgcctgcacttccgcccccaatatttgcatccgtactacattaaggtgctgccgctccatatcaatagctcccatataaacaacacattccataccaagtagacttgctatggttgcagttgcaacgccatgttgccctgcgccagtttctgctatcaacctacgctttcccatgtgttttgcaagtaacccttggccaaccgtattattgattttatgcgcacctgtgtgagtcaaatcctctctctttagatatattgttgcaccaccaaggtgctgtgttagacgttttgcaaagtatagtggcgttggccttcctacaaagtgagtgagcaaatcttgtagttcttgcttaaaagctacttcgtgttgaagctttagatacgcagcttccaattctgcaagtggcgctattaatgtctcaggagcataagcaccaccatattcaccgaagtatccttttttatttgacatttttacacctcattaaaaattcttttatagctagcggatttttgattccaggccgttcttcaaccccacttgctacatcaaccgcaaatggttgcacatgttttattgctgcatcaacattcaaattatttaatccaccggctaaaataagcttgtagtcggtaagttctctggccaagtcccaattagcaagcctaccagtaccaccaagtaaaccatcttgtcgttttggggcatcaagtaatataaacccatactcttgtaatattgaagattcaggtaactcatctttagatgatgcttgcaaggctagtatgattcgctttttatccaaaggtaatttgaaatgtagttgatatatttggatcagatcaagaaactctaaagcatctaacatctcatcttgagaataatcgatcaaaattcctacttttataacatgtattggtaattgcgaagtaatttctcttgctttttccaatgaaacataacgtggggaatttttataaaaattaaatccaatcgcccatgcgccattgtttgctgcaaacaatgcatcttctagattagtgattccacaaattttagcttttattacacacctcagatatcaatttttgtagttcgactccaggattctcatatttcatcaaggacgaaccaattagaaatccatcaaatccaatatccatcatctctcgaatttgagtggcattatctatcccactttcacatatagcataacaatcatttggtatatactttatcaagttccaagcggtatccaaactgatttctaatgtttgtaaattccgattattaatcccaataatttgaggagaaagctgcaaagcttgttctaactcaaaaccatcatgcacttctataatcggtgtaaggcctaaatctaaagaataatcataaagctcttttaataaatctttattcaagaaggccacaataagcaatacggcattagcaccatataaaagcccttgtgcaatctgttttttgcttaaaacaaagtctttgagtaatatataagaattaagatgagcacctctgatatctttaatgaaagatatgctgccttggaaatagtcaggttcagctaatactgaaagagcagcagcacctgaattaagataatctccggcaatatcgacatggtttagtttaccttgatatatctgcccacaagaaggacttgaaaattttacctcactaataatgataggttttgaagaggtggtgaatatcttgcagaaatctagtgtatttggcatttctacgaggctatcaggcattaattcaactcttcttgtaacatgtgacctaattttttctaaaaaatttacgctcaaattgaacctctcattttatttaataaggtagtaactttcccctgttctattgcgtctttagtaagcaatataccttctgcaatactagaagattttccagcaacatataatccagctgcagcattgagaagtacaatatctaacttaggaccattaattgtaccagataatatgtcacaaataagggttgcatttttggcagcatcccctcctcttacatcagaaagttgtgctttagaaaaaccaaaatcctcaggattgaggctatattcttttatatctgtaccattaagctcaattatatgagtgttactgcttatactgaactcatctaagccatcatctgaatgtacaactagcgcatgattaaccccttgagttgctagtacttctgctactttttgtactaaatcccttcgatatacacctatgacacatctttttggtcgcataggattaagcaaagggcctagtatattaaaaatggttgggaatccaagtttttgacgcaatgctccatattttttaagttccttattaaataaaggagcccataaatatgtgtagtttatctgttgcaaactttttaaactttcttccacagtctgagctattcggatacctagagcttgtataacatcctggcttccaactttgcttgtagcactcctgccaccatgttttgcaaccataatgccgcagcttgcaattacaaagcttgcagctgtagagatattaaatgtgcccttactatcgcctccagtgccaacaatatctacaacttcaaggtcatgtgttatcttggctgaatgcttgctaaaatattgcaatgcaccaagtgtttcttcagctgtttcttttttagcttggagcaatgttaaaacagcagactgtttttctggttcatattcagcaaattcagtaaataactcataagcttcttcctgagttaaattttttaagtgtaataattttttcatcatgttaccttctgcatttggttatattctggctttaaatacaaagacctttccataatgaattgaatttgctcaatacaagactcaatattgcggagtgaaatatacaacggattcacacataggcgtattaaatctggcgcgcggtaatcacagataaaccctgcatctataagtgcacgcgagaatgcatatccatgcttatgcatgaaagcaacatgcccacctctattttgtggagcatagacttctataccatgactctttaatgattttataaggatattactatattccttggctatagaataagatttaactattacctccttatcaaatatttccaaggcagcttctaaggctttcatacttaatatagcaggagttccgctcataaactttcgtacaccaaaagaggtgtattctttttcaaaagaaaatggctgattatgtcctatccacccttgaatcgggctttgcatgtgttcatgatacattctatttgcatatataaatgctgggcttccagggcctccgcttagatatttatatgtacaacctacggcaaaatcagtgctactttcttctaaatccactggaactatccctatgctgtgagacaagtcccatacggttagaacaccatatttgtgtgcatattcattaattgttttcatgtctaacacagaagagtctctgtaattaacatgagttaacataagtactgccactgtctcatctatatttttgtatatttcattagattttatatactttacctcagatatcccttgtgcaatatataaatcagctgggaaattatcatcagtagtgagaataatgttacgtccattttgtagactcatagctacttttaatgccttaaaaagatttagcactgtagaatcacatacaataacctcatcaaattttgcacctacaagtgcagctattttggctcctaacgcatatgataaatcaatccaaccacttttattccaactactaaccccatatgaagcaaaatcttgtagcgtgctacaaactgcatctgaagttgttttaaggctgggccctaaagaatgtccacacatataaactttgcattcaggtaaaataaacttatctactaacatctttacttccctttttgtatagcaagcacaatcaacactatacttcctgtaaagaattttaagtctgatggagcaaggcccaaagatagagctactccctgaatttgttgataaataagtgatccaatgataggagctgctaactgctttggtatcgtgctattacccactattgattctccaatcatcaggctggccaagccatggatcactataccaactcccatacctatatccatgaattgctgcatctgcaccattaagctgcctgcaagaccaaacatagacccagcaatgaataaacctaggcttgtatacttatttatactaatcttatggtttatagcgaatttaggattgctacctactgttcgaaaacgtaggccaaaatcagtgtgtaaaaataaggcaaaaggtacaatacaaaacataccaacaataatcagcgatataaaatcaaaatgtatgccatccatatcaaacaatgctatatttggcttgcccataatcctaagattaatgctataagccatggtactgagtataattccagcaagtaaactattaaccttcagtcttaaagcaacttgcgatgtgcccactgccagtaatcctccagccataataccagccatcatagctaatatttgcggcatatttgcaaccattaagcttgcacataccgcccctccaagtgggtaagctccttctgctgttaaatctggaaaattgaggaaacgaaatggaatcataataccaaaggcaataattgctaatattaacccttgtaatactccggtgtagagaagctcaattgacatttccacctccagatactagaagctgatcttcatattgatggaacatcgtaagcaacccctgcacagtcatggccttcttttgagccccatgaatgtctaacactattttgccttggtggagcataataaggcgattaccatattttatagcatcatccattttatgcgtgatcattatagtagtgagtccatgatttatagcttgttgatgagtatattccataagcaaagtttgcattttaggatcaagcgctgatgtatgctcatctaacagcaaaatttgtcgaccagaaatgattgccattagggttgcaatcatctgcctttgtccaccagataacatttttagaggttgattgatataatcctccaaaccaccatctaactcttttagtttttgaaggatttgatctttatatcttttataaaacaacaattttggttttattatttcacttaaagcaatattctcaagcagtgtcatttcaggcacagtgcctaaatttacatcttgtacaacttgtgccacgtcaccacttagctttattgcaccagaatcagcctgatattctgagcttatcaacttaagtaaagtagatttaccgcatccgttagccccaataaaaacacaaaaatctccacgttctaaatatagacttatatcatttattacaggcctaaaaagtcctgggaatgactttgtaacttttataatattaatcataagtcactccacaatttctatattagaaggaatggcaatacctaattctattgcaagttttttattgatcacgccatggtgatcctgagcacttgggtaaattggtactaattcgctaattttttccccatgtaatatcgcacttactaattttcctgtatttctaccaaccgcatagtaatctaccccaagaccagctattaccaatccatctcgcacagcttgaatatcagcattgaacactggtatacgcattttgtgtgcttctactgcaattgctggtagtgttggctgtattggcccgcttacgcctacatatattagatctactttacctttaaatccttgcatcctaataggcacctctcttgcttgttcaactggtatggcaacaacagacatgtcgtactctgaagctgctgattgcatcatcttcaccaatgaggtgtcattgctatcagaagttgcatataataaacctatgcttttagcgttaggtaataaaaattttgcaaactgaagtaggctgttaaggtcttgcatatcagaactacccgtcatattatcatctgatttattgtactcttggagtaaaccaacacctacaggatctgtgactgagctataaattaaaggaaggtttttgattttacctttagcaaattgggcaatgggggtagatatcactaccatagcttttgggtgatgagctcttaggcttgctattgtttgtggtatgagagcgtgatcaaagccgacatctgcaatttcatagcggatagtttggttctcggtaaagccttctacttgcatctgctctttgaaaccagctataacagcatcaagcgatgtatgtggcccataattagctattgctacaacaggcagcttattgtttaccttattattataagtaataaatgctattactaaagttataactacagcaataaaatagaagaaatttttcttcatgtgtactccatgtcaatatttgagttttatagatgaaggtgcattagattaattctaatgcagctcaattacatataagaaagtaactattaaatatattggccgaacggccatgacatagagaaaatagaggatgattgagatagatattctaaaatgagggataacatgttataaaccatagaataaaaaattgacaacgtaacgcccacaaacaacttagcgccaacgccatcgcccaactatcaaattttttattactaagtttaacaacattgtttttgttccattataaaataaatttataataaaaattataattaaactaaaatgaacgaactgtcaagcacataatatttttttagtgtgtaatgatagccactctgtttaaattaacttacaactaaataatttgctttgttcatgccaaagatttggaatgttttacatgagatcggaaggtttcatatggcagggttgatgccctaaaggaatagcttttttaagttttagtacaaggaaattaaacctgaaaatcagctgtatatatttagctgtgactttatttgcatcacataaatctacatgatttgatatttacccaatttaagctgacgctgccatagttgaacatagatttgactattatgatataatagccggattctgagtcgttaattgagtttagcctttaggcaccagtaccactttctactaccttacttttaagatgaatgggcatgaatactgataattcattttaccatagatatacctctattccttcatgcagtaataaactctgtagcctatctgtatagatgtgtacaccaatgccatcctatcacataaaaactgttttgagcagcaaacaaatggtgcaatattgcttaatgagaaagagcaaatcctaaatcacgtcaacctactgcaacattacaaaggcttcatctatggagtttatcccttcagagactttatagcagtaacttcagggcattcaataagctgccgtacatggttttatgatgagaaatacagcttttgccatgtaaaatggttgatgaaggtataataacaataaagtttatccttctttttggtgtaggttagtgtcatggacacatcacaaacctaacaacgacttctttgttaataagataatgacatttgaaagattttcacaactccggctagatcatgattgatgcagatatataacaacaaatacgatatcggagcttgatgcttgaaaacagcaaatttggttctctactttctaattactcaggaataaatccttacaaagtcgcaagtcaatctttgatatgaggggagttataggccacaggaatgtttgcttgatgcagttttttcataaccacacaggcaatttcgatagattctagttcttagtttgatatgatgtaagcttaatatatctctaccttttattatttattataccgataaattattgtggtaaactgatctaccccaatctgactttattatatcataccaatttatatcagtgttcattttcttacttacaatcatctcgactaagcacaaaaaatataataagataacattagacattgtgctaactatttctataataaatattttaactactttactaaatatagtatcatagtattaatcttacctatagttattattatgaatatgataaaacactgcttaatacttattatttttttagtaactacattacatacccatctatatgctcaccaggcaaataggactatacttattacagcatccactggtgctattggagaagctatatctactctactagcttcagaaggatataacttagttattgctggtagaaatagcaataaacttataacccttcaaaaaaaattacaaacaaagcataaagatatttctgttcaaacagttattattgatttttcaaatattgaatctatagaaactgctgtaaaccaagttcaacagcttcatggtattgttctcattggtccaagaccatctttaaagaaagaagatatccctagtaaagaagaatggaataaagcatttaatgaaacttttattaatccacttgaagtacttcgacattttaacccaaaaatagcagataaaagtagcatagttattatttcaggtaatacttctaaaaactatttcccacaatttcctaatacaaatgttatacgtgttgcttgggttgctgaagtaaaaaatcttatatacttttttgcaaaacgacatatccgtgtaaatcttgtctctcctggaattatcttaacagaacatcataaaaaagttatccaacaaaaagcaataacacataacatatcttttaaagaacaacttaccagagaggtctcttctattcctctaaaaacatatggaacaactgaagatgttgctcaactagtatcatttttactttccaataaatctaaacacttgaatggagcaaatattacccttgatggtggagaagctacttcttattaaatcaataatacagtacgttactcttttcgcctttaatatattagtattaatgacatatggtctgaactttttctaatccaatcttctggaataaaagatcatcttgttctggttgtggtccatcagttgtaagaagtcttcctccataaaatatagagtttgcccctcccataaagcatagcgtttgtaattcatcagacatttgttcacgtcctgctgcaagtcgaatataagattttggcatcaaaattcttgtaagagctattattcttacaaaatcaaatggatcaatatcactttgagggttaagaggtgtacctgcaactttgacaaacctattaatagggacagattcaggctgttcttctaatgttgcaagtaatagcaacatggagatacgatcatcaatagtttcacctaaccctattataccaccagaacaaagtttaataccaaattttcttacagcctttaatgtagcaagacgatcatcaaaggtatgtgttgtagcaatgtgctcataaaactcaggtgatgtattcatattatggttataaaaatcaagccctgccttttttagcatagcaatttgatgttcttttaaaaaacctaaggttacgcatgtctctaaacctaatttttttacttcttcaatcatctgacagacaattttcaaatccttatctaaaggactacgccaagcagctcccatacaaaaccgagtactaccaagttcttttgctttttttgcttctgaaattaaagtatcaatatccactaaaggttctttttgaagatcagttttatagtgagaagattgagaacaataaccacaattttctggacagttgcctgtttttatgttcaaaagcatactaatctgaatcttattaggatcaaaatattttctatgtattgtttgagctttatataaaagttcaagcaaaggaagattaaaaatttgctttgcttctttaaatgtccaatcattacgcataataaaaaataaccccattattaaaaaaacaaaaatgtattacagatataaacaatatatatctcatcttcatgatacaaaaaaatatcgtagcttaccagtcattcataaaaattacaaaaaagatatccttgatttttctacaaatgactatctacaattagcttatcaccctaaccttattaatgctgcaattatgacaggtagtacctatggagtaggatccacaggctctagacttctttcaggaaataatgaactatttgaacgtctagaaactactattgcacaagataaacatactgaaacagctatgctgtttatatctggttttcaaacaaatgtaagtgtattatcagcattattagatcaccatgtattaaaaatgcaacctcttgtattttttgataagttaaaccatgcaagcctctatcaagctgtttttttaagtaaagctgaacttcttcgttattatcacaataatatggaacacctatcatcccttttaaaaaaatataaagatgataatagacctaaatttattgttacagaaacactctttggcatggatggagacatagcaccccttacagatattgtttcactttcatcgcaatatcaaacatttttgtacttagacgaagctcatgctacaggtcttacaggtattcatggatatggcctatcaacaacagtaaatctcagtcatataccacatatagttatgggtacttttagtaaagcacttggatgtagtggcggatacatagcttgtaagcaacttattaaggattacctaataaataaagctactggctttatttattccacagcaggctctcctatggttttaggagcagcacaagaagcatggaatcttataagaacactagataaccaacgtgcacacctcaactctttaagtaaagaattacgagatgggtgtaaccaactaggatttaatataggaactagttcttcacatattattcctcttattttaggctcagaagaagatgcatctcatgttcataagaaacttttagaacaccatatccttacctcttatatcagacctccaactgttcctccaaagacgtctcgtattcgtattgctcttaatgttggtcataataaagcagatatagagcgtctactacaactactttcgaccttatgaaaaaatattttatattttgtcacggctttggttataataaaaacttttggaagccgcttttacccttttttactaatgaaaaatgtttagtattagatctaggctattatggaaatcattctttattaacaagtgatattagaaataaaaaactcataggtattggacattcattaggtttattaaaacttttacaattaagtataaactttgagtatcttattggattaaacagctttataaactttcttggtaatgatactcaactagctctaacaagaaaaactgaactccaaaggttgaccaaacattttctcgtctctcccctaaaaactctatataactttcacaaacgatgtggtgtacctattaaaaaaaatatattaactacctttaatttttatacattatatgaagatcttacactcctttcatctttatcaacaatcccatataatcaaaaaggacttattataggctctcaaaatgatcctattgttcctccgcagctcatctatgataattttaaaatatatcctaatatgactataaaaataatacctagtggtggacatggactaggatttctatatcctcaaaggatatatcaatatattaaagacgttttaatgtagaataaaaattaattaggtaatgataaaacaaaaaatacaatccagcttcgacgttgctagtgatacttatgacacagtagcccatatccaaaaagaaagtgcatatattttagtaaaaaatctacataatacaatatctacattctatcctaaaacaattttagacttaggaactggtacaggttatatccccgagatattattatcatattatccttatgcttcttttatgcttaatgatattgctccaaaaatgattaataaggttcaacaaaaatttaataaaactagcaatatttccttttacataggagatatggaatctatacaaattaaaccatatgatcttattatcagtaactttgcatttcaatggatcgaaaaattagaaactatgctaaaaaagttatataataattcaaaagtattagcattttcttgtttacttgatggtacatttaaagaatggaaacaaatcttacaatcttataatatcccatcacccttaaaacaatatccacaacaaccagtattgtataaatgtatatcagcacttggtagtaccactcattaccttgaaacaaaatgttttcagctaccatttactggtgcacgttcttttgtaaactatttaaagcaccttggtgcagctgtaagtaataaacctcttcccacccaaaaagtaaaaaatcttattacaaactataatgaatcatttcatgtaacatacaatgttttttttggaatcatggagagaaaatagtgcaattttttattataggaactgatacaaatgtcggaaaaacaatagtgtcaagttggttatgcctgcatacagcatatgactactttaaaatgatacaaacaggatcaattaatggtaccgacagtgatatattaaaaaaattgacatacagtaaaatacataaagaagcttactgttataaagaaccactatctccacacttagctgcaaagcttgaacaagacgaaatcaacattaataatattatactaccaaatgcttctaatctagttattgaaggtgcaggaggactacttgttcctattaatcagcaatatttgcttcttgatatcattagttaccttatgttacctgttatactagtcacacattcacggctaggtacaattaaccatacactccttacattacaagcactcaaatcaaaagggatagaggtagtaggagtaattgtaaatggtaagcctaaccaagataactgtgatgcaataacttggtatggcaaaacaacaatacttgctcaatttcccttcttatctacaataacaaaaacaactttaagaaacattccattaacacaagaactaaaacaactctttatagtataacatatgctttcccttacagaacgtgataaaaaaattatatggcatccgtttacacaagaaaaaactgcagatccagttataagtattagtcatgctaagggttcatatgtttttgatgaaaacggaacagcttatcttgattgtatttctagttggtgggttaatcttcatggccattcacatccagatattgcacaagctatctatgaacaagcactaaaacttgaacatattatttttgcaaaatttactcattcccctgcagtagaattgtgtgaacaacttacatccattcttccactaacattaacaaaatgcttcttttcagataatggttcaacttcagtagaaattgcattaaaaatggcataccaatattggtataacaaaaaacatcctgaaaaaacactctttttaagttttgaaggtgcttatcatggagatacatttggtacaatgtctataggaagctcaggctttcataacattttttcatcattttttttcaatgtattacgtattccatacccagatacctgggatggagataatgaaatagaaaaaaaagaagcacatgcactccatgtcttagataaatacttattggaatataaaaacacaattgcagctattgttattgaaccacttatccaagctgcaagaggtatgagaatatgcagacctgcatttttaaactccattattaaaaaagttcgtaatgcaggaatattagttatttttgatgaagttatgacagggtttggaagaacaggaacctactttgcttttgaaaagctagatgtaattcctgactttttatgtctttcaaaaggactcacaggtggatttttacctcttgcacttactatcacaactgacgaaatttacaatgcatttttacatgaagaatggaaatatgctcttgctcatggacattctttcactgcaaatcctttaggttgtgcagcagcacttgcttcattaaaactattattacatgaaaaaacgacattagctatgcagtccatccaccaggcacacatagatggcatctcatttttacaaaaatcctgttcaaatgtaaccaaaacacgtgtattaggtactattagcgcctttgaacttcatgatactactcatattaaacagatagaatcctcttttttagctaatggattactattaagaccacttcataatgttatttatataattccaccatattcaacaaattataaggaattaatggatgcttataacaaaatatgtaaaattttataaggaaagtcaggtaagaactaaaattacaatttttgtctgatttctcttattctatcactattatattccttactgtataataactttacttgtcttatctagcttacttaaaatttcaactaaatcatcttgtgcaaaggcaatacaaccatctgttcctaaaaatccttcccttgccacatgaataaaaatagcactacctttactaggaataggtggactatcattataacctacaactataataagatcataaacatcgtcatctctatataatttttcatgacttattgaattgttaaaacatgttaaatcaacaaatttattatactgaatagatgttggatcatcacaccacccatcattcttttttatttttctactaggtaatcctgtttttatgttatttcctattttatcctctctaaaaaatactttacgcaatggaaactttcctaaaggagtagatttatctccttctaccttacagtttgaagtaccatttttacctatactacacttatatgttttttcatctaatgttgcttggcaaatattatctttataaactatatataaatcatgagcatttgcatgaactattaaaataaacaatattaatagagtatgaaataactttagcataattaagatctttattataattatatattaataaatcaatataaataatattaataaaaaaatataaatatagaaaacattaattttttttttagaatagatatattgtctatctataacttactaagtatagtataaaattttattattagctatttataatctttagtaaattaaaataataatattatattcgataggtcaattatggagtattctatagttatattataactctatataataagtaaaaaattatatagtattaatactacattatgtaactaaaacattacgtagtacttcatatattctaatacccaactccaactacttattaatgacaactatactcttttcagtgagtttactaagtaagctcaaggagatcttatttagaaaccttacattctgtaagcaaataatgctggttagctaaacgaataaaaactgcacttcctttccctaggacagttggactatcttataaccaactacaataagcaaattaaaaaatcatcatgtctatgtataaagtttattagcatatatatcttagttctatatatttattataatatttagcttaagaagcttcacatcaaacattataaaactgtaatttacgtgtatgtaaaactgtctttaatataggatagactttattttatctaaaaaatttatgtaatggaaatgttcctaaaggagtatattcatcttcttctattttttttacttgaagtactattcttacaaagactacgtatatactttttaccatataacgatgaaaaacaagaatcattattataaaatatttcaatatattgttctacaacagtagaaaaacataatcagaatagaaaataaaaatactatacttttttactataaattatctcttaactatattattagtccttatagagagttatagtatacctaactatatactaaatatctttagtgaagatacgttttagttatttaattaataaggtaaaataaatataaaaaggtacaaaaagttgagaatagtaatggagcgggagacgggatttgaacccgcgacttcaaccttggcaaggttgcactctaccactgagttactcccgcagatggaggcggcatccggatttgaaccggagaataaaggttttgcagacctctgccttaccgcttggctatgccgccatagtattttataaaaagcaagtagggcaaaaatgttattgtttactacacataataagccaacttaaaataacaaatagagataacgtctctattcctatgttaccttatgatactagcgtagatatattcatagccagctgaaacatatgtctatccaagttcaatgtcaagattattgtgtgaatattataaatgagatcagatataaagtaatagctattaacaaaaaatgcttgcttaaaaactctagatcttctatgtccaaattaagaataatgaataaatatataagagaaaaatgaataggtaaatgacatggtagagaaacaaaaacgagatagttttacatctaaaatcggtatactggcagcaacgcttggatctgcagtcggattaggaaatatatggaaatttccaactgtaataggacaaaatggaggagcatcatttcttcttatctatattattgcaactattgttgcaggtcttccaattatgattgctgaaattgctattggccgctctactcgagcaaatgctgtagaaggattcaaaaaactttcttcaggttattggtggttagttggatttgcaggtacactctctactgtctttgtccttggtttttatacagaagtagcaggctggatatatgcttatatttttaaagctgcaaatggctctataaatacaacacaacctgttgttgcaggatacatttttcaagaacttcttagtaacccatggcaaacactattatggcaatggcttgtaattattcttgttgctacgatagttttacgaggtgcatcaaaaggtattgaaaaagctgcaactatcctgatgccgattctctttatcctacttatcattatatgtatccgtagtataacactacccaacgcaatagaaggactacgtttcctttttatgcctgacttctcaaaaatagatggtagagttattttacttgcaatgggccttgcattttttaaactctcaattggaatgggtgtgatgctaacctatggtagctacttcaaagatgatgttaatattccttatatggctacaaaagttatgctattagatctagttgtatcacttctctcagggatagctatcttcccagtagtattttcttttggctttgaaccaagctctggaccaggattactttttataactatccctgcagtatttgattcaatgcctgctggacagatttttacaggagccttttttatccttgcagcagttgcatctacaggagctatgctctcactttttgaaacacctgtagcttgggcaatcgacacttttaatctttccagaaaaaatactacaattattattatgttattctttatagcctttggagcacctgttgcactttctgaaaacatattaaaacacataacaatctttgggatgaatttctttcagctttatgattttctttcctccaatatccttatgccattaggaggctttttcctctgtatctttgtaggatatgtttggaacaaacaaatggtaatgcatgctatttcaaatggagggactttacataatcaaggtcttatcaaacttcttttgtttcaatgtagatatgttactcctgttattattcttataattatgctacatgggttcaatttatttgcatatatatttaattaaatgtacagaaataaccaagtaaaaatattcttatagcttaaaaagaatatttttacttggttttgctattttaacttacttattaagtaaactataaaaaaatcagctttccatagttaatggtattactccactgaatatttacagaattaataccaatagaagcccaatgctttttaagcatacctgcatgcccataaaaaaaacctttacaaaaagatggtaaacaaacagaagatggagattgaccaatttgttttactttctcataaataagatgaaataatgcttccccctgaatcatacttcctaatgcaggatgtcttggccctgctaaaatggaagcttccaatgtatcttcaggggctaaacttaaccgaataacagggatctttttagaccacgcccttactaatcccttgcccaatatttttactgttgtattaatatcccatggctgatataagccctttctccatatatcagcaagttgtgtaccatcaacaactaaacatggataaaaccttaagcatgcaggattttgttccaaagattgttcaacgtcattaagaaaaacttctgctgtacttccaggcattccaggaagtaattggattcctaacctaagaccagcagataatatgttataacatccttctttaataatatgttgtgtataaccacgccgtacaagacttaatgctatatttgaaaaactttgtactccaagttcaataagattgatacctgcagctttaagtttagtaagtattgctgggcttactgcatctggtctagtagaacatcttgcaccagatataagcccttctgcaagacactgctttaccatatttaaacatagttgcatgctagctgtaggtagtaatgtgaatgttccaccataaaaagcaatctcaggaagtaatttttcactagaaaatgtatttttttcttttttcaagcgagtaaaaaggttggcaaggttatcagaaagagatatcttgcttcctccatatcctaagcctgtttgtttatcttgagcacagaatatacatcgatgtggacatccttcaaatggtaaaaaaataggtataatacgattatactttttttcccctaatactccaagttggaaggaatatgtttttatattagtatacatacaaatatagctccaagcatatattaatagtatatcctaattataactaggtataaagagaacatttatgagtatgtcaaatcaaacagattgcattttttgtaatatcatacaaaaaaaaataccctgtgtttccatttataactctgataactttattgcattgttagatataaatcctgtgaataaaggacatacacttattgttccaacacaacatgtagaaacaatgtttgatatagacccatcactagggacagatttgcttagtattatgcaacatattggccctgccattatgaaagcgacaaatgctgagggagtcaatgtaatacaaaataactatgtggctgctggtcaagaagttcctcatcttcactggcatattataccacgctttataggagattcacgtatacgctgggaaaaaggaaaatataaaaatcatcaagaaatgatagatattgctacaaatattaattccataatttataatgattattcataagcaatatcctatttattgtcatacaatcattcttctatcaattcaacttctagcctactctttctggagaagatatgaacaatgtactaactaaagtagatatcattgatgctatttatgaaaaaataaataacaacaaagctgatattaaaaatattgtagaaactctgttatctatcatgaaacaagccattaaaacagataatacattacttattagtggttttgggaaatttgaagcttatagtaaacatacccgtaaaggtagaaatccacaaacagatgaagctattactctaccatctaggaaagtcattgtttttcgattgtcaaaaaaatttcgtacagaacttaataaactgtagcattctatttgtaagaatagaagaagtataataaatacattataattcaaaaataactagatttaattaataaactataaaataactatgtaagtttgtagctttccaagctaaaaaggagggtttgatatttcataatttttattaactagctttttttaatgctacaaaaaatcgtttttcacctcctatagaatatgggtatgttgtttggatataccaacaactatctatattcttaggaatatcatttaaaagtagaacaataactcctttaaaagatatctttttttctattaacttaagaagagcctgccatggcataaaggcacggcttacaattaatgcaacatcagacaaacagtttgctaacataaattcctctacacgaccacaataaacatatgtttgtgtaagaggatattgtgctaatagtgttttaagaaaaattgcacgtttttctcgagactccacaagccagtaagaaccttctttccatataattctaagagggataccaggtagaccagcaccagaaccaaaatcccaacaaagaggatctgtaggtagacttagggaacgaataaatattgccagatgaaaactatctataataagatttgaacatattgttttccaagttgtaaatcctacaaggttcataaccttattccatttcgtcaataaacaaagataacctcttaatgattcaatctcttgatctgaaagggaaaaacctaactgtaaacaatactgtcttatttctgttaatggaactaaagaactgattggcaaaaaactattcctttatctatctaatatttttacttaacaaagtacaacatgtaaccactatttgagtagtactgataagataatactatattataaaattattgtttaattattattagaaaatagcttattatgacttttaaaaaacttaatagaaatatagattattaatatatcttattgattctttaactaaccctataacaaaataataatttatccatgtcaaaatctactagtcattatttagatacagtactaaaactctattcagaacttttaatagctaactgaagagctttttcaagctgttctgatgtgtatacatcacgaaggactaaaggctgatttgctttttcaccagatgggaatatggctgtcacaggaatacttacactacctaaagctcttaataatgcttcagcttcactatgcttatttgttaaatcgacttttataagctttataccatactcattaaccaactgttcaagaaaagatgttgttaatactgttttttcaagtagtttacatgttggacaccaatctgctgtaaactctacaagcattggagttaaaccaagttctttcctaaactttgtatcagaatatgacagccaatgtgctttttcagcaggatgaaaactccaccacacagacattgcaatcatacaactaactactacccctacaaccactctttgagtactagatacagaaagtccacccaaaactccccaacaccatacagcaaaagctgctattagaagagttactattgcttgaattaacattgtttctggtaaaatagaaagtaaataaatagtggtacctaaaaggaaaaagcctacaagttgttcaagagttccacaccatgcaccaggtctaggtaaaaatcgaatggcttgaggcttaaaggcaaaaataatgtatggaagagacatacctagccctgtagctaaaaatacaataaatattatataaaatggctgtaacacagcccaacctagaacaccccctaacaaaggaccactacaaggagttgcaagcaaggttgtcataacacctgtaaaataggcctgaatacgtggaaaacttgttgtttctattttgaaatcaataataggaagtgtaaaaaaaccaaagagagacaatgctaaaataaaaacaataagcattaaaccataaacaactggtacactttgaaaaaagccaccccatgctaattcaagaacttccacacctaatgctaacataacaaaccaactgagaattccagctgcaaataataaattttgctccctaacataacggaaacaatgctctcctttatacccaagatgagaaagaataaaagaaaactttagtgttaaaacaggaagcacacatggcataatatttaaaataagtcctgcaaggaatccaaaaagtagtgcaagctcaatacgtgtaggttcaagcccagactgaaaataacgaggatgcaaatcccatgggaaaagactttctgcaatatctgttgtttgttctgtagagtctatcaagtgttctgattctgctgtatgaacaacaggatttgtatataatagatatgtatcctcccatggaacttcatcaatactaggtaaagggttaggaagtgtaattggaatagtacgattaacaggcatacaatgtttagaagaacataataataaagataactgtacttctgactcaggcgttaatgcatctctctgcacctgcaaaaaaatagggaattcgccactataaactttctttatgcttataccagaagaaacatcttcatggatttctccttcaggataaaaaattctactctgaaggatagttcctgatgaattttgaaggacaacttttgttggaagtccttctttttcattatgagtgtatgtataatagttatcatctactgttaataccattttaataataacagtttcaggagaagttcctgtatcaagagcatatgcaaattttacatctaatggtgaatatgttatgtctgctgctactggatggcttatcgacaaacaaaaaataaagtaaaataatagtagataaataatacgatactgtcgcatacaaccagtattccttactatataatataaaaaacttgacttaactttttactatcgataaacagctcttcatacttacctgaaatatgggccattagctcaattggtagagcagctgactcttaatcagttggttcggtgttcaagtcaccgatggcccaccattttttatacaattctgagatactcattaatatatttaattatgtataaaagaaatagtacactaattttaacttctacgccctaaccattatatataaatataattataaatggttgcctgatgtaaatcaataactatccataaactgcatgaaatctattagataacgctttactataactttctaaagtttctgataaaaaaagttcacttgtctgtgacttcattctatttgaagaaatatctactaaccatttacgccatgaactattaacaatagctttttgtattactttctttaatgctagtatgtttcctggttctaccagtgcctccaaaggaagcaagtctggcattacacctacatttgtagatataagaggccgtttacaagctataatttctagtgcagctcttgctatagtttctgaacttagtgaagctattactccaagatccattgccgataaataatcagtaatactttgtacataacctgtaattattacatatggttcaatcttagcttcttttatccaaacttcaacctcttctttacttatagttgtaggaaacccaataagtaataagcgaatagatgtatacccttcttgaatcaataatgcgatagcattaataagctctttttggccttttaccctatcaaagcgccctaataaaccaatgacaaaatgatttgctgtaaatccatatttagaacgtactattcttcttcctaattcagaaaaataaaaacgttggttatcaacaccaccaataatagtatctattaatgattcttttacattaagtaatgacgtaatatgagaactcatttttgtatttgtagtaattatggcatcggtcatacttctataaagaagtttattaaaaatatttctctttggtaaacgttgatcaccacgagttcttactagtgcatagttacctttctttcttaatatcccccataaaaaaacagcctcccctctatgacagtttacgatatttggcttgaacaccttaatttgttgatatatactttgaataagtttaaaaaaaataaaaggacattttgtatttaatggaagtggaataggagaaaggcccatttcaacagctttatagtgtgtttcagtattattaagagtcaaaacaagtgttttatgtccagcttttataagaagacgtgataactcaagagcataccaggctgttgcattgaaccatcgaacattaataacttgtattgttcttaaacattctggcgttgaataaaatagtgattttggagttgttatagccataatgtaaaaatatagcattataataatgcttcatcaatctagataatattaccttaaatgataagaaaaaactataaaaacagctagttataaaatagattacaattgaaaatatacatattttttattatctaaaaaatatgaataaatataaggggcagttatggctcatacaaataaacattatcttgatttacctggctcttatttttttacagagatcaaccaacgagttaacacatataaaaaaacacacccagaaaaatcaattattcgtttgagtattggtgatgtaacacgtcctcttgtccctgcagttattaaagcacttcatgatgctactgatgaaatgggacaaccttcttcttttcatggatatggtccagaacatggatatgaattccttataggcgaaatcatagctaatgattatacgtctagaaatgttcatattgaagcagatgaaatatttgtaagtgatggtactaaatgtgatattgctaacatccaagaactctttgacccctctgatacagtagctattattgatcctgtataccctgtgtatattgattcaaatgtgatgtctggaagacttggaaagcttataaatggtatatggtcaaaactcatctatcttccatgtactatagaaaataattttatccctgaacttccaacacaacatccagatatcatctatctttgttatcctaataatcctacaggaacagtattatcaaaggaccagcttaccatttgggtaaattatgcaaaaaaagaaggagctattattctttttgatgctgcttacgaggcgtatattacagatcctactattccacatagtatctatgaaatagatggagctaaagaagttgctattgagtttcgaagcttttcaaaaacagcaggatttactggattacgttgtgcttatactgttatacctaaagagcttaaagcaaatacaagagaaggtaatgaacaataccttaatatgatgtggaatcgtcggcaaactacaaagtacaatggatgctcatatattgtacaaaaagctgcagctgcaatctatactcctgaaggacaaaaacaaatccaagaatctatccaatactatatgaaaaatgccttaattatacaaaatgcaattacacaaatgggtattactgctgttggtggtataaatgctccatatgtctggataaaaacacctgacaacctaagctcatgggatttctttgatcttcttttacagaatgctggagttgtaggaacgccaggagtaggttttggacctcatggtgagggatacttccgactcacaggctttggatcatatgaagataccaataaagccattgaacgtattcaaaaggctcttttaatataaaacaatgtagaaattcaatacactttaaaagttaactactcaacctacacaataaaagtaaatgactatcttaactctgtcatagaacacgtttagatttcagaagaactttttgttttggtaataaatttttatcaactacgttatctatccaatctctgaactgcttctcactacactctagctgctcagtatttgtatatgaagatgacgtataaggaataacttttaactgttgtttaaaaaacttttgtggataccctactggacttacaattgcttctaactcctggcaaacataatgaatttttacaatgttaccattaggagtttcccataatgtaaacatcaacatccccccaggaggtgtcccatttggaggataaccatgtatcttccactgtaagtttaatagccctgcaatagattgtatattaccctcatgccctgaaaatataactaattttgctttattaatattagaatctacatctgagcttgttaatgcatcagcaattgcattcaataataaacttcctctacttgtagccatctcaggaagcctgtttacaatattagataacgtattataaatagggtaaagctgttctagttgttcataagatatgttcaaattagtttgattaccccttggccattctccttgcataaataaaaaacattctgttgccacagaagcaaaatgcaatcctccaataaactttaatttcttcttttttttattaaaaaaaacactactaggaatatctaagatagtacatccttctggtaatccatacttcttgcaggtttctttaggacatggacctaaaatatctacaatgagtcctaaaggtttttcaagttctttctgtatctcttgaacttccttatattgttgataaaattcttgaaagactttagacatatcaacaggataatctcctgtttctgttgaattaaaaagaggatccttattcttagagtcaaaaaaaaatacttaaggccgcatcctggtgcaagaccatttaaaatagcaacagctgttgcctgtgttctctcagcagtattagcacgaacatatattagctcaggattaggacatatatcttgaggaagtaactcatttaaccaagggtcttcgcgtaatgcttcccataaattactaataagaatacttcctctagaagtaagataaccattatttacaggccaatatggccactctttttgtgtccactcatctaactcactatttggaactattggagaacgaagtccatgtcgagataggacaaccatcttgattaacctttcttgatcttgctcttttgctgctattggctgaaacgtacctaaaattaaccctactagtaagagaaataaagaaaagttatacattattaccccaaaaaataactatatattattttaaacttcattgtgtttataaagataatatgatttttcattatattgaccatttttttatcataacactcattaactaattataaattagctaagggagtaccaaacctttagcgattacaagatataaatataactttaagagtataataaacttaaaaagtatatcctaatttatttctactaagatatacttcttcagttacctctagatattacattaatataaagtacgttttgatattaatggtctagtttcttttattatacagtctttcttaactaaacgataaacccattctttaaattgtttttcactgtattcaaaaggttctttattgacttttttagacgttgttggagaaacagagtacaactgctgcttataaattttttgtggatatatagaaggtgttgttactgtttctaaggactgacaaatataatgtgctttcactatattcccattaggtgtttcccataaagtaaaaacaagcatacctccaggaggagttgcgccagaaggatacccaggaatatcccaatctacagacagtataccagcaatattagcaatattagtatcatggccaacaaatatgactaactttgctttattaacgtcagaatcagtatctgagttagttagagcatctgttattgttttaagtattccacttgctttaactgtagccatttctggtatccgatgtattgcattaaatatttttgtttgaagaggaaaaactttcttaactatatcttgagaaacattaataccacttaaattacctttaggccattctcctagttcaagaaaaaagagtgcagcagataaagcagaaatacctaatccccctgttagatgtaccccattgtgtttattcaaaataattgtatcaggaatatcaagaacactacactcagaagataatccatactttttacacgtagcttcaggacaatatcctaatacatctgcaactatcttcaaaggctcttccaaatctttccgtaatgtctggactcccccatattgttgattaaattcttgaataactttggtaaaatccaaagaacaacatccagtctccaaaggagtgaacaaaggatccccttctgtagtatctagtactctgtattgaaaatcacagcctgaggcaaaaccatttaaaattgctatagctgtagcttgagtacgctccatagtatcagatctaacataaattgactgaggatcaggacatatattacgtggaaacaattctttcatccaagggtcttcatgtaacccctcccataatatactaataagaacacttccacgctgagtgagataaccatcttttacaggccaatatggccattgtttttctgaccattcttctaaaaattcatgcgtctctacaggaggacgaaatccatgtcttgaaagaataaccatttttattagtcgttcttctgcctttacctcttcagctatagaaaaaaatactataaaaaatgttgctattaaccatataataaaattaactctattatacataaaaatcctttagtaagtctaaggctaactactattttttaacttcaatatagttttcaaaaaacaaaaattttatagtctatttagtaagatataagttaaataaggttcctttttaatttataaaaagcataatctatcctataaataaaaaaaacattttcttattaactaaaactaaaatatcttaaaaaatatcattgttattatataatgttactaagtaacatgaatagattgcaatatatattaaatacattcttatagacataaagaagagaagtgttattatgaacaagataaatattgactttttcttattgcccacactaacatggaatggtataaagtaaacataatatgctgtaattatgtaaaattattaactaaacaaaggatagcttcatgaactacccaccggaaactcaatatgaagcattggaaaaacgaggtgttagtcgtcgtgactttctaaaattttgttcctttgcagccgtttatttaggccttggcccaacaggacacctagacatagcaaatgcaatggaaaataaacctcgtcttcctgttgtttggataaacgggttatcatgtagttgttgtacagaatcttttatacgctcagcgcaccctcttgcttctgatattgtcttatctatgatttcattagactatcaggatacaattatggctgcagcaggacatcaagccgcagaagtttttgaagaaacaatcacagaatataagggtcgctatatccttgctgttgaaggaaatgctcctctagctgaccagggtatggcatgttttcaagaaggaagaccttttcttgaaaccctcaaacgtggtgcagaaggagcaagtgctgttatttgttggggaacttgtgcctcatggggatgtgtacaagctgctcatcctaatcctacccgtgcaacacctgtacctaaacttatccatgataaacctattatccgtattccaggttgtccacctattcctgaagtaatgagtaatgttgttgcatatattcttacctatgagagacttcctgaacttgactctcaaaaaagaccagccatgttttacggtaaaaccgtacatgatcaatgtgttcgaagagctcattttgatgcaggtcaatttgtagaatcatgggatgatcctgcagcttctcttggttattgcctttataaaatgggatgtaaaggtccaacaacgtataatgcatgtcctgttactcgatggaatgatggtgtgtcatatcctattgaatctgggcatggctgtattggctgctctgagaatgacttttgggatagaggctcattctatgataggataaccactattccacaatttgggacaaatactactgcaaatacagtagggttagctgctgttggtgctgttggtgcagctgcagcaacacatgctgctattagcactgccgtacatttaaaacgcaaagctaatgcaaaagttgaagaagaaaatgctcaacctcatacttgctgtcactctcatcagtcaacagataatacaactgctcacacctgttgtagtaactctgctgatgaaaaaacacaaaatactacagcctgctgtcatagtaaaaatgtaatgaactcaggtaattctaacgaaactactgatagttaataaaggattcaactatgagctatcaatatagcactcaaggatatgaagtaactgacgcaggaaaacgtattgttgttgatcctattacacggattgaaggacacttacgttgtgaagttaatattaactcatcaggaataattacaaatgctgtttcatcaggaactctttttagagggcttgaaattattcttaaaaatcgtgatcctagagacgcttgggcctttgcagaacgtatttgtggtgtttgcacaggaactcatgctctaacctctatatatgcagtagaaaatgctttacaaattgaagttccagcaaatgcaaactttatccgcaatatgatgcaattagcactatggtgtcatgatcatattgtacatttttatcaacttgcaggacttgattggattgatgtcgtttctgcagcaaaaggtgatcctaaaaaagcttctgaactagctcaaagtatctcttcttggccaatgtcttctccaggttattttgctgacatcaaaaaacgtcttgtagatattattggctctggtcaattaggtattttcaaaaatgggtattggggtcaccctgcttacaaacttccaccagaagcaaatttaatgcttgtggcacattatatcgaagcactcaacatgcaaaaggaagttgtaaaaatccacactatttttggtggtaaaaaccctcatcctaactggattgtaggtggtatgcctttagctctaaacttagatgcaaaaggtggtgctgacgttataaatatggaaagattggagtatgtccagcgtattatcaatatttgtaaagactttacttcaaaagtacttatgcctgatactatagcacttgggaaattttatcctgaatggttgtctattggtaagggtatatctcatctatctatactttcttatggtggattcccaacaattagcaatgacttttcaaatgacagcttacttgttcctaatggagctattatcaatggtaacttcaatgaagttcatcctgtagatctttttgcagaagatgaagttcgagaagaagttagtcattcatggtatcgttatcctaatgatataacatcactacatccatttgaaggagaaaccattccagaattttctgttggacctaatacaaaaggaacagaaactgatattaaagaactggatgaacgtgcacgctattcttggataaaaacacctcgttggaaagggcatatgatggaagttggccctctacctagagtgcttattgcatattatatgaagagagaagaaacagtcacagctgttgatgagatatgtcggcaacttaatgttcctgtcacacatatgtgttcaacacttggacgtattattgctcgtagtcatgaagcagtatgggctgctgaaaaacttcaatacttttttgatcgccttatagctaatacaaaggctggtgatttaactgtagccaatactacaaaatgggaacctagtacatggcctaaagaagctaaaggcgcaggttttactgaagcacctcgtggagctttagggcattgggttgttataaaagacacaaaaattgatcgctatcaatgtgtagtccctactacttggaatgctgcacctcgaagtgatagtgaacaattaggtccttatgaagcagcactaatggatacacatcttgctgaaccagaaaaacctcttgagctattacgtactatccatagctttgacccttgtctagcttgtgcaacacatattattggaccagatggaaatgaggtactaagtgtccaatgtaatacagctggatgttgataataacagtagtatcctgaatcatagataaaaaaggtagtagtaagatattaaaaagccacctgtttaatcactatataaacttggcttaacataggtaggatgtattatggaagaaactccaccaccacaaaaagctaaatatattattgaactacctgttagaatctggcactggagtattgttatctgtattgctacactgattcttacaggatactatattggatatccctggcactctatagatggacacccaacctatctctttcttatgggatatatgagaatagtacattttagcgcaggctttatacttgctattggtatatttttacgtcttatttatgcattctttggtaataactattcaaaacaaatttttgttattcctatatggcaaaaatcatggtggcatggcctcataggagattttagatggtatttatttatagataaaactccacatgtccactacgaccataacccattagctcaagtaggaatgtttggctgtatttttcttattttcttcatgacattcactggaatgggaatgtttataatgagttctgacaatccatggcttgtccatacatttcattgggttcttgatgttgcatactgggttggtgggaatggtatagatctccataactggcatagacttggaatgctctttattattgcatttatcattatccacttgtacatggtaatacgtgaagaaataatgggtaatacaacactagttagtgctatgtttaatggatttaaactagttcgacttataaaacaacccaaaaagaattaagtatggaatctattattgttcttggattaggtaacattctatatggagatgaaggttttggtgtacgagtagctgaacagctttatactcgttatgatttccctgataatatagaaatcattgatgcaggcacgcgaggtcaagcattattacaatatgttgaaaaagcagatagattacttatccttgatgcagtagattttaatatgccaccaggaaaaattatttttaaagataacaatgaaattccctcttaccttacagctcataaaatgagcttacaccaaacaagcttttctgagattattgggttagccagcctacaaaaactattacctaaggaaatggttttactaggtgtccaaccaatatctttagagtatggaacctctttaactccagatgtttttcatctattggataaagctgttgaacttgcattgaaccaactattaaaatggaatattacgccacaaccagcagtaacaaaaaaagtattccaagcagcaggaatttctttatcaaattttaatttataactattgttatatcacaatgtaattacgtttgttttttattttttaattgatacttcttgttttaatatgaattaataataggaggttatcaatagtttattatagctgactttatattacatatatttatgtaactatacgtaaaaaatatatactttactattactatattggaataatatgactatagcactattttataataagctataagatagttacagactataaaaaatacaacaactatttttttcatcaatcaattatcttaaaaaaagaaagatagctcttataatatatgatataactatacgtaataaaaagataataaaagattatatacaaaaaaataacagttatttccaatttacaagaacaaataataataataataataataacaacaataaatctctaacaaatatacaatatattttttacacgggtataataaaatatttcttataaatgctatagtaaaattactaaaatagtgtatttaaagggtaacaaaaaaataaatatacaatgctatatgatagtcagtaatattatttgattatggtttggttaataaaaaatatatacaaaatataatatccaaaaaacaacaaccttgttctaaaagtaaaggttaattctttcataagaaaatcactagctaactaaaaccatattgtttggatttttattgtgataaacaatagcccttataatataattgaaatattaacaaactttagtatccttatggaggatatgaacttttctaatgaactaaatatacttaagattaacaaattttgttttagaaaacgtaagaaggcataccaacatatgcaagctattgctgttagcttatggcgtcttgcattacaaaactctttcccttcagaatatgaaattatttttggagcatatctctgtaaaaaaaactctcatattccaataaataaacaaggtatactagatccatactttcaaaaagtcctacaatcttatattgaaattcttaatactcatggtgatagcgatttcacagaagttagctctcaccttattaatatgttacaactttccaaagtaaacaatgacgcaataaaactaaaattagccctcacaattagaactatgtataatgatatctttaaaaaacttatttagctctatgcaaattcttactataacttcttctaccaataggagtggtggtactcgtcaagcaatatatcaaactcaagaatttgcaaagcgtgggtataatgcaaggctctgcttaccccatgactcaactttttgggagttaccaaaaaaagaacaaaatcctctttggattgcattacctgaaaatcattcaaaacaaaaaatttttatagaaaaattattatctgaaacaagccctacagttattcatgcattccataataaagctattaaacgtattgcatggtggggactttcatggaaatataaaaatgtaacatgtgttgcacaccgaggtgtcatttatcgacctaaaaaccctctgccatacctatcccctgcaataaaagcttttatacctaattctaaagcatgtgctaaggcactccgatggcattgtcctcgtaaaaaaatctatattgtacctaacgggttaccagccgaacgtttcactccaacaatatctcaagaggaagctctcaagcatattggaatttcttatattcctaaatttttatttggctttgttggaaataacaaaccacaaaaaggtttcgacatattattagaagcgttttcaaaagcacatatagctgatgcacacctcttaaccatgggtgtaaaagaagaatactggcgtcctctatgcgaacaatttcatattgcagaacaagtacactttcttgaccatgtagaacatatttctaactacttacaactctgtgatgcttttattgttccatcccgagcaatggaatcttcacctaatactcttattgaagcaatgtctatgggacttcctataatagctacaaatgcaggagggattcctgaactagttaaagggaatggaattattgttcctgtagccgatgcaaaaagtatggccaatgcattagctcatatgctctctaatcctgcacaaagggaagaatggtctaaacaaagccgtctattaagtcaacaatattcaataactacacgttgtgatacactagaagggatttatcataagataggagcatggtctaactaactattgcaataaaaataattaacataataaaaaataaaaattctaaaaaatctacaaacctactaataaggtattcttctaactctcactaataagaatatacttataaaaatcatataactatgatgtatactcttctgagtctattaaaatagttacaggtccccagttttcaaaatatacgtccatgtctgctccaaaaacacccttttgaacttttcctggtaaacgtatacacagttgttcataaaatgttataaaaaactgtttggcaacctttcctgatgcagctaaatgaaaagatggccttcttcctttatggcaatctccatatagagtaaactgaggtactaatagtaactccccattgatatcttcaagtgaatgagcaaatttcccttctttatttggaaatattcgaagtgttgcaagcttttctacaaataataaacaaatattattattaggtaatgaacactcatcaacaagaccaaaaccaattagaacaacaagacctactcctatttctgtagtgaggttactatcaatatacaatcgactgtgatgaacacgttgaataactaatctcatatttctatgaattaaaatgttattatctagttgtaacttattatgatattcgaatagctgttacaataacaatggctttaattcctttacattctcctgtaaaacctaaaccttcttctgtagtggcctttatatttacatttgctagatcaagatctaataatcttgaaagattacttctaatagcttcacgatattgactaatcttaggaagttgagcaactattgttgcatccatatggacaatctttatagaagattccaatacttttgttagcacatgatcaagcaaaatagctgaatttattccatcgtaacgcttatcagagtcaggaaaatgaaggccaatatctccgcctccaatacagccaagcaatgcatccataagtgcatgtagtaatacatctccatcagagtgtgcaacaacgtttggtgcattgggaatagatattccccccaatctcatagaacgaattggctgatttatttgatcttcagttacatatttatgaacatcatagccataccctactataggaactgtagtttttggttgttcgaccatatataataaatcctgagggaaacttattttcctattttctatttcaccattaataacttgtacagtatgcccacacaactcaagaagtgatgcatcatctgtgacagtccacttttctaatgtagccctattatgcccttcaacaattgtttttaaatgaaaaccttgtggtgtttgtacagcaataagttgttccctaggtcgtgtaactataacttctccttgaataacctgtttaattgtatctgtaacagatatacctggaactactccaactgctccagcttctaatacttcaataacattattaatcaactttggagagataaaaggtctagctgcatcatgaataaggacatgagagcagttttttgggagagtgttcaatgcatttttaactgagtcctgacgcaatttcccgccagaaataactatatatggaagtcttaaatcatactgagctgctaatctatcaacaactttttcttcattatcttttacttctgaaggaaagaccaacacaacaccacggattcttgcacaatgcataaactgcagcacagattgccagtaaagaggtatgcctttccatacaaaaaattgttttgctatacctattgtacttaataaccgactaccctgtcctgctgctaaaattaaagcccaagtctccattttacactctcaaatatgagtctataatctatctgactattatgaagaaaactataataaaggagtcaagctataagccgggttctgtaccctaatgggcgactgtcattcatctaggaatatagttacctatattctcaagcaacctacccaggaacattggccgggtcagcctgttcccctatttggtcttgcttcaaacggggcttgcctagctcgctatatcactataacgactggtagactcttactccaccgtttcacccttaccactattattaataatggcggtttactttctgttgcgcttgccgaagatcactcttcctgggtgttacccagcgttttaccctatgaagcccggactttcctctccataaatccataaaaggatatgcagcgacagtccacttgactcctaatacataagccctcaataatatatattaactctctatttcttcaacaggctcctgcttaatctcttcttcactaaaatgcttactccaataaattaggcgctggcaattaggacaattaataatcttgtgtcctccttgtagttcaatgtatgtttgaggaggaacaacaatatgacatccaccacaaacaccatctgtgacaggaactatcacaggatgtgataaacgacgtcgaataaattcgtagcgctcaagtataggacgaggaatatcacttgtagtcgttgaacgtgaactttctagctctgctaaacgattctttgcatcctttaaatattcatcaagacctgctttcttaagttcaagttcttcttttattgccgtccataaagactctatttctgcaagagtggtttcttgaagttgcttttcttcaagtaatgtattgcgttcttcttcacgagtacgattaagacgctccatattatccatttctcgtgccatagcttggtattcacgagagtttgaaacctgcattaatttgcctttacttctctttatacgtccctcatcatcttcaatttcatgatgaatacgcttttccctttctttaagatgttctagtttttctataacaagagtacgctggctatctactgattcaaacttagcagcaagtgtttctaattctttgggtgcttgtataagctcttcttctacaatataaatagcatcatctacatgttgaagcgatacaagttgacatatttggtttatatacagactcacaaatttctcctaacggctgtcttaatctaactctctaattttcttttatacaaaaagaacgtaatggatcttgagttggtacaaataccacagttacatctaaaagaacactctgtaaatattgagaaaaacgacgcatcatttcttcctcaagacagaaatgtccaacatctaaaacaggtaaagaaaactctaacgcttgatggtacttcacatctccagtaatcaaaatatcagccttctgtctagctgcttcagcagcatactctgctccagctccaggacaaaaagctactctatatatttgtcttggaagttcacctatcaatcttggtacagcttcacctatcaatggatatatacgttgacaaaaattttcaacaggtacaggtgaagaaaaatgaccaatacgaccaaaaccatattgagacgacaccccattagtcgtatgaatagattcaagcacactacattcatgtaactctaatacttcagcaagccatgaggcaggaccgtaaagatttgcatcaagagatgtatgtgctgaatatagcaaaatatttttagataacaataactttaacacactataataattatcaataatagttgggaatcgaggcctcaaccctaatggatggtgtgataaaatcatgtttgctcctaactcagatgctttataaaccgattctggagttggatctaagcatacagcaagacaaaaaatttcatcttgacttgaagcaacttgtacacctgagttatcccatgtagcagcaactgataatggagccacctcttctattatattaataatattattatagttcatttactataacaccacttataactaccttaatactaatatatatatatactaccaaaaagctaaggggtctactttaaaaatatcaatatgtaaatcaactatcaaaaaaaaataaaatattattatttatcaatagttctgcaaaaatctacagcattttgaaatattattgttcctaatatagtttgttctcctcgtggccagcctggatgatttgttctatgatgaaaagcctcaggatgtggcataagaccaaaaattcttcctgaagtatctgtaagccctgcaatagcaaatggggagccatttggattataaggatactcttgtgtagcctcacctgtagtagggtcagcatactgaagaacaatatgctgcccatcaataagctgttgtagaatgctaggctccctaacaatacatttaccctcaccatgtcttacaggcatagaaagcaaattcttttcactcaaaccacgagtaaacacacatggactatcttgatttactcttaaagaaacccaccgatcttcaaaacgtgcagaatcattatgactaagtgatacttggcgatcaaacaactttccatcaagagatggtaacatacccaacttaactaataattgaaaaccgttacatataccaagaacaagaccaccttttgctataaaattttttaagcttgtaagtaatgaaacaccatttttatcagatagatatcgccaacgttgtgcagcagcttgagcagcaccaaggtcatcaccatctaaaaaaccgccaggaaaaactaacagttgataactatcaagaaaaacttcagctgcaacaacttctgaaaaatgtttaatatcaacataatctgcaccagcaagccttattgcatgtgcggtttcattatgagagttcgttccatatccagtaattactaaagcattaacctgtgccatgtagtatccatagatgtaagtagattttagtataataattaattttatgtcgatgaaaaatttcagtcaatggctgtctttttataaacaatcatagtattatttctgtcgaaggaaagtttgtaagctaaactcttgaaaattagggtacagaattataagaaattagctatcttttgtttcccttgatcttataatgtataatatgcattatcttgttttattaaaaggacaaaatacatgaagacaaaatttatcttcattacaggaggagtactatcctcacttggtaaaggtctttcagctgcttctataggagcactactgacctctcgaggtatgacagtcactattcaaaaactagatccttatatcaacatagatcctggtacaatgaacccataccagcatggtgaagtttatgtcactgatgacggtgctgaagcagatcttgatcttggacattatgaacggtttcttggtacctcgctttcacaaaagaataactccacttcaggagccatttattacaaagttattagtaaagaacgtcgtggtgactatcttggtgccacagtacaggttatcccacatattacagatgaaattaagtcaacaatattaagccttgcaaaaagttccatagacaataatactccggatattgctatcattgaaattggaggcactattggggatattgaaggacttccattccttgaagctatccgacaattacaaactgatcttggtaggcaaaactgtctttatatccaccttacattagtaccctaccttgggacagctggtgaacataaaacaaaaccaacacaacatagtgtgaaagagcttcgttctattggaattcagccaaatatcattctttgtcgttgtgaaaagcctatccctgatgatatcaaagcaaaaatctctttattttgtgacgtagaaaaagatgctgttttttctgctgctgatataaataatatttatgagttaccactcaagttttatacagaaggacttgatcaaaaaattacaagttttcttaacttacctactaaacaagccaaccttaaaccatgggaacaacttgttaacacaattaataaccctaaaggaaaagtaacaatcacaatcgtaggtaagtatgtaggacttacagaagcatataaaagcctgcatgaagctctttgtcatggaggaatagcaaatgagattacagtagacttacaatatgttaactctgaaattatcacagaagataatgttaatgaaatttttaaaggtgttgatggcattcttgttccaggtggatttggttctcgtggtatcgaaggcaaaattgaatctattcgctatgcacgccaaaaaaatattcctttctttggcatatgtcttggcatgcaatgtgctgtcattgagtttgcccgtaatgttgcaggaatagaaaaagcaaactcagaagagtttaatcctgtagcagctgataaagttatttatcttatgaaagaatggtacgatttccgcaacaatgccatagaatatcgtgactcactatgtgacaaaggaggaactatgcgtcttggttcttacccttgtactcttataaaaaatactaaagcttttaaagcatatcaaacagactctatagaagaacgtcatcgtcatcgatatgaatttaataatatatatagagaccagtttgctgaaaaaggaatgatatttagtggaacttctcctgataatacacttgtagaaattattgaacttctcaatcatccttggtttattggatgtcaatttcatcctgagttcaagtcataccctatgaaaccacatccactatttaaagactttatccatgctgcttgcaaccataataaacaataacactgtaatatatatatatattcactgcttatgactacagatgatctttatcactccctggtttcaaaacattttatttttgctggaccatgtgtactagaatctaaggaacttgcgtgcaactcagctactattattgccgaacaagcttgtaatacaggactccttgctgtctttaaaagctcttgggataaagcaaatagaacttctaactcatcttttagaggtccaacgtttaaagagggtatggaatggttatatagcgtcaaaaaagagacaggattacctattgttacagatatacatctcccagagcaagcagctcttgtcgcagaagttgctgatattatacaaatccctgcattcctttgtagacagacagacttattaaaagaagcagcatatactgattgcattattaatgtgaaaaaaggccaatttcttgctccatgggatatgaaagctgtccgtgataaaatttttgcaacaggtaacaaaaaattactctttactgaacgtggtacaacttttggttataataatcttgtcgtagactttagatctattcctattatgaaggaacttggagtacctgttatcttcgacgcaacacattcagtccaacttcctggaggaaaaggtgaatcttctgatggccaaagacaatacgtgtcaacgcttgcttatgctgctgcagcaacaggtgttaatggaatttttcttgaatgccatccaaatcctgacaaagccttatgtgatggtcccaacagttggccactaaatcaactggggacattgcttgctcagttatcagctatatggagtgttgtaaaatgagctttaataataataataataataataaaatagcaaataaaactttagaacatcagtatactcatacatcttttcaagaacaactattaaaagaacgtgcacatagtatacgtctccttatccttgatgtggatggtgtcatgacagatggtagtctttactatgaggatacaggattatgtatgaaacgattcaatgtactagatgggataggtattcgactagccaaagaggcaggattatcaattgctattgtttctggaatggatgttccatgtgtagagcgtcgcttaaaggatcttggtatttctgactatcaccctgggattaataataaacatgcacacattgataagctgcgtactcaaaaaaatcttcaatggagtgaaattgcatatgttggagatgattgggtagacttagctcccatgacttctgtaggcttacctattgctgtggataatgctgtacctgaagtaaaagaattagcactttatattactaaacgtaaaggtggagatggagctatacgagaagttattgacttattgctcatatatcaaaataaaaaagaagctcttcttcatacatggatgaatcttaaatgaaaaaattttttatttggactataatacttatactcattttttcttttgcatattggttatatactcaaaaagtcatggattctttattcactacagaaaaaaaacaggctggaaatgagttgttaaatatcaatgatagtgacccaacatcagtagatcactctctttctcttgaaaactccttaggtttagcattaaaaggtgtaaatctttcccaaggagaaaatggaattgagctttggcgtcttaaggcttcttgggctcgtctctcaaaagatagagaatctatacaagtagatagtcctattgttcaatatctacttggcgatggtttgaataatgatgctatcacagtacgtgcagataaagggaaaatagtagaaaatcagaatactattatactttgggaaaatcttcttattgcacaagataataaaagcataacaggtccctatatggtatatgatacaaaaaaacgacatatatattttcctaatggagctcaatttacaagtccacaagctacaagtgcagcaggaaaagttacttgggatcttaaatcaaatattattagtggtaaaaatgggatcaaagttactatccatgcaaaaaatatataataagttataacgctacataataaatagattatatggttaaaggtgactatattgtatttaatattatatctagtatgtaaaagctggagtaaaaaagtaatgaagctatattttgtctcacaagttttattacttataggactaatatacacctataatcaacctacattatatgcacaacctataaaaaaaggttcgcttggtactgttgaaacaaaaattttttctgatgaattaacttatgacttagaaaaacaacaaattacctttaacaaaaatgttcatgtacaacgtccagactttcaactcacaacagatacattaactatttatttagcaccacaaaaaaaatctcaaaaaaatgaagatctatctacaaaccctatttcaagtaaaatatctgctggcgagttaaaacatattgtagcaaaaagaaatgtctgtattaaaggggataaatatacaggtactgcaggaaaagtcacctatacagaaaaaacaggtatccttcttttagaggattcgccagttcttactgatggagaaaatactattacaggcgatagtatccgttattatatatatgagaatcgaagtgaagttattagaggaaaaaacaaacgtgttgaagctacatttatgcaatattcaaatgaaaaggtaaaataatggcaacacttaaaggtgttgagctacaaaaatggtatggaaaccgtgaagttgtttgtggtgtctcaccagttatccatcaaaacgagatagtaggtcttcttggcccaaatggtgctggtaaaacaacttcattttatatgctcaccggaatcattaaaccatcaagtggaaaaattttctttgaaaatcaggacatcagttcatggccattatatcaacgtgcacgtgttggtatttcatatctcccacaagaaagttctgtttttcgtcacttaactgttaggcaaaatttacaaattatattagaatatacaacatattctaaaagtaaacaaaaacagaaagctgatgctcttcttgaagattttggtcttacttatcttgaaaactcttatgctgtacatctttctggtggtgaaagacgtaggcttgaaatagctagagcacttatccgacaaccaaaatttattttacttgatgaaccatttgcaggaattgatcctttagctattcatgatatacaaagtattattcagctccttcgtgaaaagaatattggtattcttatatctgatcataatgtacgagaaacactaaatatttgtgatcgagcttatcttatggtgaaaggccaagttattcttacaggaacacctgacgatattattaatagtaaaaaagctagaagtatgtacttaggagaaagtttctgtttataattaaggctagttgtaatttctatttgtgatctagcaaaggttttacatctttactgttgcaacatcatatacagtacgatatggtgtatataaagctatcctcactacttgtatataaaaaggcaatagtaaccaggatgatgaaatgggactagaactcaagcaacagcttaaacttagtcaacagcttgtaatgactccccagttgcagcaggcgatccgtctattgcaactatcacgggttgaattagctgaaacaattcaaaaagaattgttagaaaatccatttctggaagaatcgcaggaagaaatagcttctgaacgtcaagaaacacggacagaacatgatccttctgaagcctacgatcaggatgtatccaacactgcagactgggaagattatcttggtgaatttgcaagcacaccaaaacaacttcaatctcgtgaatacgaactttctgaagagatgtcttctcttgaagcaagatatgcctctcgcccaacacttgaaagtcaccttatgtggcaacttcgcctttcaacgcttactgatgaacaaaaaaatttaggtgaagctattataggaaacctatcttcatcaggctaccttcaggcttcacttgaagaaatagcaaatagcgagcacacagatatagaaaaacttaaacctgttctccatgcaatacaaagatttgatcctgtgggggtagcagctcaatctcctcaagaatgcctacttatacaaatagaagtcttaggctatgatagagatcctatcttggtagaacttatacaaaaccatcttgatgatcttgaagcacaccgatataaacctcttctacgtaaactccacattactatggaggaacttaaagaatatattgatataattcaaacacttgatcctctacctggagcaagttatggagagggagatcctacttatgtgagccctgatgcatttgtctatcaagttgataatgagttcattatattacttaatgatgaaggattacctaatcttcatctaaaccaagcttatgaacatattttagaagaatcaagtgacaaagataaagagtatttttcagaaaaaattcgttcagctgcatggctaatcaaaagcttgcaccaacgacaaagaacactatataaagtagtagaaagtattgtaaaatatcaacaaaccttttttaaagaaggtatcacaaagcttcgtcctcttatattaaaagatattgctgatgatattggtatgcatgaatctacagttagccgaataactactaataaatacattgcaacaccatttggaatttttgaattaaaatttttctttaatagtgcacttggtgttgatgatggtagtcaagttggctctgaaagtgtaaaagctattataaaaaaatgtatcaatgaagaagatcctaaaaatcctctttctgatgaacgaattggtgaaatcttgaaagaacaattaaaagttaatattgctagacgaacagttgcaaagtatcgtatgtctatggatattccatcttcatcacgtagaaaagtacatttctaactattcattataaataaaataaaaaaggattattatgaatattgtatttactttcaaaaactttgaaccatctgatcatttgcgtaaatatgcacgacgtcgccttgaaaaacttactcgttttgtaggaaaaaaagtatctcttgaaatacaacttcttatggatgtcgataaatttcgacaaaaagtagaagtacaagtagtaggagaaggacttaacatatcagcagcagaaacaactgaagatatgtatggctctattgatctagccattgataaaattgaatctcaaataaaaaaatatactgcacgctatagggaacaaagacgcagtggtcgcaataaaaatattgatattttcccatttgaattaattgatgaagatggtgtacggacaattacaggacgagaacatttttctccaaaacctatggaccttgatgaagcagctatgcaactagaaacttcaggatttgaattccttgtgtttctaaatgcagaaactgatcgtgttaatgtcatttatcatcgaaaaaatggtgactttggtttaattgatcctgttatttaatttattgttaaccatttttactttcatttacccaatgactttaaaaaaaataatacctaacctacaaaagacacaaaataataataataatagtatttcttctccattattacctcatacagttcaagaatattttccagtaattattattgtaggtatgtctggtgcaggtaaaagtactgctttacatgtatttgaagatctccagcttgtcacagcagatggtattccaccgtcactagttacaagtatgattcatacagttcaaagttcttcactagaacacgttcaagggttagctttaggtattaatcaacatagaatacatacaatgcaagagcttgaacatacttttcaagaaatgcgtagccaacatatttactttacgcttctctaccttgaagcagatatgcccactcttataaaaagatatgcagctacacgaaggcctcacccattagaacaataccatattggtcttgaacatgcccttgaagaagaagctaaacgtcttatccctataagacaaacagcagatattgtacttgatactacaacatattctattcatgacttacgaaggtttctacaaaaatcttggaacccttatccagaaaaaatacgatctattaaaattaacattatttcttttggatttaagtatggtgtacctaacgaagcggatttactattcgacctaagattcctaccaaacccatactttgtagaagagttacgtcccttatctggaatggacaaaaaagttgcaacttatgttcttaattctgcttcaggaataaaatttaaaaaacatcttattagatttctttcattccttcttcctctctatgatgcagaaggtcgttatcgtattactattgctcttggttgcacaggtggtaaacatcgttctgttgctatttcagaactattattacatgaacttactaaaaaaaactatactgtttctatagagcatcgtcatatggaactaggataactgctattatagtaaaacaatcagtataacataagaaaactcttgccaagcgtgtaaattacgcatatatacatcatacgccgaggtggtggaattggtagacacgctatcttgagggggtagtgggcactccctgtgcgggttcgagtcccgccctcggcaccacccttaccctaggaagtttgttgttataactaacctagctttttagtagtgacttccttactcttttttctatttaaaacctacctgttaacgtatattcttttttactatctacattcaaatacatttagctacatctctagctataaaaacgctataataactaacgttaacttattaaaacgcatataataattataatgttagtgtaatagaatatcaaagacagtaaagcaatagttaagataaataaaaagttataagtattattattcaataaccaacattattatattaattggagtaattatgaaaaaactgattctaacttttgctttattattagtaacaaatataactacttttgcttctgagccttttactctatcaagcccacaaatgaaaaatggaactattgcaactaatcaagtttataatagttttggatgcaaaggaaaaaatatttctccaagtctagagtggaaaaatcctcctgaaggaactaaaagctttgctataactatgtttgatatagatgcaccaacaggtagtggatggtggcattggatagtttataacattcctacatccacttcctcattagtactaggagcaggaaatgatcctaaaaaacttcccaaaggtgcagttcaatcaataaatgactttggttttattggatttggaggaccttgtcctccagttggtgcaaaacttcatcactatatttttactatctatgctctcaatgtagagacaatggatttaccagcaacaactatgcctgcagctattggattcaatattcatatgcatatgattgacaaagctacttttactgctacttattctcgtaagtaataataaaaaacataactgatgcaccattatcgaatactagattatagaaaacttcagaacaatatacttttctttgtatttactttaataactatataataaaattttctcttaacaacctatgtacgaaaaaattaatttcttcaacgaaatataaaaagaaaactatccttgataattcaaggatagttttctactagaatcttttttaattttaattagaattgatacttcatatttaaaccagcacgataggcattcttatcaacttctctttgaaggttccatagttttttatcaagttcaagacgaatatatgacagttcaagagctacacttaagtctttatagattttatattcagtatcaaaatctacttcccaagcataatctttctttgttaagtaaagcatattatcaccaccacgtgtgtcataaatggtagtaacgtatgataaacctaagtgttcaggaacgtctttattatttgtaccctgaattctagctccacggataacatgagttagattttctaagaaagaaatatctttcaactgaactacaacaccccatgagccagcaatagtatttccaaaaacagaatctttgcctataccataggctccactatatccaaaacttgttgctgaccagtttccaactaatgttggtattcttttagaggcgccacgtgaatcaactttatctcctgaggcataccaacctataacccctggagttacatattcaaatttatattctgctaataatgctgcataccaaccttgacgttttaaatcaatcttatctagtaagaagtcaccaataacaacatttctaagacttcctaagtctgctcgtccataagcaccatcaacagctatatgcaaaggacttgagccagcaagttcagctgataaaccaacccaccatgcattaccacgctttttatttggaaaaacatctccaaatggattaccagctccccagctatatccaaatcctgctggcattgctggtaaaagacctgctcttacatcttcaatatctccatagctttcccctaataagctcttcttacctgcaaaagcaaacataccccatggagcaatttttatatcagatattgttacaggaatagttaatccaactacatctaatgttgtacctttaaagttaggtagctttgatattccataattactatcatagtttttatgcaatgcacgcatccagaaagctgtagcacctaaataatcattaaatacagcagaaacagtaacacctgctccatcagcatctaatattgtagaacctgcaacaaatcctggaaggacataaggttgtaaacccatacggacttgcacatctgtgtaaggaataacccaatcaacataggaataacggagctttataacatttttaccatctgttccaatagaagcaccatcaacaccacgtccccagatagtcttacctaattcaaagaatacaacacccttaagactctctgatgcaacaatgtctatttgagtacgtaaacgttgtttaggcgaaaaacgttgatctccatcgcccttcataaaactagattgttgccactcaaaattgaagtcccacacaccctttgccttaaaatcaatagcttctgctgaaagcgatgctgtaagcaatgttccaacaaaaaggaatgcactaataagcacttttttcataaaagtcttcctttctctagtttaaaaattgataccatacttatttaggataaatgctagatcattagcctaaaactgaaatagacctatcagtaaattctagttcagtcaacttttttgtactttttatcattaaaaatgtggagttattatatattataactgaaagcgtaacttatctaatctagctaggacttcttttttcccaattactacaataagttcttgtaggcttggtcctcctaaaacaccagatacagctaaacgaagaattggaccaatctctttaaacttcagattgttacttgtgatatactcatggataagctgttcaatatataatggttcaaagtttatttcagcttctaataaattacgtaatctatctaaatgctctttactttcattagtgacaattttttttatatcatcttctttatatgtaagatctgaagcactaataagcacaggtttcataagataaactaattccttaagagtatcagctcgttctacatacaatggtaacactgcttcaatccgttcttttgttatatgagtaaaaccttcttttctaacaaaaggtaacataaggtttgcaatctgggagactggtaatctccttagataatgagcattaagccaaagtaacttctctatattaaaagcagcaggagcgctatgaagatttgttccatcaaaaaaacttatcaactcctgaagagtaaaaatttcttgatcaccatacgaccaaccaagccggacaaggtaattgagcatagcttctggtaaaaagccatcttcttggtattcaataactgcacgtgcaccatgacgtttagaaagcttctgacggtctgaaccaagaatcataggaatatgaccaaatataggtatttcccaacctagcgcattataaattaagatctgttttggtgtatttgaaacatgatcatctccacgaataatatgtgtcacttgcatatcatgatcatctacaactacagctaattgatatgttggtgttccatcagaacgttgtaagaccatatcgtcaagctctgtattttggactgtaacttgtcctttaacaagatcattaaaggtaacttgacctgcagaaggaacttttagacgcaccacaccagaaggattagcagataactttttctctctacaacaaccattatatcgaggcttctcacctttttgacgggcttcctctctcatcttttctatttgttcaatagaacaatgacaccaatatgcatgaccagtctgcaagagtatatctatgacctcatggtaacgctcattccgttttgattgataaacaatttctccatcccaattcaaaccaagccatgacatggattctagaatagtatctgtatattcttgcttagatctttcaaggtctgtatcttctatccttaaatgaaatatcccatcaaaatgcctagctaacaaccaagaaaacaaagccgtgcgtgccccaccaatatgtaattgtcctgtaggacttggggcaaaacgtgtaacgactttcttcattataatcctccatactacaagtaataacattacccatttaataaaatgattatttctatctttatgttctatgttataaagaatgttatcattctctaatttattattctttctctaaagtagatacccattcaacttttaatgcacctgaacgtatatctctctggtttcctggtaaaggcttacataatactcttgcacctgatggaataccacgtgtataagacataagagctaaacctttttttgtacaaacatattgagctgttcccatacctaaaacaggaaatcctccagaaaggaccctcccagttaaaaaagaagtagtattatctaatagtttcaaagtattctttctataccttaataactgaaaagaaaaacttactttaacttttgataaattagctgcttgactaaggtttaataaccattgtggtgcatctacatcaaacaagacatgacaccaaagattatttgtactattaaataaaggacaaaaagctgtatgtgtgcaaggagcaatagaaataaatgtatcttgtatagcaacttctcttaatgtagacataagctttccacccaaacgtgttccaggctctacaaacaatgctgctccatcagagtgtaaaacattatttatgagcattaccatttgttccatacggcttctaataagatgatttgtttttccctttaattcattaagcatatttccagacataataaggtgcaaaggggaactaatagattttagtacttgggtataattaccacgtatcaatgtaacatcccacacaaaagattcttttagttgtgcagctatttgtttaaaaagtttcaaccctatattcataggttgaattgcagtatccacacaaataagctttattttgcaattacgccaggttggtttggaaagccacaaggccacaggtaacgttaaaggaccactacctaagtccataataacgacttcagatttaggttcaggtaatgcaagatttgatattagagacgtaagacgtataagattccacgggaaaaaataccataaataagctgaacaaaaacgtgcattgctccaatatgatttatataaaccttttctttcagaggttaataaacaagaaaggttatgaatatcatcaggtaatgctattctctgtgagtgagaaagatgaagagtcttatccaaaatgtaaggtaaaatctctagtaattgttttgtaaaaggtgttaaatctgaaataattggttgaaataacggctgttgctgtttattcctcaccttatctaacttacaaatttttcctcccctactgtaattaagtcttgctttactaatattcatccttttttgattagtaccttttaatacctgcttagcaaatagtaattcatttttcacgatgaagcagatgcctcaagtgcagctacagctggtaaaattttgccttctaacatttcaagaaaagctcctcctgctgttgaaacataatcaaccttatctaaatatccatatttctcaagtgcagcaatactatctcctccaccaacaactgtatatgcttttgtttctgcaactgcatgggctataatttttgttcctaaaccaaactgatcaatttcaaaaacacctactggaccattccataccacagttcctgcattcattatgtattcagcaatcctctgagctgtttcaggacctatatcaaaaattttctcatcaggcttaatatcatcaactttacgtattattgcagttgctttctcactaagttcagttgctacaactacgtcactaggcaatggaatagatgatattcccctagaatcttctttccgcgttgtttcacctaaagaatcaaatggtgacatatgctgagaaacctgctctatcactttagctcctaaagtttcaaaagggaaaccttgtttataagcatttgccatcaacttaccccccaaatgatcaaaaggtgatacatgtcgatgtgtttctctcataatttttgctgctgttgaaaccaattctggttcatataaagataaaccaatttcaaaaccagcagcttttaaaaatgtattagcgatacccccaccaacaatcaatcgatccacctttcgagaaagattttcaataagttgaagctttgttgaaactttggaacctccaataattgctactaaaggatgatttggacgatgaagaatatgtctaatagcttttaactcagcagccatcaatggaccaacacatgcatgtttggcaaaacggattgcaccttctgtagatgcttgtgcacgatgcgccgtagcaaatgcatccataatataaatttctccaagtgcagctaatttacgtgctaactcttctgaatttttcttttcacctacaagaaaacgtacattctcacacaatacacactttcctggagatactgttactccatttaagtaatctgtaatcaagggaacatccatacctaacaattcagaaagccttgctgcaacaggtgcaagagaagcttcttttgtaggcttaccttcttctggtcggccaagatgtgaaagaatcacaacaccagcgcctctttccaatgcaaacttaatagagggtaaagctgcacgaatacgcttatcactggtaataacaccatcttttaatggtacattcagatcttctcttaatacaatttgttttccttgtaagttaagttcagacatggagcacatatgcatattgtcttctcctttattagaaaaacttataaaaacagttggcttttactgttccctaactgaatgttttacctaatctaattttatattacataatattaggttgtagcaataacttctaaaaaatagactaccacttacttaaggaactgatagattcttattactacttcttaatttgtaaaaaataaaatatagtagaatctttttatttaatattttataaaaattgatgtacaacacccaaataatatataaaaaatgtaaaaagggcggtattagaataaataatagtatgatattcaagaattttttgtactaacctttttacttcatgcatactttaatataacctctattttttattagtcatgtaatttaatgtccccctttggagactataatggatttacatattattactgaacctctcattgatctttacgacagagttgcttttttttggcaatcaccaaaaacacaaaaaatatcttctattattattttagtcatctttctctgtgcactagctagtatagaacttaatcgagaaggataccttcctaaaaatctatcaattatagtaccaacaaatcattttagagctattagcttagcgttcacatgtatattatgtattgaacttattgctttggtccttagtatttcacaatctctttcaatctctgtaggaaaacagcttgaaattatggcactgattttattacgcaatgcatttaaagagttagcatatttatcagaacctattaatatgaatgatagtgcatatcacctatatacaatttgtcttgcagctatcacatctcttggaatttttatatgccttggattttatcaacatatgccaaaacttacaaaatatatttataatcctagagaacggttaggttatattaatgcaaaaaaaatagttgccctttttctcttatgtcttctcacagttatagcaattcgtgacacatatcaacatcttattacaggaaaagatgtagctttttttgaaacagtctatactgttttaatctttgcagatatccttattgtacttgttgcacaaaggtttatgccaacatttagtgccatttttttacactcttcctctgttgtagcaacattaattatgaggctttctctgtctgcaaactcaccatggaatgcaataggagctatgttctcaggactatatattcttgctgttacctgggctataacatactttatgaaaaaaccattctctataagaaaaaacaaacatatagtagactaaggaataactaccaccaacttttatactatctacctattgttataaaaagtggtgttacaaaagttggagtgccaattccatgcacttgcaataatttgatcaatatttgaatattgtggcctccatccaagtaaggaggctgctttttgattacttgagattaaacatggaggatcaccttctctacgctggcccagtctatatggaactgacctacctgtaatcctttcaacactatcaataatctgccttactgaaaaaccacttccagtaccaagatttatggcctctgaggtttcacctttagctaaataatttaaagccaacacgtgtgcacgtgcaagatcacaaacatgaatgtaatctcggacacatgtaccatcttcagttgggtagttatccccaaaaatagttaatggagtattacttgtaatagtttttaatattaaaggaattaaatgtgtttcaggttcatgccactctcctgtttccccatctagatcacaacctgcggcattaaagtatcgtagtgaaacccaagaaagaccgtatgctgcttcaaaagacttcagcatagattccataacaagcttacttactccataagtagttacagggagctttggcatatcttcatgaataggcatttgttctggttgcccataaactgcacatgttccagaaacaacaatatacttaactttactattgtatattgtttctagaagattcagtgtacctgtaacattattacgaaaataatacccaggattgctcacagactcactaacaatagattttgccgcaaaatggatcacgccatctggtttatgcttatgaaaaacagactgtaatctagaaagatctaaaatatctccatattcaaactcaccccactgaacaagggacttatgacctgtagacaaattatcatatacaataggattatatccctgacgtgctaattctttacatgtatgacttccaatatagccagctccaccagtaacaattaccttcatatattcctaatgtttatatagctaaggctaactaatgttaaatattcatatagttatcagttaaaaaagttagtaacattataaattaatatttttatggttagcaagaaggaactaaaacaaaaaactctttctttataggatcatattgtaataactcacctgatacaatatcaaaataccaaccataaactttgaggtttgatttttttacagcctctttaacccatgggaatgtcaaaatattattcatagaatttacaacactaaactgttcacatgctttttgtctaacttcaaaaggagcattaggaaatttcttctcagcaagtatcttagcaggcttagcaatactcatccatctatcaatgaaactttttccagtatagcttcctggtaacaataaactatgaattcctccacattttgcatgtcccataataataattgtatctacatgcaagtgctctacagcatactcgattgcagaagtgacaccatgataacttccatcctctttagtacatggagggaccaaattagatatattacgaactacaaataaatctccaggcttagcttctgtaagaatagcaggatcaacccttgagtcactacaagaaataaaaagaactctaggttgttgtccttcactcaattcttttttatatggtgagtcaggattacaaaagtgaagcttttgaaaacgacgaaaaccttcttctaatatttttactgcttctacattgttaagagattcctccatagacttaccttttatgcttttttgtgcattagcaaaatttggtggtataaaaaaaactatacatccccaaaaaactactaaatgtatactgatataaaaaacttttttcatagctattacaactaactctcttttatttatttaactttcttttaaccttaacacccttttttatttaaatataataaataaaaactttaactataaattaataattaccattctactagtagtatattaatataaaataaaaaaattatttcattacaatacaatttattatactaaccaaaaattttagttatagttttaaaaaaagtcaatttaaaaaataggttagtggttttacttgtacatatcacaaacagaatagatttattaacaactatttcaggatatatatatatatcatccactaacttaaaaattagctgtattaatgaaaaatacaatatagagatatattgacaaccaaatgactcttgtctaactcatacatataataattgggctgtcgttcaatggcaggacagcggattctgactccgttaatcaaggttcaagtccttgcagcccagccatatccacccctatactactatcataaatactataaatattaattcaacattttctactttttctttatctacacatagttccttctaactacttataaaaaatgtgtataactgttattatccgctagttatatctagtaaggaataataataataatatattaaaataattaactttttattattttattactataaatgcatggcaaagtactatcattaattttgtatacccccttctcaactactaatacttttgaattaatactattaacgaattatttcgttatgttactctttttactataaagaattttgcattttttcctattttatactataatatatgacatatattttcttgttataaaaaaatattttctttaatatattacatcaactctcaataggataatattagttaacccgccaagtaaattggaacttgtttttcatgtctaacaaaagcaaaatagatcctattattactgtaaaacaactttgtaagtcatacccactatataccaaaaaacaggatcatcttcttgaactttttgatccttttagaaaacagcgtcatacactttttcatgcacttaattctatctcattttcaatttataaaaatgaaagtattggtataatgggtattaatggttcaggcaaatcaactcttttaaaactattaacaggtgtacttacaccctcttccggggaaatatccgtaaaaggaaaagtatctgctttactagaacttggtgcaggttttcatccggaaagaacaggtcttgaaaatatctattttcaaggagcacttcatggacaaacaaaacaagagatagactcttaccttgcagaaattatccagtttgctgatattggagagtatatccatcaacctgtaaaactttactcaagtggaatgtttatacgattagcatttgctactgctattcaaggtaacccagatatcttgattatagatgaagcattagctgtaggagatgtacgtttccaacgtttatgctttcaacgtattgaagaattaaaacaacaaggggtaactttcatttttgtttcacactctagcgatcaaattgtagcacactgtagtagagcattactacttggaaacggtcaactcattatggatggagaaccacgcaatgtagttaatcgctatatggatattttatttaatcgtaatgataaattaagcaacacaataaaagcaaatgttactctccctgagagcataagcaccgttacagaaaaaccaactgagcttactactaattatgacctaaaagataaagaaaaacttaacgacccttactcattacatccctggtataatccttatgaataccgatggggagatggtcgtgcaactatttcagatattcatattacctcatctggaaatataaataatgttcagcctggtgactacttatctattcaactaaaaacagtatttcacacatccattattagacctatttttgggtgtaccataaaaacacatgatggtattattgtatatggctcaaatacagagctaacaggttctgaaatattatatgaccatgtttctgctggatccataacatttgttacttttactatgcattgcaatttagcaccaggagactactttttctcatttggtgttgctgtaatggaaaaagatactgtacctcttgatagacggtatgactctcttcttttaactgtgcatggccctgcaaacttttttggtcttagtaatttaaatatgataattaggaattcagggattaagcatgtataatgtcttatcacaactatataattatcaagctgaattgaatatttggcagtgtgacactccaaaaatatttaattattctgatggagatgaaatagaagataggttgtataccatactaaaacaagtggaagataaaagtatcctctctgatgaactacaaactttccaaaaagattgggccactacctatcatttatctgcctccagagccaacttattacgcccaattgaaaaaacattgttaaaagatgccactgtattagagttaggttgtggttgtggaggaataactcgctaccttgcagaaacatgtgcacatgtatgctctgtagaaggaagtcaacgtcgtgcatcaattactgcgttacgctgccaagacttaactaatataactatcatatctgactctatttatgatctgtctcctaaaattgggtcttttgatattgtaacacttattggtgtattagaatatgctcgtctttttggtggagaatatgcagaaactcgtctattaaaaaaagcttgctcttttcttaaaccaggtggtgctcttattattgctattgaaaacaaacttggactcaaatatattgcaggtattcctgaagaacatctaggaacatcatggactggtgttatggatggatatacttcagatggtatagttacattcaaccgtaaagaattagaagatcttcttatccaaactggcttttcacaactccaacagtttatccctttacctgactataaacttccaactactgttttacacccagaaggtattgtagcagaggaaaaagaatttcaacgtgcaccactaattgctgcttcctctagatcatttgaagaaaaacccctttttaatattcaacaagtttggaagggtatctgtaatactaatatgttagctaacatggctgactctctatgctttattgcatggaaaacttatgaatcagataaaactatacatagctggcccaaaaatattctagcttcacattatggaacattcattcaaaaacaatacgccaaagaaactcaatttattcgttcagatgatggtatacaagtattacgccgacacttaataccaggcttacaaaagcctaatgctatcttttcacaactattagaagaagaaccttacataaaaggagaactccttatagaaaaagtgagacagcttatggtaaaatataactggacaattgaacaaattgcagctgtattacaaccttggtttagttggctttgttcacaatgtattcctggtacaactgatttaccagccgaactacaagatatagcaccttttaatgttgtccttgataaagatggtgctatcaatcctatagatatagagtggacaagcatacaatctatccctttattaacaatgcttgtacgaacactatcatcaacattcatccgtataggtcaagttgctcctcctgcaactaatgtccctttgaagattattcccctacttcatcaaactatttgcatactatataaaccaatatcaatggactctattcatgcagcatgggaagatacagaaaataaagttacatgttatctaggagtagattgtccatgggaaactatgatccatgctgagttgtcagttattcctaatatgcccctctccatgattcaatcattaaagacagacctatgttctctctcagaagaaaataaaaatcttagagaagaactaacttcatgttataattcccgctcatggaagcttacaaaaccattacgtttttttagtaacaagttacacaattatcgtgcagttattaaaaatttttttacttttaacatgttactttttataattatcacatattagtatcacattacactactagttacacctctaactaaataatgactctatcttccaagatatattcaagctataattcatactttttacttattccccctacccttactatgctaaactatattaaggataactagtatgaattaccttataaaaattggatcttaattgtatctcctttaaaatattgaaagaagtatctatgctctaaaaaaataaataatatttacccttattaaaaagagtgttatgggtttaactacattgtatgaattgaaaccaattattttttgtttccaatgtaaatttattgcatgactatcattgtacaatattgtatcctctgatatttatttctattatttagaattacatattgtatatcttggagacagtatgccattatttacccgttcttactctactttttggctaactcttaatttagtttttttattactacctgcttgtggaactaaagaaaaatcacttcaatcaaatgaactcctctcacaacccatagaaagtcaagataataccacctcaaagacagaactacctaaaattagtcttatcaaacctacacaagggaaacatatttcttctgaatttggaatgcgtagtcatcccataaaaagaagacaacttctgcacaccgggatagatatatctggaaagcgaggggacaaaattatagcttcagctaatggaactgtcgttttctgtggacgtagaggctcatatggtcttacaattgatttagacattggaaatggtgtaatattacgatatgctcatcttgatagattacatgtcaaaaaaggtgtagaagtttatcaaggacaatgtattggaaaacttggaagaacaggtagagcaactgctcctcatttacattttgaagtccgtgtaaataatatccctgtagatcctatgcaatttattataccaacacaccactggacaaaaaaacctcaaccacccagtactacaacaaaaaaagaaatgtaatttccattcattggtaatagagtatatagagcatattatgactcaaagcctccctgtattaatgtatcattatatatccaattatcctagctcaataagcgtatctcctcataattttgaaaaacattgtcaaggaatggcagaaaatggttggagaggaataactcttcaagaagctgaatctttttttctaaaaggagaaaaacttcctcctaaatctgtgctcattacatttgatgatggttttttagataactttgtctatgcatggccaatattaaaaaaatatgaacatagtggtgtcatttttactgttactgaacgtattctatctgaacaaattgttagacctacactttttgacgtctgggataaatctatttctaataaggttctttatgaacttgtagatatgcctataaaacaaacaaaacttggactcaaaaaaagacaagatgtatttctttcatgggaagaatgtcgtataatggaaaaaagtggtgtaattagcattggtgctcactctgcccatcacctttctgtttttgctaataacacatggaaagatatatatattccttcagatcagcatagaacattctataaaattgatgctcctatagtatggggaatgccatgttttaaagaaaaatctgccttacactgtaaggcatttattccttcgaataaacttactgaacttattacctatcatgtaccacaacaaaaacaacaagcctatgaatactttcaacaacctcataatataacaagcctgaaacaaaaaattcaaacactttcctctaactctcttggaagttttgaaacatggggacaacagcaaaaacgtcttatttcagactttgaacaatgtaaaaatactcttgaaaaagaactaggacataatgtgcaatcattctgttggccatggggtgaaagttcaattattgctcaacgtattgggaaaaattttggcttttcatatttttataaaacttctatgggagcaaatccatcaaaaaaatatacggctattaatcgttttaaagtcagaaataaaggatggaactggttacgttggcgattagaaatatattctcgtataatgcctgcaactgtgtatgcaaaaatacgtatctaaatttagtcactaagtaatataaaaacatttctatttattacaacttctatctgttatttgtagtgcttgtaaactttcttttgatgcctgtatagctattgctacaagaataggtcctgctactattccaacaggtccaaacgctgcaagaccacacaaaatagataaaataagagcaataagtgttgcatctatacctgttttcaaaaaaaacggccttaataagttatcaacgcctgcaacaacaataacacaccaaataatcatggcaaccatagctacagtctcaccttgaagccaaagccaaatacatacaggtatccagactaatgacgtacccacaaaagggattggtgctacaaaagctgtaatgagtccccaaaaagcaggctgtggaacattagccacagcaaagccaataccacatagaaatccttgtattatagaaactaaaactatacctactaatacaccaaaaatagcatttcttattgttacaataaatcgattaagtacttcataagaaaaattagaagtaatacgaatcatagtataaagtaattctgcatttgtaatacataatacagtaaccataataaatataaatatagttaatactgcatgaaaagctccacctgcgattcctaaaccaccagctaacacagaccttgttactgaccctacaatacctgctatgctgcttgccaactgtttaaccccaccttcaagaccaggaatttcttttaaccacctatcaatagaatctaacatttgatcagcattaatactctgtaaaaaaccaggttcacgtaattggtcaagaatttttaaccctgctacagcctgagggacaataagagatatcgttattattaaaggtaataaaattaataggctaagacatatagtgtaaattacaattgcccaatatcgagaaattttctgagtaagcttaagaaaatatggatatgaaacacaagccatacttgtagctaaaaatgtagtaactggaaaaggccataaaagtaaaaaccaagcgcctatactcaatagtgagagaattcgtgtcatattataatgtctctttacccttttaattactatggtaacatactgttaatacacaaaaactgtctaaccaagttactatcctcccacacttctatctatagttcaaaaaaattttattgaagatatatctaccatagtaatagattaacatttctcaaaattatatctatagtatataattatattatagtatatagtgatagcatgacattgccaatacctaaaaaaatcagaaagttacaaccataagaaaaggttaaaatacaaagaatagctatcttgtttttctataaaaaaacatatactcctaccgattaacattagtaaattaacattagtaaaattttactaacttactattctagttattataataaacaagggggacgcactggtttcgacggggatgtggaaaccaaagtggcaggtcgaggcgccgctggcctcgtaaaaagcggcaacaatgtaattgcaaacaacaattacgactacgctcttgctgcataagtaatagcgtacctggctatttaaatagccacgtcaatcctgctgatgtctgataagctggtgcggcgacaatcatcaggctagcagcctattgtgtttactggatagtctgcgaaattattacagtaaacttgttttgatctgcctggctaagggctagaatcaaaataagatgtaaacttagcctaaacctgtagatactttgtgtggaactttctcggacgcgggttcgattcccgccgtctccaccatttttttatccagagacatccaaataaatacgtaacaatttaaaaatattgattttttagaaaagatctatctaacaacatctaataaaatccattgacatattacaagtttttggggttaactttacaggaaatgaaaaaataaagttactcccccccccccccaaggtttactttttatatgtatagtaaggattaaacaaaattctatatgcccttaaataatatttttattaaaaagcttacaccacaaaaaacaaagtaagttttccaataatagtggacttttttattagttagtctttcagattggagcaggataaaatgatgctaaacagtgtagatagaatggtttaataagatagcctttgaggttcaaatatcttttgaaggaaaagcctcagaaacattatttacaactacgttcttaaacattgaggattgtattactactacatttactagaggcagttctacataaaggaaaaggcttacatcctattactattgatactatcgtgaatatagaaaccaggtaggattaactcaatttgtatattgatttccttttattatatgtttttctatattcatatcgaataaaggtaaaaattgtttagtcatagatgtaagctgagaatagtcacttatacttactaaaccatcatattgtttttgatactcagggattagccaatgtataattccagccttttcttcttctgcttgtatgttatataactccattaatcgtgataatgcttcatgagttttaatatcctttggccatccataggcttcagccacagcttcatcaagttctgtatggagccttaataaattatagatatctccttgaaggcttatctttgactccttagaagataatggaacattatgttgtaccttctccataatagcatacatatgtgtaagtgtcaaataaggatattgtttttgtctttctttacggtgtgtatctaacatgttggcaatagaacggatacgattcttttgctgttctgtagcttgaggaaatggaaaagtatcaaaacagattttattatatacgtcattagtattaggtttaagacctcgacttgtggctgtgacagtcaaccagacgctatggaatttacttgagagtatccctaaaatatatggatcatcgctagcaataacagtcagactatcatcaggtactactagtttatttataaaggcaaaatacctcctaccagcagttcttggagtagctatatattgtttaaaattattaatggcatttcgtaagcctattccttgcgatccaaataaccaccagtgattcctacgaaatgcaagtctattcttttcccgaataggttttactttagtagcaatccattgatatatagtaggatagttctgttggacttcattaatacttagtccaaataaatctatgacatatgtattctttgatatccctgctaaatctctacctttcatatagggtttaatatacttttctaaccctgggattgttcctaatcctaatttttttgcctcatctagtgtaataataaagtgttttcctctaatactgacacctgaccatgctatgcctttattagcctttaaaggtacaagttttgtagtatcaacatcaacagaaagattagcatgtattttcccttgtgagctattaaaagtaacctctacaaagccatcttgttgtttctcatgtatggatgtatataatataccttgtttatcacctaaagagcaggttgtcatagcaatacgaactcgagcagcatcttttgctccagtccaaggatgatcaggtatagccatcactattgatagttgaggcttattctctagataagactcaactatttttctattagacggatttttaatactgtttgttgttataaatccaaattggcgtactttgttctccctaagtaacaatgccgaacgatgccaccaatacatcacatagtctatattctttggtaacattggataagcagaacgtaatgcttcaacatagccgtctcctagtgcagatcttatacgattattaccgataaaaggaggattcccaacaataaagtctgctttaggccaaggatctgctggtctaggatttatatatgtttcttgaatatttcctaatgaatcttttccttttttgatagaatcccatgtaagaatagcgtccctacattctatgaattggatgttatccataatcggttctggtggttggacattcccatatactttataatgtctttgtaagtaacttatccataccacaagctcagatataaatgcagcacgaggattatactcaatacctttaaactgttttggtgttatagagtagcctttcttttgtatctcattttcagataaccctaagtctttaagggattgtactacctcaccctcaatatcttttaatacattcatagaaacagctaaaaaattcccacttccacacgatggatcaagaacaatggtttcacttaatcgtttatggaaaacttctatttcttgaatggcttctttatgactccctttgacaacatgagataaggctaagagttttacattttcccaatcttctctaacaggatcaaccactgtcggaataaccaaacgttcaacataggctgttggtgtataatgggcacctagcttgtacctatcttttggagataaggcacgttctaataatgtaccaaagatacttgtttcaacgccactccaattagctttagctgctttatagattatagctaattgttctttatttaaaggtaatgcctcagcgtcttcaaataaatggccatggaagcatactacttgtttacccaaagctgttgagtttcctcctgtcttcatagctttccatacgtctgtagtagctgatgcaaattgttctggagtcttttcaagtctagccaataattgtgtgtaagaattaaaaggtagtaagccacaatcctcagcaaataatgtgaaaatgagtctcataataaataatgccacaacatctgggtcatgtccttcattttctaaggattgagctaagtcagataatgttaacacaagctgataggtaactttttcattttctcttgaagggtttaatgaaagaggatccgtccaaatctttctaagacgttcacgtatttcaggctttcttagatcttcaaggaggatagtgttttctcttgctgatggatatggagcatagaatcctgtatcattaaaatcagcatagacttgtattgtatgaccaatatcagcaacaatgataaatggaggatgtccttctttagcaggaagagcataggcatacctttcggcttggattcgagcagcaatcatagcagcatcccaagcatgggtacctctaatagctgttccacgtctgtggagacctttattttgagatgttgatttatagctaccttgtttactttcccaaataaaacaaccacgtttgtacaagtcgatccttcctgttgttatttttccatttttgtctgttaaaataacaggcatttcaaatagatatgtgttatcaacaagtgtagctctaggtgattcaggacgtgaaatctcaaggagatcacaaagttcaagtaaaaaagattgcgaagagcctaattcacttcctccagaaggcgcccattttgcaataaaggcctcaataggaggtaattctattgaaccttgcgatacaacaggtgaaggataaaaaaaaataagtattattaacaaatatactaagttagtacctatcaatctatagtaactcataatcgtatagctaaaggctttcctcaaaacaacttattgtaaagattaaataatacctatttttgttattgaaaattttaacaacaattttatccttaatcttccctttcaagataatctatacactagcaagtctaataacactgcgtcctcttagattcacaaaacatagactagttagctcttttaaaaagattgaaagttgtcagctagaaaggaagaataaagcttttcttataaccataagcatcttatctctactttttacataaaaatgataggtaacattctaactaataatagtatgaaattaaatataggggtaattttaggggtaacttaaaaatagtgatcaataaaaaatcaataattacaaataaataaattcaatggtcgctgtcccactttttgtccaatactccccagtatatgatgatcattttgaataaaaatggcctggagataactctaggcctatgttttacgcttttgattgtaaatcaaagtccacaaccaataagcaaagacgatcaaacatacccaacggtggctccaacattgtttctgcaatctgattcaataaataaccatctatcttttattctgtatcaaaatattgcatcaatatttataacatactgaatttacaataagtttactcaaacatttcctgccaactacttgttttatacagacaaagcatctcctgctcttcctcaacaatgaatccaggcagctggtagatacaatattctactgccctcttttctgttggagtatattctctaggattagaagcagcagattgtatagtttgactaacagcaagcaatacttgagctgtttcttctagctttcctactaatgtgttaaaatctagaatggatggatgtaaagaagactctgaagtcagaattgattgagacataacactctcctgatagtttttgtataaaatccacaaactgacagagtgggaagaccgctggtggaaagtattttgagcgcttcagcagacaaaatcataagaataacaagaaagggtcaagatgtaacgacattcaacataaaataaagtttgttataaagataagcttatctaccatttataatcctatagttacatccacctaaagttgactttcaaagtatacaataaaaaaagctttattagtctattgctagttaataaaaaatgaatatatatttatatatgttctgtgaaaaagaacatgttactcatctcttacagaaatactctatcaataataccagtaggtattagtatgtaataaagtattccattaagacccccactatactccttgaatatacatactttactgtatatccaatttaatacagctgtacatcaagtaaaataaaactatcaataaggtgtctatcatgaataatatctataaggtattaactagtccttcatcagcttctctacttgtaatcttagaagattctgctaacgtaaaaattcaaaattctttttggagaagatataaaacagctatgggtcaaggtgcttcctgtatagtttcaggatttttagctgcattgggagccatatcttgtgcatgtatcaattgttattatgcaataaaaagagctataactgagacaatattcagtaaaccttataaggcgtgtttcaactttgaagatgatgaagatttatgggaactagataaccaccatgatagtactactcatactgatagtacaaaacaaaaaatcttatttatctctaaagaataaaatacttactctataaaacttattcatttttctatataaatatgatatcataataaaagttaatctttcaaaagaaaggacactattaaaaattactttagatctacaataagaatgactatcatataaagaaataaataccttaacaactataggtaaagggctatagttgtatctctatttaaatagctctatataaccattctattttgataattatacgattattatacgtataggataccttttaaaaaagactgcatagaatattctatagttagagtgtatcttattttttctatatcttactttactttgatgctactggtgtagacaataaaaatttaccctgaattatacgtaacaatgtcccaagaatcaaaagtgcaatgacaccattagaaaaaataaaaattggtattgccatttgcccaacgacactttcaggattctctataaaaaaatgcaaagatgaaacagaaagagctgaaacaccaaatgaaaacgcccaaaaagatacagaaaaaggttgttcaaaagtccacaataatagccatagtaaaaagatcagctgtaataaaccatatccaaacaaaatttgagaaaatatatctgtatgtcctccattcacaaaaagatatgcttcacaagcaactagtggtggagcaagttgaataccaattgatggtcggaggggattaggtaatgctcccattgtacgaaggcgttgcaagataacactctctaaactcaaccatgaaaatatacctgcaccaaaaaacaatattccccactccttatatcctaatactcccaaacaaatagcactaattaaattaccagaaactgttggaaggtatacacctggtgttgttgcctcttaagaatgaagtccacgccagagaccagcactacgatatgcagcaaaacctaactgtcctatagtcccaacgactacaaaccacagcgctactgtatgaaaatacggatatatccctgcacctattaacatagttgtagctggaaataaactaatataacaacattggataggatcattcacttctgccaatgctgctggacgataccaaatccatttagtaatatatattatagctaatactaaccagacaacccctgcaagtaacattagacattctccccacaaagtggatatctgccatatttttgcagctatacgccatgctgttcccatacctgaaataccaagaaccatacccaaatatgctgctggaataggaaatgtctttattggagaaaaaggttctagcataataacttcctttatctataaaaaattatacgttatagtaggataatgttatataactaatcctactactttaaagagaactttaaagctttttaaaattagttctatattaatgtataaaaaatatatcatatactagttctaattttagacatcttaactatatatatcatgtaacttaaataatatatattaaaaataataataaaaatacttatatgttaagaaataaaacttattattacatattatatttctctttttaaataatataaaaatttataaataataatataatagttaaaatactctctatactttttcataagaatttattttataaaataatataataattttgttatctataacagtaaaattgtaataaattttaagaactataaataaattagctagcttttctaatatattaaggggaaatagtgagaaaacatctcttgtatattccttgacaaaaatataagctgaagatagtaaaaagaaaaagtaaaactcctaataaagggttaatttagaaaattctcttaaggagaaaaaggtaatagtatttgtatattaaaaaatttttccttcttatctataaacatacaatattcttaggaaggttaaaataacaaaggaataccagtaaaatatacattattactaattaatttttataggacgaactattacagtaataagatactgctaatagttctttatagaggataacaatatttcctcctttgtcccttgataaaggagtttttttatccctatattttataaattttagtcatcctacaatgtttatattatattaaaatatccactatctattaagataatgtaatattttaatgtaataaagttaggggatattatggaacatccagaggtggccttctcacttgcagctatgcaagttattcgtcgtaatggcgatattgtatccttcaaatctgaaaaaatagcagctgcattaacaaaagcatttattgcagttaaaggtgaacaaagtccattatcttctagccttcgtgatgtagttacacatctgactgaaactgttattagtgcactcacacatcgctttccagatggaggctctatacatattgaagatatacaagatcaagtagaacgtgccctaatgcagtctggagaacacgatgtagcacgagcttatgttttgtatagagaaaaacgtgcagctatgcgtaatacatcagaaaaaaaagctgtattgcatctagtagataaaggcgagaaaaaagttctagaccacacatggttaatgaatatatgccatgtagcttgcaaaaatctaaccagtgtttcttcaatctctatatttaataatacattaaaaagtttatatgatggtatgtctctagcagatgtatatagctctctaatcctctctgcacgcacaatgattgagtatgaaccagaatataataaagtaaccgcaagattgttacgccttagcttagcatatgaagttcttgatcaatccacagaattaatggatttacatcaacttaagatagcaacaatctcatatttccctaaattcattgagcttggaataaatgctggtttattagatcctcgcctttctacatttaactattcttatcttgctcaagcattagtcccggaacgtgacgaactttttggatatataggaattcaaactctttatgatcgatattttctacatatcaaaaaacgtcgtatagaactcccacaactcttttttatgcgtgtagctatgggactagctttaaatgaaaaaaagaaagaagataaagcaatcgagttttataatttactatcaaactttgattttatgtcttcaacaccaacactctttaatagcggaactatacgcccacagctttcctcatgttttcttacaactatcaatgatgacttagaaaatatctttcaatctataaaagaaaatgcattactacaaaaatatgctggtggaatcggaaatgattggacacctgtaagagctttaggcagtcctataaaaggaacaaatggccaaagccaaggggttattcccttcatgaaggttgctaatgatacagccttagctgtaaatcaaggaggtaagcgtaaaggagctgtatgtgcttacttagaaacttggcatttagatatagaagattttcttgatttacgtaaaaatacaggagatgatcgacgacgtactcatgatatgaatactgctaattgggtaccagatctcttcatgaaacgagtcctagaaaatagtgattggacgcttttttctcctaatgatgttccagaattacatgaaaagtttgggttggaatttgaaaaattttatactcattatgaagcaaaaacccttactggtgaaataacattatttaaaaaagtctctgcagtacaactatggcgtaagatgttaactatgttgtttgaaacaggacatccatggattacattcaaggatgcctgtaatcttcgttcgccacagcaacatataggggttatccatagctctaatttgtgtacggagattaccctaaatacatctaaagaagaaattgctgtatgcaacctaggatcaattaacttatcatctcatttaattaatggagaagttgatcaaaacaaactatcacaaacgatcgccactgctctacgaatgttagataatgttattgatataaattactacaattctcctaaagcctcctatgccaatcttcaacatcgccctattggtataggaattatgggatttgctgactgtctatataaactaggtataccttatgcttctcatcaagctgttgagtttgcagatcgatctatggaaatagtttgttattacacatattgggcatctacagagttagcaaaagaacgtggtgcatatagcacattccctggaagtctatgggatcgtaaaattttacctcttgactctctggatcttctccttaaagaacgaggtggatttcttgaggttgatcggtcttcacggttagattgggatgctctaaaggatcgtatagctaaatatggtatgagaaactccaactgtgtctctcttgcgccaacagctacaatttcaaacattataggtgtatcacaaggtattgaaccagcatatcaaaacctttatgttaaatcaaatatgtctggagaatttaccattgtaaacgaatacttagttaatgatctaaagaaacttaacctctgggatgaagcaatggtagctgatttaaaatattttgatggatctgtggcttatattgatcgagttccagactcactgaaaaaactctatgccactgcttttgaaattgatcctgtatggttaattgaagctgcatctcgaagacaaaaatggattgatcaagctcaatctctaaacttatacctagatactccttctgggaaaaaaatggatgaaatatacaaacttgcttggttacgaggattaaaaacaacttactatttacgttcattaggagctagtcaagttgaaaaagtaggaacaaactcgcaatctgtattaaagaaagatacagtcttacgagcatgctctattgatgatcccgaatgtgaggcctgtcaatgagtacattaaaaaaaaccaactctttaaactgggatactcataattctatagaaactaatactggtatctcacaccctcaagatggggtaaactctcttagaaaaatttcagaaagtttacaagatagtgttacactacctatgcctgttaatgcctctgacaaacgtatcgttaatgggaaaacggatattaaccaacttcttccatttagatatccatgggcttgggatttctttcttaaagctaaccaaaaccattggactccacttgaaattagtatgtcacaagacgtttatgactataatcatacacttacaacaaatgaacgtcatgtttttgacaatgtcttagcttatttaacgacatctgacattcttgctatgcgtaatattggattagctgttatggaaaaaatgactgctccagaattacagatataccaagcacgacaagtttatgaagaagctttacatacctggacataccaacattgtattgaaagtttagggctagaacaatcagaaatatataaccgctatagagtagttccagaaatttatgggaaaatacttctatccaataaaagattagaacaagttttacgttctgatataaatttatcagataaagataatttacatgaattcataatgtcttacatcttttttgcagctattttcgaaggatgctggttttataatggattttctcctattttctctttacagcgtagaggattaatgaaaggaactgctgaacaatttcaatatatcctacgagatgaagttttacactgtacatttggtataactgttataaaaggattaatagaagaagaaaacataacacttgatcctacggctgtacgccagttatgggacgaagttgaagcagcagaaatagcttatgctaattatattttacatgaacctattattgggtataatgcagatttacatataggacaatttcgctttattgctaatcgtagatctcgacaattaggtatgaaagaaccattccctggagcaaaaaatgtattaccatggttagatgagcagtcaaatcttagaaaagaaaaaaacttttttgaaacacgggttactgagtatcaaactggtggtggactaaaatgggattaatacattcaaatagacaaaaaaagattaaatagagattacgattattgttgtcagactaaataaagtattcttcattgaatctaatttatattctactcaaataacaacctcatagtattctattaagcgctagtagttagaagtaataaattttatcctcttaacttaaaaagtaagatcttttattttaaaaaatttttgcctaaaaaacaagatataagaagagctatactactaattagtagtatacaactctgatacactttaaaattactatcataataccattacagagtaattacccttataagtgtaatcaacacatagcccccaaaatatataaaaatattacaaactataaacttaacaaaactttttacaacaattgtaacttttcttttacccaatggctcacttttttcatctcattagataagctatcataatcaaagcgtgtgaatgtaccattataatataaaatttcaccttcaaccatagtaagaaaaacttccattcctgtagtagcataaataagatgagaaattgggttaaacattggttgaagattaggcatactcatgtctaaagcaataagatctgcaggatgtccaggtgcaaggacacctaatttaggttgatgtatagctgcagcaccacctaatgtagccatatctagaacagtttgtgcaaaaagagctgttggattattccaatagactttgtgtagtagtgcgcaacgtcccatctccataaacatattaagacaattattactagcagccccatctgtaccaaggcctacagaaagattacgttttatcatttcagggatgggagatacacctgaagcaagcttcatattagaagaaggattgtgagaaatcacacatccatgttcagcaagacaagttaactcttcaagattaacatctacaacatgagctaatgtcgtacgtggagtgagtattcctaagtcacgacaataagaaacaggacgtaatccatatttttgcaaacatatttgtgtttctgtagttgtttctgaaagatggatatgtaaaggtaaactacactcttcagcaacttcaatacattgtgataatacttgaggcgttgttgtatagacagagtgaggatttactacaacatttatacgtgtattatcagaatagagttctgccattttcttagtatgctctaaagctgtctttgctgtatcacatgaaactgacggaaaaacaaaaatgctctctccacctgtacatcgaattcctgctttgattgcagcttcaaaaacaacatcttcaaaaaagtacatatctaaacaagctgttgtgcctgtccgcaacatttcagcatatcctaataaactactccagcgtacagtttccggagttaaatgacgttctataggaaagatatatgattttaaccactccataagaggtaaatcatctgctaatccacgaaaaaatgtcatagcaacatgtgtatgtgcattaattaaacctggcataacaagcatattacaaagatctaaggtttcttttgcatcccaaaaagaacaaatttcttcttttggacccaatgcaacaatatttccagaagtaatagctagtgaaccattgtaaagaataacacgttctttattttgagttacaatacaatgagcatgtattattgtatcacataattgagccatttcatatccttaataagaaaaaactcacactgaatagcctattgtataaatgagtaagaaaggtattctattatctaataatatcttcttcatataactactcttgtcagttttaatttattaataactaaaaagtattttaatagatagataataagattatatcattcattagcctatatccattacttctttatatataaagaaatctattggctactctatcaaactatgtaaaataattaattaagtgattatatcctttacgttactatcatattatattaataactctttcaaagaaaaaataccttacccggtatggtaattttcctccagttaaccaatagtaactatatgtctactataatacaacttaatcccaactaaaaatcttgtttggaataacagaatgaattttgttacacttgaattttgtatcttttttcctattgtactattcatactatacctctcttgttaccatcttggaatatataaaggagcacttcttgctggtaatatattcttctatgcttatgcaggattaacctttttacctcttctttttactgttattattcttaactggtgtactggcaaatttcttttttcttctaaaacaacttgttccaaaaaaattatcattactatcaatataattctccacattctcatacttgcttttttcaagtattatgaatttattatcctgtctcttgagtcaatcttttcactgggaagatcaatacctattaccttacctatgatagatattttctttcctgtaggattatcattttatacatttcaaggtctttcttactctatcgatcaataccgtaatccaacgtcccacccagaatcttttattaatgtgagtctttttatatcttttttccctacaatattagctggtcctattatgagagggcatcaatttttcccccagctaggaaagtgtaactatatatcagatgaacttataacaggctttgctttaattcttagcggtctttttaaaaaagtagttcttgcaagctatctgtcagagcacattgtccgtgatgtatttcaatcaccaggcatctattcttcatggacaattcttacagctgtctatggttactccatccaaattttttgtgacttttcaggatattcagatttagctattggaattggagcacttatgggttatcgtattcctcaaaattttaatgcaccatacctagcgtacaatttacaaattttttggcatcgttggcatataacactctcacagtggctaaaagactatctttatatcccactaggtggaaataaaaaaggaaatcgttacattaaccttatcatcacaatgtttattggcggtctttggcatggttcccatcttcgttttcttatttggggatttttacatggcattggacttgctttagtccattttataaaaactgtatgtgcttcacagacaaatgttcaatacctacttaacattccctttataaaaacaatacactatattattagttgggctcttacattccattttgtgtcttttctttggatattttttcgagctgaagatgtcccttgtgctttggaaattataaaacgtattattatttttggacaagaaggagagggttttccaattcttgttattcctgtcattttaacaggcttattaatacaggttgttggtccttatattttaactagctttactaaattccaaaaacgactgcattggattatccagacttttgttcttgctttcattgcaggtattattcttaaaatgggacctgatggcattatgccttttatttacttccaattctaataaatagtatgaacaacatggttaaacaaaaaaagattacatcaacacaattaacaccatcacgtagtattattatctacattgttactctatttattctgttattgttagatacaggacgagtaattccaatactaaaccgtcttagcagtgacttcccttcaataagtattgctgctcaatttattcaaaaaacagctgagatatcaaaactaacagaactttcagcatttgaatcaacgattataaaacaagtttctttaaatacagtcataggagaaatccctgttcataactcatatcctcaacaagagaaaggagaagaggatacttctcactcacaccctgaaaagtttgaagaagcatgtaagatgcaacaagatgctgtaatggatcatacagaacctcatctaacaaatgaactttctccaccattaacttctactccaaacttagaaggcaataagtcagaaacattatctacatcacctataaatactatagatcagtctatccctactaataataacaatacaatacttatcataggcgactctatgataaatgaaggacttggaccagttctacaaaaaacgttacataatcagtacccatttaaagttatccgtgaaggaaaatattcaactggactttcacgaccagattattttaattggccagaacgtctgacttttttagtaaacaaacatcaccctaaactcattattctctgtttaggtgcaaacgatgctcaagatatttttgatgataaaaatcatagataccatcctggcagtcaagaatggaaaaaaatttataccaatagagcaaaacatcttttaaacatagcaacatcacaaggagcttatgtaatttgggctggattaccaattatgggtaaagtaccatatgcaacacgcatacagtatgtaagtgaatgtcaaaaaaaagcttgtgatgagacagtaaatacacaatttatagatacacagtctgttttagctactcctcagggcaagtatactacatacacgcaagagtcaaacaaacatattcgactaagagctaaagacaaaattcatgtaacagaagcaggaggtagacttcttatgaatcacctcatgccatatataaaacaatctttggagactataacagtaaataatacaaaagataataaacaagatctttatacctcaaatgcagagaacgatatagttatttatattccttcatcaattcagcaagcatctataccatgctcagtatttattcctcaaaacaaaagtcaagaaaaataccctgtattactgctattacatggtgtaggatgtacaaatgaaatttggaaacaaatgactggagatctcctgcaacaacttgcaacttttcatagtattgtcattattgcaccagatggaggtaaaaatagttggtatgtagatagccctcttattcaaacaagtcaaattgagtcatttattataaatgaacttaaaccaacaatgcttgaacagctacctattatagataaatggagtatagcaggaatctctatgggtggtcatggtgctattactcttgggctacgtcaccctatgttatatacttcaatgagtgctattaatggtgtccttaaccttatggtacatcctcatgaatgggggataaaaaatgttctaggtgaactatctgattctcaacaactatgggaatcatattcagcatatcatcttattgataatatctcaaaagaagatgtcccaccaatgctaattagcattaatctaactgaccctgcattagatgaaaatcgatgttttttccataaagctactaaattaaatcttcctatacaatatagtgaaacatctagtgatcaatattgggattactgtctttatcaactccctattcatataggttttcatgcaaagaaattacatcatcataatgaattatcgcaaaataatgattaggatatcaaataataactaattacccctaacaatactaactacttgttctatattaacacacccatgattaaagataaaaagctagtcattgttattccttcagagtttcctggtggactagctgcacgattaagtccacattttgcttactgtgaaacatatacactcactactattaagaataatgtagttttacatgtcacaactagacctaatatcattcaagaaagtaatgtaaaaagagcaatacaaaatattgctgagctacagactaatatacttattgttcgaggcataggtcttcacccacttgctatactacaacaaaaaggtattaaaatttattactctaaaaacttacccacagtttctactgttctttcatcctttctacaaggaatgcttataccctacaatcaaagccctcatacctcttcataaccttaaaacaactagtactaatgattcaccataaaaattttctctattaaccaataaaaaaatatccactacttcttcttatatttttgtatagtctaatataccaaaaatgtaatagctttccatataatggacattatggtaagattacaaataatgccctattcatttatagtttaatcaagttggactagttatatgtatattattattggatactttattgttattgcttccattattggaggctaccttatggctaaagggaatcttgctttactctttcaacctgcagaacttgttatcattattggggcagcattaggtgctttttttgcttcacagacgaaatattcatttactctggtcattaaaaatttatcacacatttttggcgatccaaacagtacaaaaataaaataccttgaaacacttgcccttctctatggacttttcttaaaaatgaatagagaaggtgtcattagtatagaaagtgatatagaaaaacctgaatcaagtcctatctttagtaaataccctacaattgtaaaagatactaaagttgttgcctttattgcagatacattacgagtttatctgacaacaggtgcaccagaagatatagataacctcatggaatctgacatgaaaattacacacgaagaagaattattacctgcacattccatcagccatatggcagagtcgctaccaggaatgggtattgttgctgcagtattaggtgttgttattaccatgggaaaaattaatgagcctccagaagtccttgggcattatattggagcagctttggttggtacatttataggtattcttttctgttatggtttttttggacctatgggttcaaagcttgaaacctctgcagaagaagcacatttttattataattccattaaagaagctgttgcagctgctatccgaggttctacaccaatgatagcagtagaatatggaagacgtgccatacctaatacatttcgtccatcattttcggaaatggaagaacgtctaaaaacaggataacctctctctaataaacattagttacatcattaaaggaaatatatatgtctggctcatggaaagtggcttatgcagactttgttacagctatgatggctttctttctactgatgtggattcttgcaatgacaccccctgaggttaaagaaggtcttgctgcatatttttcttcatctgatgctacatttaaaacacctgatagttcgccaatctctaacaatcctcttatcaaccaaatagataaacttgatactcgacaattaaaaattaatgaaacagaacaatctcattatgctcttgctaataaattaaaaaaaatgttaatggctgatgctatcccacagtcagcaacaggaataagtgctgacgatgttggtgtattattacgtgtaaattctaattccacgtttcttcctggtacagcaactcttacacccgaagggaaaaaagttatgggaactgtcttagccgttctccgtgaatataatctttaccttgtgatacgtggccatgctgatattggtgaaataacaaaaggcagcccttttgcttctaactgggaactttcaggagctcgtgcagctgcagctgcacagtatcttgtagagcacgggataaaggcttcacgaattcgctctgtaggatatgcagatacaagacctctagaacctagttctcctgaaggaagtacaaaaaatcgtcgtatagaattctattttcatcggccagaagttatgtcttatggcgttgtatattaatagcattcttaaaagggaaaaaattcctaacgtgaagactggattgaaataaatgtgtcatgaagactaactaaccttccataattttttcgtatttcatatcctgcaggtgtcaattctttttttggattctcaatataagtacgtcttaagtatctatcatctaatattgtttctatatggtgaataacagtagctgtaatttgatcaaaatatgttacaagctcaaactttaattctcttaaaatttttacagcttctaacaacattttattataactaattctcactcctttaacatttcgtgacataatatcttctagatgtttgaccatacgtgcttggcgaatatacgcatatttattcattacctcatggtaaaggtcaccatattcttcaaataaatctttatggtttggtgcatgaagataaccttctaaaatttttaccattgaagtaaagaattcatcactatagctaacaagtcgtcgttgattttttgaaagccatgcaaataaaaatttaagtcgtttttcttctgtttctgtgttttctatcaactcattacgtttataaactatacgtccaacatattcaccacggacaatatcatttaagtgcaaaataattgtgctagtatcttttataatattaacatcttctaatatttcacctgttaaaggatgaataatttcttgactctcaacagaaagtgcacgctcttgcctaacattatcatgattatagcgatgttgtttatatttgatacgaataatggcaatataattctttggatcaacaaaataacttccctttgaaagacgttctataacttctttctgaccaggctcaacacgaataagcgcaaccttttcaactctggggtataatctgttacctccattattccatattgttgttattactctatcagattgacctaacactctaaccataaaatgttcacccattttatgaagacggcgagagaataaagcagctgatgttctacgctcagaagcaacaggaaagccataaagttccatcaaaaactgatatacaaatagtctgttttgctcataaaggctgttattaccaagctgaaacttacgaattttaaggccatatcgttttatttcaccatctatatctgaagggaatgacccaaatattccagcaagataatagtatcctagtggatctgtagcaaatacatgagctcgatccatatgacataagtatggaaggattgctggataataatccaaagaagatatgtctacatgttgaaagcgttgtttaaaagcatcttgattgtttttaggtaaccgagttaaaaatgtctgtatattatgagcaatacactttaactctgcttctttttcctcttttccagggatagaatttaatggatcacatgaatgtaaaatatcatattggaaaatttcattaaaactttcaagaggacgggcaaaggctaccatcgaaaatcctggtaactctttatattctaaaagttctgcttcaaaagaaggtaataattctctatgttcaattaaaggatattgtggctgtgtgctccactcttttaacaggcaaaattttatttgtacaaaatcaaggtaatgcttaaatgtctcaagattatcaatatcaatcttgcaagaaaaacaatcaacatctttccatggaaacgctccctggctaaatgctttttcccacaaaaacgacattattatctctccaacttatctatatctttaacttatcttatatataataaatatcctttttcttcaactagctagtagtataataaatgtattcttatcttgtataaaaaatgtattcactaaatatactataaaaaatgagtacaacgtattatcaacagactatgtttattgatttatataaaagtacataattactcttttaagaatgatcagcataacactaaaaagaaaaaagaaatttttaacgagaactaactgttatgtattcctaccagtaggctattatatcaaatagtattaaacttctttcttacaataaagagtacaatagatattataaggatagaaaatagtacccctaagatgtaaggtccatgccatccccaaagtgtccaagctaacccaaagattaaaggtgatacactttgactaaatctgaatatgcttccatttacagccataactgcagctctattatttgtaggcgctaaaatagcaatgcgttcagcaacaattggtaaagtaataccctgagcaagaccttcaaaaattaaagggacgatcatccacttcatacttggcattataataaatgaaaattgagccaaaaaatacccaaaacctgccataagtagtaatatattaaactgaacatgattattcaaccatcctaaactaaaagcactcattccaatacctatagcaagtataataaaaatatttcctatttctgcaggtgatacataaaaacgtatatgtgccatcatagggaaatatgtattcacagggccgtaataaatacaataagataaaaaagttaaactaaataatattaatgctttctggttagtgataatctcctttgtatctataaaatactttttccacttaactgagctacttcctttaactaggggaaggtaaaaactaagccaagcaacaggaaaagcaaggatacttacccaaaacggagcatgccaaacaatttcgcctaaaagcccacctacagtagggaaaatagcaataccaatacttgctacagctgaaatttggcccataatttttggaagatcttctttatgatacatatcagctggcaaggtagcatataatactccaataacgccccctcccatgccctgaataacacgaaatataattagcatagtaaaattaagagaaaaggcacataataacccacctattccaaaaagaaggacaccagggactaaaacagctttccttccaagtctatctgctaaaactcctgcaataagagccataatgataccaggagatgtataagcaactgtaacccaactaacttgctctgtagttaacataaaacgttgagcaatagcaggcaatacaggtaaaggaatagtcactcccataacaactaataaagatatactaaaaaaaagcactttatattttatcaaaactattatctcctatagtatattactatgatatttatatattatataaaataatataacagatagtactgtataatatatatgttattttaacaataaatattataaaaataaaaaataatacgatattactaacatattgatataagtaaaaaatatttattattatcataattctatacttaattataaataagtataatatatcttgagttaatactaattaatatattactattatataatagtatatcctctgtatattatagcataaagttagttaacagtttatacatatagttataaattgttttgcagaagtattatttctatatggggtcctcaaatggatatagctacgttactagggattgtatttggttttacccttgtgctggttgctatttttataggtcctgtaccaggaaaatttattcatgttcctagtatgattattgtttttggtggagtaagcgcatcaattttaatatcttttccgtttgaagatgttcgtcaagccatttctgcaggagtcaaagctttctcttcaaaaaaaacaaaagcttctgacgtagtaacaacaatggtcaaaattgccgaaattagtcgtagggaaggaacacttgctcttgaacgtattcaaacagataatccacttttaaaaaaagcaacacaactcattgcagataatgcagacccctctctaatccatgacacagtagctatagaaattgcatcattaaaacgaagacataaagttggcattaatgtattccaaaaattaggctatcttgggctagcatttggaatgataggaacacttattgggcttgtacaaatgttagcaacaatgaatgatccttcagaattaggagaaggtatggctgtagctatattaactacattttatggatctattatagcaaatcttgtttttatccctattgctgacaaacttaaagcaaaatctctacaagaagaacttattctatttattatttttgaaggtgctaaatctattttagagaataataatcctaaacttgtttatgaaaaactttcatcttttttaccaccaaaggagagaattcgtgcttgatacctcattactttcagatgacgatgatgataaaaatgatggttggcttacagtcttctgtgatatttctctgctccttctcacattttttattttaattctctctatgtctagccttgataaagaaaaatttgatagctcctttagtgcaattagagatacctttggtggagatcaacaaaaaaacattacaactaaacaaactataaaagagtcagaagtagcagacttcttaaaacttcgtgaagaaatgattgctgctcaaaaaaatacatttgatgctattagaagcttcattacagagcatgccctaggagataacataaaggctactttcgacaatgggatcattacattaaggttgcctgatgaagttctatttgcacctggctcagagcaacttacacctcaaggagaaaaggctttatcgcagcttcgtgatctatttcttaagaatcgtgagcaatctattaatattaaaggatatacagataattcgtctgtatctgaaggtgcacgctttcacaataactgggaattatcagcgcttagggcggttaatgtccttaggaagcttctccaaggggggattgaagcaacacggatgaccgctacaggtcttggtgaccttgatcctcttgcaccaaatgatactcctgaaaatagagcacaaaatagacgtgtagaatttacccttgaaagaaaagtaaccaatcctttacaataaatatttatcgacttttctagttaaggataatttcactatacataataaataattataaattaaaaactaacttctaatttattagctaactatatcaacttgcgtcctaatccttttttaactattatattagtttgatgttttttcttatagttctcaaattagctgtctataaaatttattgatagatgaccccttttcatccttataaagatagtctaaaaggtgctatataatctaactacttttctgaagtaacttaataactccttttatacactaccactatgcaaatgataactataggaacacgttatataaacgttacaccacatagccacattacataaaagacaaggaacacgatggaggtctctgtctgtgaaaaaaataagacataaagtcctaattgctaaccgaggcgagatagcagtacgtattgctcaagcatgtcgtaaactaggacttgattttgtttgtgtctatacagctgaagatttagcatctggtcatgtattgatggctaaagagtttggtacttctcaatcattatacaaaattgcttcttatcatgatgcaaacgaaattttatcaatagcagatgagtcaggagcaacggctattcacccaggatatggtttttttgctgaagattttcgttttgcccgccgagttacaactcgtactcgaaatcttattttcataggaccatcatggagagtcatccgtgaacttggagacaaaattaatacaaaacgtcttgcaagaagtttaaaagttccaactgttccaggctcagacaaaccaatttatgatgaaatggaagcagaaaaaatcgcaaggattttatatagcttccaagtacaacaaggcattcaacgacccttagtccttgtaaaggcctctgcaggcggaggtgggatgggtattgaagaagtctatgatatagaccaatttcgtgcggtatatcgtcgtatccgtaattatgcactacgacagtttaaagatgaaggtgtcttaattgaacaacgaatttgtaattttagtcatcttgaagtgcaaattattgccgatcaatctggcaaaaaacctgtacactttggaacaagaaattgtacaattcaatctactggattacaaaaacgtatagaagtagctccaggattttatccacaaacaataaaatacaactttaatgctgcaaaagttcttgaagacattacaaactattctcttaccatggcacaaaaagtaggctataataatgttggaacttgggaatggattgtaacacacaaagggaatccatttctaatggaagtcaatacacgtatccaagtcgaaaatggtgtttcagcacgtattgctagaattcatgggaaagacggtgttgaccttatcgcagagcaaattcgtatagctcttggcgaacctttaggatatactcaaaatgatatatcatttgaaggagttggaattgaatatcgacttattgctgaagatcctgactgtaaatttacaccatgggtaggttgtattgatactttttcatggaaagatcaaccatggcttaccatgcatactcatgttcctacaaacaaaccttatgaaattcctgtagaatttgatcctaaccttgctttagctattatttggggaaaagatcttgctgaagcccaacaacgtggcctgaaatttcttaaccaactatcattaaaagggaaaaatcaacagggagagacattaaagtcaaacatacaattccttaaatcaaatacagaacgtatcctccaattttaattgagtacatctatggatatagaaaaacaaatatatcatcttactgaacgccttaattatctaaaagatatttttgcagggaagcacgctaaagttattgaattattacaaggccggctagcaacttttaccaatcgtaccaatggagaaactcaacaagacccaagtgcagaaattggaacccttgaagagctattcacttttatggaacataagcttgaaacaaagcttacccctatggataaagtgcgtattgttcgtcatcctcaacgaatttgccttcatgatattttagaaaatgtatatgataacttcacagaaatagctggtcaacaagaacatagtattgatccaagtatgttgattgcacgtgctactatcactcgtcgtaggggaaaaaagacatataaccaatttattatggtcataggtcaagaaaaagggcatggagaagagtttcgtaatggtggatcagtaaaaccatggggtaactctaaggctttacattatatgaaagttgcagaaactgaaggtatcccaatccatacatatgttttcactccaggctcataccccattgaagataccccaggtgcagcacaacaaattgcaaaaaacctttatgaaatggcagatctttctgtccctattatttctattatctctgaaggaggatctggaggagcagaagcaattgcacttgctgataaacgacttatgctttcacatggatattattctgttatttctcctgaaggagctgcagctattgaaggcaaattaaaaccaggtgaacgtgctacaccagaacttattgaattttgtgctaatcaacttcatatgacagcaaaagataatttatcgtttggctttattgatggagtgatacaagagccagatttaggagcacgacctcatcattatgacttttttcgaaaactccgccaagaagtcattcgtgctacagatgaagtagtccttggtgtaagaggccttgggttattccgtagaatagctcttaataggctgggaaaagaggacattaatatagatgaaatgtatgtaggttggaatttaaatctcaaatcttgtgctcgccttgtttctaaacgtcaaaagaaatttataactttatcaaaaaactcatgccttgatcaacgtccattttttaataaatttcataacttattaaatgactctataggaacacttgtctcaaaaacacgttacttcttctatacaaaatgccaacgtaaaattagatttgtctttgatgaaattacttctgaactccacttagttaaaagtcgtttaacagccccactttgtagaataaggcctcccaaacgtcaaatagaagaagctgtagttcaccagctaacaactctctctgattgggatgatacagaatctcgaaagggtagatggtcatatattagtccacgagctacagaagatcgttctatctcttgccctaatgcagcaacacatggatgttttgatctttgggctccagatctctttggtgaatttgcaggagtatgtacatcatgcggtcatcactttcctatggaatatcaatgggttgctaaaaatatttttgatgaaaattctatacgagaattcaatacagaaatagaagctatcaacccgttaaaatttacaaaatttgatgaaaaactaatagaagcccgtaaaaaaacaaaactaaaaagcggctgtattacctttgaagctactattcatggaataaaaacaattgttgctatttttgttggcagtttcagaggaggttctgttggagctgcagaaggaacaaaatttgttaaagcaataaaccgtgcaacaaaaaaacgttatccttttttagcctatgtacatggaactgcagggattcgtattcaagaaggaacacatggtcttgcacaaatgcctcgttgtacagtagcagtccgtcgctatatcaatgctggaggactttacatagttttatatgatacaaactcttacgcaggacctgttgcaagttttcttggttgttccccatatcaatatgctattcgatcctcaaatattggatttgcagggagaggtgtcatcaaagaaaccacaggcatggatattcctccagactatcacaatgcttataaagcattagctcgtggacatatccaaggtgtatgggatcgacgtgaagcacaagcgaatcttaaacaactattacttactgttggtggacgtaatctttattatagataacataattatagataacatattataatcatataggtaacaacccttttatgttggacatcacaaccttacttgaacatattaaaaaatctccatatgaagaagtcactatctcttcccctcatacagggatagtgacatttaatactcttaatattggtgataaagtaaatggtccttctggaacttggaaagaaaaatcaggtacccttttagctacacttacaagggaaagaaactctaaacctatttacagtcaacaaaaaggatatgttgctacaattcataaagaacttgaaggaacatttgtacaagcaaaaacaccacttttagttatccgacactttctgtcaaaagatgaagtacttcaattgattcttcagaaagctcttcatattttttcagcaccagaacgtgcaaaatattactttacccaacaagttgatgcaaaaattagaacagctggttgcaaatccgttatggtatacgatggaatggagctttttattgtttcacgaatgaaaagagaaaccccactccattactctggaccagaaggaatcatctatgctacatactttcaacataatgaaaatgtaaacgtaggaagccctcttattggtatttgtccacaaaatcaacttcaacaaattgaagatgttattctgaaagtacaaacggaatggcaagaacaagagtaatggtatgggtaaaattcttcaaatacgtgtttcggcttggacttatagggaagaagatgttgccataacatggcctaaccttacagaacttacatggcccactccaccataccatggagaaaaaagaggggttttagaacttgttgactcattagaaaatcaactttcttttggagattggcctacaacaatcaaaaatactcttcatcaagggattcagaatcttgtccaaactaaaaaaaagttagaattagcactagcagactggaaacctaaagaagcaaatgatctaagtaatatattagaagatcaattaacagaacttaatcaaaaagttttacttccttaacaaaaacataccatatatatatataggacaataaacaatgttaaataaagttatgattattggaagacttggaagagatccagaaattcggtatactcaaacaggaagccctgtatgtagtcttaatattgcaacagatgaatcttatactgatcgagatggaaataaagttgaacggacagaatggcatagagtttctgtatttcaacgtgcagctgaaaattgtggtcaatatctgagtaaaggaagcttagtttttgttgaaggtaatcttcaaacaagaaagtggcaagaccaacaagggcaagatcgctatacaacagagataaaagctcaacgtgttcaatttttagatagaaaaggagcagacttaggacaaggactatatcaacaagaacaacctgtaagtagtactaatacacaacaaaatggatttgaagatataagcccattcccttctgaagctagtggtatggatgatgtacctttttaatcttaccttcacattctctacaaatctataattacgctgtattagttagtaaaataagtatccttaagctaaaaaagataaagctctattctaactagttttaattctttactaattttaagtatcttttttttcaatttttgcccatgaatcttttagtgtcacagtcctattaaaaacaagtctatctccttgtgtatctggatctacacaaaaatatccaacccgctcaaattgaaccttttctcctggcttactaccctttaatgaaggctcaacaaaacctgttactatttgtttagaatcaggatttataagttcactaatgtgagttccttctgaagctgtagaaggatcagcaagtgtaaacagatgttcataaagcctaacttcaactggtatagaatgagaagcagaaacccaatgaatctttccttttacttttttcttatcagttttttcaacttcttttgagtttggatcatatgtacaacgaagttcaattactttaccttcactatctttgataacttctgtacatgtaatataataagtatatcttaaacgtacttctcctccaggataaagtctataaaacttactaggaggatcctcacgaaagtcatcttgttcaatatacaattctcgtgtaaagggtactttcctactaccaggaattgtattatctgaactatatggcatatctatccactctattttgtcatcaggataattttcaataacaaccttcaatggatttaacacacccattacacggggagatgttgcatttaaatgctctcgaacacaaaattctaataagctatactcaacaagattttcagacctggcaacaccaatacggctacaaaaattttgtatagattctggagtataaccccttcgacgtaaaccagaaattgtaggcattcttggatcatcccacccatcaacatgtccttcatggacaagctgaataagtttacgtttagatagcacattatatgttaatcctaacctagcaaactctatttgttgaggatgatacatatttagtgtggtaaggatccaatcatacaactctctgttattctcaaactctaatgtacagatagaatgtgtaatgttttcaagtgaatctgaaatacaatgtgtaaaatcatacataggatatatacaccaatcattacctgtacgatggtgttcagcatgcctaatacggtataatgtaggatctctcataacaatattaggtgaagacatatcaatttttgctctcaaaacatgtaaaccatcaggaaactctccggcacgcattcgacggaataaatcaagattttcctcaacactccgattacgataaggactttcaatacctggagtcgtaagtgttccacgagtttctcgaatttcatcagcggactgactatctacatatgctttacctaaagaaatgagctgctctgctaagctatataatgtttcaaaataatcagaagcataaaactctctattttgccaatcaccaccaagccattttacgtcctcacgaatagaatctacatactctacctcttcttttataggatttgtatcatcaaaacgtaaattacattgcccagaaaactccttagcaataccaaaattaagacagatagatttagcatgaccaatgtgaagataaccattaggttcaggaggaaatcgtgtgtggacacgcttatcaaaacgtcctgattctatatcttgaataatacgagcacgtaaaaaatctttccctattataacgttatgggaaatatcttctttcttcatgtattctcccaaaaattattctatctatattaagtattctatttagttactggtggttgaactaaaggcttcatatgagactttgtacttgtagtcttaggttgttcagaatctgttaactcctcaggagatctttgatgcatcttcacattatccatttccttttttccttcttcactttgcacattttgttcatgtgatttttggaaacgttcccattcttcacgagaaattttaccatctttatttgtgtcaattgcatcaaaagcaacttttttaagatttggaaatactgtttgaaattcttcccaagaaatgtagccatctttatttagatcaatgtcatcaaaacggcttcctgccattacaggagacacaaaccataccaaaaaacatattaccatccatttcttcatactactcaccttatcctctatgtaatgctatagaatatagctaattctattaatataggtaactagctatgtagctatataacaatatataattaaaataatagataactcatataagatagcttattaatagtaagtcccaaaaataaaaatcatgatatattgagatgaaaaatctacaacgtactttatttttctttacagtcactttatatgtcatttgtagtcttcttattgttttcttgcaactatagtaagttgttactataagactaattataatgaaaatacaatattcttctatatcaaaatcatcccttagaagagtacttcatgttactccatcactatctttaggtggtacagaaaaaacagcacaactttttgccacttatttaaataaaaaatatttcaatgttgctgtttggagtccttcaagcggcccacgtgctgacattcttaaaaatgcaggtatacctgtttggattaatatacctcttgaagctgtcttatatcgatttaaacctcatattgttcatctccatcgtgcaggatggccagaaccaaaactcatgagagctttccgtggaactcactggttccatcatggagtaaaactaccaaagattattgaaactaatgtatttggtagacatgatcctagtcattcaggacgtataattgataaaacactatttgtatcacatttttgtgcagaacgtttcagtaatgcttataaagaaaaagttcctagcaatcggtacaatgtgttatataatcctgtggatgtaatgtttatagcaaaacatacaactccgccagaaaaaaaaaactttaggaatgctgtcattggtcgcttatcaagagcagataaaggtaaatggtcaatatcttttggcttgcatataattccaacaattatctctcaaataccagacttacagtattatattgttggaggtatacaagaagcatatgactttgttactacacaaaatctttctaataatattagttttttacctgaaattactacagaactagagttagctaattatctagataaactttctatctttgtccatgctaatgatacaggggaaagctttggactttccattgctgaagccatgtctgcaggattacctattgtcacacacccatgccttaatttcaaagataatgcacaaacagagcttgtagaacatggagttacgggtcttattgcaactactccaaaagaatatgctgactttataatcatgttgttaaaaaatccagatattgcccaacgtatgggtatagccggacaaaaaaaagcattccaactttttgatgtttccctccttactcataaacttgaacatatctatcataacctttgtccacctaaccttgcttgtgctatacctagttaatatattacacaacgttggtatacttttctaatatattcaacatagtaaaaattaatatttaaaaacaccctagttacacagaaaaaatctatttttaacttgcattactaaaaatattttactatggtcaataattcacaggttacatagatatattacttatttatactaagataactctctctagaaatgatatattatatactatcttaataaattacctgtcataactactatctttaaataattatacaaaaccatatgtatagtagctaattagacaccttataactttatgaaaaaggcagtaaacatgaaatttgctgtaatgtttggcactattcttactattatattgttatatggagcaatcatacctagccatgcatctgagccaattaaaataggtgtatacctcccacttactggtcaaaatgcatatggtggtcaacttgaactagatggaattaaacttgcccatgatctaaaccctgttgttcttaataggcctgtacaactttttattgtagataataaatcagacaaggttgaagctgcaaatgcagttaaacgtctaatagatcaagataaagtgtgtgttattattggaagttatggttcttcactttctcttgcaggtggagaagttgctgaacaagcaaaaattcctgttattgggacttcttgtacaaaccctttagtcacacaagggaaaaaatactatttccgtgcatgctttattgatccttatcaaggcgcagcagttgcaacctatgcaaccaaaaatcttggagttaaaaaagcagctacactaactgatgtttcaagtgactactctgttggactgacagctttttttaaaaaagcttttgtccatcaaggaggagaaattgttgctaacttaaaatataatgctggagatcaagactttacagcacaacttatggatcttatagccaaaaaacctgacctattatttgtaccatcttacttttctgaaggagctattattattaaacaagctaaagaacttggagcaacatttattttaatgggagctgatgctatggataaccctgatacattagaaattggtggacaatctataaatggttttctacacacgacatttccatacgatatccatatgccacatatgagccaagaagcaactaagttcacacaagcttggcgaaaaacatttccttataaggatcctaatgtaaattctgcccttggatataactgttataatattgttatagatgctattcaaagagcaaattcatcaaatccagaagctattactcatgcccttgaaaatacaaaaaatttacccacagctcttggtatacttactataaataaacatcatgatgcagaaatgcctgttggtattattcaatatcaaaatggcaaaagggtatatcttggagaagttactggagaatagtaataacaacctagctaaaataatatgctaacctactacaattatatttttaaattaccatctgttaagtaaggcataaaatgattctgaatatattttttcaacactttttcaatgcactaactcttggatcgctttatggccttatagccattggatacacaatggtctatggtatattacgttttattaactttgcacatggtgatcttttaatgctaggtgcttattgccttttctatggaacaacactcttcctcctcccatggaaaatttctatcattattgctatttttggagtaagccttattggtatgcttattgatcaagttgcttatagacctttaagagatgcaccaagaacatctattcttataagtgcaattgctgtatctttttttattgaaagctctgctgttgtacttttttctgggctaccacgacctgtgtttcagcctgaatggcttatatctcctttttctattagcaagataaggattcttccattaacactgattgtccctattgttagtttctttcttgtattagccttactttggatcatttataaaactaaatttggtcttgctatgagagcaatctctaaagatattgaaactacaaggttacttggtgttcctattaaccgtattatagcgctaacatttgctttaggctctgctcttgctgctgcctcaggtattatgtggtctttacgttatccacaaatcaatccatatatgggagtattcccaggatttaaagcttttattgcagcagtacttggtggaattgggtctatccaaggcgcactgataggaggactcttacttggttttattgaaattatgacagttgcatttttacctacactatcaggctatagagacgcatttgcttttattattcttatattagtgttactaattaaaccaacgggcatctttggagaatacgtagaggaaaaaatatgaactcttctactcgtaactatattttcaacgttcttactattggagttatagtactttttctcctttgggcagaatctacttttaatgggtaccaaattcaacttctaaacctcattgcaataaatactattttagccctctctttaaaccttgtttatggttttacaggaatgttttctcttggtcatgctggatttatggcaattggagcatatatatctgcacttcttattctacctgctgaacaaaaagaaattatgtggatacttgaaccaatcatatggccattttcagttcttgaaacacctttttggttttctattcttgctggaggactagtttctgcattttttggactccttattgctttatcagtattaagactaggtggtgactatttagctattgctaccttaggattttctgaaattattcgagttatccttataaacgttgcttcaattaccaatggttcccttgggataaaaggtattccatctcatacggatctctttgtaacatatggatggttatttcttactctgtttttccttataaaattgttacaaagtaattttggtaacatatttaaatccataagagataatgaaattgcagcaaaagttatgggtattaatactcttcactataaaacattatcttttaccattggagccttttttgctggcattggtggagcactcctcggaaatttacttacaacaattgatcctaaaatgtttacttttttactaacatttaacattcttatgatcgtagtagcaggtggtcttgggtctataacagggagtatattaggaagcattattattactatccttcttgaatggcttcgtgctgtagaaagtcctttcaattttggaagttatcaaattcctggtatccctggaatgcgcatggttattttttctttaatacttttgggaattattctctatcgacgagaaggaataatgggaatgaaagaaatcagttggacaaacataactaaatttttctctaggaaaagagatatatgaaagaatatgttcaacaaaaaaatcaaaattctatccttgaactacaaaatattgttatacaatttggtgggatcactgcagttaacaacttaactatgaatgttgaaaaaggttctattgctgctatcattggacctaatggtgcaggaaaaactacagcctttaatatgataagtggattttatacaccacataaaggaaatattttttttaaaggaaaaagtataactggacttcctccatacaaaatttgtcaactagggatggctagaacattccaaaatattcgtctcttttcaaatgaaacaaccctagaaaacattatgttaggatgccatgtacgacgtagttcatattggtggatgccagttataggtgttccttctgcgattcgagaagaaaaaaaaataaaaggacaagcaatggaacttatccaacgctttaaccttgaattatatgtaaatgaaaaagcatcttcacttccttatggagctcaacgtagacttgaaatagcacgtgcacttgctacctatccagaacttttattacttgatgaacctgctgctggaatgaatccacaagaaagtattgaacttatgcatcttattaaaaatatcagagatgaatttaaattaactatcctcctcattgagcatgatatgaagctagttatgggagtatgccaatatatttgggtgcttgaatatggacaaattattgctgaaggtattcctcaaaaaattcgaaatgatcccaaagtaattgaagcttatcttggaggtgaagaaactcattatgcttaacatttctcatcttcatatttattatggtggtatccatgctgtacaaggggttacattatcggttccaaaaggaaaaattataacacttattggtgctaatggtgctggtaaaagcagcataatacgttcaatatctggcttaataaaacaagttacaggtagtatagtatatactaatgacaatatttctatgccacagcagctcttagaacatagtcctgaagatattgttcgtctaggaatatcaatgagccctgaaggaagacgtatcctccctcatctaacggttttggaaaacttacaacttggtgcctatatacaaaaagatgcaaatgaaatacaaaaagatattaaatgggtatattctcttttccccagattacaagaacgttcttggcaaaaaggaggtacactttctggtggcgaacaacaaatgcttgctctagggagagctcttatgagtagaccttccttacttatgcttgatgagccatctcttggccttgcaccccgacttgtaaaagaactttttgatatcattcttcaaatcaatgcagaaggaaagacgattcttttagtagaacaaaatgcatttgctgcactttcaatagcagattatgcctatgtacttgaagttggaaatattgttatggaaggtaacggtcaagagttattaaataaccctaaagtaaaagaagcatatttaggaggatgaagtataactaacctattataaataaatttttatttttctctaaaaaatctttatgtatcttctacttgcaacgtatatatttttttattaatttttatttcttcttaaagattacaaatagtatctaatagtatcttttgaagatattttcatatgtatatataatgtaactatagttttctatcttaatatttcctgtatagaaaactataattatagaataagttaacaacttttacctttaccttatgataagtgaggcttataaatgttcttatcattttctatagtaatagcatgtggtctttatgctctatattatgcctacaccacctctaaacaggtcttttctgctgatataggtactgaagaaatgcaacaaattgctggagctatacaagaaggagctcaagcatatttaaaccgccaatatagaactattgctattgttggtatcataataactattcttctagctatctttttttctttcctagtagcattaggttttgttattggagcatttctttcaggtcttactggatttattggaatgaatgtatctgttcgtgcaaatgtccgtacaacagaagcagcacgttctggccttgcacctgcattaaatattgcctttaaagcaggggctattactggaatgcttgtcgttggacttggtttacttggtgtagctctctattatggcctcctttcaatgtttggagtagatcaaaaatctatacttgaagcattagtagcattaagctttggagcatcacttatttccatttttgcacgccttgggggaggaatctttactaaaggtgctgatgtaggtgctgaccttgtaggtaaggttgaagcaggtattcctgaagacgatcctaggaatcctgctgttattgcagacaatgttggcgataacgttggtgattgtgctggaatggctgctgatctctttgaaacatatgctgttacagttgtagcaagtatgcttctagcagcaatttattttacaggcaaactccaatcaattatgatgatgtatcctttacttattggtggtgtctgtattattggttctattataggaacaaaatatgttcgcttaacaaaagacaataagattatgaaagcactctatcgagggcttattgcaacaggaattacatctgctattttaattacattggtcactacactccttttctgggatgtaccaacaatgtctgcacaaggaaaatcttttggtattataaacttattatcatgttcatttgcgggattaatcattacagcattattagtatgggtcactgaatattatacatctacagtgtttcgtcctgttcgtagtattgcttatgcatcaactacaggacatggaacaaatattatccaaggattagctatagccatggagtcaacagcattaccagtactaattatctgtgctggtatcgtcttcacttatgctaatgctggtctttttggcatctctatcgcagctacaacaatgcttgctcttgcaggaatgattgtagcactagatgcttatggacctgtaacagataatgctggtggtattgcagaaatgtcaaatcttcctagtgaagtacgtactgtcactgacgcccttgatgctgtaggaaatacaacaaaagctgtaacaaaaggatatgctattggctctgcaggacttgcagcccttgtgctttttgcatgctatactgaagaactaggtcgatttttcccttctcttaatatacacttcagcttacaagatccatatgtcctcattggtttacttataggaggactactaccatatctttttggttctctaggaatgatggctgttggaagagcaggtgctgaagttgttgttgaggtacgtcgtcaatttagttcaattccaggaattatggaaggtacaggaaagccagactatagttctgctgttgatatgcttacaaaagcagctattaaagaaatgattttgccctctattctacctgtatttgcacctatcattatttattgcattatttattggattggaggacaaaatgctgcgctctctacactaggagcaatgttaatgggaactattgttactgggttatttgtagcaatatctatgacatcaggtggaggtgcatgggataatgcaaaaaaatatattgaggatggacaccatggtggtaaaggttctgaggcacataaagctgctgtaacaggtgatactgttggtgatccttataaagatactgccggaccagcaattaacccaatgataaaaattattaatatagtagcactgcttcttcttcaagctcttgcttaagtagatagtattaaaaaaatcctacctaaaaaaatctctcctaatatggagagatttttttacacctatagctcatcattatacattaactaacaacatgaatatgctactaaatctactcttataatctagtgaaatatataaacaaattactgcttgtactctaaacacaactgtaatgacaaaggtagtaataataacttattataagatgaaaaatattttaatcatagtacaatacagttatatagataaaaaagaggaactagcaatcctaaaaagtaaaaataattaagatggtggtactgtttcttttagaggcaaaagatcttcttgaactttagaaggagctacacctccatgaattaatgaaccagtatctccttttcttaaaggaagttggtatattttaaccattctattatgactgtccaaatttgtactaaaaacatgtgatccatcaccacgagcaacaaaataatagtagttgtgctcttcaggatttaatgctgctcgaatactatcaagacctggagatgcaataggccctggaggtaatcctttattcacatatgtattatatggattattcttatcttgtaattgactacgacgtaatttcccatcaaagttttcccctaagccataaataactgtagggtcagcatataatggcattcccacagcaagcctatttgtataaacaccagatactttacgacgttcacctgggaaatgtgtttctttttcaataattgaagcaagaattaatggctgcttaataacagaagcatttctaaagcttggacgcatcccatttggccatagtggagctgttttcctccaaaatgtgtcaattaaccttccaacaataattttcgcagattcaacgttttgtttaaatggacgtgctaagagatatgtatctggaaataaaaaaccttctgcattatgaaatggtatcccccaatatctcagaaactcagggtcatgaatgactgttttaaaatcttcaaaacgaacaaatcctgctttttctagacgttttccaacttcccaccaaggaagtccttctggaatagttattctattaagaagtggagaaccagttacaaggtaatcaagaagagcttgtggcgtccatcctgtattaataaggaatcgaccactctttactttatcactcattcccttccatttagcaagtatttcaaacttatttacgtctgtaattgcacctatatcttgaagatataaagacagtacatgaaactttgttcctggaggaatagctatttctatctccttaccaggagtagaaccaggcgtatctaaaaaagaaaaaatttgatatccaataaatccaataacacaaataaatataacaaaaataattaataatagcttaagccataagcttgaggagttgccaggtggtggtcctgaatattcgaactctccagtattaaaactcatacttgaacacgctcactttcagattggtccaaaaatgattgtaaaatacgaacagcagcctgttgatcaagaacagattttatcttattttttctgtaaccgacagactgaagatccaactttgcttcgtaactactcaatatttctttcattaaaaagacaggaagcattattttatgtttcaatcgtttgataaaatttctgacctgacgtgtaataagtgtttctgagttatcaaataaaacaggtaagcctacaactagtgcatctggagactctacataaattagttcaactaattttataaaaaactctttttgtgttgtcattataattgattgttttggaaaagcaaaaacccccatagagtcactaacagctatccctgtatattttgttccataatcaatagcaacatatttcataatctgttattagcttatgacttcaattgaagcaagtcattatcaatctttggtataacaccagctagataatagaataataaaaaaatctcattatacaattatactaaccacccctaacaataaataactattttattcgttaatagttataaataattggatttttataatttaaaattaaactctatgtatataacaatttacaactgctattcttcacgttaaacttatattgttaggggagcctaaatgacaaacaaggctgagagtgggatggaccctgacccttggaacctgatgtagttaatactaccgtagggatagcataatagttaactatttatgtatgataatcaaacgtccatccacaaattggacgttttttacttatatctatctttaggataatattatgaatatcacagtaaatggaaaacctattatatgtaatgaacaaagtactattacagaccttcttctccaactacaactttcatctgatactgttattatagaaaaaaataaagaacttattcctactaaacatttctcttcaacaatcctggaagaaaaagacactcttgaactcttacattttgttgggggaggttaaaaagctttatatagactatagaactcttttttattgtaatatgttggagtaataatgcaagatgatacttttcagctcgggaatgttaaattaaaaagtcgattattccttggaacagggaaatatggtaatgatgctataatacctgatattattaaatcctctggagctgaagttataacagtagcactacgacgtgtggaactagacaataagaaagaaaattttctttcttatattcctcgtacaatacaactacttcccaatacctcaggagcacgaaatgctaatgaggctatacggatagctcgtatggcacaagctgctggctgtggaaactggataaaaattgaagttatctcagattctaggtaccttcttcctgatggatatgatacagcaaaagcaactgaagttcttgctaatgatggatttattgtattaccatatatgaatcctgatctctatgttgctcgagatcttgctaatgcaggtgcagcagcaataatgcctttaggtgctcctattggcacaaatagaggattaatgacaaaagaaatgattcaaatacttattgaagaaataaaacttccaattattgttgatgcagggataggcaaaccttctcaagcttgtgaagcaatggagttaggagctgcagcttgtttagttaatactgctatagctacatctgatgatcctatactcatggctaaagcatttgggaatgcaatacaagcaggaagagaagcatggcttgcaaaaacaggacctgttcttacaggcaaagcttctgcatcttcccctttaacaggttttttagatgactcctattaattctttctatcatacattatgcaagtggcctcctaaccaaatacagaacatgttcaactctgttacagagtcacaagtatcgcatacattaaatctagcagaaagaggtctatcactctccatagaacacttattaatattactatcgcctactgcaacttcttttctagaaaaaatggcttctattgctcaagaacagacaatccgatattttggaaaaactatacaactttttactcctctctacctctctaatttttgcataaataattgtaaatattgtagttttagcgcaactaaccgtataaaaagaatacagttaacaattgaagaaatcgaaaaagaagctgctgctattgctgcaactgggcttagacatattttactcttaacaggtgatgctccatctaaagcaactatagcttatcttaaagaagctattcaatgtcttaataactattttcctagcgtaggaatcgaaatttatgccattgaaaaaaaagaatacgaattgcttgaatgtactggagtagattctatgacgttatttcaagaaacatataacgaaaaacgttatatggcacttcatactaagggaactaaacaaaatttccgttttcgtttagaagcacaaagtagagctgcatctgcaggcattcgctttataacacttggtgcactattaggcctagaccactggtggagagatatattttatgtaggcctccatgcaaattggttacaaaatgaatatcctggagtggatcttactatctctgtacctcggatacgccctcatgaaggatatttctctgattactatcctgtatctgataaaaaccttgtacaagctattcaagctatacgactatttttaccaacatctggtattattctttcaacacgcgaaaaaccctctctcagagatagattaatatctcttagtgttacaaaaatgtctgcaggagtttctactgctgtaggagggcatactgatcatcatatagcaaaagataatattgcccaattcgaaattgcagatacacgctctgtagagcaaataattacagcaataaaagcaaaaggttatcaacctatttttaaaaactggataaaattatctaatgcacctatgcattaaaggaataacatgtctacctttcattggaaaaatgttatggatgagcacttacctgaatcactgcaaacaaagctttctaatgctactataggtatagcaggtgctggaggactaggttcaaactgtgcggtattacttacccgaacaggaataggtcatttagtcattgttgatcatgatattgttagtgtttctaatcttaacaggcaacagtatttaccatctcatattggtatgccaaaagttgaagcactaaaagaagttcttcttaacattaatcctgggttaaaacttacaatatatcaacaatacatgaatcctaacaatatcttaactctatttgaagactgtcagtttgttatagaagcagtagacaatgctatcactaaaaaaatgcttgtagaaacacttattactgtagattatactgttatatctgcatcaggtgttgcaggatggggtgggctacctatgacacaaaaacagctaggcaaaaaactcttagtagttggagatcatacctatggagtatcttctataaatcctccactagcccctcgtgttaatatggctgctagtatgcaggcagatgctatactttgtgcactgctcaatactaaaaacgactaatatctatcaataccctttacctatcttattaaaagattatattaaactatagtcttattaggctgtaacatagctaatgccagattcttttcatcttgcattctacgtagtgcagatgcttgtatttcagctgttgaagagccaaaaagtgtacctctcaactcataaatacttttaataagttgttgttcctcttggtcaccaatagattgtccttcagaaataccaaccatattagcagactgagtaaaaattcttacagcacctgaaggtccatgctgaactgctgtactccataaaacttcatgcattgctggagacaaagattctacttcatatcctgctgctttaataccttttaaggcaggttgataatgactttcagaaataaaacgtttttgtaaatcctcaaaaagttcgggttgttcttgagctatagatctccatacttgcggcattttcccatcacgactaccagtgtcagcaggtcctgcactttttaaccgtgctgctatattaggattttctctctcaagaaactttataaattgatccatacttcctggctttgatgctatttgatacttcccatatgaagttccaccagttcgatcataacctatagcagaaataccttcatttccagattcaaatcgagcagaaagctgccctatccttgtttcattttgtatagttttatttagagttatattagctgtatttaattctgttttacttctacttattgtctgttgagtattcattcccccatgttttctatttaatgctatattacgggcagaaaaaataatatctcttttggcatcaagaggaatccctttactaaaagggatccctttattttctttatgaagtggtatcccagatacagcttgagttaatggtacactatttttatgttgttgattttgaggtaatatagactgcatcaccatttcattttgctgatgttgagcctctcccattgccaatccattagcaaaaaggcgagaaattacatttaacccttttgtatctttactattttcttgagtttctactgttacttcagaagtttttccaaccatttctgaaaaagattcattgtcaattttttgtcctgaagttctcttaaagactttcgcatgttctggtgatgtaccgccaagaataaatggtgacttggctatagacatataatcccccaaaagatgatattcttatacattagaatttaacatgcaaattttaggccttaatatataacttagtataaaaatagattataatcccttacttaccttcttataaaatttgtgctcaagaatggttactctccataaaccaagaacacctgctaaagaaagccctcctaatagtgctaaccaaaaaccagttactcccattggctcaacaaaccaatttgttctcccaaggatgtatcctacaggtattgcaaaaaaccaataagcaaaaagtgttatatagaacactgtctttgtatctttatatcctttaataatacccattgtgattgcttgtaatgcttcaaagcattgattgatagcagtaaaaatcattaaagaagttgctacttttaatacttcaacatcattattatagattcctgctatttcataacgaagtgtaagaataaatataatagagcataatgcaataaataatcccaaacttagagagacaaagctgacacaatgtaacatttcatatgaatgcctgccaatactataacctgtacgaattgtagcagtaatagcaagcgaaaatggaatcataaaaagaagtgcactaaaatttagtgctatttcatgtcctgcaataattgtaacacctagaggagcaaccaataaagcaataatagcaaaagatgttacttcaaaaaaaacaccaagagctccagggaaaccaatacgtaacaattgccattgtgtttttttatctatccattcaacccaatttttaaacgataaaaatcttcgaacatctggtagagtcattgcataacaaaaaataacaaaaaacattacccaatatactatacctgtagcaaagcctgatccaacaccaccaagagcaggtagaccacacttaccaaaaataaaaatatagtttaagggaacattaaaaagaaggcctataaaacctccaatcattgatggcctcataaatgccataccttcaaaataacaccggataacaacaaaatataaaaagcctggagttccccaggcaatagcccttaaatattgacctgaaagatcagctaattgttcctctaatcctaatttccccatctgaaaagaaagaatatatgcaataaagaacaatggtaaagataaaaaagtagcaagccatatcccctgacgtaggacatgaccaatatgttcagtgtatccttcacctctccactgtgaaataaccggatgtaatgcctgtagtatcccttgaaaaaaaagaattaaaggaacccatatagaactacctaaagcaacagcagccatatccatggcacttacatatcctgtcataaccatatcaacaaatcccattgcagtcataaatatttgtgcaaggactattggaatagtaagttgaatttgagtttttaactctctaaaataatactgttttttcatcacacactatttaaagaagaaattaagaggaatggaatataatatccatacctcttaatattactatatttttcaatgaattcaataaaaagatattgataaaatcccattcagctagtttaactatcaataggttcatctggttggcgtttacgtcctactgtcagtaatgttatcccacataatacactaaatgtgatcgcaataatatttgacaagtcataagaaataccaaatcccatattttcctcaaaacaaatataagatacacagactgctgtcataaacattgcaggaacagtagcaatccaatgaaaacgttcacgatggagtaagtaggctgctgcagcccaaagaacaattgccgcaagtgtctgattagcccaaccaaaatatctccaaagaattccaaaagacataaaattcagagcaacaccaatagcaaaaataggaattgtaagtagtagacgatttttacctgatgcctgatcaaaaccaaatgcatcagcaattgttaatcttgcagagcgaaaagctgtatcacctgatgtaattgggagtataaccacaccaagaatcgctaaggtacctccaactgttcccaacaaaacttttgaaacctcgtcaacaacaagtgctgcattaccttcaggacctagtgcagcagctaatgctgaagaattttcatagaaagacattcctaacgtaacccaaataagtgcaatgacaccttcggctatcattgctccaaaaaatacaggccggccatatctttcgttaggaagacatcttgccatcatgggagattgagtagcatgaaaaccacttaatgccccacaagcaattgtaataaaaaccataggccaaataggtaatcctgcaggatgttggttaatcaagttaatacttggataaaacggatatcctttaactattaacatcactaaaagaccaatagccataaaaacaagtaataaagcaaagtatggataaataaggccaataagcttatctattggcaatatcattgcaagaaaataatatgcaaaaataatagatacaaaaaacattgcatcaatacctgtcaatttctcaagaagcccagctggaccagcaacaaaaactacccctacaaggataagtaatacaacagagaatacctgcataaggatacgaattgtagaaccaagattatatcctacaatatctggaacagacttaccattgtaccttaaagacatcatccctgaaaagtaatcatgaacagctccaccaaatatagaaccaataactacccaaaaaagagcaataggaccataaagagcaccaaggataggcccaaaaactggtccaaggcctgcaatatttaacaattggatcaaaaaaattttaaatggtcccatcttaacatagtcaacaccatcgaacattttatatacaggtgtaactctagagtaatctgcaccaaatatacgctctactaccttcccatatataatataccctaaaaacaaggcaattaacgaaagaaaaaaatatacaattgaggacatgtggtctccattaaagccgtttctattttattagactatatatagttagttaccttatagttaacttattaattagattaaaacaaaattagattaaaacaaatatatattaatttctaaaaataagcccccccttcacaacataaaacctgaattaagtaaagaaaaatagttttctcagctttctgaataagaaattatattttacaaaaataaaaaaataactctttgttcacgacaaattatatctgtaaaaaagtctaggataaatgtagataagataaaatactactctggcaacccattaaaataaaaattaatgaaaaagctatacaacactaactaaaaaaattcatataatcctttttcattatagtatatctatctaaaactaaaaataaatctattaaataatagctacttagattattcattattaaaaccaagtatattcaatataactactccataataaatgtattatttatattgtaattaataaaacaataatatcttattatactattacagtataactgtagataatagttaattatacatatattctaattatatttagagtaatatttaatttatttacctagatctttactaacaatttatataataatgtaacatatattattaacaggctctatcattatagaagatatgacttatcttaagctctagttctatttactcatgcatgaaaaggagtgagctcatgctaggtgaatattccattacagaaattataatttttttaataattatagtaagttgtttatggtttgacttacatgcacataaatctgataaagttatttcggtaaaaaatgcttttttatggtctagtatctggatctctcttgcgcttttatttgctatctatattgggtgtatgtttggccttgaaaaagcacaactttttctaactggatatttacttgaagagtcactctctgtcgataatctatttgttattatggctatttttgcctctttttctataaaagatgaaatgcaacatagagtactttactatggaatacttggtgcattagttatgcgacttctttttgtggctgtaggcagttcacttgttacactctttggtccttatgcattagctagttttggtatttttgtactatggacagcatggaaaatgtggaaagagcaaaaaaagaagcatagtgagataatagattactctaagcattggtctgttaaaatagcacgttggttaatgcctgttcatcctcagctagatggacataattttttcataaaagtttcagagcataatagattgatttggaaagctacaccacttttcctttgtcttcttgtaattgaattctcagatgtgatgtttgcttttgactctattccagctattattgctattactcaagaaccattccttatatatacaagtaatatttttgctatactaggactacgttctttatattttcttcttgcagcagccaaacgctatttacgttaccttgaaaaatctattattgttattcttgcctacattggatttaaaatgttacttgatgtcgtaggaattatacatatttcaccactagttagcttaggaattgttataatttgtttaactattggcatactagcatctctgttcattcctcaaacgactactctttctcataacaatactattcatacataattttactctagagaagtataaagcttaattgcttttaaataatgataagttaaactagttacatattttctttaatactaaaaagaaagatataatcaattagtgttagctttctgaatttcgtcagccagtctaataatattattaaaatgttcttgagaaacaggttgaatagaaagtcgacttcctgccttcaaaagttccatccctgagagatcatgctgtaatcgcaataaatttcttggaatagttggatgaaataccttaaccaactgaacatcgaccatataccatcttggattttctggcgtagctgatggatcataatgatcattttctggatcttgtgctgtatgatcaggataactttctttaaccactttaacaataccagcaatttcaggtaatttcccactatgataaaaaaagccaagatctcctattctcatttcatctctcataaaatttcttgcctggtaatttcttacaccatcccaacttgttgtttgatttggtgcagactgtaaatcattgattgagtaacaatcggtatcacttttaaaaagccaatactgcatttctatttcctttattctttgctataatgtactgatttataaaaaagagaaagggatcaatatgcacccttacgtttaactacaacaggaattgtacgagctaatataacaatatctaaccatactgaccagttagaaatataataccagtctgtttgtacacgttgattatatgttaaatcatttcgtccagatacttgccataatcctgtaattcctggacgaacctttatatacaaagcataagcatcgccatagcgggctacctcttcttctacaattggacgtgggccaacaagactcatatctcctagtagtacattccatatttgaggaagttcatctaagcttgttcgtcttaacaacttacctacctttgtaattcttggatcataccgtaacttttgatcagctttccattcatttcttaattcttcattttcatctaaagttttttgtaagacttgttctgcattttggaccatagtacgaaacttcactatccaaataggcttaccctctcgaccaatacgtaattgcctaaaaaaaataggccctggtgattccaaccgtatccaaattgcaataaaacaaatgagtgggaaagtagcaatacctataataatagataaaataagatctatacaccttttaacaactagctttcgtggatcaagcaaattttgtcttactttcaaacaaaggaaagaaccaatttctaaaggacgaacccatagaggaataccacacttaaaaaaatcttcagaaacaaggataatggaagaaaacaaagttgtggctaccttctcaagctttgtatggtatatgtcatcttttgataaaagaacaaatgcacagcttcttggatggttagatacaaattgtttaattttttgctctgtctcaaggtacattaaagaaggttttaaatatccatcggaagtcttatcctctttatcttctattgtttgatttatagaatacgcatagcccataggtgttaaaccaaattctggatgttttactaaatatttttgaatcaatgaaagaatactaccattgcccaaaaaaattgttggtattccccaccaagattttcttgaaaaatactgcctaacattacaacgaatgacaggaacaacaattaaacttgccatccaagaggccatataaacaagacgagaaggaagatctgctctaaaaaagaataaataaatagcaatacaaaaataagctaatgaaactgaaagactcaaacttttcacctcttcaggaagaggtggaggcgtagcatcataaagttccttcatataattaacaaaaatagctacaagaaggaataataataaggtccaatgttgtgaaaattcgactggtgtaaaaatattccgtatatatgcagcaataataactgtacttaaaagtgctatacagtctgagcatactaatattagtgtacgccttgtcgtgaagtttaaaaaaaacttttttaccttaatcatattgtaatgaatgaactatatattagtatagctaaggttaactaaaaatataaaacaattattgtatgttatccttactagcacataagttatcaacaacttttgaaaacgcttgatgaaattgagtctcactaaatttagaggcatgttttacaagctgctgagtattaatggtatgttcatgtttttcaaaatactcaatagcctttaataaagcttctggtgtttgttcatgaaagaaaaaacctgttataccatcagaaactgtttctgatgcccctcctttgctataagcaatgacaggtcttcctgatgccatagcttctataggaactataccaaaatcttcttccccagggaagagtagtgcacgacaaccagctagtaatttagccctttcgtccatagaaattttacctataaaaataacacttggacctgccagttgtttaagttttgtatatgcatctccatcaccagcaacaattaatttacgacctgtttccgatgcaactttaatagccaaatctaccctcttatactctacaagctgaccaaaacataggtaataatcaccaacatctcttgtgggtttaaataggtcaagctcaacaggtggataaataacagaagctgaacgtccccagcaacgttgcacacgttgtgctactgtatgagaatttgcaagaataatatcagggtgtaccgcagaacttatatcccacatccgtaagtaatgaaaaataggacgaatgatagttcgtgttactatacctttattctcaagataagtgtgataacagtcccataaatacctcatgggagtatgacaataacatatatgtcgagcagaagaatgaacaataagtccttttgcagggccggattcgctggaaattattaaatcatacccccgaagatcaagctgttctagagctaaaggcataagcggaagataatacttatagtaccgagttgcaaaaggaagactattaataaatgtagtataaatagtcttattttttaataaaggtgaaagttgatccttatctacacagtgagtaaaaatatccgcttgagggtaaagacgacaaagagactcaataactttctctcctcctcgcattcctataagccaataatgaacaatagcaatccgcatattacctctttgtctcagaacttactcactctcttcttgctctaactgtagagattgtttattgtatgtaaaacatttcataaaaacaatgcatagttttatataacatcgttattctcacatgttaattatgatggtagttatggttatattataataatcaaattgttatagttagttagtattctgaaaaaatttaactctttttttcttacttactactgcaaattatacttataaggagcaaacatgaagctattccatgttctcttcctagtacttacaatattattcttcataccatttagtgtattagctgcaactggacactacgaattacatggcacagaactttcaataatatgggtaataccttttatttgtatgcttctatcaattgctcttggacctcttataattcctcacttctggcatcataactttgggaaaatttctgtcttctggggacttgcctttctcattccctgtgctgttatatttggaatacctctaacagcttatcaactcttacatacaatattccttgagtatattccatttattgtcttacttcttgtactctttacagtagcaggaggcgttcgtctcaaaggtcaccttattggaaaaccaatagtcaacacaggacttctttttattggaactatattagcaagctggatgggtactactggtgcagcaatgctacttattcgtccactcattcgtgcaaatgaacatagaaaatatgttatacattctgtaatattttttattttccttgtagccaatataggaggttccttaactccactaggtgatcctcccttatttttaggctttcttaaaggtgttcactttttttggacaacaacacacctctttcctatgacagttattctttctatccttttacttactatctattttatacttgatagtatattatataaaaaagaaggctctcctttacctcaaaatatatcagataatccaggtcagttaggaattgaaggaaaagtaaatcttatacttttactttgtgtagttcttactgtattaatgtcaggagtatggaatcctgatatatctatcaacatctatggaataagcatagctctacaagacctctctagagatattatactcctattattaacaggaatatctctcaagctgacaaaaaaagagtctcgaaaacttaatggattttcttgggaacccatacaagaagttgcaaaactctttataggtatttttattagtatgattcctgcaataactatccttagagctggagaacatggtgtccttgctccggttattgaacttgtttttaaagatggacagcctgttaatagtatgtttttttggcttacaggtattctttcatcctttttagataatgctccaacttatctagtattttttaatacagccacaggtgatgctactcatctaatgggggaatgggcaaaaactttatgtgctatttctgctggctcagtatttatgggggcagttacttatattgggaatgcacctaactttatggttcgttctattgctgtaacacatggaatatctatgccaagtttctttggatacatgttatggtctatttgtatccttttcccatgttttattttacttacatggctctttttttaatgtatgttatcttttcaaaaagtattggtctaaccacttataatcttttcttaataatgcaaagaaataactcaatcatagttatttctttgcaaaaaagtttgctagtgtaccatacttaatacttaatatatgttatcacagtataccattagtatctataataaggtaaggtattattatcaaaatacaatgaataaaaataatcttctttataagaatgatgttatcattacattaaataccatgaattataattgaatacctatagtaaattttgcttagtaagataacatcatctgtattaattaaagtagtataaaaaccataatataatatataatgatactaacacataccctcactaatgttttatgaatatctatactacttatatagaacaagagctgccttacattaatgctgctataaaaaaaagcatagcagaactcccttcatctattcagcctgtagctgaacatattcttctctcaaaaggtaaaagattacgtccaatgcttactatcctcctctctcgactttttggttataatgaggatgatatctatccattagcaatttcagttgagtttcttcatgcagcgacattactacatgatgatgtattagataatgcgctattaagacgtaatactattacagctcataacctctttgggactgtttctactatacttgcaggtgacgcactgcttgcaaaaggcaatttacttgtagcaacctatggatgtcagaaatgtatcctaacgatatcccaagctctttaccaaacagcacatggtgaaattcttgagatatataatcaaggggaaatatgggaaaacaaaaatatttatttagaaattattactggaaaaacagcttgggttattcaagcagcttgtaaagttggtgcactgaaagcaggtgctactccacaacaggtggatgttgctgctttatttggctataatcttggtattgcttttcaaatcatagatgatgcattagacttcttaccttctaaagatacaggcaaacctgaaggaggagatatacgagaaggcaaatttacaccaccacttttttactatttaaaaacactttctttagaagaaaaaaatatatttataaaaaaatttcaaactcataactttacagatgaagagatacttactattaccagggtcatccatgaacaaaattttgatcaaaaaacacgggaattagccaatgtttattttcaaaaagctttaacaaatttagaattattaactaatgttcccaagcctgaatacaaaaccatactcatagaatgcctcaattacatctctacaagaacctcataaatatccttttttatcaggagaaataaatgcttcatcgtattagcgtgggattattatcccatatcgatgatactattggccaaaaaatagcttcatctatttatcaaacactttcttttcctgttactacagctaacttaataaaagtattcacaatagaagggatacagaaagaacaggtaaaccaacttattactcaaaatgtattacatgatcccatcttacaatatgcttcactttcaccttcagaaagtaatgcagattggataatagaagtacgtttccgtcctggagttactgataatgaaggtcacacagctagagatacctctgcacttgcattaggaatagagaatcatgaaatattagctgtatacacatcaaaccaatatcatttatatggtacacttacagaacaacaagtacatcgtattgcaactgaattattatctaatacacttattcattgttttgaaataaaaagtcgacaaaattggaaaaacaatccaggattcccagctaaaacagcaaaagttacaggtatagctaatgatacagtcataactattccactttcttctatgaatgatgcaatgttattacatgctagtaaagaaagaacattagccttatctcttgaagagatgcaagtcattcaacgttggtttatgcagcctgaggtaaaaaaagaaagagttgctattggattaacacctgatcctactgatgtagaaatagagatgcttgctcaaacttggtctgaacactgcaaacataaaatttttgctgcacaaatatcttataaagatttagaacaaaattctcaagaagttattaatagtctctataaaacatatatccaaaatacaactgacattattagagctcaacttggtgacaaagatttttgtctatctgtttttaaagataacgctggtgttgttgcttttaatgatacacatgacgtctgtattaaagttgaaacacataatagtccctcagcgttagatccttatggtggtgcacttacaggtattgttggtgttaatagagatcctatgggtacaggtcttggtgcagagcttgtttgtaatactgatgtattttgttttgcttctccctttcatagggagcctcttccacctcgcttactacacccacgtagaatttttgaaggtgttagagagggtgtggaacatggtgggaataaatccggaatccctactataaatggctctatcgtatttgatgatcgctttcttggtaaacctcttgttttttgtggcactattggcattatcccttgcataattaacaataaaaaagggtatgaaaaaaaagctaatgtaggcgactatattattatggtaggaggacgcatcgggaaagatggaattcatggagcaacattttcttcagaagaactacatgaacaatctcctgttactgcggtacaaattggagatcctattactcaaagaaaaatgtatgacttcattttacatgtacgagatcttgggctctactcagctataacagacaatggtgctggaggcctttcttcgtctataggagaaatggctcaagatacaggaggatgtcatattgatctttctaaggcactattaaaatacgatgggttatgtccatgggaaattttactttcagaagcacaagaaaggatgacaattgctgtaccaaaagaaaatattcaaaaactttcttctattgcaaaacatatgggtgttgaaatttccatcctaggtgaatttacaaatagtggatattttcatgctacatatggttcaaagactgttgcatatcttaatatggaattccttcaccatggagtacctcaactaacactcaatgctcaatgggaaaaaccttattatcccaataatagaatagaatctgtaggtattgaccaatctatgttccttcataccatgcttggacggcttaacatctgtagtaaagagtatgtcattcgacagtatgatcatgaagtacgtggaggtagtgttataaaacctcttatgggtgtaaaacaagatgcacctatggatgctggtgtattacgacctattttaaattcagaaactggacttgttattagtcatggtatctgtcctaagtttagtgactatgacacatattggatggtagcaaacgctattgatgaaggaatacgtaatgctgtagctgttggagctgaccctgatcgtatggctggtgtagataacttttgttggtgtgatcctattcagtctgagaaaacacctgatggcttatataaacttgctcagcttgtaagagcatgcaaagcgctatctactttctgtttacactatggtgtaccatgtatttcaggaaaagattcaatgaaaaatgattatataggagggggaattaaaatttctattccaccaacattacttttttctgtacttggaataatagatgacatcaataaagctataacatctgactttaaaaagcctggagatcacatttatattgtaggcgatacagcatgtgaacttgctggaagtgaacttgctagtgaactacatataagctgtagtagtgtacctcaagtacatgctattcaagctaagtctaactatcgtaagatatatagcgccatacaaaaaaaatatattacatcctgccatgacctatctgatggaggttttgctgtagcacttgcagaaatgtgtataggtgggcgcataggatgtcatgttgaacttgatagaatacctactattgaaaatctatcagtaacagaactgttatatagtgaaacagcaagtagactcttacttactgtttctccagataatatagcaccatttgaacagctaatgggtggcagtgcaaaatatttaggaagagttgtcgagcattcacaattgattataacaaatggcaatactataattattgatacacctgttgaacaacttgcagtatcatttaaatctacattaaattggtaataaaagaaaaaagacaaaaatctcaaagtactatgtacttagtttttgtcttttttctttttatgttagcattagcacaatattaactatcataaaatgaacgtaacacttgactacgtacaggatgacgcaacttacgtagagcttttgcttcaatctgacgaatacgttcacgagtaacattaaagagtttaccaacttcttctagtgtatgatcagatttttctccaataccaaatctttttcgtaaaacctgttcctcacgaggtgtcaagtcagcaaggacagaagcaatttgttcagaaagctttgtgtttacaacctcttcagaaggtgctacagcttttttgtcttcgataaaatcacctaaacttgaatcttcttcatcaccaattggtgtttctaacgaaataggttctttagctatttttagtactttcttcaccttatctaaagggtagtccatacgttctgcaatctcttctggggttggatctcttccgaactcttgaacaagatagcgtgaagttcgtatcaacttattaatagtctcaatcatatgtacaggaatacgaattgtacgtgcttgatcagctattgctcgagtaattgcctgacgaatccaccaagtagcatatgttgaaaatttatatcctcgttgatattcaaatttatctacagctttcatcaagccaatattaccttcttgaataagatcaagaaactgtaatcctctgtttgtatacttcttagctatacttacaacaagacggagatttgaacgaataagttcttgcttagcacgcattgcagcattattaccccgcttaatacgccaaagcacctcctcaagatctacaacgttgtgacaacacttttcctgtaaacgttgtaatatttctattttcccaagtatcatttctttgtaagagaaaagctcatctacacccatattgagtaataatgcagcatctctaggacttaattcacgtgcatctaactttgtaaacaagtctttaatttcatcttgtgttttcccggttgaaagaagatatgctgaaagttccctttgacaattatgcatttgacggacataatcttcaactgtttcaataattctatctataagtgtcttttctaacttaatatcacgtaaacgagtaacaatttcttctttaaattgtaaaatttctttttgaatacctgccacacgacgttccagtgtacaacactcgtcaagtttaagataaaccttacgtttctttttaaaaatttgacgaatttcttctaacagaagaataaccctatttctttggctcatttcatcttcactaggatcatcttcttcaatagttttgacaacgtccttaagtttaattctattaagtttaagatcttcacctacacttataagttcttcaacagcaacaggaacttctacaagagcatacaatacatcttgctcgcctgtctcaacctttttagcaataacaacttcaccatcacgatctaaaagaggcacagcacccatttcacgtaagtacattcgaacaggatctgtacttcgagaagaaaaatctgctacatcctctgtatcaactaaatcaaaacaattttctgaagtatccccatctgtttcgggggaagttactgttattttttttccttccttctctgaatccacaataacaatttcaagttgatcaaaaatacctatgatctcttcaaactgttctggtgtgttcatatctattggtacagctttgttaacttcttcaaaagttacaaaaccagcagccttacctttagcaataagtgtacgtatttgttggatttctttaacgttattccccatgtgtcctctccaaagtttcctgaagggcgcgtaaatatttcaaatcagcttcaaagctacttgtttttccaagctttaatgctgctgaaacagaagcagactgaacagtcatatgcaatgcttctaacatagtttgaatagcttcaaactctccctcctcattatctaaaggtggaacatcacctgtacgacattgaacccaaaaagttttttcttgtgagtttaaatactgcattatattatcctcagaatattcttctacttttccccataattctttggcccaagttgtattaagaacaagatgtgctccctgctcttttagtttgtctaacatatggggatagcgcactagaaacattaaaatttgtttatcccttggtgtagtttgaactaaagaatgagatattgctgcagactgtgttaccttcttcttaatagaatgctttatatctgccacatattctcttaattcactctctgccagacctaatcctgttgatagtattgacgtaaaacgacttactatttctggtaattcaacttgttttaaaaaatttttaacccaatcgataacatcacgaggagccctagttttaagtgattgtatacaaaactgtagcccttcagacgcgtcattttttaacttctcaaaaaattcttttccataattttttataacactatctatatcttcaccttcaggaaacaaaacaaccttacaatttaaaccttttgtcaaaaacatttcacaagctcgcagtgctgctttacgacctggagcgtctccatcaaataaaatctcaatatttgatgtaaaacctgaaatacgttttacttgttcagaagtaagagctgttcctaacacacctacagcattagtatacccatattgatgaagtgtaataacatccatatatccttcagtaattaatatagacttccctgaactgatactttgccttgcttgttgtaagccatatagttgatctccttttttataaagcaatgaatcactactattaatatattttgctgtatcttcatctccaataatacgtccaccaaatgcaataatatttcctgataaactagaaataggaaacattaatctcccacggaaacggtcataaaacttcccattagaagctataccaactaaagctgcttcaactccaaattgttcatgaaatcctgcacgttttaaagctcttactaaagtatcccaatcagatgaactccatccaaggcgaaaatattgagaaatttcatcagaaattcccctttttttcatatattctctacactcttttcctatttcactatgaagattatttacaaaatgtgttgtagtaaattcatatatctttaatagttgacgtctattagtatgaactttctgtgattcattcccaaaagtagaaaatctagtaagaataacacctgcttcttctgctaattgttccaaagtctctcgaaaacttaatccatttatttggctataaaacgtgaatatatctcctgaggcttgacaaccaaagcagtaaaaaaatccatcctcctcactcacagaaaaagaaggttttgtctcttggtgaaaaggacatggtgcaacccaacgtgaaccatttctatgaagtttcacatattgacggacaatatctactatgttcaggcgtgacttaatctcttgaatagcctgaacatttttctgactcataactttgtcctacttttatatacttttatgtattatacgaaaattggcagcatgttacaatagttatacatttatatctctccttacattatactgtagtgagtaaataatactctataaccattataaaagaactaattattattaatattacaatataactttaactagttaataaaactaattaacatgtaacataccaaaattgacaatcttttttaactattatagctgaaatataattacattatagaaaataaaatgttactatatagagctataccaattaatttagtcttaaaaataattctcaaaatagtacctaataagttgtatttataataataagtaaaagttgttaactaagaatcaaaaaataataatttataacataacgctatattgtctattattgaaacatagcctgaaatttaacttttacaacttcacttaccattttaccactaactttcccattgtactgagacaaaatatactgaataactcttcccatatctgacatttttgtaacacctaaaaagtttaatgtgttatctacaacctgctctaactcttcagaagttaattgttcaggtaaatatgttttaagaatatcaagctcagcagattctttactaacaaggtccaaccttccagcagcataaaactgctctatagcatcctgtctttgcttaacttgtctttgaataagattaagcagctcactatcagtgataggacgctttagttcaacttgaagatgtttaagtgctgtctttagcaggcgtaatacattcaggtgtatttgatcttttgacttatatgcagacaaataatttttttcgatatgctctataagagacatatgtgccctcataaagacacgggaagtcactatttgactccccgtgtaaattaagtcgttactactctaaagtctattgctttgcaataataatttagagaatttattataaactatcctcattattacatataaaaaagtatacaaatactttttattctatgcattcatctttctaatttttttcaatagccgttttcgtgcagcagcttttttctttttacgcattacactaggcttttcaaagtgctgacgttttttcatctcagagagaattccagctttttcaacttgttttttaaaacgacgtaatgctatatcaaaattataatcgtcttctgtaagataaacaccaggcataggcatcacctcctattcaaatattgcctaggccaactgactctgacagctcaaagtatagtttgtacttctcaaaaatacaagctcaaaaagtgaatatatctatcattaatgagcacactaaacttactccttattatgtagatagcaaaaaaacatatatcctatactaccaagaaaaaataatataaaataaagcgttcctaaaaatactgcaatttcaaaagtccaccatgggatatcatgtgggagaggactatggattgcctcatgtaacaacatactattctactttttactttacagcatcttttaatgcttttcctggacgaaattttactacctttgatgctggaatagtaatcatttctcctgtacgtggattacgtcctttacgagctttacgagattccacagaaagtgttgcaaatccagttaaagttaatttgccttccttagccaatacttcttcaatacttattaatgttgcattcaatgtacgctctgctgcagccttagtaatattaaccttagatgcaatttgggcaacaagatctgcttttgtcataatccttctccttttccgtttaatctagctgtactatataccaagctaaacactttgttcaacttgaaacaataaattatctcattaagttaaactaaatcttaatatacatataaacattattctaagtacattaatgcatatagctcaatcatgttttttttggaaagtcaataagttggagtaaaaactcctgagataactgctgaaataattgatttgaaagcgactcaggtcttgctgaaggggaaatgccaatacgttctaatgattcatagtagttcaaaaaacctatttttcgtaaaatagattgcatttgttttctcctatgttgaaaacactgttttataatccaagcaaatgttttactatttttaggttgttcttctctaggttttgggtaaagagtaactatagcagagtcaacttttggttgaggataaaaagaatgtggctttacaataaaaccccattctactttagcaaagctttgtacccatacagacagaacaccatacgatttagttcctggacatgcacataatctatctgcaacctctttctgaaccataaatacagctctagacattgactggaccctacttacaatatcccaaattaacgccgagcctacattataaggaagattactaataactttccaagagccacaaagtgtttcccaagaaaacttcaatgcatctaaatgatgaattgtaacttttgatacattctgttgtttcactgaagaatgataatctacccagcaagaatctttttccacaagtaacaactgacctgggttatagccatatatatgccttgttaatgcaccctgaccagggccaatttcaaaaatattctcaccttcatggatatccaatagcttaactatacgataagcaatagctgtatctttcaaaaaatgttgtccaagactctttttaggccgaaaggtttgatccatactcttattaacgtattctcattactgtctaaatataacaattaacatatgaagctcatcatatattaatcaataaaaaaaggatacaacactatacaattatgatacacaatatagataatgatgaggaaagattatgcacgtcatatttattaactatgggggataccttggatgctctggggtccatattcattttcttgcacaaaccctcacacagcaaggaatacgctgtactgtttaccttcctgtaacaataaaatcaaaaaactactttggccaagcagattatcctatttttacacataatgatcttgttgcacactctcatactggctactttaaagactctattattcatgcttggaccccgagagaagttagtcgaaaattaactatatatgtagtcgcccaaacacatgttccctattttgttcatctagaagacaatgaaatcactataatggaacaaatgtttaataaaccatttattcaactacaacaagaagctttagaaaagcctgcactctttaaagatgtacaatactgtcacccactctattttcaacaatttcttaataatgctactggtgtcacatgtattattaataaacttgaagaacatgtcccttctcatgtacctcgaatgactttttggcctgcctgtgaagaaacttttttccgtcttccagaaaaaatacctgagtccgtctataaagaattaggattccctttaaatactatatttgttgtttatcctgggaatatacatgaatacaacaaaaaacatgttagtaatcttatcacagcaattgactatgttaacaaaaaaggacactcaataaagatcctcagatgtggagaaacagctataccaatggagcaacttgctccccctcatgcattagcacatatcattgatttagggacacctgaagctcataagcttcataactatattagcttagcacacattcttgttcaaccaggatgtcctggagattttgatgattatcgatttccatcaaaaattcctttattccttgcaagtggacgacctgttattttacctaatacaaatattggattaaacatgacacatgggaaaaactgtttacttctaaaaacaggtagtgcagaagaaattacaaagtatctatgcctacttatagaaaaccccaaaatagcaacatccattggaaaacaaggaaaacaatttgcttatagtacgttcagttgggaaaaatcagctaaaaaacttatacagttttataaaaagtgtttaccaaacttataagatatatctgttaaaaagtaataaacaaataccaacataaaaatatcttttaaaaatagctagttagacatacgtgacaaaataagttcgacttcatctacagctagtccagtagaacgagcaatctgagcaggtgtttgtccttttttctttccagctaaaataacttcacgtaaaaattgtggggaacggcttatactagttgcttgatcaataagcttctgtaaaactctaatacgctcttcaagccctttatttaatataattaactgctcttgtctttggctaaaactatccacaagctcctgttctaatgctgcattacgataaatactctcaaggacatgttcttgattactttgtagctgggctaaaatagcttcagaacgtctcaatcttaaaaaaaacaaaaaaaccatcacaacaaggatagtttccgcaatagttataacaccaatgatccaaagtggaaatatcataatgataatcaaaccttacggttcacaaagttgccaaggtgatctacttcatcttgaaaaatttctgagtcttcctctttgacttcttccttagctgactctttctctttatactccttaagcattttatcagaattcttattattactatgaggttcttcatctagcgatataaggagacttataccatctataccttgtacttggcttccttgctgactcaatgcctctgctactacttgacgaaatgttgtttgtgatgtttctggatgtgtagcttcatcttttattatctttcctgcaggtcccatttgctgtataaagagaagtggagctatgggttctattggcatagaggactcactttacaatataattttcaagaagaatatcctccattttcccactaataaggtaactgtttacaatatcaagtaaatcttgcttaatcactaaagtattctttggatcaataagatatccatgtgtcttattacttagataatagtatatagcatctcgaagaacaagctctttacttttagattcttttatgactttttcatctttagaaactccaacaaatgttgccttaagaaattttacactattaccgctaggctgtgcaacagtaaacggctcaaaggtaattttgtactcttgtggtcctgtaattttctctactgaaggaacaataacaactgttggttcaggtaatgttggttcttctactggtggaacatcttggaaaaaaagaaaccaacttatagcaattacaataataaaaatagataatataataacagcaattttctgttttctaagtttttttcttctaagtatactatcctgatcttcttcactagccagggtatctgttaaagagtgagatatttctccaggagccttaagtggtacagcttcttcttctgtatctaaaagaaaaggtgcatcctcaatatctagctgaactttttgacttttactctgtgtggtgtctgatgattgtaactctttgatattggattgtttttcctctggtgattcagtgtccatccaatcctctcctttaactccatctcttaacattagtttgctaattaaaaaatgggcagagtatcctccacccatttacttataacttgtttgatataaaatacctatagaaacaaggttaatcaaaaattttatcaattttttgtttcattgtctctgcagtgaaaggtttaacaatataatttgagacttttgcttgaacagcttcaataatattttcttgttgtgcttctgctgtgaccataagaaatggaagttcgctatattgttcactagcacggactttacgtaataactctatacctgtcatttgtggcatattccaatcagaaacaacaaaatctattttttctttattaatcatttcccaggcagtagtaccatcatcagcctcaacaacattattaaaaccaagttgacgtaaaatatttttgatgatacgacgcatagtagaaaaatcgtcaacaaccagaaccttcatattcaagtcatatgacatttcaaagctccttaatcttaaacagctttagtcaaccttaccatactggtttaaaaactctcgcctgagccttgttaatgcttgtgaatgcaattgagaaacacgcccttctgtaatacccattacagacgctgcttcactcatatttagctcatcgctataataaagcgataataccaacttctctctatctgtcaatgtgtctatgagtttcgaaactctatctgctatctctgtagcagctgtatcttcatatggagcaccctccttttcggaagtatgatgtgcaactgtatcttgaataacatctaaagataaaaaagcattattctgaagagcttcaagtcctattcgaatatccttaatagctaatccagtaacttcatgtagctcctcttctgttgctggacgacctttttcattttctattttccatgaggccccatcaatttgacgaatacgttgccttaacgtacgagaaaaccaatctaacttccgtaactcatcaagcatagcacctttaattcgattctcagcatatgtttcaaaccgaatacctagctgaggacgaaatcttcctagagcttccattaatcctaaagatccagcactaattaaatctgaaagttctatattcttaggaagcttagctttaaggcgtgatgcaagaaaacgaatcttaggtgcataatgacaaacaatagcctcctgatcaaggtcagaaaagtctggccaagtaacagaaccagattcaagcttttcccatggtttattgtctgaaaaggaactttttccagaaaaatttgatattgccatcaagggccaccggtacaccccaactttgaattgtttctgcaacctcttttactgcaagtgaagctgcactttctggagcttctaaacaaaatggcttttgattaataaccgctttccgaacatttggatctcggggtataataccaatgagatctaaagatatactttttaaaaactgttcacatgccatatgaagtctaacatatatttcttttgctgacttagtatcttgagccatattaactaaaactctaaagttatcaacaccatgatggtgatttataactttaattaatgcatatgcatctgttaaagaagtaggctcaggagttaaaataactatccgttcttgtacagctaagttaaaataaaggacagtatcattaatacctgcaccagtatctacaataaaataatcaatttctttttcaagcatatctacagactctagtagatctaacttttgtcctgtagataaatttaacatatccataacaccagatgacgcaggaagaatgctaaacccataaccagtagcaactattatttcttctaacgaagctccctcatgaaataaatgaaaaagatttttttcaggtgacatcccaagcataatatctacattggcaagtcctaagtctgcatccaataaaagcactttcttaccaagtgctgcaagacaataggctaaatttacagcaatgtttgttttaccaacaccaccttttccagatgtcacagaaaacaccaaaggaaaatcttttgccatttaaatacccctcaaaaattaacagttggccttggtatatctctatacctgaccaggtaattgatgcttaaaaacaagcttccaaagaacagattcataagccgaagatagtgtatcacttaaccctataccataactcaatgcagaaataggtagacctgttgccattgcgacattaactatagagccatatgttgctgcttcatctagctttgtccatacaatactactaagatgttgactttgatattttgaaagaaaagcttgattttgaagtgtagcataatgtggaggcaaagctaaatgcacaacaaattccatgctagaaagccctaatgcggataattgcattgttaatgtctcttttggattactaatacctgggaagtcaatgaaaagatagtctttatcctcattttgctctattactttttccatagattctggatcacttgcctcgaagtatccaaactcggataactctgcccagtgttttaacacaagtctgctattcgctcgctcacagtctgcattaataaaacctattcttatagatggatcagtttttcgtaataataatgccatacgtaatgcagacgttgtcttacctgcaccaaaaggtcctgttatcccctgtatacgctctggccagctctctgccgaccaaggtcttataggaacaatttctgacaatgcttcaaaaggagagctacccggaacagaagataatctatgatataactccataatgacagcatcatcaacttcttcacgctgtaaatactctagtgctgtacgctgtcttgaagaaagacgctcccactgtatagatggttgcatgagggcatagagatgctctttaacttttgtccagtccctaaaccactcgtcccaaccctgaggagggctctcaccattcaagttattactattattacctcctgaagtaataggacgatctatacctgctgtaacttcatattgccgttgcccatctttttggaaatctcgactagataaaataatagcacttggacctaattctgcttttacctgagcaagaacggactgagtacttggacctataaatgtttttacctgcattaatcaatctccacattccctacagcttgaagtcttgtatctggtggaatttcaccttgggaaataacaggaacattagggagaaatctagtaatcaattgtgctaaatgtggacgcacaataggagtagctaataacactggttgaccatctgttcctacagctccttcaatagccatattaatattatgaataagctgttgtgcaatggatggattaagtgcaaggtatgatccaccctctacttgtcgtattgcctcttgcaatgtttgctctgtcttagagcctaaagtaatcacagggagaacaccatcactatctaaatatgctttagtaatactccgaccaagacgctcacgtacatattctgtaagtgtgtcaggattcttaactgaaccaccataatctcctaatgcttcaacaatagttaacatatcacgaatagaaacattttctctcactaaattctgtaatactttctgtacagaaccaagaggtaaaattccaggtacaagctcttccacagctttgggagagtgctttgctaatgtatccaataaaccctgcacctcctgacgtccaagaaaatctgctaagtgacgctttaaaacctctgtaagatgtgttgcaataactgttgaaggatcaactactgtatatcctgcaagcattgtttcttcgcgctgcatttcagaaatccatatagctggtaaattaaaagctggttctcttgtttcaataccttctatctggtgtaatgcattaccaggatccattgctaagtaatgatcaataagaatttcagcagtagcaacttgatttccttttataagtaaaacatattgtcctggtttaagttgtaagttatctcttaaatgtagagatgggataataacacccatatcaagagcaaactgacgacgtattgaacggatccttgaaagtaaatttccattttgttcctcatcaacaagagggataagaccatatcctacctctagctctaatgtatctaaaggtagtaaatcttgcatttcctctggtgtatttgcaggctcactagcagcactaccacctttagccttctttttatcttgtgcagttgtatctgaatttttacctacaatacgagaaactataaataaggaagctgaaaagaacaagaatggaatagttggtaaacctggaacaagggcaaatataaaaagaactgcggatgttaacttaagaacacgtgaattatatgttagttgtgcaatatattcttcacccattttagcttctgctgctgcacgtgaaacaataagaccagcagcaatggaaataataatagaaggaatcgtagaaacaagtccatctccaatagagagaagggaaaatgtcataagggcactatcccaactcattcctttttgcacaacagcaataagaataccaccaatcaaatttataagggtaataaacagtcctgcagttacatctccttgtacaaatttacctgcaccatccattgcaccataaaagtcagcttcctttctaatattttcgcgacgcctagttgcttcttcttcatcaattaatccagaatttaaatctgcctcaatagccatttgttttcctggcatagcatcaagagtaaagcgtgctgcaacctcagcaatacgtgttgtaccagctgtaataacaactttattcaaaataaataaaattaaaaagataacagcacctacaacataacttccacctacaacaaactcagcaaaagaacgaataacattacctgcagcatttgcaccttgatcgccattaagaaggattaaacgtgtagaagctacatttaaagctaatcgcattaatgttgtaacaagaagtaatgaagggaaaatagaaaactctaaaggagaagtcataaacattgctgttaaaagaatcaaaatagaaagagaaatattaagggaaagcatcacatctagcaaaaacgtaggaagagggacaagcataacaagaagaatgacaacaacacctgcaccaaggaatatatcaccttgcttagcaaaacggctgtaatttatacttggaccacttgccatagagttgactccttgcaggtcaggccttcgacatataacaagcctatataactaattatagtaatttctggatacaaaaaattattatttattgaggtccaggcatctttccttttaaacgccagacacttgcaagtatagctgcgacagctttatatagctcttcaggaatcatctctccaacacctactgctttatacaaagcccgtgccaaagggacattctctctaataggaatattattttctctagcaatctctttaatcttctctgcaacccgatccacacctattgctaataccaaaggcgctggtgcctcaagagcattatatctaagcgcaacagcaatatgttttgggtttgtaacaacaacgtctgctttaggtacatcttgcatcattctgtttgtcatcatttgcatcattttttggcgctgtttctgctttacaataggatctccttcttgttgttttgactcatcttttatttcttgttttgtcattttcaaattttcttcataactatatctattatatacaagatctgcgactgcaataattgtcataggaattagcgtatataaaacaagtactattcctgtattaagcatataatctgccacacctgaaggacttgcataatataatggtaaaaagtttgaaaactctccttttataatcatatatggaacaatacctataacaattacttgaactaaactacgtaaaagtcgaacaagtgtttgttgagaagcaaacattcctttcaacccttttattatattaaatttactccatttaaatttaaaaacctttgtagtccataatgcaccaacttgtacacgtaatgaaatccatgccgtaacagcaataaaaagtaatattggcatcaataaaatagctatctcttgagcaacataaataaataaagcatatactgactgtgctgtaacctcaaaccgaaatgattctgtaaaaatatagtagaaaattgtttcaaaatgacgtcccattacgcctgaataaatagcaagccccagcatccctgctgcagtagtcaatgctttagtaacctcttctgatttagggacactcccttcagaacgagcttcctgacgtcgtttcggggttgctttctctgttttactgggatcatcagacatgtatagttcctggtaccattaaaaatatatggaacctaacatgaggtgaaaactattttccactacccattacagtaagtaagttaaaaaatagtccctctaggcctgcaataaatcgataggtttcttttgataagatagtaaataatagtccaatgaaaaaaaatcctacaccaatttttacaggaaatccaacttccataatatgaatctgaggagcagctcttgccataagtcctaaagagatctctactaaaaaaagagctgacataactggtgccgcaacatgtaaggcaaaaacaaaaatcatccctgccatattaagaagttcactcaataaaatttctcttacaacaagtcctcctgctggaaccattttaaaagtatatgtaaaagcttttataagaaacaaatggccattaagagcaagaaaaactaatgtagcaaccatataaagaaaatgtgcaataaaacctgtggtgttaccagttaatgggtctgcaagcgtaatcattgtaaaccccatttgtgtagcaagaatttctcccccagcttgaattcctgcaaagaaaaagtttaccgcaagccccaatacaataccaagaaaaacctcgcttatgattaacaatactagatcgaaaggatgcgctggcatttgtgttcctgaaagagaaagacgcccccaaagaactatagttagaataagagctattgatgcttttaacatattaggaaaaccatcaatagaaaaaaaaggaagcataaataagacaacactaatacgtaaaaatgtaagtaaaaaactaagaaacatactaggatcaaaattaaataaattcatacttactcactaactataatattaacaattaataatagtaataatcattggcatctctttatttttctaatagattatatggatagttatctatatctaaacaatttagttaattaattactacctactataattaaaaatagtacttatcttaccatagttattggtacagactagctacacatgtactaaaaataacaatagcattatttattataacaaaaatactattttttatattattgtaagaaaaatattactaatagttataaaaaataatctatcactttttatttcctatcaaaaattttacttagcactcagtacatcaaagctaaaaaattttataagaatttcttgacaaacatggttattcagagtatttgcattttcagtacagaatagtattcattaaatgagtactacatcctctctggtcaaattgactaagctgggtggcctgactaggccccttttttttttttatgttattattttgggataccttagctttttatgaacagtgctgcactaatagaaactattacccaacttatatctcctcttattacagcacaagggctaaaactttggggtattgagttgattaatatacctcaacctattataaaaatttttgtagatacaatagaaacaaacaggttgcatgaaaataatataataaactctaagtctgagcaaataacaatagaacaatgtgcttcactttctcgtctaataggtttaactttagaagttgaagaacttttccctaacaaatggacacttgaggtctcatccccagggttggaacgctctttttttactatacaacaacttagtaattatattaatcatgacattgatgtcacacttaaagaacagcatcctttgtggccaaaccgcaaaaaattttatggaacgcttattagtataacagacaatacatttatgcttaatttatcattagcacaccgcaaatctgatgagccagaaaatgttagtattaactggcagcaagtacgtaaagcaacacttgtacaccatttctttcagccaaataaaaaacttggatcaacaaaaggtctcaatggaggcactacatgaatctagaattaaaaaaagctcttgatcaaataagtaaagataaagggcttgatcgtgatatgcttgttgatacacttgaagatgctgtaagaacttcggttattcggagatatggagataacctagatgttgaggtaagctataatgatgacacaggagaaattgaagtctatcaatttaaaattgtggtggaagaggtaacagatcctatcacacaattgtctattactgaagctaagactcatgatccttctgcacaactagatgacgaaatgggattccgcttaaaagttgaagacttagggcgtatagctgcacagtcagcaaaacaagttattattcaacgaatgcgtgatgcagaacaagaaattatttatgaagaatataaagatcgtattggagaaattgtcagtggtattgtacaacgccgtgataaaggaggttggattataaatcttggccgtacagaagctttacttcctaaagatgaacaaatccctaaagaacattataaacgtggagatcgtgttcaaggtctaattatagatgtccgtaaagaaggacgtgggcctcaagttattatttcacgtgcacatcgagactacatggctgctctctttcgccgagaagtccctgaggttgatgatggcacagtacaaattatgggtgttgcaagagatcctggaagtcgagcaaaagttactgttctttcacgtgaacgtgatgtagatccagtaggcgcatgtgttggcgttcgtggatctagaatccaaaatatcgtccaagaacttcatggagaacgtattgacatagttatctggagcccggaaataactacatatgcccgtaatgcacttgctcctgctattatttcacgtattactgttgatgaaactgaaaaccttcttgaagtaacagttccagatgatcaacttacaagtgctattgggcgtaaaggccaaaatgttaaattagcagcaaagcttctaggatggaaaatcgatattttcactgaaacaaggtataatgaatcaaatgctgttggacgtggacttgaacaagtcgcaagtgttgctgagatatctatagaaactttactccactctgggcttaacactcttgagcaaataaatgaaacatctgacgaagaacttattgaaaagttaggtatttctgaatctcaagttaacgacttacgtgcagctgttaactttcttagtacaacagctaccgtcgatagcaataaaaagaaaaaagaagtagaagcagaacaagcaaaagataacgaaaataacccagctgatacagcagattactagataagatggataaaaagcatattcctattcgaatgtgcaccatatgtaagactcgtactgctaagcatctgctaaaacgatatattcttttccaagaggaaaatatatttcatactgatgaaaaacaatgtatgtttggaagaggatggtatgtatgctcaaaaaaaaattgctgggaaaaattccggagattccgcgttaatggtcggaaacgtaagggagactagttcatgataaatgataaaattaaagttaaagatcttgcaatagagcttggtgtttcaactaaagatcttttacgtgttttacgagaacttgaaatttctgcaaaaagcacaataagtaatatatcaatagaagatttacctaaaattcgtgcacaatttaatactcctaatacaaataaggaagaagaacgaagacaaatacaacctggtgtaatattaagacgtaaacgtcaacaaccttctactaaccagacagatattaaacttaatccagttgatactaatgttagtgaatctactatacaaacagaaaatcttatattagaaaataaaaatacattatcccctcatatagaagaaacaactgaaaaaatacctgctacaacaaatgaaatattatataattctcaaatagcaaaaatagttcaataccctacacctagtgtccctaataaaactttaacaacaacaccacatcaaacaaaaaaaaatcattctgaaaaagatgtgttagagagtcatgactcttctaataaaaacatcaaacaatcttcatctcaaaacacagaaaaaactaaccgtaaacctgcggcttctgctatccctgaaggatcttcagctccaagtttactgcctccagtttctgaacaaatacgtcgtttacacgatgaagagactgaaaactcttctagtgaagaaaaaaatgttgatatacaacaaaaagaaatcccatcaacacaagtgcgggttatttcaaagcctaatattacacagtcccactcttgggatgccaataatacacgttcttctagtgggcaacggactgaaactgaaaaacaatcaaatactgcccctcatactgatagtagagaacatactggtcataataaacgacctgtttcataccaaggacaaaatagaaataattttattgctactcctgatacaattcctaatgtagaacatgatggacaaaacaagaaaaagcgtcatactagccgtaggtcaacagagtttaaccataaatttcaatataataatgaagatgatgatatatcacgccaaaatcgtggaagaaaacgtcataaacaaaaaacaacatctcaggtaacaacacaaccaataaaactaacaaaacgtaaaattcgtgtagaagaagctattagagttgctgatatggcccatcaaatgggacttaaagctaatgaaattataaaagtgctctttaaccttggtgtgatggcaacaattaatatgtcattagatattgacacagctactcttgttgctgctgaatttggatatgaagtagagaaaattggatttacagaagaagattacttagtagcaacagcacctgaacaatcagaatctctaaaacgtcgacctcctgttgtcaccattatggggcatgttgatcatggaaaaacatcacttcttgatgctattcgaaaaaccaatgtcactggaggtgaagctggaggtattacacaacatattggcgcatatcatgtaacaactaaaagtggtgaaattgtttttcttgatacacctggacatgaagcattcactacaatgcgtgctcgtggtgctcaagtcactgacattgttgtgcttgttgttgctgctgatgatggtgtcatggaacaaacccgtgaagcagtcaatcatgcacgggctgcaaatgttcctattatggttgctgtaaataaaatggataaacctgaagcaaatccagatcgcgtcttacgtgaactttctgacatcggccttgttcctgaagactggggaggtgacacaattgttactaaagtttctgcaaaatcacttgatggtattgacgaacttttagaacttcttgctcttcaaacagatatcctagaacttaaagctaatcctgacaaaccagcaagaggccacattgttgaagcaaagcttgataaaggtcgtggtccaatagctacagtccttatccaagaaggaacgctgcatcaaggtgatacttttgtttgtggtgtctttagtggccgagtgcgagctatgtttaatgatcaagggaaaaaagtaaaagacgcaggaccatctatgcctatagaagtccaaggatttgaaggagtacctgaagcaggagaagcttttatttgtttacctgatgaaaaacttgcaagacgcattgcagaaagccgtgcaataaaacagcgagagaaagaacttgccaaagaatctagggtaaccttagaaaccttcctctcaaaaacatctaatgaaaaagaagctcaagtgcttaatttagtagttaagtcagacgttcaaggttcactggaagcaattcttgaagcactacgtaaacttagcactgctaaagtacgtattaatattattcatggtggtagtggtgctattactgagtcagacatcttacttgcctcagcatctgatgcaattgttataggttttaatgttcgaccaacagcaaaagtgaaagaagtcgctgagcaagagaatgtagatattcgtttctatgatattatctataaactagtagaagaaataaaaagtgccatggctggccttcttgcaccaattagtcgtgaagtatatcttggacaagctgatgtacgtgaaatttttaatgttcctaaaataggaaccatagctggaagccatgtttcggatggtaaagttctacgtaatgcaggagtccgactattacgtgaaggagttgttgtttatactggtggtattgcctccttacggagatttaaagaagacgttagagaagtccaaaaaggctatgagtgtggtattagtcttgaaaacttcaacgatatcaaacttggtgatgttattgaatcatttgaaacagtggaagaagctgctagcttatagtaaattataattataataaaaaggggaaaagagactgaagtcttttcccctttttattataattatgttacaaaactgcttttttaataatactaatattattttatattttttagatcttgttctagttatagtatatgactaattaaaaattactaatgatgtgatactctatatttctttgattaaaccaataaaaattttctgtttcctagttaattgttaactgttgctatctaacaatatagctatattagctaaaataaaaggggattaatggatcatggctaactatcctccatctgctgaagaaattgcttctcttatacaacgttatgatcgtatagtagtaacttcccacattaaccctgatggtgatgctattggtgcttgtggtgtggtttcctacattcttaaagcacttggaaagcgttttattatatataatgcaacaggtattccatatcatctagaatgggttcctttaccaacaaaagttattacaaaactaatggatattccatttaagccagaattatttattattttagactgtggtgatatttggagacttggtagagaattatcttcctgtcttttagaataccagtcaataaatattgaccatcatataggaaatccaaattttgggacattagctaattgggttgagccaaaggcagctgccacaggtcaattagttgcagctattgctgaagttattggaatcccacttacaggagagctagctcaatgcttatatctctcaattgtgacagatacaggctcatttgcatatagtaatacaagcccaggagtattacacttagcagcaaagcttattgaactaggtcttaacccctcccccataagagaacagcttgataatcaatggcctcttgcaaaatttcacctatggggaaaacttatgcaaaaaatacagttagaatatgatgggcaaattgctatttctgctgttaccttaaaaactattacagattttggagctacaaaagaagatttagaaggctttactgaacaaatacgaaaaataaaaggagtacgtgttgctgctcttgtaagagaagatcctggagaaagttgtaaagtcagtcttcgttcatcaggaacagataatgtacaagctgttgctatacagtttggtggtggtggacactttaatgcagctggagcaacaatccatgaacctatagaaactgcagtaaaacaaatattagaagctatacaaaaaattacattttcaacaactgatgtagactagatttcaatgatcctaacaaattactactaaattagtgaataattactataagtattacacaatatttaataactatctatagcttaacattaaaccttgactaatttttaaccagccatctaatgtaacaaaaagcaataatttgaaaggcaaagagatagtcattggtgaaaccatcatcatgcccattgcaagcaaaatatttgatacaacaagatctattgcaacaaatggtaagtaaagtaaaaaacctatttgaaaagattttgttaactctgtaattgtaaaagcaggaataataataagtaaattattgcgtgaaatagtttcatgctgatctttaggccaaatacgcttagccgtcaccattaagcctctaatagtagactcatcagcattacgtattaaaaattcacgtaaaggtggggttgcatcataaagagcttttataacttctagtgctgctggcgatgagggaagtgctgttttaagatacaagtcttccatcttcatatatacaggagccataataaatatacttaaaataattgctaatccattcattacaattgcaggaggaacctgctgtacacctaatgcattacggatcagtgaagttacaacaactatctttacatatgatgtaaccatcattataacaaacggagctagtccaagtgctcctaaacctaaaatgattattagaggatcaacaccaaacatatatttatagctccttcataaagcctattcatcaatagttgttgaaaattctaatatacgaataccaataactccattaaaattcattaatacacctgtaccaatagttttatcttcaaaagaaagtataacaggtgaatgaatatctaactccagtgtaaatgtatgtccttctataaaatgctctaactcactcagtgtagtattatattttcctatttcaaaagaaataggaacttccagtggatgctctatacttttattccttattgtggactctgaactccatatcactggtgacttctgagagaataacgtcgttccattccacccaagaacctttatgtgtcttccctctacagagcaaaaaatttctttatccaaaaataccaaggataatctatttctcaggataggataatcataagggaataaaacatcacctggtgtaagttgcattaactctttaattgttaataagctatatccaactcttatattcatttctaagggtagtgctaatggcattacattattctttggcaatgtctgtaaatatattaaaaaattttttgcactgtttccttctggaatataaatcctgagaggaatatttgatctcattagtcccgtatatgatttattctcttctaactttgtagaatcaaatattaatgtaatcacacatccaaactgataatctactaatggttcatagaaaaaacctaaaaatattacaggtacatgtaatatattctgtaacttatgctttaatggggcaaataaagcttctagtataggtaaaataacaacatctgataatggactatcatatcttacagaagataaagctggatgtaaccatagaatacttaaatcttctaatgctatttgtatcaaatcattttcacattggaatcgtagaaagactttttcagcaacatataaagaaggttgccctaagtgaacaatgcaacttgtttcaccaagaggaattatccatggtggtgtgagagttgtaacttcattcagtaacctcattgctaattttgacaacaaaggaggtgtaaatagttgtatatctccctgtgaccccagattagacattattactactccgtaacaggaataaaactaatacattaaaagttattcatctatatcttcttgttcttcttcacgttcaggcattttgaagtcttcaagttcaacttcttcacgttgttgagcaagaattttttcttctgcttcccataactttttatgttctgcgagttttgctgtctgcttttttaattctgtaagattcttaatagctctctcttttgcttctatacaagcttcaacataatcttttgccttatctacaagcttatacttttctttgacattatctaataaaatacctgtctttacttttaataattctaattccttaaaaagaactaatgagcctataatttcactatagtatctattaatttcctgttggcaccattcttcataatttttacagtcttcttcagctttttgtaaatctttccttgcctcaacaagtgcattttcagctcttagtactgcctgttgtgccaactcttccttatgctctcggacagaaagaagcggagctaatggatatttggacattcaatacattccttatcattcttaagccaccgctttttttaaagcctgaagtgtttgctcaaaagtacttttttcatctaggccctgctgtaaaaaagcattaatccctttattatgttttatagcatcatccgcagcaggatcattacctgctttatattctcctatctggactaaaagctcaacttctgcatatttagcaagatatttccttaatttccctgcattttctttatgttcctttgtaactatagcattcataacacgacttacactagctaagacatcaacagcaggatagtgatttgctgcagctaacttccttgataaaataatatgaccatctagaatagaacgtgtttcgtcagcaattggctctgtcatatcatcaccttcgacaaggacagtatataatgctgtaatagaacctttatctgagtttcctgctcgctccataagttttggtaatgaagaaaagacagaaggtggaaacccacgacgtgttggaggttctccagatgcaaggcctatttcacgtaatgcacgaccaaaacgtgtgacagaatccataagtaataaaactttctttccttgatctctaaaatattcagcaattgcagttgctgtataagctgatttaagtcgctccatagaagaacgatcagacgtagatacaacaagtacagaacgctttaaaccttctgctccaagatcatgttcaataaattcgcgtacttctcgaccacgttcaccaatcaatgctaaaatacaaacatcagcagttgtgcctttaataatacttgataaaagtgtacttttacctccaccagctgcagcaaaaatacccatcctttggccctcaccacaagttaatattccatctaatacacgaagacctaatgaaattggcttctcaataattcgacgtaacattggattaggaggatctgcatatacaggatagtatgtccgtaaacgtaatggagctttcccatctataggttctccaagtccatttaatacacgaccaagtaactctcttcccactggaatagcatgaaccattcctgtaggaattacttctgttgagggagaaataccttggagatctcctaagggtgtaagtaaagctacatgttttacaaaaccaactacttcagcctgtaaggtccaattatcccatgggttacgtagttcacataattcaccaatcttaacgcctgggacaactgcacgaattattgtaccaataacttgttcaacccttcctctaacttctacaggacttgtattctgcacagcctcttcaaggagtgaagcaatatattcaagcgccataaagtatcctttctatcaacttaatatttaattttagaatggaaagcactttccaaagctttaagctgtacatctaaacttgcatctacaacaccatattctgtttcaacaagacatgaacctggttctaacctggcatcaacaacaatattaagaaatccaccttttgttgactttaatgtatcagaaaacttttttgtaatagctttttcgtcagctgtagatacacggataactaactctttttgagatttaacattctttagcgctcgttgtgcaatacgtataatacgttcagcgggatccatttcattaagaacttttttaactgtattcatcacaatctgtacaaggtcatcttcaataccttcaataaattcaacagataataatactgtttctaacacatgctctttgttctcacgaagtccttcatttttgccatcttcatagccatcttttcctttttgcttgtatacttcttctgcatgaagttttagttcattaatacgcttagtaacagcttctgatagttcactggaggagataagagaagaaaaaaagtctgcctttaataaaggaattctttctgtcaactctggtaatgatgatgttagtcgaaaataggtgcccattgtggtgcaacctctcgaagaagtattttctttagcccatcccaaacccctttaataacaggtgaaggataatcctgagacagtacagcactgtcttctgtggaaaaaacaaaattaagctgtgaaaaaaatatagattgaagaacactaggccatgaagatgcacaaatctctaaagccatacgaccatcccaatggatacgggttgttaatggaatggaatgactctgtgctaaaaaaaatctgcgtactgcaccgacttggtatctaccacgcaataagctatattgataaagatcttgcccaaggatctgctgtaattggaggacttcatcccttcttaaaacttttgcaatttcatctgcattaatggctgcaccaaaaactagttgaagacgccttactgtttctggttcaagtaatgcaatccttcttgtttcttccataaaatcccaaaaacaatattctgtttccattagtcgctctttctttaaagcaattcctcgtaaagcaagcttttgtataaaagaattatcaaatccaggagtagcatctgtaaaagaagccatttcttcagctgtctggatcattacattatataataaattacaattaaattctattattgcctcaaataattgaggtttattaatgattatctcaagaaaaaatactttatccattattgctcttctggcttaatagtttgttctcctgatatagatccatcattatcaatttttttagcaatgggtatatctttttgaaataacactaaaccaatacaaaaaaatatcccaaatataatggctaaaaagataattcccattccaataagaaaataaggactacctcgttctgggaaaagtgatatacctaaaaaggttgaagagcccatagagggaatagtcaaaggttcttgtacaggaagtaacatcacagaggtacgatcatattcaagatcaggaagacttttagccgcaacttcacgaatactaggaagcatatttactacaggcgaatcaggcgtatgccttataaaaatacccatagatggaaggattttagaatcaacagcttgatctgtatagcctgggaccacatgaactcttgttgttaatactccatcaatacgagaaaaagtatttgcaagctcttgagatatagcataggccatccgtgcacgttcttcagattgagaacttatcataccttggcctgaaaagacttccccaaggctaacatagttttctctaggtaatgcattcttttttaaaatctctaaagcacttatcaactgttcttctgccacaagtaaagaaaatccttctttaccacctggagatttttctacatcaatccccctatagattaatgtagcaaccatttcatttacctgatcttccgtaagccccttataaacttctaacttacaccctgatataaaaataatgctaaaaaaaataataaataacagtaagatattgtcccacttttttaatggatatacattgctatccgttgctttaactatatatctgtctgttaaaagcatctatactcaccaattatgactgtaactgtattttcattacctcaagtaaatctacggcaaagacactggctgcaccatcagtggctgctactttctcaaataacagcgatgattgatccccacgccctgtgaacatataagtaattcctaaaaatacttgtgcatcaggatcatctggaactttttctaaatatttcgtgaggatttcttctgcttcactaaactcatcgataacaatatggctcagtgcttgtcctattaaagctggtgggaaacctggttttaatgccaaaacaccatcataaattttacgtgccacaccaactaatccataatggcaagctgtattagctgtatcaagcagcctttttacttgatattcagaaagcatatttccctcttctatctttaaaaatagataataaattttgagttaatcataaccatataaaatacatacaatttatcctgtcctctgtgctaaacttttgattgtatctattgaacttttatttattgaagaagttacttccagtaatgagttatactgacctagctcaaaactaactagcatcatatcttcaggattaaggttttgcccttgaattaattgatctaattttgcttgtaatgtattacccctagtatcaatcttttgtagtgcatcagctaaaaaatctcctatattaacggccattatcacacctcctttacctatcttagaatatagaaaatatcaggatggtatataattcaattttaattgacctcatttaaagctatggtattagcataccacttccatatggactactaaatgaatttgattgatttttatatttatctatttgttctttccaccaatacatatcacttgcaaagcttttcatataatcagggaaaagttctatctgttcatttttaactactaagtgtaattccaaattgttttctttaatggaaacaatagatcttttcttttttgctacaccaatagcaattcttgcacactctttaataatagtatttgttatagtatcattattttctacagaaaaaagttttccaaaaaatatagaaatattactattaggtgaaaataaatctatatctatatcttgatccaaactaaaatgataactaccagtacttgttggtagcaacggttcaagttcaaacgcactagtaatagtatcaacgatatcttgcagagtcatattattacctattaatagagttaactaacctaacgtcaaattatgaaaagactaaaactttatatgttactctcattatatatcatagcctaactacaattagagttttacaactcctcttctagaaactatccttttcctttttgtagatatatcttcttcttttttctttgttacaggaatatctgaaaatttttcttgaattttttgtttttcttcttctaaagttctaataacttctggaggaagttgtttaacaaactcttcaagtttttcttcagtaacaccaagagcttcaaggcgttcatcatattctttattaagcctctctaactcttgctttaattctaaatattgccgttcttgtgcttcaagatctttcttggtgaatgccatttgaaaactccttcttgggaaataccataaaagtattgcaatataaataaaaaataaaaaattttatattactgtgaaaaacagtataactttctttctattataaacaataaaataactatattctattgaaaaatatctcaaaaaaatacaaaatataatttgtcattgtaatatacaataatatttttactataaaaaagtatatgaattatatattataatagataaaaaataacaattaaaatttactgaggagattatgataacacatgaaattgaagagtttggtcgtcgtatgggaatgtcagacttagaactttctcaagatggtatcattgcatttgaagttgaagacctaggatctttacatatagagcaagatgaagaaaatgaagaactttttatatatttagcaacacctgtaccaccatataataatgatattcctaaaaaagttcttgaactatgtagttataagcatgcacatccatttatactacatggtggtatacataatgacaacgttatatttctttctagaattagctatcgtgatgtaaaagcatcaactattgaaaatacaacacaatttcttataagtattacacaaaaagtgttgtaatatatatatataataagatatataattgtatagtttttttatgatgtattataaaaataaattttatatacctttttatatatttatatataattactaaatatatattatataactatataagtgcattatagtaaagtttttactaagatagagagagtttaaaagtattatatttggatgaaaagattatctgaggggtaccatgctgctcacgtccgaacagcgacaaactttatatatcttaggatatctttacatacgcatgggtctaaatgactcagcagaaagactttttaaaacaatacttagtctctttcctgaagataaatggtctcatcgaagccttgcagtgatcgccatgaggaaaggtgatagtatttcttgcttagcacatatttataaagcagtagcaggggaacatagtatagtaaagcatgctccactacttcttttacaagcacaagcattatggaatcttggacgttattctgaatcaaggacatctatccaaaactatattaaaattagaggaagtcgaacatgagcttattcgctaaagctcaatcgactgtaggtgttattacacgaaataatgacatcactatggtccttttattagtgactgtcatagcattaatgattatcccattacctactcctttagtggatacactgattggtattaacatgggactttcatttcttattgtaatgatgtgtatgtatgttaagacagttttagatttttctgtttttcccactatgctcctttttacaaccctgttcagagttggtttaaatatcacaacgacaagacttattttactccaagcagatgctggagaaatcatttttatttttggtgaatttgccttaggtggaaactttgttgttggagcagttgtctttgtcattctaacaattgttcagttccttgttattgcaaaaggagctgaacgtgttgccgaagttggtgcacgctttacccttgatgctatgccaggaaaacagatgtctattgatgccgacatgcgcgcaggcgttattgacatggaagaagcccaaaaacgtcgtgcacgaataaatcaagaaagccaaatgtatggagctatggacggtgctatgaaatttgttaaaggtgatagcatcgcaggaatgataattgctgttgttaatattgttggaggtaccattattggggtcacacaacatggaatggctgcctctgatgccttacatgtttatggtattctgaccattggtgatggtttagtctcacaaattccatctctgttaatctccattgcagcagggattctgattactcgtactggtgactcagctgaaaatgttggttctcaaattggtgaacaaatatttaatcagcctaaagctcttttaatggcaggtggagttgtatttcttattgcactagttccaggttttccaaaaattcaactttttgccatttcagctactcttgcaggtattgggtatacactaaaacttattatgactaaccctgcacctaaaaatgcaaaacaaagtatagcaaaaacattagaacctacaacatcaccttcaaaaaaatcttctactgaacagaaggaatcaaaagaagagttttcaccaactgtacctattatattagatatatctcaacaaatgagtgaagagttagattatgattcactcaatgatgaacttataacattacgtcgtgttctatactttgatcttggtgtaccattccctggcattaatcttcgcatctcatcaaagctacatgaccttacttattccttaatgattaatgagattcctataaccaaaggaacacttgaaaaaggtatggtcttagcaagggatacaaaagaaaatttggcaatgcttggagtggaacctgaagaaaaagaaaaatttcttccagatgttgagtctctttgggttccagactctaaaaaagcattgcttgaacgggcaggaataacatgtatgacacatagtcgcattcttgcttaccacttatcccttgtcctttcacgccatgcttcaaactttctgggcatgcaagaaacaaaatatctcttggataaaatggaagaacgtgctcctgatttggttagagaaacaactcgattattacctgtacaaagaattgctgaaattttccaacgtcttgtacaagaacaaatttctatacgtgacttaagaagtatccttgaggctcttattgagtggagccctaaagaaaaagatactgttatgctcacagaatatgtccgaagtgcgttaaaacgtcaaataagttacatgtactctaaaggtcaaaacatgctacctgctgttcttcttgatccaaacgtagaagaaactattagaaaatctgtaagacaaacttctgctggggccttccttgcattagatccagaaacaacacaaatatttatggcatcccttaaagagtttgcatcagagaccaatctaacctatacccaaaaacctgttttaatcacttcaatggatattcgtcggtatgtacgtagactcatagagggagattattacaaccttcctgtagtgtcataccaagaacttacaccagaaatttctgtacaacctgttggaagaatacgtttctaaatacagagagtagtcatatggaaacgacaactatgacatatacagcaaaagcactttatttagtgcttgtgctatctatgccacctattcttgttgcatcacttgttggactttttgttagtttaattcaagcaattacacaacttcaagaacaaacacttgcatttggtataaaacttcttgctgttgtacttactcttttttttatgggtggatggttaacaggagaactctatagatatgctgaagaaattttcaatcgttttcatatcatgtaactattgcaataactatagttgacacacaaaattttattaggactattatgaattatgatcaaacaataggtgcacttggtgtatatgatcactttatagcattcttaataggaacaccaaggctcttcatgattattcaagttgttcccttcatgggcaataatattgtaacaggtcaacttagagttgttgttgttttctcattttatctattattatcacctgcacttgttgcacaactaccacatatacctgaagtagatccctcactccttcctcgtattttagcaatagtaataaaagagggctttataggattttttttaggataccttggaagtatggttttctggatgattgaaagcgtaggactctttattgataaccaaagaggagctgccatggcagcacagacagatcctttgtcagggagccaaacttctcctcttggttcttttctatttcaatgtcttgtgtatatcttttttaccagtggggcttttattacctttttaacacttatatacaaaacatatgaattctggccaccacatgaatttatccctatgagttggaaaatgcgtcttcctgaattaataataaaacaagtagattggcttatggcttatacaatgctacttgcaggtcctattgctgtagcatgtttacttacagatgtttcattaggacttgttaatcgctttgcatcccaacttaacgtttatgtccttgctatgcctataaaaagtgctgttgcggcttttctccttattttctatttcaaattacttctagaaaaagctacatttttatttaaaccttttgaaactgttctatttcaaattaagagtctcatacaatgagtggagatagcggagataaaacagaaccaccaaccccgaaaaagttgcgtgaagcaagagagcaaggtgacgttgctaaaagtcaagatgtcgctgctgctatgacaatgtttggtgcttcattatattttattggaatgtggcaagatgtctttagcaatttgcttaatttaattgaattaccaacaaaatttatacacctaccatttgaagaagcactccctgctacaataagcggaattgcatcaatagcttttagtatacttatacctatcattgctactcttatgtttttagctgttgctgcagatttaatgcaaataggcgtattattctctgtcaaatctgctatccctaaacttgataatcttaatcctaagaagtggttttcaaaagttttttctataaaaaatcttggagaatttgtaaaaaatattcttaaagttagtgtattaactattactgtatggattattttatcaaattatatcaaagaattatttgcaatagcttcaggaaatatttggagtttatggtacatattaggatctgttttaagggatctaacccttagcgtttctatggttttttctgtcattgcatgtatcgatttcatgtttcaaaaatggcaatacaataaacgtcaaatgatgagtaaacaagagatcaagcaagaatataaagatatggaaggtgatcctcttataaaaggaaaaagaaaacaacttcatcaagaaatggctatgcaaaaccctgtaaacaaagtaagaaaagccaaagttgttgtagttaatcctatccactatgctattgccattgactatgaaaaaggaaggacactccttcctgtaattctagcaaaaggtgaaggattattagcacaacgtatggtagctgtagcacaagaagaaggtattcctgttatgcaaaacattccactagctcatagcctttttatggatggaattgaagattcctatatccctagaaatcttattgcaccagttgctgaggttttacgctgggtaaactctttaaataaaaatatgatacataaacctatatctaatgatacttaaataacaaaaattttattatgtaatacaaaacataactattttattaataataattttattaataatagactaagctcctcactctaaaactatctgaaatatagttacgatcatgtgctatagtattagtgctattaaagtgaactatacttttttactaaaaaattactatgttagagcttaatggagttactgaagcaatggccccaaatcttgagctttatggtactgaacgttttgaaaaaacgcttgatatgaacaggaagaagtcattaaagggattaatagcagcagtaaatcaaacaataatagaacatagaggagaagctgaacaatctgacgatataacgatgttagcatttatgtataagtagagagagttgttgtgtgtgtgtgtgtgtgtgtgtagagaggtgtttgttaaaaggaaaggctctctgatagagagccttttttataaaaaagtcttggcatcgacctactttcccacacataaatatgcagtatcatcggcgatggagggcttaactgccgagttcgggatggtatcgggtgtaccccctcctccatggacaccaagacaaaatatgtataggggatgaagaaagtaaaatagagcaagcctcacggactattagtactggtcagctgaatacgtcaccgtacttacacctccagcctatcaaccaggtagtctacctgggtcctttagcctctttcgaggggggagaactaatcttgaggcgggcttcccgcttagatgctttcagcggttatcccttccacacatagctactctgctatgccactggcgtgacaacagaaccaccagcggtgcgtccatcccggtcctctcgtactagggaaagaccctctcaattctccttcgtccacagaagataaggaccaaactgtctcacgacgttttaaacccagctcgcgtaccactttaaacggcgaacagccgtacccttgggacctgcttcagccccaggatgtgatgagccgacatcgaggtgccaaaccgcatcgtcgatatgaactcttggatgcgatcagcctgttatccccggcgtaccttttatccaatgagcgatggcccttccattcgggaccaccggatcactaacgccaactttcgttcctgctcgacatgtctgtcttgcagtcaagctcccttatgtgtttgcactcaacgcctggtttccgatcaggctgagggaacctttgcatgcctccgttacattttaggaggcgaccgccccagtcaaactacccaccagacactgtctcctgccaggctaactggtcagggttaggatcttaaacgtgtaagggtggtatttcaaggttgcctccgcctatactggcgtataggtttcactggctcccacctatcctacacatacaagcccaaaatccaatgtcaagctatagtaaaggtgcacagggtcttcctgtctttctgcggatacacggcattttcaccgcgacttcaatttcaccgagtctctggccgagacagtgtggagatcgttacgccattcgtgcaggtcggaacttacccgacaaggaatttcgctaccttaggaccgttatagttacggccgccgtttactggggcttcaatttggtgctttgcttgcgctaacacctccttttaaccttccagcaccgggcaggcgtcagtccctatacgtcgtcttttggactttgcagagacctatgtttttagtaaacagtcgccaccaccaattcactgcggcttccaggagctccaatagttttattttcacccccaaaagcgccccttcttccgaagttacagggccattttgccgagttccttggccagagttctctcgagcgccttggatttctcatcctacccacctgagttggtttgcggtacggtttgatacatatatgcttagaagcttttcttggcagtataggctcaacagcttcagaacttacgttcacgggttcgcatctcgaatacatctggtggatttgcctgccagacagttctacatgcttgcaccaggacttccaacacctggcctgcctaccttcctgcgtccctccatcacgctatgtatcaagtacaggaatattaacctgtttcccatcagctacggctttcgcccttaccttagggaccgactaaccctgggaagattacctttacccaggaaacctcgggttttcggcgaataggtttttcacctattttatcgttactcatgtcagcataatcacttctctactgtccacaaaacctctcgattttgcttcagcctatagagaacgctcccctacccattgccttacggcaatgccaaagcttcggtaccatacttagccccgttacattttcggcgcagaatcattagaccagtgagctattacgctttctttaaacgatggctgcttctaagccaacgtcctggctgtatatacaactccaccacctttcccactgagtatggatttggagaccttagctgttggtctgggctctttccctctcgacgacggaccttcgcacccgccgtctgactcctgggatacaattagatggcattcagagtttgatagagtttggtaatctggtaggacccctagctctttcagtgctttacctccattaatcaatcccaaggctatacctcaatatatttcggggagaaccagctatcaccaggtttgattgacctttcacccctatccacaagtcatccaaaacgttttcagccgttactggttcggtcctccacaaggctttacccttgcttcaacctgctcatggatagatcacctggtttcgggtctaatccaacgtactgacggcctattcagcctcgctttcactacggctacacttacgcttaaccttgcacgttagattaactcgctgactcattatgcaaaaggcatgtggtcacatcttaaagatgctcccacagcttgtaggcaactggtttcagattctatttcactccccttacaggggttcttttcacctttccctcacggtacttgttcactatcggtcgctgaggagtacttagccttggaggatgggccccccagattcccacaaggttacacgtgcctcgcagtactcaggtaccgactatgtctttttcaggttcagatacgaggctatcactctctatggcggaactttccagttctcttctcctgcttactccagaatcacgtatgtcggccctacaaccccaaccagtcgaaactgtttggtttaggctcttcccggttcgctcgccactactacgggagtctcttttgatttcctttcctccaggtactgagatgtttcacttccctgggttagcttcattgacctatgtattcagtcaatgatactgggacattactcccagtgggtttccccattcagacatcaccggatcataggatgtttagcgcctccccgatgcttatcgcagcttaccacgtctttcttcgcctctcagcgccaaggcatccaccttgttgcccttattatcttgtctcttaagaacttcctttcattccctattcaattgttaaagagcctgaacatttatcatgttcccaggtctctcctggatgacttccacaagtatcttgcgaaacttaccagacaagaccttccttcttctggtggaggtgaagggatttgaacccatgaccctctgcgtgcaaagcagatgctctcccaactgagctacacccccacgcctttcaacctctttcttccgtcttaccttgttgttctagtatctttcaactttagacacaccttatggtgggcctggaaagacttgaactttcgacctcacgcttatcaggcgtgcgctctaaccacctgagctacaggcccttactgccttcttctttgctctttgcaagtaaagagtgaatgggaattttcttcgttaaaggaggtgatccagccgcaggttcccctacggctaccttgttacgacttcaccccaatcattagccctaccgtagacgactgcctcgattgctcgttagctcgccggctttgggtaaaaccaactttcgtggtgtgacgggcggtgtgtacaaggcccgggaacgcattcacccgagcatgctgatctcggattactagcgattccgacttcatggagtcgagttgcagactccaatccggactgagatgcattttttgggattggctccaccttgcggtcttgctgccctttgtgtgcaccattgtagtacgtgtgtagccccaggcgtaagggccatgatgacttgacgtcgtccccaccttcctccccgttaaccggagcagtctctctagagtgcccaactttacttgatggcaactaaagataagggttgcgctcgttgcgggacttaacccaacacctcacggcacgagctgacgacagccatgcagcacctgtcttgaggctccccgaaaggcacctcttaatctcttaagagtccctcagatgtcaagcctgggtaaggttcttcgcgttgcatcgaattaaaccacatactccaccgcttgtgcgggcccccgtcaatttctttgagtttcagccttgcgaccgtactccccaggcggggtgcttaacgcgttagctacggcaccgaagataactccccagcacctagcacccatcgtttacagcgtggactaccagggtatctaatcctgtttgctccccacgctttcgcacctcagtgtcagttatcgtccaggtggccgccttcgccactggtgttcctccagatatctacggatttcacccctacacctggaattccgccaccctctccgatactcaagttatacagtatcaaaggctgttccaccgttaagcggtgggctttcacccctgacttatataaccacctacgcgcgctttacgcccagtaattccgattaacgcttgcaccctccgtattaccgcggctgctggcacggagttagccggtgcttcctctgggggtaccgtcaaaaatagaccctattagagcccatccatttcttcccccctgacagaggtttacgatccaaagaccttcatccctcacgcggcgtcgctgcgtcaggctttcgcccattgcgcaatattccccactgctgcctcccgtaggagtctggaccgtgttccagttccagtgtggccgattatcctcttagatcggctacccatcatcgccttggtgagcatttacctcaccaactagctaatgggacgcggactcatcttcaagcgatagcttacatacagaggctaccctttgcactacaactttttaccataatggttatccggtattagcgaccgtttccagccgttatccccgtctcgaaggtagattatccacgcgttactcacccgtgcgccactttactcatcccgaaggactttcacgttcgacttgcatgtgttaagcacgccgccagcgttcaatctgagccagaatcaaactctccagtttaattcacaatttctatatagtcacttccgtgactcttaactcaaagtcttgttccctctcactcttcacttgtcaaagaacaactctgctaatacttctttaaaatatcttccagcagagagggaggtctacacctataacgaccaatctgtcaacaacttttttaaataaaaaaacatcaatattcactaaccactttcaattacagtattaaaaaatatttttaaattttgaagtacaaacttactattaagaatatcatttcaaaaatatagttaatcagtcttccataaaaatataatgcatttgatatgtattttactacaatatcataattaagcacttgctcaaaaaagcagaggagagtatttagtactgtaagactgtttttacattaactagagttggttatacttaacttcctagcacctatagcttatatagaaggataaatagatgagaggatactatacctataactattcttttatagtataatattatcatactgactaaactagtcttaaaaaatgtaactacttttactaatcaaaaaatataacacatgcgttactttaattttcataatcttgctagacaacttattatatctcctaagttttttcttatcatttgctcatttatttatttaacctatattttgcttctacccttagttcatgctaataatgatacaaataataaccttaatacagatttaactttttctcctgaagaaacatcaactggtattataacagatagagtaaccccattattagattggattttagatcaatcaggtcaacttacaattaatcaagttctctctccagaagtacaacgaactttctcatcatttctatttactgaccttcctaagcaggaaggaactttttggtttcgttttgtaattgactcaacaaacaggctttcttcatctgactttatacttgatttaagtaaacgtactcctactcagttccctgaaccaacacaagtatgggttgtgtctatgggctctgggaaagcaacactaattaatccaattaaagataatagttatccaatcaaatactcaggagctgaagtccttgaagtatatataaagctacctggtgcaccaggagttggttttactcctgttctctggacaaaaaaaagcttttcgaccttttatgcttctatgcatgttgctatattatttttgcttgcaattactattgctatctgtcttattcgagcatttacagaaaaacaagaatggagaatttgggctgcactttattcaggatctattctaataagcacactatggggacttcctcctacccctaaggggatacttactatttgggatatacctggtttactagctccaggaatagcactatttattctaccacacataggtagacgcctgatgaacacaaggcaagtatcacctcatattgatatacaacttttacttcttactcttccaggattagttttatcaattcttcctcttattcctggatatctttggactttaccatatctttctgtttggccacttataactattctctttttacccacttgtttgtatgcaagattttgtgatctaaaacaatcaaaaacattttttactatatgtgcattcccatctattgggatattgcctcttgctatttctatcaactctatgcctcaatatattcctataggtctaattaacctctttcctataataacacttactctaagtgctatgcttgttgcacttgtacctaatccaaaaccttcttctggagctatacgacgggaacacccttcttctaacataaaaataccatctatacctaataaacaaaataagatacagatgaagaaagaagaagaacaaagaacaacaactacaaatttaaatatagaaagtcttgaacaacagctacgtgcacctttagagcgtatacgtaaagaattaagtatacttaatacatcgctacagtcgacacccttacaacagcacattgaatctattgaaaatacagccgaaggtctttctcatattattaatgatatacctgaactatttatctccaaaactcatactgacaaagaaatttttgacttaaaccaaatagttctgggtatccatgatgctgtcaataacgatgcagaaagtaaaaatcttgctttttcttggtttatagcaccgcatctttatcaaaaatatgaaggtaacccaacgcagctaacacaagtcctttatatgcttgttgaaagctccatacaagctacagaaaaaggacttgtacaactacgtattcaacgggtacctaatagtataaaccctggagaactacttattacagtttctgactctgggaaaggatcaccaccaattacacgtagcccgcttgctcttattcatgcttgggaattagcaactagcactggtggctctgtgacaatgaaaagtgagccaacaggaacaactatctcatttagtatctccctcactgctaaacaaacaactacgtctttatcccaccaacatgatgagtcaattactactactgaacagccaacaacacaattatcacaaattattattgttgatattgtccctagcaatagacaacttttaacttactacttagatgaacttccctataatatctttgaagcacaagatgttactactgtctataatctatataaacaatctccaggagcagttatcatttttggaccagaactgtctgaaactattgctattgaaacaataggagctattagagtatttgagggagaacacaacttccttcctgcaccaatattagctatttgcaaaacagaagctcaaaaagaaagactcctaagaataggctgtacccatgtaattatcgaaccattaactcgtaagacctttcgacaaactatattacagttatcgcctatttctagccatacccaagctatacctagtcctcttttggaatcaacatctaaaaaaatcaaacagacagcacctactagttctgttaactcaaaactaatagacacagtaaatgattcacaaataccatgcatggagacgcctatacaggatatacccatatctcctcatgcctctctctattctgaagataatacttcagagtatactcatgaaaaaaaggggatagcactcctaaaaaccccagatcaaattaaaacaaaaaaactttctataattaaaggagaacctacacctatttcttcttcgactcatcaacaaaggaatgatacatctctaaccaataatgttagctacaaagtagaacaatatcctcttatgagttcatcagagtgggttggtgaacctactcctattactaagcaaaaaacttctactaataaaacttcagctagattatcgcaacattcatcagaatgggttggtgagcctattcctattataaaacgaaaaaaaccaccaataaccccacctaaaaatgatcctttacataatactgtagagtgggttggtgaacctatgcctattactatagcacagcaaaaatcattaacaattgaacaacaacctatagttaatctaacaatagaagatgaacaactatcctcagaaaaaagaaaaattgttgaggaaaactatacgacaactatagaaaaaacactgtcagcagaacctaaaccacacgagcaacttgcaactattactaaagaaaagatagaacacattgaacctatagtaacaacaaatgatatacataaaaataacctattagagaatggtacatcttttaatgaaaaatcagttatactacaaaactctatagagatacctgaagatttatcaatttattccccaagtttacacattcaaaattcccctgaaaaatcttttttatcatcacaaagtgaacctgataacaactctcaatgcattaataactcatcaaaagaaatagatacaattcaagaagttcccataacatcatctgactcggctattatcaatcaaaaagataataaacatcatgataacctattaacagctactacaactagacaaaagaagcataataattctcgtcaaaaaaactctcgacatcaaaaatcatcactatcattattagatatgataacaataccaacagaagagaaccaagaaacaaaccatacacaaaaagctcttaatactgatagctacttatctatggttggacaccctgagataccagaagaacatatcataacattaacagaaacagtagatacatacaaaaaagacacattatcagtaaaaaaagacataccagacttatttagtgttcaccatccaacagaagtcatagaagattttacttatccaaaggagcagtctgaacaactaagtatgatgcaactttttagctcaacacttaacattgtcgaagaaaacgacttgggaactcattctaaggaacttttccaagaattagatattacattaggattattacaacaagctatccaaacaaaacaatctgaaaatcttgtatccttttcacaggtcattttatctctctctgaacaactaaagttaaaacatctaaaaacactttcttactctttactcgacgctatccaaacaagtaaagaagatataatagaacaacttattaaagatataaaagcagaagtacaacataaccaaggggatactacagacttattatagtctcaaaggatggtagtatattaacactaaccttttcatgtctcccttataatcatagcaaattttattgatatattttttatctaatataagttaaaaactaatatgtttaattcataatactctcaaagacaaaaatgaaaaatttaacttaacgaaaataatacttaggttaccttttaggcatactccaccataaactaacaaaaaattcacctgccaacttcaaaaagaatatataaaaaaataaggtacaataagttgccttatagtatttcttagagttatacatcgttatcaaaataaaaagagctgctcttatcaacaatctttcccagaatgacataataaaaggtctaatatgcaaaatatacgctctagttatactgactctattaatttctttggtaagacatcacctgaagaactaataaaaatttatggttcacctttatatgtatataatgaatccataatccgacaacgatgtaaagaaataaaaagtctatcttcctatccaaatttttttgtatcttattctgctaaagcaaatacaaatcctacattactctctattattaaagatgaaggatgtcttgtagatgctatgtctcctggagaagtatatctccataaaaaagtaggatttaagtctgatgaaatactttatgtatgtaacaacatttctgcagaagaaattcaatatgctattgataacaaaatccttcttagtatagactcactttctcaacttgaaacctatgggaaacttaatcctggggggaaaataatggtccgtattaaccctgggataggtacaggacatcataaaaaagttataactgctggaaaagaaacaaaatttggaattaatacagaacagtttagtgatgtaaaaaaaatagtagatacgtatcaattgatgctagttggaataaatcaacatataggttctcttttcttagatccccaaaattatcttgactctattgcttttcttcttcaatttatagacaataacccttggatttttgaacagctagaaattatagattttggtggtggttttggtattccttacaaaaaatatgaagaacaaccacgacttgatctcaaaaaaatgtcagaacagttcaatacaaaaattatggactgggtagcatcaactggttataaaggacgtttctatattgagcctggccgttatatcattgcagaaagtgggatattacttggttctgtacatgttgttaaatataatggtcctatacgctatataggaacagatgtaggattcaatgtccttatgagacctgtattatatgatgcttatcatgagattgaagtctatcgtaaaaatggtacaccagacttacagcttattccacagactgtagtaggaaacatttgtgaaagcggtgacattatagcaaataagcgtcctctacctctcattcaagaaggagatataattggtatcttagatgtaggcgcttatggatttgttatgtcatcaaactataatcaacgtccaagaccagctgaagttctcattcaacagaatggtgaaccaaagcttattcgtaagcgtgaaacaattgaagatatgaatattcaacttcattaacatgttataaatcaggacataccttatgccttctttttcttttgtattaagatgttgcctgctctttttaatggtactaacctcacaaaccttgtctgtttcacagccactaagagaagaagctgaagggaatttaccacaacatattgaagctaccttaactaaccttattgaagcaacttcttcaacaaaacaatacccttctgtttcacagcttgatacaatccttcaatttgtaacatcgactaatgaacaggctcataaaatccttccagccacacgtgattatggtaaaggtattttttataaaactactataaatattccactgtctaccttaattaaatattttcttaacccagaaattccaggagaagcactttatcctacaagtatccgtcgtaatgtatggcaagaaggaagtgaaatcctccaaaatagtaatatattcttagcagcacctcttcctccccaaaaacctattttctctcgaggaacagaatatgaagaaataactcctgatatatctagcggatgttattataactatattttaaaaagactatttattttatataaatttaagagtgaaacagcgtttattactgtttcatttatgccaaaagaatcatctgttggattacgtggcggtgttattggtaaagatactgagtgggattatgtctatggtccagacataggcacaaacctgcctatgctaacatgggcaaaaacatatctttatggttcagcaactattaacattttcacccaaaaacctaatagtcctactacagatatttatatattcaaatggacaagtgctggctggtcagggatgaatgttgtaacacataaacacattagaaatggggttattcgctttatttcaggtttgaaacaaattatggaatccccttatctcccctcagaacaagaaattattaaaaaacatagcgagcttaacacaatgagtcttaatgaattacaatctgctctcaaaccatttgcatcaaaacttgcagcaaaaagtcttaaagattctactctatcaaaagataattttcaaaaaattctaaaaaatgacgtctaccctacaacactaacaaaagaaaatgctgttgctgaacttttaaaacgttatatgaagcaaaaaattaatcaaactatggaaggaaagacaactatcacatcaaaaaaataacttattgtaatataaaaaaggtaaataaaccttttcataaaaacattaaaaaaagtaaccatactatagttaataccttttataatacttttagtcttgcaagtagggttgttattatgaatgatggatgtcttcctgaagaatttagacaacatcaaatagatgatatatattttgaagaatcctatgagtcaatggatcctcaacacagggtatggattaaaacaactttagctctaacaggagcattttataatatattccctggtagaacaatatctactcaagaaaatctgtctattggttttcaactaaaaaaaacttttaaaccttttcattggaccatcttactcttagatgaacattatatgtcttcgccaagaattgcagcagcaattatgcctgcacagcttgctggagttaaaaacattatagctgtttggaccagtaaaaataaccgactgaccgctgaaaaaatctcacctgctttactaacaacattagaactttcaggagttaacatagccctaacacttacccacactgaaactgaacttcttattcatcaattaatgaaaataggtattggaaacctgttatattttttaaaagaagaagacatactacatatatctactatacctgtactacctttctggaaagaatatacttctcatcgacttgttatagaaaaagatgctggcattaatacagaaatcctccaatgggcacatcctcattcaattatagaacaaatagcaacagaaccatactctgaagatatcccagatgcactttactgtgctagctcatccagtaaaaactatacatcatacagaatcccaagaatttttcataatggacttgaagcatattggattcatccaacactttctccagcctcctttctccatacaacatgggatttatctttgctagaacaagactaacctatacaataaacataattaatataagatagttactctaactaataataaaatacatgaactaaaattataattccctaataagttaattatctaacgacataaagtacatagcaagtaatctaagcaatgcatagaaaaattgattgccagttaggccttttcctgtcacgatatcttaatgaaaccactgcataatatcatccttattatgtctatagctttaatgggagttatgggcgtatccattattcttccagtccttcctctacttgcccatatatttgaacttactcctactgaagtaggacttattataacctgtttttcattgccaagtgctttatttactcctgttgccggaattattgctgatctttatggaagaaaaaaaattcttttattaggtctggccctttttgcacttggaggagttggatgtgcactctctacctcctttaaaggacttcttttttgtagagctatccaaggtcttggagcagcgcctctaggaatactctacagtactatcattggagacctttataatgaagaagagcgtcctaaaatgatgggcatagctggtgcgacaataagtattggaacagcaatatatccggcactaggtggatttgttggagaaattcactggactcttccattctggttttccttattatctctccctgtagcaatcatagcccttatttatccctatccttataaaggaacaaaaacatctatcaaagactacacaaaaatttctggaaaacttatttttcattcacattcagtaggccttttaagtattacttttctttgttttagcattctgtatggcccaatacttacctatttccctttaattgcaaatttactctatcaagcttcacctatccagataggtataacctttagtattgcctgcttaggtactgcaattatcgctattaatcttgcacaacttagtaggacatatagtcacaaaaaactgcttattatagctgctggttgttactttatttcccaaggacttgttattattctcccattacaaagccaaaatatttggctacttacattacctatttttgttttaggaatagcacaaggtatatcatttcctttagtaaacagccacattacatcacttgcaccaacatccaacagagctattgttatggctataaacagtacatttatgaggttaagtcagagtatttcgccaattgtttttggtattggatggtcattttttggttggcctggtccttttatatttggtctttttacttctattatattagccctcttaattatgaaagtattttcaagatgtaacccaatatcacctatttttgataactagtaaattttattattaaaaagcttagttagttaagattacatatattatatacaattactataacattaactaattactaactattacttccaattgattaattgatgctatttaaagaggatatattaatgatgtcatggctcacaataggtgttatccttggattagtgcaagggatcacagaatttcttcctgtttcctcaacaggtcatttgattattgtagctaagtttcttcactttacaggctctaaagcaagtgtgttcgaagttgctgtacaacttggatccattatggctgtagttgtcatttactggaatagatttataggactaataaggccagaaaagaataaaaaatttacaggactatatggtatttggcttttatttttaacaacattaccgccaggaatcataggatttttatttcatagctatataaaaacacttttcaccataccaagtgttatagctgcattaacaactggctctatatttatgttgattagcgaacagttatgtagaaatatttctcaacgtatagttacacttgacgaattaacgcctaagactgctcttggaattggcttttttgaatgtttagctctttggccaggattttcccgttctgcagcaacaattatgggaggaatgcttcttggggcaaagcgtcatcttgctgctgaatattcttttattgctgctgtgcctgttatgtttgcagctacaggctatgatctccttaaaaattgggatctttttactgccaatgatcttcctctttttattacaggaatgatatgtgccttcttagcggcttggataacaattaaagtttttatcttacttataagtaaaatctcattgcggccatttgcttattatcgtcttctattagcatttattgtatatttatgtattaaataatatacccaggtcgactatacatacatctaattcataacaattgaaaactatataatataaatgttaatcaaagtctgctaataacgtaccaaaagaaagtgtaccaaaagttaaattatgaaaatctgcatggatgcgagcaactgctgcatgcaatacaggagatgaaatacctttatatattgaagtatgtgcctctaagaaagcagcaagactatcacatgcttttaatagttgaccgtcttttggatcaaattcatctttattgttaaacaattgaagctcttcaaagttcttaatacgttttacccctgagctatcttgtattgtttcttgaaattcggatgtaacatcttcaccaagtagccctaagtagtattgcaatctatgtacaagatctatataacctgacttccgcaatggtacaaaaatacgtctctctaattcttgtaattcatactcttttaacaatattgaaaattgatccacagaacgctttacaggtgttataatatcacgagtcaaaagctctggtaaatcatgaaataacccagcaaaaaaattgtttacacatcttgctggacaacaacctataacaagactacaaaaatatacatatccagctactaaaaacatatgacctaaaactgatgtttcaggaacacgaggagtatccgaccaacgaatttgaaaacgtaattgcccgcttaaccttgcaaaatgtccaagtgctgtaggattctctataaaaaaagcctctccttggattaagtcttgtacccctgtaagttcttttaaggcaaaaagttcagagataaaaaaatgggaaatattttttgtctcctcatcaaaggtattaaaaggttgaataagtgcaaattcccatcctgatgcatacaacctagctgccttaataattttgtctgcaagttctgttcgatctgtttggtaatgatattttaccatacgatcccaaaaatccctactcaatggttctacaattggttttaatttatttaatacccaatcagtaagttgtcttttatgaatgtgatgttcacaaattctatgaaaaatttgtggtgtaatatctgttactattaaaccaaataaataatcaaataatcctctctcaataacagtttgttgtaatgctatcttttccgattcagaggcatgacgactatttaataaagtaagcatccaagcaataatcattttatgaccttgcttatctacttcataaagttctataggacgaagcttatcattccatcgacgcatagatgcacctaaaaacataatttgtaacagactcttacgaatagaagacataccttctccatataactatcttatttttattgtaaactttgaagctatacctgacaaggtttaactaattaacaaatcatcttttttcctgcttgacaagaagtatctagtaatttatgaaatatgtagtatttttattcataaaaaacaggagacgcttcgcaaatgaagacgtttagcccaaagccagaacatattagccaccaatggtttctagttgatgcacataataaaattcttggtcgtcttgccgctcaaattgcccatagacttcgtggaaagcataaacctgaatttgctccacatatcgataacggagactatattgttgtagtcaattgtgaacagattaaagttactggtaacaagcaagaacaaaaaaaatactatcgtcattctggatatgtaggcggactaaaagaaacaacattaaaaacacttcttgaaaaaaaaccagcagaagtacttatacatgctgttcgtggtatgcttcctaaaaatcgtcttggtcgtgctatgttaaaaaaacttaaagtctatgctggaccggagcatcaacatatagctcaacagcctattcctttaagtcttccttattaatgacattaggagtttattatgtcaactgaatttaattatgctacaggtcgtcgtaaaacagctgtagcacgtacaagactctaccctggaaatggaactattaaaattaatggtcgtcctcttgaaaattattttcctagaaaatcattacagatgattatccgtcaaccactagtccatacaaaactattagataaatatgatataaaaattaatgtaagtggtgggggagtatctggtcaagctgaagctgtacgtcatggaatttctcgtgcacttcttgaagttaatccagaacttcgttcccttttaaaacctgtaggctttttaacacgtgatgcacgacaaaaagaaagaaaaaaatatgggttacgtgctgctcgagcaaaatatcaatattcaaagcgttaaaattttatattgtattgttactatattatcaactttttttaaaaagcatctgtactcttctaagagccagatgctttttaactaacttacttaagagttatataaaaaatctctgccataatgagcagataatatatatatatattaactaataactcttataattatgagatactgaatgaaagatgaatttttaactataacaccactaggaggattagaggaaattgggcttaactgccaactatgggaaacatccaaaggagttgttcttattgactgtggcatcatgtttccaaatgaacaacatcttgggattgatgttattattccacctattgatcctattttacatgtaaaaaatcgattactaggagttgttcttacccatggacatgaagatcatataggtgctatcccatggcttgtatgttttattcctggtctaaaaatctatggttctccctttactcttgcgctagttgagcacaaactcaaagaacgtaacctcctcagctcagcccaacttattgccgttactccaaaaactaaactcaatcttggtaacctttacttccaatttatttcagtaagtcattctattcctcaaagctatgcgcttgcagtgacaacacctgttggtaaaattattcattctggggattttaagatagatccaacaccatcagatggtattggcacagatttgcaatctattaaagaatttgctggtaatgatggtatacgacttttcctttcagactcaacaaacgcagatgagcaaggacataacctctctgaacaatatataaaaaaaaatttttatgaaatttttagtgaggcaaaaggaagaattattgttaccctttttgcaagtaatatagaacgaattcaaaccgtctgtgatttagtcaaagtttttaataaaaaattagtggtaacaggaagaagccttattaataatatagaaaaagctaaagagctaggttttctcaatatcccctataaattttttactgatcaaaatgtaccagacctgtctcctgaacagacagttattatcactactggttcacaaggagaacccctttcagccttagtgagaattatttcaggggaacatcgctatctctctatccatgaaggtgatactgttattatgtcttcaagagttctacctaatagtactttagcagtaaatcgccttataaatagaatataccgattaggagcaactgtttgtcttaatggacaaaaagcaattcatgtttcaggacatgcacgtcaggatgaattaaaaattttgctcacagtagttaatcctcaatattttgttcctatccacggagaatatagacaactatttcgacacaaagaacttgcaatgcaacatggaattccttctgaaaacatttttatccttgatgatggagagccccttacacttctcccaaccaaggtccgtaaagaaaaaaaaatacccttaaaatctattttgattgacggaaaaggtattggtgatgttgatagtagtgtacttagggaccgacaacttcttggaggtgatggtgtagttgttgtgtctcttactagagataagggaactggatctgttatgcaggggccttctattctttctcgaggccttatctttgaaaaaaaactaaattgtcttatagaagaagcaaaacaagttgttattgaaatattacaatcagatttaactctaacgactcaaaaactagaaaaaaaaatttgtacttcactacatagtttcttccgaaatgttattggaagagaacctattatcattcctatcattacagaaaactaatatttcttttattcttatattttttcttctacccactctaatatacatattatactataactataaataaaatacattaaactaatctattagaataatataatattttatacttaaactgtaaaatatgtatatatatatattttaatatagacactatattagaataactgttatgtaacttattcattagtagatgaagccataacatattgtagtgctcatactacaagaggtaaacatgagtaaaaatgtacatattgaccttaaaatcggaataagttttgctatttctacaggaacgtttcttattttaggattatatattctactttcaatacaaccaattattgatcaatttaaaatcacaatcttagaaacatctgatgctataagcatcactacacggctattaattacaatgaaagaagcttctataaactttcgcagttatactgtaagagcagatcaatctttctatgataattttactaaaaatatacatctttttaatacagcactagagcatgcacaaaaccttaatgatgattctatctcattaaaaatattaaataaaaacttgccacaagttatagctttaaaaaaagaatataaagaagttggccaaaaagtatacgatcttactgaaatgtttaaacaaaatacacctaaattagcctttcttttaagtgcatttatcaatgacatagaagagtttttaaaaactcttgaagagttagttcgaaatactggtggcaaagatgctgaagctttcaaactaatagttgatcttaaccaactcattgaaacatccttacttgctagaggagatttttggagaggagttagtaatgcaaatagcaatgcttttgaaacatgcttaaaaatactcaaaggcagtattagccatatggaagctatcaaagaagcaaattctgttaaagaatttactgctccatttgaatcgttaattttttcaatgaaaaatcttgaaaatatctttgtaactataattaataactatgagttagctcaagaaaatatacagaatcaagatgcaatcgtacagagtatcttaacactccttaatgaaatcctagaagaaaatatggataagataggaatagaatcaaagtcagcagttgaaaacttaaaacttataagaaatattgtgcttatgcttgtagcaataggtgtaatttttacaaatacagtaggatttattgttgcaaaaaaaataggagaaaaaacatataccccatcaaaataaaaggctattgttttaaatttgtttataaaaaatgaagtggtgcctggagcgggagttgaacccgcacagtgaattcaccgagggattttaagtcccttgcgtctaccagttccgccatccaggcaataaaacaaaaaaacagttagaagaggtgaaaaatacaatggttaagctttgtcgtcaagctgaacataacaatcttacagttcaaaccaattaacgaaattacaaatatacataacttactaagtattaagtattttttctatttattgctttttaaaattatatctaattccaaggaggaatagtaaaagtatatttttgaaacgtcttatctgaagctacaactccttgtaactgattcaagtctctactaataagtaaaaactttccatttataccatcacaagtgtagttacttaaggcttcacataattcattatattttctatcattcatgtcttcaaacgaacattgaacctgtaacccatctcctactggtgtaaaatcaagatgtattgcatcaaaactattaagtatctgttgaacaaaaaaggtaagcctctcttctttactcattatttcttcataactaagttctatatcataaacaaaataacaaaaatactcataaggcaaatatgccataaatgctccaaaacttttgttgagtctttctaactcctgaattatattaagaaaatatattaacaaaaatcagaaaaactttctatatcttgtttttacattaattaaggttagatatgggaataaatgaactcaaaaggctatgtataataagctatgcaagacttggaatagcaggattatctcctattatgccaggtagttgtggttcactcatagcagcaatattagccccctggctattcattccattctcaacattcacaagaatattaattcttatttttattttttggacaggtagccttgttggaacaataattgaacaattactacaaaaaaaagaccccaaagaagttgtgattgatgaattactgggtctttggatagtattacttccattcaaaaatcctggatggatttttattggattagcatttattctttttcgtatttttgatattattaaaatatggcctgttaatgcatcagagaattggttacctggtggatatggaattatgattgatgatgtatttgcaggactacaagcattactcattataagtatactatactggacaggttatctcaaccaatggctttaatattcatatcattctcctctatgataagtaacacttatgatccagcctatccttatacatccctttttttgatttatttataatgttaataatctttactataaggagcactcatggcattacttcgctactacctcactataggaattatatttataactttgttaagttcagctactgcaacacaacccaaaacagaatctcctgaatctattcttaataaacctgaaaaatctacaaaacgtaatacaactatttcaatcgaatttgaaggtactgatagtattggttctaaactttccacccgcatcaaagaattaatgaatgcaagtaatcttttcacacttacagaaaaagattcccctaaaattcgtattctgcttgctacaatgtcagagttttctcaacgtccaagtattggctcagtatattctgttgtgtggcttttttcacaatcagaaacaacactaaaacattttcttgcaaaaaaaataggtgtacttactgctgatgaagtagaccaagttgcagcaatgattgtagagcaaacagatacacttgctgtacgctatggttatctactcccataagattgtgtataatatattccattcccccctccacataaaaaataccggtaggcaaaccggtattttttcggaggtagactctaaataaatttgagctctcctgctcctgactactatcaggagagagtaccactaacgcttcatatttacaactgtctctaacatttggtcaatagtagttacaattttactatttgactggaatccacgttgtgttgcaatcattgagacaaactctgtagatatatctacgtttgatccttctaaagtattagcgttaattgaaccaaacccagaagtgtttgcagcacctgaagatgggtcccctgattctcttgtttgactaaataagttaccaccttcacgacgtaacccctgtttagagttaaaatcataaagagctacttgatataatggaagttgtactccatttgaatatactccaaataacactccctcagcatttacactatagttcattaaatcaccaaaaccataaccattttgacttgcagattttgtagagctaccacctgcatagttagtaaacgcatttgataagcggtttggtgttccattcatattagctaagtctttaacatttggtggatcattagcttctaatatacctgatgcagcattatgaggccaatgttcctttttaatgtcagctgcggtaccacctgcggcagttaatgcagtcttatatgcagcctgataagaagcttcatttttatatacatatggtggactctgtggaactgtgttatcatagttagggttaccaaaataatattgtggcattaccccagcaggattttccaatatctgagccataccaagttcagttactgatggagctggagttttatacccaccaactgtccaaccacctgcgacatccataggattatgtgtttttttatagcttaaagaagaaagaggttcatttgcattcttccatgtattatcaagatcagtagcttttaaaccaaagtcaatttctgtaaaaaaggtggtagcatcaccaacagatccagctgtatttttacctgggacaccagtaaaattagctacaatcataggaaatccattattagaaacttctgctggatagaagttttcagctggattatctatattaagaataggaattgcatttccatctctatcaatagtaaaaccattaccattaataagagctccggttgcaggatcaactgcaggcttacgtgaaccattcagcgaatatgcactttggtttgcaagttttcctgagctatcaaaactcaatgttcctgacattaacattcctgcagctttagtatctttgatgtccacaatgttaccaccaacagaaacttggcgattatcttcagaaggatccatagtaacaacgtattcccatacactttctccacttccaccacctttgtagtctttaggagaaacttggtcaaaatagactgttaatgtatgtgttccaccagcttcatcatataccttaatagatgtctgataactatatgcactttcaggcataggtggattgttaggttcacttggttgtttaccattccatatattaaataatgaggtaaatggactattaacgttttgagatttatctccagatttatcagaagaaaggtttacgttaaaacttacatttgttgtctgtaaaggtgcaactgtccaagtatcaagacggatatctgttggttcacctgtacccataatctgcgaagtatttgtacctggattaacaccacctgagatacgttgtggcccttcagtattatcaattttccaaccctgaagagcatatccatgaggatcaactaagtatccatcattattaaaacgaaaattacctgcacgggtataatatgaagtctctgatccttgtggtttaactttgaaaaatccacgaccaccaatagcaaggtctgttgcttcagttgtggtttcaaaactaccctgaccaaagttccccatgacagctccaatgcctacaccacgtccaatttgtgtaatccctgcagtactaaagccatcttgataaataaagtctgcgaaatccatacgttggcctttaaagcctactgtatttacgttagctatgttattaccaataacattcatcttttcgccatgacttaaaagtcctgaaacacctgtccacattcctgctgtaagactcatagtaatcaacctccgaatgtattttactctgcctgttgcctcaggtttttccagagtttagttttaattatatataatctaccttacctagataacttctcttttatagtgggtaatagctgatacaaatcctgcatcccagaaccttcagatccctctgtaccattagtttcaccaggatctgaattatccccaccacctgactcaccgtcttctgaatcaccactgtctgtgtcatcaccgggctcaactgtttttggctgaaccacttcacgaacatttgaaagagctactagacgtccatcagaaagacgtaataattgatccccttgatacattgtaacagcttctacttttccacttacagatgtgtctactaaaactggagcacctgctgaattttgacctgcgatattaactgtataaactccatcagaaactttacttccattaggaagcagcccatcccaatcaaaatcatgaataccaggtgcctttgagtccaattgaactgttgtaattagttgattagaagcatcaaaaatatttacataacctttaaccatttcttcattaattgcatattgaatattagaaatagtatcacctttaacggatacaccataaccacgagcagcaacttctttaccaataaaacttgcagcactaatcatttgttgttgtgtctgtaaatttaataaagactccatcttttcatttgtactcatctgctgctcaagagcagagaactgtgctaattgagcaataaattctttatcttccatagggttcagggggtcttgatatttaaactgggttacaagtaatttaagaaaatcttccttacccagttcacttttaccagcctgctgagaaaaaatcccagttgctgagctaactcctgaagcaccattagttggcatgataaaactcctttatgcaatgatatctactcggctggtatttcctgccgtcatactgttattatgcatgttatgtgccaaggaaatttctaccccattatcttcttgtcctactcttccaagcatgcgtaatctctcaagatcccttactctttcagattgttcttgagagctattatgctgatccataccttgccaatgcatattttgttcgtctttcaactgtgtttgtacttctactttagctaccttaagaccttgttgttctagctccgcacgtaagctatccatctgttgcagtaatgcagctgttgtttcagcacgttcagggcgcaatagtgcactcacctccccattctttgttgtaagcaaaacattcactgttccaagttcaagagggttaagtgtcaactctaatttactggttccattacgaagtgcagaaaatgccccttgctctatttgagaaaacattctagctgctaaacgatctattgcagttagttgagcattttgttgtataggttgttgaagaggaataactgtccccacagattgatttacccctaaacgttgtgcaagagattcccatgggttagaactagttgtagtaacaccttttcccttattatcagacaataaacccttactatcttgtccattatttttttcaaataatccatcaccactattcttaccttgaaataaattttctttatcaccagtttgaggttgaaattgcccggcaaattttgccgaatctgtattttgtcttgcaccctgtattttattaagagtttcactagctacgtcttgttgttgagtattagctattccattttttgtaactgtatcctgagtttgttctgcaccctgtattttattaagagtttcactagctacgtcttgttgttggatattagctattccattctttgtaactgtatcctgaataagaattttactctgctctgatcgtcttgactcaatagtcccagctgaaatctcctcatccatacgctttttagcttctttaattacaggcattaatgcaccttcaagttggcttgccaacttactctgtgcatcaattttatttgtcatttgttgttgaagtggtacaagtaaatttcttaactgatcaggagtaagggataactctttacttcccttaaaactttttgataatgcatccaatgttgcagagtttgcccctaacgcctttccaagagaaacaatttctttatgactaattgaaagttttacatttggatcataacttgataatgctttacttaaacgatcccatgcttgaacagaacgtccttgtctgaaatcactaagaactctctctcctaactgacctgaactatccagtttatttgctagtgatctaatatttatcatatcgctttcactaagacgcacaggagcttcataagctactgcttgtatgacatcaccaatagctgttccattaggtgaaccaagaagattctgaacagtttcagttgcagcaccttgggctgctaatgaatcaataaccttttgcaactcgctatctgtaaaacgtatatcatcaatagaagaagaggatggatataatgtacttacatctactctaagctctgcactattatcataaggagcttctgtactaaaaaatgatgtatttttatctacagaatcataaaataaatttggcgtaatttcagctggagtatttttaaaaaacttagtaaagagctgattaaaagcaaagctatctctaccattacctctagataatgatgaagcttctttataaagcatatcggaagaaataggaaaaatctgcatggctatactccttgtaggcaaaatagtacaaggagtgttccaaaaattttaatgtgtgtattcccaagaagatacgattattagattaagattctaggtaacttttacctattaattaatactccatactaattctagcctactactaaaatacaaaaaatatctaataaaaaatatagttatgatgaaaagttgatagtagatagcttactaacattgagaagcaaaactaaaagtttctattaacgaagaaagcaatgtacctgtttttttccatgctttattactaaatttattattttgtaataacaaatcaatataacctgtagctggccttaatgcaggcataacgctgaaccaatatttacttggaacaatatcacttccttttttaagaacttttgcaacattcttactaagacttaataatgttttttgcatagggttacacatatgaggagcattctcaaaaaataacttagaaacaggtataagtttgtctgacattccaccaagcattgcaataaaccactctttccaaaataaacctaataaatgtctctgatgctcaatattgggaagcaatggaaccaaagtaaataatcctcgttcatctctacttgttttatatatatgtaacccagaaaatattgatttctctaaagaactattctctattaaatgaacaataagtctacctattttccctggggtaaataaactccggcaactaaaatctctcccctcacaattccaacaacctacacaactcatagctggcctaactacaatatgtccaggagatgcaggagctgtctcccatggatttacatttcccatagacaaattcaaaacaggagttcctgtccatgcagccaaatgcattggacctgtatctggagtaacaaataagtctagcttttgggaaaaaagtactaactcagaaagattaaatttcccagcaaaattattagacgaatttaactgagctatgtctatacactcttgagctaagctcctatcattaggacctccaagaaaaattgggtataagttatgccttattagataacgtgctagtaaaccccaaaactgtgcgttaggacgctttccagcctcgcttgcaccaacaaaaagtccaatatgtcctgaacttccaatattacgtaaaggtggccatataacctctttaaatgactgctctggaatcagccctaatgcttccaaatctgaccaatggaaaagattatgcctattattattaactatagaactacggtataatctccaatcacctgctatatataaaaaatcttcttgattaaaaatacctattttctcttcagtagttaatacaccagtaagttgagcagctatgtctctatggcttaaattaataacccgcctatagttccttaatttaagattaggtatcatagagtgatcaaaaaaaaccacttgaggagcaactgtaattaattctttaaaaaaatgaggttctgcaagaacccataaaggatgatttggctctaacatcaataatcttttacacaaatgaaatgatagtattaaatcacccattcgttgtaattgaataatcaatgttggactttgagtcatatcttcatattatcctttatatctcatggaaataaataagatagtttattatatttctttataattacaatcttattagtacaaaaagattatatcttccataatatatttaaaattatacactaaaaaactataaaaaatgccccagaaggaatatatccttttggggcatcaacactatacattaaaaggagaaaggaattattaaatatatagcaaattatatgccaaataatactattcattatctcttataataaagaggagttagatactgcttacttgtaataagaagtacaaaaatttatactacttaatagttatcttaaaatttatatataaaaacaaaaaattttttactactatttaaaataatgatatatacaaaaaaaactatgtttaactaaataaaaaaataaaaatttactattataatttataaaaactacttatttataatataatataaaattaaaatattcatttttttataattaatatagtaataaaaacattactacgatatatttgtagtataaaatttttacataatatattataatattataacaatgccggttatttgtcattagtattaagattggattgatataacagttaatagagtaaaaatatgatatgtaacatttctatatttattacttttttaagattggtatatccattgcatgatttatggtaaccaaccatttcaggaggtttgccatatgtctttggtcattaacaacaacatgatggctgcaaatgcagcccgtaacctcaatgaaagttattcacgacttagccaatcaacaagacgtctatcttctggacttcgtgttgggacagcagctgatgattcagcagggcttgctattagagaacttatgcgagccgatattaaaacatttcaacaaggtgcaagaaatgcaaatgatgctatttcattagtacaagttgcagatggggcactaggtgttatagatgaaaagcttatccgaatgaaagagcttgctgaacaagctgctacaggtacttataattcaacacaacgcttgattattgaatctgaatatcaagcaatggcttcagaaattacacgtatttctgttgcaacagaatttaatggtataaaattattagatggttctctatctggacctcataaaggaactaatctacaacaaacaggagctctaagagtacattttggtccagggaatagttcagcagaagactattatgaaattagcatacattccgctacagcttctgcactaggccttggaaatggaactactggtcctggtgctacaatctctactcaagctgcagcacaagcagcgttagacgccatcaatgatgctatcgtttctaaagataatattcgtgctagccttggtacgctacaaaataggttagaagcaacaattacaaacttaaatacccaagctgaaaacctccaggctgcagaatcacgaatttctgatatagacgtttcaacagaaatgactgaatttgtaagaaatcaaattttaacacaatctggagtagcaatgctttcacaggcaaactcactgccaaagatggcaagccaactcattagtggctaatccatcactacataatatggttaaggcagaccaaagacacatggcttggaggaaagaagttgttgtattcttttcttcaagccatgatacttattgatttattgtaccgttatgataatattgtctatttataatcttttcctgctctacttactttatatattaactatttttataactaataaaaagaatcatataagcttttacttatcattaactgattgacaatgcatcaaagactctaaagcaatacgtgcagcttcttgttctgccctttttaaacctgtaccactggctctaaaaacttggccatctggaagttcgacacaaacttcaaaaattttttcatgttcaggtccatgcattccttcaaggatatattttggtaatcccttaatatgtctttgtgtctcttcctgtaatcttgttttaaaatctttaactaatgcggcactttttttaggccaaaaattatcataactcttgctaattacttttcttgcataaaacaaatctccatcaacaaaaactgctccaaagacagcctccattgtatcagcaagtaaagtatttctttgtctgcctccctgattttcttctcctcgtgctaataaaagatattgattaagtttaagttctctagcaagaaggactaacatttttgtattaacaagattagatctcatccgagttaattctccctctcttgcctcaggatgacgtttaaataactcctcagagatacaaatttctaatacagcatctcctaaaaactctaacctttcattatgttctgctgttacatcattttcatttacccatgaactatgtgtcaatgctgttataagtaactgttcatctttaaaataatatcctaaatcttcttgtaattcttttaaatccatcttagccttcttttatcttttcacatttagtatataatagtatctatgattaataattattgtagtctaaacttgacataacaattaggactccctaactatgccaatagaacttcactaaggagattatactatgtcttatactatccgtatggtaaaactttttacaggtgaacttgtactaggaaaatttgatcctgaaaaaaatatacttaaggatgttgctttactacaagttatccccacacaacaaggtgctcaaatgatgatgttaccttatggatacccatttgaacaagaattttcaggaacaatagaagctaaattctttatttatgaatataaaaaagttcctgaagatcttgaaacaaaataccttgaagcctgcacaaatcttacactttcaacagctggggtaactcttacaggagcaactcctagtggaaaccccacaggattaattaaataacgatctagtatttatcaacttactggatgaaaaccatattctctttaagttaatctagttctaataatataactagattaacaaagagttttatactaatcttactgcattaatagttattactattaaatcaattgttactatagataataatagttatggttatgttatttttctttttaattaattatggtataaaaaaataagatacactactagctaaaaaataaaagtagacgaattataatagttataggtaaaaagaatataactaataaaaattcttataatattaagaactaacctaagttatagagcatatttatcactataaaaaatttttatcttacttttcctaacaaactagtaaaataatataatcctatgatataaattacactgatatctcattaacaaggtatttacttatatagctctagcagtcctttcggaggatttatcctaataagttgagcattagtgtcaacctctaatacaaattctggtatagctggtaaaagaacttctttcccttctggagtaatgatcgaccacaattcctgtcccccaggaaacgatacatattccaacttacctataacttcatctgtattatctaatactacagaaaaccctaatagatcacatagataagactcattactttctatctcaggtaaaaaacttcttgaaacaagtaatgtttgaccacgtaagacttctacagcacttctatcagaaaaacctttaaaacatactagagctactccttgatgaatacgagaggatataatttctgcctttttaggtaatgagttacttttttgaagaaagacttcacctaaaaaaacatcaatagaatccgtataacgtattaaacggatctcacccttaataccatgaggacgagataatactccgacagctacaagctgctctgacatatatgtagattattccaagatttcaagcattgtgcgtttttgtgctttagatgatgcggcacctagaagggtacgaatagcccttgctgtacgaccttgtctaccaataacctttccaaggtcttcttttgcaacacgtaattcaagaactgaagtttgttcaccttccacttcacacacctgcacttcttcaggattatctacaagggatttggcaacaaattctacaaaactttttaacatactaactctgttatttctcaaaagagaggttaaggaatgaaaaccatgtgtaactacacaaggcaaaactagatattatacattaactttactatatgctttaataatagagcgtacagtatctgaaggttgtgcaccaattgacagccatttttctactttttcgacatcaaccttgatagctgatggatttgtttgaggattatagtatcccaaatagtctaatggacgaccatcacgacgagtatgactgttgattgctacaatacgataaaatggacgttttttattacccatacgggtaagccttaactttacagacatattaaattctcctaacttttatgatatataactctcaaaaaaagaacaagaaaaaatacattaagaattaataaaaaaattaataggttactattcataataaaagcagcacttcataataatataaaagagctattttctttttttattcttatgtttctttttttcctttttcttttttgttgcagattttccactaccattcactccaccaattgaagttgaacgcaggacaggtcttccaaacagtccagggatacctggtaatgcactaaaacctattcctccctcaccaaaaaatgatcctaatccaaaaccaccttctcctgattctgcattcttcataagagaattatctgagacaactctctgcatcatttgcttcatttgatcaaatttctgaattgtttgattaactttattaagagtaacaccagcgcctctagcaatcctttgtcgtctacttgtatttaacaaatctggatttcgacgctctttaattgtcatagagttgataatagcttctgtataagaaaattcatcttctggaattgcaacacgaaatttactaacagcagaaccaaatccagggataagtttcattaaagaacttaatgaacctaattgtttcattcggcgtatttgactaaaaaaatcttcaaaattaaatgttgctttctgaattttttcagtaatagctttaagctcatcatcttcaaacgttgactgggctttttctataagtgtaagcatatctcccatgccaagaatacgtcctgctatacgatctggatgaaagacttcaaagtcagaaagtttctcaccggttcccacatacttaactggcacaccagtagatgaacaaatagatagtgctgcacctccacgtgcatctccatccatctttgtaagaatggcacctgttaatgaaagctttttattaaactcctctgcaacagttacaacatcttgacctgtcatagcatctgcaacaaaaagaatttcttgtggatgtgcaacaagttttatatctgtaagttcttgcattaatggttcatctatatgtaatctcccggctgtatctaacaaaacaactgtatactctttttcttttgcttcatgcagcgcagcattaataatatctaatggcttcattgccgcattagatgcaaaacatgggatattcagttgcgttgccaaagtttgtaattgttcaatagcagcaggtcgatatatatcaacaggaactaagtatggacgtaatccttgactctgtagtaaagaagcaagctttcctgtagatgtcgtttttcctgaaccttgtaacccaacaagcataataacacttaggggaaaatgcgttacatctaatttggtcgactttcctcctaataggttaacaagttcttcatgaaaaacctttataaactgttgtgcaggagtaagatgtttttctatagcttgtccaacaactttctcttttacatgctcaataaactttttaacaacgttaaaattaacatcagcttctaataacgctaaacgtacctcacgtaatccgtcacgaatattatcttccgtaagttgaccacgtttaccaatcgcatgcaatacactggataatctttcagataaactttcaaacatagatatctccaatcttgaactgcaggatcatagataaaaagcgttactttttgttgccttaaaagtcaatagaatgctattttttctattacaatataaaaaattaataataatttcatatggttaactaacattgttaagagaatgcattattatacaacaaatatgaaacagtttctacatgtggtgtatgaggaaataaatctacaggttgagtctgctgtatgacaaaatgaggacttagcatagcaatgtctcgtgcaaaggtcccaggattgcaagacacataaatacagcgtcgaggagcaaggcggataagcaattctataacttttttatctaaaccagcacgtggaggatctacaataactatatcaggagtaatacctttttgtatctgtgaacgaataaaactaaatgcatcatcttgtataaaagaacaattagtatagcctaaagataaacgatttttattagctaaattaatagatgcagcaattgactctactcctatcacctttaaagaaaaaggagctaaaaaaagagcaatagaacctactccagtgtataaatcccaaacaagttcttttcctgtaagttgagccatggaaagaatttttgagtaaagaatttcagttgcttttgtatttatttgaaaaaaattatcattccccctagataatacaatatcccctacttgttcctctaaaaatcgttctccctcatgccagattatatattcactataggctatatctgaaacctgagtcctccgagacaatataataccttttatagcttctactccttttagacactgagctaaccttttacctaatgcctgttcatcaaatttattctcaatcaatgtattttttttatttacaataagctcgacaaggatatcaccagttattgtctctcgaataataagaaaacgaaaatattttaatgtaagtatctttttttctaatgatgtctgttcgtgtctaacccaatgtcttactatctctactattttcatagtatttttggactgaagcaaacaatctgtaactggaatgacttcatgagaatcaactctttttaaacctaataatactgtacttagacaaggagatggagcaaacgcaaagaccatcttattacgatatctccactcacatggagaaggtataacatctaatattactggattgttcactttacctatacgttcaagagcatcttgtattatttgtttcttccaaataatttgatgtttatattgaatatgctgccatgtacaacctccacattgtattgcatgtatacatataggttctctttcatacttcgaaggttttattatctgtttaacttctccttctaaaaactttgagtgtacagatgtgatattaacaagaactttttgaccaggaactgtatgaggaacaaaaacaaccttattttcaaaacgtccaagccctcgaccatctgaaacaatagatgtaatatctaaaacaagttgatgttgaagataattcatatcctttttattattgttcactataaaacttaacctactttttaatataccaagttttatcgttcattattctgttctagtaaactaaataaatattcaccatattcattcttatgcatgggctctgcaagtttttttaattgaacatcatcaatataccctttacgccatgcaatttcctcaatacaaccaacttttgcaccttgtctctcttgaacggcttgaacaaaggctgctgcttgatgcattgactcaaatgttcctgtatccaaccaagcaactccacgcccaaaaatttcaacagaaagtccactgtcttgaagatatatattatttaaatccgtaatttcaagttcccctcttgcagaaggtttcaatgatgctgctttatttgatacgtcaccatcataaaaatataatcctgtgactgcataatgtgattttggattttgaggcttttcttcaatagttaatactttattattttcatcaaaagaaacaataccatatcgttcaggatcttttactctataagcaaaaactttccctccatactcaaggcctgtacaatcttcaagcatacaatataacttgtctccatgaaacaaattatctccaaggacaaggcaacaaggttctccagcaataaaatttcttgctaatataaatgcctcagccagaccattaggaaatgattgctttatatacgttaactgaagccctaactgtgaaccatcgccaaaaagatttataaagtcctgttgatgatgaggcgttgtgataaaacaaatttcacgtattcctgcttgcataaggatagataaaggataataaaccattggtttatcaaaaataggtattaactgcttgcaaactcccctagtaatagggtaaagacgtgttcctgagccacctgctaatataattcccttcatatcacctccaacaactacatgaaaaacataatctaatactaaaatcaaatactaaaaacatattttgactcacatatgatgcatattttttttacataaagtactaattgtatatatagtattaatcactttactggagtaaacgttatggatcttattttaattaaaagagcaatcttaagtgtcactcaaaaagatggccttatagaattagctacctttcttcataaacataatgtagagcttgtttctacaggaggaacattagctacattacattcagcagggttacctataactgctgttagttctgtaacaggattccctgaaattttaggaggacgtgtaaagactattcaccctaatattcatgcaggaattcttgcagataaaaacaattctgagcataccaacacattacaacagttaggtattcaaccatttgacttagtttgtgtaaacttatacgaatttgaaaaagctttaatgaaaaaatttaatccatatgaaatggtcgagaacattgatattggtggtccatgcatgttaagagcagcagcaaaaaattttcatagtgtactagtattacctagcccaaccttttactctgaagcaataaaagaattatctataaactctatgtatagctctctaaccttccgtaaaaaaatggcagctgaatcttttaaaataacttcacaatatgatactattattgcaacatatttagaaaataattagttcaaaaagcttgttatctatcttagataattatattaaaccgttataaatttttttgactgtaacttaataatatctaactgcaagactacaaccagaatttttatacctaaagaacaaaaggttaactaaccattggtagcctatatttaaattataataataaagaaagattaaactatctaaaactataatacacaacaaggcatagttatatgctccaccataatgaatacacgaatcctctcaatgtagtatgtgggattttatggcgtaatgaacgatttttagctactcaacgaccagtaaatcaaagccatgcaggatattgggaattccctgggggaaaagtagaattaggagagacactacacatagctcttaaaagagaacttaaagaagaattaggaactactatcttttcacctactttctattgcaaaataaatcataattatggagtaacaccacttcttatccacttttttcaaattacagtatttgaaggtgaacctactccacttgaaggacaaacattaagctggattacaccaaaagaagccaacaaccttcaattcttagaagcagacaaatttttactccaacagttacaacaacggtagagtgaaatactatagtactcttataacatagtgttataatcaacactatgttataaattttttgtagataataaaagaattatctaccctcttatataagctatgctatgaggtaatacgacttataccactctacaaacttcttaattccatattctataggagtattcggagaaaaatctacatcatgtttaagatcatctatatctgcccatgttgcttcaacatcaccaggttgcataggtaagtattcctttatagctttcttacctaactctacttcaagtacttctataaactcactcaactggacagtattattattaccgatattgtatatcttccaaggagccttacttgaagaaggatctggagaatgactattccaattctcatttatcttaggagtttttttcatcactcgaataactccctcaataatgtcatcaatatatgtaaaatctctcctcattcttccttcattaaatacactaataggttcaccagaaagaattgcctttgtaaaaaggaacaaagccatatctggtcttccccatggaccgtatacagtaaaaaagcgtaatcctgttgatggtagattatataaatgactataagcatgagccataagttcattagctttttttgaggctccgtataaacttataggatgattagtaccctgatgtactgaaaatggcattaacgtgttgagtccataaacagaacttgaagaagcaaaaactaaatgttccacttcagtatgacgacaacattcaagaatattcccaaatcctacaagattagattggatataagatgaagggttttcaatactatatcgtacacctgcctgtgcagctaagttgacaacatgactaaatcggtattgtaaaaaaagctcttgaaggttaggtagatttactatgtctatagaggaaaatgtaaaattaggctcatccattaaaagtgccaatctatcttttttcaaagtaactgaataatagtcattgagattatcaatacctacaactgaatgcccttcatcaagtaatcgacgacataaatggaaaccaataaaaccagcagcaccagtgacaagcacattcatactataaatctcctatagagtatgtaaactttgaatatgtttttttaaaaaacttagaagttgactgtaatacatttcattccctattaactcatctatatgttgtgtagttaccatatatctaccccagcatatttgaggaacaaaaagagaaaagttaggtaatcctagttgatttggagtaatacctgtcataaaaataacccaatttggcttaagatgctgtacaccactcataaacatttgcatattttcaaaggaggttgcatgatcagggaataaacataaaggccaaaatgcatggcttcctttagctaaagacaaatctttaatgagtcgatgtaataatcttcgacgatctggatttgcctctccccccaagtcataccctaactcttcatatgtccaaagtataaatggattctttggagtcctactcaaaatatctttccaagcaaacggccacttatctaacgggagtaatggtacactattttttgtatgtgtaacttgatgatgccttactttcactgcatcagatgagttgggctgaaatgatgggatagtattactattatcttttaatttttctttctcaaaagaaggtgattgaaatttattattataattctggtcactctttaataaagaaattaatgcttcattttctattaataaatgtgtaatacccgcctgtctccatggacgaaatatccctattacacctaaagagacttgatccatgaaagaattctccatgcaatatctgttttagtcatagcttcccaacgagcttcatgcccattcctatctaagataaagacactgccagatagagatgcaacactatctttaatataatttccaacaatcatatctgcctttttaacatataatttattctgtacagcttgttctaacccttcagattcaagtgcaaaaccaacaactttttggttacgagctttattattagaaagtttttgtaatatatctgtatttctaataaatcgtagtgtaaatccatcaccagcttcatcttttttaaatttaccttcaggacctttttctggcgaaaagtctgctactgcagcaacaaaaattcctatatcagaagttggccaaatactttctgcaacttcaaacatttgtaaagctgtagtaacagaataacggtgaattcctaaaggtaaccatggagagcctggcccacaaacagcatgaacttctgcacctctcatccaggcagcaacagctattgatgcacccataatacctgttgcaggattactccaaaatctcaatccatcccagggttctcgtgtaggacctagtgtaataagtatacgtaatcctgcaaaatcttgtggtgttatagacttaaggcctataagataaatatctctaagatctgccaggcgaccttgaccttcatctccacatgcaacacgcccttgctctggttcaataacaatacaccctcgatcttgaagaatttttatattttgctgtgttgaaggatggttccacatatttggattcattgcaggagcaataataggctgaccagaaaatgctaaagcttgacatgcaagtaattcatctgcctgtccatatgccaaccttgatatagttgaagctgaagcaggagcaataataaaagcttgtgctgttttcccaggttcaagatgtgagtatggatgacgaatatcatcaaacatcgttgtgtaaacaggatctgctccaacagaagaaaaagctaatggatttaaaaagttacaggctgcaggtgttagtgtgacactaacagaaagacctacatctttccaagctcgtactaaatcgattgctcgatatgcagcaattgacccacaaacacctaaatgtatctgtaataattcctgacaatgaaataaaaggtacttgtctatcattcgttaagtcctttctctcctaactctgtctcaaagtcacctataactccatgtgaagaataaggtgaatcttgacttattattgtttctctcgatagatttaattgatatgcaccatcatctaatcgagctaatacccaaacctctatagcagtagtcaactgctgattataaatatataatatagcataacgaccactcttttcatagagctgaattgttcgtttcccgtctataacacctctaagagtccatccctgacgagacatattatgtatcatagcagaacaaagagaagacctatcaacccttccttcaaacgtaagtagtcctattttttctccatctggccctacagaaacaagtgttcggttatgatctatactcatactctttggaatacaaatatctgggaagcttccataatacacatcgtctacatgtgcagttgaactagaaaaaggattgctaaaactagaaaagtcaaacttagaacaaccaactgttattatgcataaacaaacacaaaaatatattctcaacattaagatatctcctcaataactatttagaaatatagtagagtaaaatatagtagaataaattaaattggaataacataaatacatatcataacaattgctttatttctatgaaatagggatatcagttactcttaataaaattgaggattactaaaatatccttaaaagtaattctttacataaaatattaataagaagatttaataagaaatacctgaggacattatttgtatttagtatacttaaattggatttaactaactcttaaaaaataacttcagagtatgtgtcatatatatcaaaaaaagtaaaagttaaacttactaattaatatataaaaatttttcatttatcttataactaaatgttatccttaactaaaaaatatagcttattttactatatatatatatatctgaacaccatgctactaaaaaaacatatctttagttttgaagatcttcttgcatatcctaaaaatttacggcaaatacattgtaagacaactctattggcactcctttaacaataggtattagcttatggatgttcaaaagataaaagaacaacttagtcgtatcaagctctactactcacgtaacgaaacaattagagctcttggtgtagctgtagcaggtctcaaaggtatcgtaaagtctagcacgccaccacctacagaattacgcagccttttaagggaaggttctcaactactattacatgatgcattaatacagaaatatttgccagcccctataacttaccaacctggccaggaaaaacaactctttactgttttatcagaaacatacaaaaaaattattgaagatcaagaaaaagaaacatacttaaaaactagagaaagaaagcaatctttagatcaagcttttaaccttgggataaaattactagaacaaaaaaaaatatctgaagctgataaagctttcacagaagcattaacatactataaggacgaagaaagactcttttatcttattgctaaagcgcttattaaatctcatgaacctacacgtgcatttgactatataaaaaaagggcttacttttcatccaactaataatgatcttagcaaactatatgatatcgcaacacgcctaaaagctggtgaaacatctgcactagatgaactataaaataaatattctaccatgaactaatctcacctagctatatattatacaaaaaaccatgcaaaattatccattatgttttatacatgcatctgatctccatctagatactgtattttcaggtctgtcaaaagatattccttcaaacttagctacaatacttcataactccacttttgtagcttttaaccgtcttatacaattatgtattacacaccgtcctgactttctattactttctggtgatatctataacgaagaagattatagtatccgtgctatccttacattaagagatggctgttacaccttagaaaaagaaggaatacaagtctttattgttcatgggaatcatgatccttactcctcaagaatgaagtctatcacttggcctaaaaatgtcactatttttgatacagaggtaacaaatgtaccctatacagccaaagatggtacactccttgctcgaatatatggtataagtcatgcttcaaataaagaaagtaagaatcttgctctacaattccatcgaacagaagatacatgtttacacatagctatgcttcattgcactgtaggaagtccacaacactatgatagatatgctccttgctcaacaaaaaatcttatagatgcaggcatggattactgggcacttggacatgttcatgaatatcaagaaatttcacaagatccccttatagtgtaccctggatgtacacaaggccttcatatccatgagcaaggagaaaaaggatgtgtccttgtcacaactaaacaacaaggctcaaaacttactctatacaaaaaattttatacacttgggccagtattatggcacacacttactattcaacttggagatactaaccaacctactcttcaagaagatatctctaacacactatcccttgattatatagaagatacttttcataatgctcttaatgagcttatagctacatttactcctggctggcagatgctcattcttcgcctttcttttacaggttgtacatcacttgatcctctgttaagatatgggaataatctgaatgaccttcttgaaaggctaagggatgtagctagtagctcccaaccagtttggattaaagacattcaactgttaaccacatctccaaagtattatcatgaacttttagaaagagaagacttactaggtgaagttgtacgactttcaaaatcaattaatgaattagaaaatatagaacaaatacatacaacagctcttgctccactgttttcacatcataaacttcggaaaattcttaactatcctaaccagctagaatttaaacaacttttaacagaagctgagcgtctttgtgtcgaacttttagagaataattaatgcgtatccactccttccatatagattcgtttggattctttcataaccaaacaatttcaaatctttcaccgaaattttctatttttcttggaaacaatgaagcaggaaaatcaacgcttttggacttttttcgtcttacacttatgggctatccacaaagaaaaaacaatcgtatcaaaaactatctaaatggacatggacttcaaggaggaagtttagttcttgatactaactatggtaatatccatatcactcgacgtcctaataaaggaccagtaattatagatcaacatggaacccccatagatattacactatgggaacgcttattaagtggtattacccctgaagtttatacaaatatctatggatttagcctctcagaacttcaatcatttgaaacgcttagtactgataatatccggaatgcactctatggagcaagttttggtactggtttacagtccccaagtgaagttatcaagtcacttgataatactatgaatgaactcttcaaacctaaaggttcaacacaacctatagctgaacacttacatgactgggaagagattaacaaacaacttatagaagccgaaaaagaagctgcaaactacgataattatgcacttgaattaaaaaaaattacattaaaccttgaaagtctccattctaaatccaaagaattagaacaacaacaataccatttaaaaaaacgtcttgatatttggcatcaatgggaagaatggcgccttatacagacacgccttgaacaccttcctcccatatctgcatcatttccacaagatggtgcagctagaatggaacgtgcactggaaaaaaaagaacatgccgcacgtgaagttacccttgctagaacccgtcttaacaatacactgaataaaattcaacaatgtcatataaatcatgacatattgtgtattcataaagaacttcaaactattgctgaacataaatcaacctataaaacagcccttatagatattcctgccttagaagcaaaactacaacaaacaaaagaatctcttaaccaagaattattaatacttggtaaaaattggtctattgaaaaaataaacaaaattgatcgctctatatctgtacgtgaaaaacttgaacgcctttctgttgaaatagagctaactaaagaagcatatgatgctgcagccacagcatataataatatatgtgaagaattggaagttgcaaaacaagaagaaatagaaaaacaaaaaatctatgaatctcttccttcattacagactgtccttagtgatacaaacaaagacatccttagtcgtatgcttatacagatagaagaagctgaacgttatttaccagagaaaaaaagtcgctataattctctttatgaagatttcaaaaatcttttaacccaatttcatttacatcctaaatataataaaatagagacacttctaaagctgttaaatgaacaaaactctgctatagaaatggttaacaccatccaagaaaaagcattagaagaaatacaagctaataatttattaactcaaactaaacaaaaggtggaccaactaaaactccactcaaaacaaatagaagaacagatccaacagttaggggatgttgatacaaaagatattgtttcaatctattctcaaataaataccttacggacattactacacatcttttctacagaaaaaatacgtgctgaagaaatagaagattattatcaactacaagttgcaaataataacttcaataacaaaagctcacggtctattgtaataggaattctttctagtcttattggttgtggaatatttagtattcaacacttaatgaatagtaatatattgcctatttctcaaaacataataatcctgctacctctatggtctggctacttctttttaagttcaggaattgtcattatcttaaaaaaactattctataattaccttccactaactaaaaattctactattacaaaacaattacatacacgacatgaaaaggctctatccaaatgtactgaacttcaaaataaaatttatactatttgtaatgagctgcgtatagaaacaccctctttagaaaatattgagaagttaaattaccaaatagaacaaaaaaaagaattatatgataagaaagaacatttaaagcaagaacataataaatatcaaaaagagattgaatcactttatcaacaaatagatgtggctaaaaaagaacatgagcaaaaactagcagatgttattttagctaaaaatacttggtatgaatatgttttggagtttggaatacagtttgttcctaaaccagaacaagttactgcattctttgcacgtgtagaaacagcatgtaatttatggtctactatagaactattgaataatgatattgctgaacttgaatcttattacaaaaattttaaaaactttgtaaatcaaaccttaggggagtatctttcttctattgactgtgattctataccggctttgattaatgcagtaaaagatatcttaacttctcatcaagacgatgaattaaataatagctatacacaagctttagaagatttacagttagcacaagcacacactaaataccttatagattacttacaaaaactaaaaatacagtatgaacattccaagactaaatacgataagacttgttcagcctggagcaacaatctaagtaatcttatgttggatcctaacttggcgcctgatgcaataaaaaatatgttcaaacaaatggatcatattgcattgttaaaccaagagatgataaaaatccaaaataaacttgaacatcaacaaaacgaaaaaaatgcttttgttctcccactaaaacacctttgtcaacagttaggctatactccaaacagtgatgactggattacagttcttgatcaactccttaaagatgcaaccaatgccacattaatatctaatgaaaagaaaacacttgaagaacaaaaaagcgaatatgaaaatgaagtaaaatatactcaactcatcctcgatgacgcaaaccaatctgtctatagactactccaacttgccaatgtagatgatacagagactttctttcaacacgatatcattaaacaaaaacaagaagagctttataagcagcaagaagaaattgaagctattctaagattagctgctaaagatatttcttcctacaaatcctatcctgatttcaatatgtttttacaatcattttctgaaatagaaaaaaaagatttagaagtagaactgaatgaagtttcatcacgacttattgataataaaaaaagtatagataatttttctaatcaagcacgcacacttgaaatacgtttagaaaatcttatttcatctgatactctatatcaaatgaaagtaaaacaagcttctatagtacattctatgcaaaacattgcaaaaaaatggagttgttatgcgctagcaaaacagcttttaattgaagcaaagtctcactttgaacaggaacgtcagcctgaaattatacgtattgcatcccatatttttagtactattactggagggaaatggataggcatcaactcttcattagaagaaatgtcacttagtatattaccacctcatggagaacctataaagccagagcttcttagtaggggaacccaagaacaactttacttggcactacgtcttgcacatatccataatcatgccatccaagcaagtccattacctattattatggatgatattctagtcaactttgatcctgaaagagcaaaacatacaattagtacctttgtagaattaacaaactcttctcaagaacttcatatggggcatcagcttcttttttttacatgtcaccctcatattgcaaaacaacttcttgaaacaatccctgaaagtaacttatactatatagaaaacaaaaaaattactcttgcatcttgactctaattctatttacttaaaaaatttactaaaactcctatagcctaaactctttaatcattttttcaatagcttcttttgcaagctcctctgtagtaacccacttaccaccacgtttgataaatttattaagtgttaaaagattacttgcaagtcctacttgcttctcgctatagtgagatcttcctagtaatgctccttctccttttgtatctataagaaaaaaatctatagtcaactcagcagaagatgtcacacctgcactacttccctctctaggatgccaacttaaaacataaggtataatcaaaaactctacacctagttgttttcctacagcaacccaatattctagtgcactattaactccagccatacgtgtaattgtaggatctgcaccatcagctgctggaataaattcatattcacgtttagtttgtgctcttagcgtatctataatcaaagagcgaagttctataaggttttcctctgtagcaaaaccacgatcttctggtatataaccagctaaaagatctgttgttcccataggctgtataggtcctacaacaccaattgttaccttaggtaatacttcaggaatttctacaagttgttgcccacaagccccaagtaaactacttgttatcattaggataaatcctaactgtatcactttattcataaatttaacactcctcaattataccccataattttgataatctaaattctatcctgcttactatctatctattgttagataaggcttggttcaatataattctctaaagtaatttattgactattttcttttttctttgtgtcctgctgacaatgcaacaacccatatactcaactcgtataatatcaacataggaatagccataagtatttgagaaaaaacgtcaggaggtgtaagtatagctgctacaataaatactacaagaatagcatacttacgtatagaacgcattttttcagcattaataaggttcattttaccaagaaaaaatgcaaataaaggcatttcaaaaataagaccaaaagcaactaacatcttgagagaaaaagacaaataattactaagagatggcattgctacaatagtatctgtagaatagctcataaaaaaaacaaaaacaaaaggaaagacaaaaaaataacaaaatgccgcacctcctaaaaaaaatgcagctgaacatatagatagtggcaaaatatactttttctcttcatcataaagccctggggatataaataaccatatttggtaaaaaatataaggactagtaataaacagtgctgcaacaaaagctatcttaagatatacaaaaaaaccctcagggacactagtaaaaatcaattttgtgtctgctggcattacagttattaatgggagagcaagataatgaaatagtatatctgatatactataacatgtgataaatactactccaataacaataatacacttagtaagccttttccttaattctgataaatgctctaacaaaggcattccatatggtttctcatcatcatcagacattgttggaggtatccctccaccattattgtttcctccatttccacttgcagttattatgagcgatgtattatttactggaggtgttatacctggaagatatgcctgctcttgttctccatgcatactttctacaaatttttcttgtgagctatctaataacatattgctatcagtatcttttattgctccagagtcactcatcatattatcttgtattgaagactcttttttcatatagatgccttctcagcctgctctttattaagagaatgtttgccatcatccttatcattagaagacacaaatgaagtagatagtgtgtcgcttgtagataaaggactttcagatattgttgtctcattattatctacattattttttacactacttacggtgttacctgctttaactttcttttcatgctcttcaaatgttatctcagtattaagagtatgttgaaattctgaagaaacttgcctaaattctcttaaagcttttcctaatgtccttgcaatttggggaatactttttggtccaaggactagtaatgctacaagtaaaattaaaagaagttctgtaccaccaataccaaacatacaattttcctaatataaaaaaattgttaccctatttaaactttttgaattaccttccttttcctataactctctttatactaaaggaaaagatagaaaatctataactcataactaaaaagtttcactttaattaaaggtactccagtaaaatataactatactaaacagctaactactataaaaagatataataaaaagacctacattgtaatacatatcaagtcaacaaagtaagtctttctataaggtatcaagaactatctgtagttatctaatatattactcccactcaattgtactaggaggtttagacgaaatatcgtatacaaccctattaataccttttacttcatttataatccgtttagagatagtttccaaaagttgtgaaggtaaacgaacccaatcagctgtcatagcatctctactatcaacacaacgtaatgctatgacattttcgtatgttcttccatcccccataacaccaacagtctttagaggtaaaagaattgcaaaaccttgccaaattcttttataccaaccaaaacttttgagttcttcctcaacaattttatctgctttacgcaatatagttaaacgctcttgagtaacttcacctataatacggatggcaaggcctggaccaggaaagggatgtctccaaataatggaatctggtaatccaagctctacagcaactttacggacttcatctttaaatagttcttttaaaggttctataagtttcaaagacattttttctggaagtccaccaacattatgatgactctttataacaacacttgaacctctatgagggatagattctattatatctgaatataatgttccttgtgccaaaaagtctacttttccaattgctcttgcctcttcatcaaagacatcaataaaagtatgaccaataatttttcttttttcttcaggatcttgaataccttctagttgtttaaggaaacggtcttgtgcttggacaaaaataagatttaaatcaaagtgttcacgtaagtaagaaataacttcatccttttctccttcacgcaacaaaccattatcaacaaaaatacaatgaagtcttttaccaattgcttggtttaatataagagctacaactgtagagtctacaccaccagataatgcacaaacaacgtttccatcccctatcgttttctgtgcttgtgtgataatcttttctataaatgaagacatagtccaatcaggagcaatacctactatcttaaaaagaaagttacggataatttgttctccatcttctgaatgagaaacttccggatgaaactgtacagcatatacctttttctcttcatttgcgattgcacccacgttaagtgtgtttgttctcccaataactgtaaagtttggaggtggaaactctacagtatcaccatgagacatccagacacgagagaaaggtttatggctaataccatcccaaagaatagagtttccttctagtataaactcagcaggaccatattcacgtgtttgtgaatatgcaagaattcctccaaagcattgagcaataagttgcattccataacaaataccaagaataggtacattaaaatcaaagataatatcatctaactgtggggcatcagatgctcctacacttgcgggtcccccagacaaaataatcgctgatggttgtaaagaagctaaaacttctttactaacagtacaaggatacacttcagaatatacacctaactcacgtatccgacgtgctataagctgagtaaattgtgaaccataatctatcacaataactttattctgcatttgttacctttaactatattaagtcatattgttgtattaaaaatgagtagataaagacaaatttaatagtaaatttaacgatataaaataactagttatatctattaagtaactagggagtatctactcgataattaggggcttcttttgtaataataacatcgtgcacatgactttcacgtaaacctgctgaggaaataatcacaagttgagaagtattaaatagtgtttttaaatctgatgcaccacaatatcccataccagaagataaacctccaacaagttgataaattgtgtcggatacaggaccacgataaggaacacgcccaactattccttcgggaacaagtttcttatttgtgtcctggaagtatcgatcggaactcccatctttcattgcatcaatagaacccattcctctataaattttatatgttcttccctgatagagaattgtttctcctgggctttcttcagttccagcaaaaagactaccaaccataactgtattggcacctacagcaagtgctttaactacatctccagaaaatttaattccaccatcactgatacaacaccgatccatctcccttgcagccttagaacactccattactgctgttacttgaggaacaccaacacctgcaacaacacgtgtagtacaaatagaacctggaccaataccaaccttaattgcatcggcaccagctaatagtaaagacttggcagcctcatatgttgcaacatttcctgcaatgagctgacaattagggaaagaatgctttattacttttacagcatgaagaatattctttgagtgaccatgtgcagaatccaaaacaagaacatccactcctgccataagtaatgcttctgctcgagcctcacaatcagaacccacaccaattgctgctcccacacaaaggcgacctttgtcatctttacatgcattaggatatttttgtattttatcaatatccttcattgtaagtaatcctgctagttgccctgcttcattaacaaccaataacttctcaatgcgatgcatatgcaaatgatgttttgcttcatctaatgtagttccaacaggaactgtaacaagattttcacgtgtcattacttcgtgaacaaaagtattggagagatcttcaacaaaacgaacgtctctatttgtaacaatacctataagcgttttatcttgtactacaggtaagcctgaaactctatatagctgcataagttcaagtgcatgttcaactgtatcctctggccgaacagtcactgggtcaagaatcataccattttcagactttttaactttttctacctccatcttttgcctagagatactcatattcttatgaataatacctatacctccagctcttgccatagagattgccatagcagactctgtaacagtatccattgcagcagaaataaatgggatacttagcaatagtgatggtgttaaccaagcagaaatatttactttatcaggagtaacctcagagtatgcaggaattaataaaacatcatcaaacgttaacgctttataacgaattttatttgttatatcttgattcatacaaaaacactctgagttaaatagattaatctgacttgtgttattttcattgactaatttctaaagggaaagaatagagaaaccaaaatacatgataacataaaaaaatatctgatataaaaatataattcaacacgctgattgtcaatgtagattacaagttaccttattagtattaattctaacaagctagaaaataacatttttttaatacattctgtctttggtttaatcttctatatatttaatagtatcatactgtacaaagtatatttaactattcgttattattaataaaataaaaagagaatcaaattatgacagaattacaaaaaatgctatctggctatgaatttgaatctgaagataacgaaatttatgaaaggtctttaaaagctcaacgatatataaaaactttaaacgctcttgagccagaaagacctgagcaacaactttcgattttaaaacaactttttaattatgttagtccaacagtacgtctccaaacaccatttttttgttcttttggttttaatattaacattggaaacaacacatttattgatatgaattgtgtttttcttgactataacaatatcactattggcgaaggagttcttattggcccttgtgtaaatatttatactataacccatccaatatctgtacaagagagaaaacgacttgctcctaataaaaatgatgcaccactctataatgctactgctaatcctgtaaagattggagataatgtatggataggaggtggctctattattttaccaggagttgttataggtaataatacaaccattggtgcaggttctattgttactaaaagtatcccatctgatgtacttgctgtaggaaatccatgtcgtgttcttcgtaatcttcatccataatattatatattaaaaaattattcaaaaaagaaaatttctattcatttttctcaatgtaatttattattattattattattattatttaaaattatggtatgatgtatttctatcttgatataatgtatcctaactataatatataaatataattatattattcttatagttaacctacattattgtactctaatattactatgaattttatctttttttcttctattattgttatttattgtttagctatttttactgccgcacaggcattactccataaaaaagactcaaaatctgcatttggatggattgctataatttttatgctcccaattccaggaataatcttttactggctatttggtattgctcgtgttgatagtcgagcaagtcttttgatgggaaaagcagcttataaggtcttaggtgggaaaaaagatctccatactggcttttttgttaaggatcctcaaggattcattgatagcaaaactcttcctgtaaatatagcaaagctatctatgccaggacaaaaaatttctgatcattatgttgtaggaggaaataatgtctatccactttataatggagaagaagtataccccaaaatgcttgaagctatttcaaaagctacccatcgagtatatctttctacatttatttttgggaacgactttgttggaacactctttataaaaactataaatgaagctgcgattaggggatgtgaggtaaaaatattacttgatggtattggctcgttcttccctataaaaagttggagggaaaaattacatccagcaattaagctagcctatttcctatcaccaagcttactacctcccaaattatctataaacttgcgtaatcacagaaaaattcttgtatgtgatagcaatattgcattcactgggggaatgaatatctcacaacatcacttagtaactcttaaaaagtctaaccgtgtccaagacatacatttttattgtgcaggcccaattgctaaacaactcgagattgcatttctattagactggagtttcactacaggtgaaactgctcgtatcccttttgatccaataaaaaaacaaggatcaacactatgtcgtttaattattgatggtccaggctctcctcatgaaacaatccatgatttattctgtgctatgagttcatctgcacaaaaaaatatccgtattatgagcccttattttttgccaacacctcaactaagcgaagctttagcaagtgcagtattacgaggagtaactgttgatattatcattccattaaaaaataatcattacttactacagtgggcaatggcccatcaggctcctcaacttgtagataaaaatatacatctctttttacaaccaccaccctttgcacacacaaaactcttacttattgataatgattatacattaatgggatccgccaaccttgatccacgaagtttaaatcttaactttgaacttgtagtagaaaattttagtacaacacttactaacaatttaattgaattctttgataaaaaaaaatctcaatcctaccaactgactgaacatacaaaactaccgtctctccccatacgattacgtaatgctgccagctggctcttttcaccctatctataacattacctattattctttaacactattgtcctttctgatgtaaagaagaactttttttctttctctttctaaaagaactattgctacttcttaccttttctttttgcctataatagttccttgccttagtcctaccttttttaatattttctccactagtaggttgcatcatatgtaactcaaactctatttctaaccttaatatattcacagaacttactttaacagttagacgttgtcctaaataaaaacgttttcctgtccttacaccaagaagttcttgtctatcctgattatactcaaaccaatcatcctttagcgatgcaagccttaccataccttctataggcatagatattaattccacaaaaaaagcaaaatctgttattcctgtgacaatagcttcaaaaattttaccctcatctccttgtaggacaagacaacttaaccgcttagtaatttctctctctgcctcttgagctacacgttcatgtgaattacactgttctgcaatactaaaaagctgttgcccaaagggtatatgtttctgagtatctcctaaagcaaacttaacagctcgatgcacaagtaaatctgcataacgacggataggagatgtaaaatgacaatataaaggagatgctaagccaaaatgctctccaggttcaggagaatattttgcctgcatcattgaacgtaataccatacgactaatcaaaaatgtctgaggagtattttctgcttcttccaaaataccccccaacttctttgcatcaggactacctgacaattggcaagctaagtctgtagtcgctaatatccgaaaaagtttttctagacgctcaatatctggctctgggtgtatacggtataaaaaaggaatttgtttatcatgaagaaatgtagcaacagcttcatttacagctaacataagctcttctattaattgatgagaaaaaaaacgttcttgacgtataactcctatgactcgacgggttgctttattaattaaaaaacgtgtctctggaagatcaaactctaaacttcccctttttatacgattagcttgtaatactttagctaactcacttgcattattaagcattgacagggtatctattcccccagggagtcgacttatttctttaacttccaaagctaaatgtacttgctcatatgtaagacgtgcccgagaagatatcactccaggaaaaaatattacattcttagttttcccatcattatcaaaagaaatttttgtagccattactaaacgttcttcttttggctttaaactacaaaaatcattagataaaaactctggcaacatggattctacagagcatgggaaataatatgaattccctcgtgctaatgcttcactatctaataatgaacctgctctgacaaaatgactcacatcagcaatggcaacccataaatcccacccaatatctgttggataaacacaaatagcatcatcaaaatctttagcgtcttcaccatcaattgttacaaagtctattactcttaaatcttgccttatagctgtagaacattgtgaaatatcatcatatttctgatagggaacattatagaatactgctttactcttaataaaaaggtcttttgcaacattttcctcttttaatacatgtaaaggaaattcacatggaatattatagttaagtttcacaactttttcttgtactcgaacatcctcttcaacccccagtgagtattgagcaatacccatcaataactcaccatttgtatttggagttggtataataactaatagctcattttcaatgggtttttcaggtaactttgatgtgtctacaatgaatagtacattaagcttagagtctacaggatagcaaacaacccctcctttctcatgcttctggctaacacgaacaataacttctttacgaggtctttcaaggatctgtacaacctggccttcaaagtttttaccatgcttagtaggatagacaataacttgaactttatctccatcccatgcaccattttgaagttctggacggataaaaatatctgaatatggcttttgtgtattctgttgatcaacaataacaaacgctgctccagagcgctgtactacaaacgtccctataactttttgcataggtgatgctattgcccacttctcaccttttgtacaaactatctgaccttgtttctgtaacacgtttaatactaattctaaagcttgttttttttgcttagtaatttttaaacgtgtaatgatttcattactacttaaaggatgatcagaattatatagtaagcttagtatgtgtaatccatttattttactacctggctgaacactttgacgagtaatatagcttttaggtttatgtttttgtatcttacttgtcttttgtcccaatgtattatcttttgttttttgagagcgatgttgacttcttttcatctattaccttccaccactctatgtcaggtggctctttcactgttattatcattactatcattacgtagtatatctctttctcttttattagaaaaagtagcttcatccataacatgactaccatgataaaggttttggggagattctggaagtataacagtagtcctcatgttatctatctcttcatgatcatcagtatgttgtacttctacattgttattgttctgtataacactaacttcatcaacgtcactacgttcatcatcaaaaataattaaatcattagagacagccttatcttgaatagattgctcatactctggagggatactttcctctccctgctcttcaaaaaatagtgttaccgaactattaaatcctttgtaatcctctatatcttcccctaacgaatctacaatattatgatgcttttcatcccacaatgcagctaaccattgtgggaaactatactttgaccacaaatatccttcaaatactgtttttacttgtaatccccaaagttcactaacaggtaaccactgcagttttacaaagtctttcattgtacaaataataggaagattaaaagaaagaagtcgattaatatcttgaaaagtatatctatgatgatcagaaaaaatgatatgagtttctggagaataacctaaatatgactcaactgtatgtaatacctgatttggattccccacacctgtaactaaaatatatgagcggccagcaaactctttagctgttactgcctctgacaaacctgctccttttaataaaactggttttaaataaaaactaaagactggtttaccaaaatgaaataatctattttgaataataggcaaaagtgattgcattttttccttatctgccttgataagaaaagcacttgcatcctcaagtgcttggctaccttctctccatgagcctgctggaataactctattccattgttttgttaaatcttcctcacttaataatacaaagtctagagttttttttacaccaacctgctgaaatccatcatctaaaagtaataaatctggctttaatacttgtacagcatatcttcctgaacgaattctatttggatctactaaaatagatgcatttggatgctctaaagctaacataagaggttcatcaccaacttctttgggcttatggtgaggctttacatataaaggtaatatagtagaactattatccgacttatatcctcttgttaaaacagatactgataactgtttttgttctgcccaatcgagtaaccagtcgatcactggagtttttcctgtacctccccaagaaatattacctacagaaatacatggacaatatggatctagtcgacccaataaacctatctttccaatagctctacgtattctcataactagagtataaagatacgacaatggtaatagaataaatcctaaatttttttgtaattcaatgaaatccatttatgatttactccattaacatactgctatctaatcattgcttataataaaaaatctgacttattagttatatgttttcttacaaattcctttataaatataggcaattgcccagtttaaagatatcctgaaaactgggcaataattatgttaattaatagactagttagttaactcgcagtattaactgcttcaaagatagcagtatagttaggctcgtgtgtcatctcaggaacaatttcttgataggtaatcatcccgtttgtatcaacaacaaagacagcccgtgctaacaagcgcaactctttaatagctataccatatgcataaccaaaggaaagttctctatggtcagaaagtgtttctactgcactcacaccagtagctccacaccaacgtgcttgtgcaaaaggtaaatcacaactaatagttaagatacgaactttttcaccaagttttgctgcctcactattaaaacgttgtgtttctatatcacatactcctgtatctaatgaggggacagcacttaatattaatatattattagcatagtcacttaaagtccgaggagagagatcatttgcaagaactgtaaagtctggtgccttttcccctatagaaacaggattacccataagagttaatggattccctagaaaagttattatatccttacgttccttaaccatgtaaattctcctaaagacgaagctatcgtcaatcaataggttatatatatatatattactaattatatcataaaaatagcaaaggtaaacaaattaatctctatatattaccatcacggtatgatatactaattaacatactataaaaatcttgtatacctttcagttatacataccacatcttgagcttgataaagaataacatatgtgaaacataaaatcataaaaggactattataacaaataataagtaaaaactagttgctacattaaaacattagaatatttctaaaatgacttcccatcaatattatgataataaaataatacaaaatggatagataatattaaagtattattctaacccattaacctgtataatatactgcttcttcttgctatatatcaaaatataaaaaatacaaaagatgagcgtgttattagtccaatataggtagttatcttaatatgtattaaagtactctctgtggaacttacttaactcacatataaaaattattttaaccttaatattaattaatcaaaatttgttataacttctacaactaaaaaagattcttaaaattttttgtaataaccaaaaactaaggataataacaataatgtcataatatcaatatgatataacttagtattatttactatacaaaaattatactatattagttagtaactacctataagtaaaccgtataactaagtttagttattaaaattaatacatagtcttcatatcagacttaccaagttaagattatttttatattatactatatctataatctttagctataacctgttactttatttaaaatcttcatgagcaaaaataataagatatctattcctctcaataatacttattctttagtacgttgggacttactaaagtttgaacaacaactatgtaatagtattaaattaatccttccttttaaaaattatgctatttactttccacagcatcatctccccaaaaatcctgaatggcttcccgaagaacaaaaactatttcttccattctggtacaaagacgaattattaggcgttgtcatgattcgtaatcctgatcctaccttaacagagatgttactccctgttctgccagggttaactactttatttttagcacaacttgaacttcataaaaaagcacaacttgattttcttactggcctaatgacacgccaaaattttatccaattgcttacagaagaaatagagcttatccagtcctcactcaataataacagatatggtggagtagaagaaacaactcattataaaagcagtatagctgttataatcattcgttttaatggactatctaaattaacccacgaaataagctataactttgtagaaaatattattgctgatcttgctgatatttttatacaatccatacctaaccatacaattcctgcaagaactggtgagtatgaatttgcattactaataccagaaacaaatagatctcaatgtgatactatcgcaagcaaaatccttttttgtttaaatcaatataaaaaaccttctcccctaactgaccgttatatcagtattagccctcatgcaggctatgctatttatccacaagacatggatagaacaaaaaaagttactatggatacccatgttaacctcatcctacataaagcaggacttgctgctgaaacagcttactccagactttttcatggtgggaaaaatattatgggatatggaagccttctttatgaaggaggagaaatttgtcaaattctaccattagcacaagtcgctataaatttaggaagagaaattggagcctatgaaggacaacatttttctgtttggacaacacattatcataatcctaaaaagctaaaagaaaatcatattcccatctataaaggagaaattgtactgcttgaagtaaaagaaaccagtagtatagcagaaatagtttaccttggagatcctacacaacctttcgaaattggagatatgctcctactccttgatgaagaacatagtttattacaagaaaaatcttatgaaaggcaacaaaaaataaaaacacataaactagatcccacaacaggtctccttcaacattttgactttgtaacaaaattttcagaatcttatagaaaatatactcaattttctttagccattattcatacagctaataaaactttaaatagtacatctcaagaacaaataaaccactatatcaaagagatagcagtaaaatgtcatttattaaataataacctcaatgatagcgaattatttggtggacgatttgcacttaatagtcttatcttcttccatactaatactcaacctgaatcactttatgcacattacacagcattatctacaaaaatttctcaagaattaaatataactttaagcgtaggtattgcctattggccttttctaacattacaaccactagacattttagaatgttgtcgcaaagcattggaatatgctcttcttctaccaccccctcatgtagggatatttaactcactagctataaatatcagtgctgacaaaaaacactgtaggggagatttattcagtgctattgaagaatataaacttgctctacttgcagataaaaataatgctttagcacggaattcactaggtgtttgtattgcaagccttggacactacaatgaagcccaaaaacattttaaggaagcactccaactcttaccaacagaaccaatgatctcctataatcttggtatgacataccagaacttaggagatattacatctgcgactcaatacttccataactgtcttacactatgtccaacacatctatatgcagctattagacttggggctcttgcagagtctacaaataatactcaagaagcaataaaatattataaccaggcattatctataaataaaaaacatgcattaccatataggcatcttgcaatgcttgcttttaaagaggggaaaaaagaaaaagcaagagaatatcttcatcaggcactattatataatccacatgatacaactacacttatgcttatggcaaaaatgtatttagatagtggtgaagatcccgaaattgctgaaactctttctcgtcaatgtgttgctcaacggccagatattaaatcaaactggattgaatttgctagagctcttgaggcacaagggaaaaaaaaagaagcaaacaaagcttggctaaaagcaaatgaattataatagttacatatcttctgtaaaccaacactttttttattatttaaaagttttttaatttaccagctcgagttgaattaaaaacagctaataatgctacacctacatcagcaaatacagcttcccataatgtagaaaggcctgctataccaaaccccataataacagtttttatccctaacgctagtataatattttgtaaaacaataatgtatgtttttcgtgcaatacgtataagatctactacacgtactggtgaatcatctaaaattactgcatcagctacttcaatagctgattctgctcctaatttacccatagctacaccaacacctgaataagctaaaactggagcatcgttaataccatctcctacaaataatgtttgctcaataggcccaaatgactctatcacagcaaccttatcttcaggtaataaccctgccctatactcatctacctgtataatttttgctataccttcagcagagtcagggcgatctcctgttaacataaccactttattaacatatttttttaaacatcttatagcttctaccgcatccgactttaatgtatcagtaacaacaataacaccaaggtagttagcatccctagcaacatgtatgatactgccaggcctatctacgataataggctcaaaaccatgttcccttaacaaggtttcattgccaacaacaagagatgtctctttatatgttgcaacaatacctttccccgggatttcttttaatgctataccacttacctgaggtttttgattaacaatatctaaaataggacgaacaatagggtgagaagagtatgttacagccattgctgccgactgtagtaaatattcacgagagactcctttattaagaagtatccctgtaacttcaaatcttgccttagttaatgttcctgttttatcaaaagctacaattttaattttttgaagagcatcaaatacacttccacctttaacaagaataccttgacgtgaagcagcacctattccacctaaataccccagtggaatagaaataaggagtgcacaaggacaagaaatgacaattaaaattaatcctctatatatccactcctgtaaagttcctagtccaaacaatggaggtaatattgctactaaaatagcagataaaacaactaatggagtataataccttgcaaagcgtgttataaacctctctgtaggtgctttccgtgctactgcattttcaaccaactctaacattctggatatagaagaatccttataagttgctgtagcttttataattaatgaacccatgatattaatagttccaccaaagacttggctcccaacatgtacaacagtcggtactgactctccagtgagaggagaagtatcaacttgtgaagtacctgattctacaatgccatccaaaggtatcttttctcctggtcttacaagcaaattagctccaggctgcagagattcaggagaaacatcttgtatatgatttttttgcactaaatgtgcaatagaaggttttgttgccagtaaagccctaatggactttttagattttattaatgttctttcttgaatgtattcaccaatacgataaaaaaacatcactcccacagcttccgagaaatctccaagagcaatagctataagcgtagctccacccattaaggtaaattcattaaaaaaatctttgcgtaatacacacttcaaaccttgtagtaaaacactccatccacataaaacatatggtataccaaaaaaaattgcatctgtgacaactgaaagggaaaatttatataatttttcttgaaaaagaataccaataataaagaaaaggctagctatccatagtgaaggaggccacgaaacctcttcatctattgcattagtagaataaggttcaaaataaactccaggtaaaatctcacctgctatcttattaagttctattaagtctggggcactaccttctataacaagatgatgtgttaattcatcaatagaagcaaatgatattcctggtaaagactgtatttgctcttctatgcgaatagcgcaacctctacagtgcaaattatggatagtatatgtcatagttgccacaacatattgcttttattacattataattaataattaaatatgaaattagtgttaaaaatctacttaatgttatttcttccagtaaggataactatatctcatgatattttatattaaaaaatatgttatactataaatataagataagttatatctataatgaataatttcaatcagtaagtgccatataaaaaagtagtcctacgaatattaattaatatgtaataataaaataaaaaatactgttgttataacaaaataatatataactagtagtaattactccttttcaccccaaaataaccaaaggatttcttttgatgtaggctgtccctgatagctaccaataatgaaagctataccagataacagtaaagaaggaacaatagaataaacatttccaaaagaaaaattaaaaatacttatactccaaaaagtaatcattcctgtaataatagcacaaattgctcctgtagcatttgcttttttccaatatattccaaaaagaattggccaaagaaatacaacttcaaggccgccaaaagcaaaaagattaatccataccaatagcattggaggatctaacgctagaacaaaaacaagtaaacctaataacaatgtacatccagtacttatttgcttaatatgtttttgagaaacagacgaaatatcacctttccatttatagtgaatgtagacgtctttaacgataactgctgatgctaacaaaagcattgtatctacagttgacataatagctgctaatggacctgctatgaataatcctgcccaaaattctggaagtaattttactataagagatggcataacaaaatctcctatagataaatcaggtataataacacgcccgaatactcctgctaagtgtatatttaatagcataaatccaataacaactgtacctatgatcatagctttatgcattgaatatgaattcttataacccatacatttttgagcagtttgtgggagaccaagaacaccaaaaccaataagtatccaaaaagaaaacataagagtaggagatagaagtccatctggccctgttggagtaataagtccaggatctatattctttagggtaagaatacagttttctatcccaccaccattataaataacaacacataaaataagtatagaagaaatagccataactataccttgtaacgcgtctgtcgttactaccgccctgaacccaccaacaacagtataaaatgtcactgtaagaacaaaaatgacaagaccatactcataagagaaaccagttatggtttgaaaaagcctagctccaccaataaactgtgcaagcattgctgccataaaaaatgtaagtagccctatacaacaaaatacaacaagaatatcactttgatagcgaacacgaagaaaatctactaatgttactgcatttacctttcgtgccataatagcaaaccgcttcccaaggattccaagagttaaaaaagcaacaggagcttgaatcattgcaagtaaaacccaacttaatccatactcataagcagctccaggaccaccaataaaactacttgcacttgtataacttgctataatagacattgctaaaataaaaccacccatagagcggcttccaataaagtactctttaataaatgtatctgaatttgttatagtaagatgtttatttgtcagtagtgcaataaaaaaagtaagtcccaaatatatgataatgggaataaaaataatatactgctgcataattataataattctggatgatgttcactctgtatttgggagtttatatcatttgggtcataattttgaattggtgtatctaatggaacttctttaaaaaagtaatgaataataaaccataatatacaacaaagtaggggaaaccctataagacaactgaaaaaaaaccaacaagggaatcctaatatataactatacgttaggacattcccattacaaataacataggcaaaaagccaccaccatatactataaaaaatatatatacatgatgttaaccatgcctcataatttgattgtttatattgtttatatgtatgattcttatcatttcttgaaaaaatttctttacttaatctatgctgcataataataataataataataatatatacttttattagctgaactgttaaaagcctatcaacatactttctaataactaaaaaaagttatttagtctaatacgattttcttactcaacaaaaactctcttttaatgtcatctattcattaaggtttgacataaacaaaaccttctctttgtaactgaacaatttcaacaacaccagcaagagtaactgtgcaaaaaggaaataagtcttttgttgttataccaaattttcattgcattggcacacacgaaaaagtacacatttagccacaaaaggttaaaacttttcaaagtatatatattagttaaaagttgaccaacaccaatgcttgctaataaaataactgaatatttttcatctggtagtgctaatagtagtttattatattactaagaacttatatccaattctgagcgtcatctaagtctatatgaagtaataagtcataatacatataaattcttttataaaatattatagttagattattagaataatatattaatattatactaacatcattagctatctattataattagattatttatatagttatatacaacatataataaataatacatattaaaagaagtattactttatatataaaacatatttttatctaaccttattatttttctatctataactaattatgttacaacgccatattcttgtttcaccactctataaaaatactaaattatcttttattacatctgtaactcatggattaattattggagtctgtgttggaagtatcatttctttatataggttaacacacacagtatgtctcaattttatactacagatattacaccaatggttgaactatgtatgggtaatcccattatggttttgtatactttttatcatttcctggatcattggtaaacttgtagcttacgcaccacatattgccggtagtggtgtcccagaagtagagcttacacttacaggagatctccaattaccatggggaaaaattcttatttctaaatttataggaggctggctagctattttaggaggtctttctcttggacaagtaggtcctagtatccaaatgggaggactaataggagatggatttagtcgctattggctaaaacaacaatctaacttccatattattggagggattgctgcaggagtctgtgctgcatgcgatgccccaattgcaggcttattactagtttttgaacaaataaaatatcctataactatacgctctttaatcattactattttttctgtgattggtgcacaacttgtattaacctatggatttggtattaaaagaatgtttaactttgagtcatttcttagtcctatattaaatgaaacgccactacttatagctactggcattataatagggataggaggagcattatataacactatacttttatggttcagagagagggaaagtaaacaaaaagttgttcctaatcttttcagagcagctccccctctcttttgtgctggtgtattaattttttttctacctgaaattacagagggcggggaaaacctcatacgtcaacttcctagcttttcatactcattatattttttagcgattcttcttctatttaaagttattttctctgcatacagcactacaggaaacatccctggaggtatccttatgcctattctttcaataggtgctacctctggcctcatacttggtaacatgtttgctcaacaagaagttattggatatatgcaagcaaaaagttatcttatttatggtatggccgggttttttgcagcaactgttagagcacctctaacaagtataatattagtaacagagataacaggagcattacagtgtattccaggaacatttcttgtaggctttctaagtcattttacagctaacttagtacaatctacacctatctatacatctttaaaaaaacttgcttatctcagactttataataaccgtaatttatagtaattatcctgcttttatactaagctacaaaacataactcactctactcccttacttatcttagcataactataatttataagccctttaattattatcatgaaagaaacattacataattatacatttacgacaggagaaaaaattacagtcatagttaaaaaaggttcacctagacgtaaacatattgctatttgtataacaagtagaggacaagttgttattacaataccatatggagtaatgcaaaaagatgcattacaaataataaacaaaaaagaaaattggattaaacatcacctcattaaaactcttaacaaacctcaaccctctccattaacttatactacaggagaatcacatttatacttaggaaaaagatattctcttattgttcttaaagaaaaaaaatctcgactatccctgcaacaacgtatcatacttaacaaaaatgaaatccaggtaactccattttccaacaactcattaacagtcaaaaggcttctttttaaatggtactatgctgaagctcaacaatatattgcaaagcaattatatctacttttacaacaaatcccttggttacagacagttcctacatggaaaattaaagcaatgcggtgttgttggggaagttgttccccacatggcgtaattacaattaatacacacctcattaaagctccaacaatatgcattaattatgtgttacttcatgaaatagctcaccttaaggagcacaaccatagccataactattataaattattaacaaaactgatgccaaactggataaacataaaaactcaactagaaaatatagcaccatttgttttaatgagttagtaatattttttacaatataattaaaaagttaaataatataataccatatcaaaatatttttatttactctaattaatatatctagaagtgataaataaatatctttgaaatatagaattgactatattgtataataaatatagaatatacgttatttaataataaatattttaatattacagtacctttttaatgagaataaaaaatatacaaaatagaatataaaaaactcaattaatcaaactagacaacaaactactagctctctttaactgtatatttttattttaggattattacattgcgttttttagataaattttatgacatgaatagaactttacaggtaacacatggtaaaagaacagtccccttctacagttaggacaagatgtattaagcgtatagtagaccaatgttccctatggcatcactgcattcctatagcatttgcttttagtcttagtagtataggaaaaagttttctctttaccttaccattttggtctaaccactggaaacctaattcagaatcattttttattaataaaccttatgggctttggattacctcgataactattcttctacttggaatacttcttcactatactaataaattaaacaacgaaaattcgttaattcacaattttataaagtcattctcccatatcataaaacaagtagtacctataaaatctcataggattatattatggaaaaagagtcccttacaacctctctttgttacttatcttattgtaatactcttaaatatattatttgaacagtttcaaccctacttctcagacttattcaaagaaactatgtactctattgaactaggagtcatagtttttacaggattactatgtatttctattttcccacctgtttatgcatgtattacttatgccttagcgatagtatgtaatattgctttttatgaatgcacgctgtatattgatcccagctatatacatatgtttcaagtaatagcaccatttttagcacttccactttttattattggtattccccatttagaaccacactataacataacaaatcctaagaaagtatctagacctactgtcaacatttcaaatcacagtttacagtatgtagccctctcccttataggtttattatctacattccaattctttcttaatgctgcaacaatagatacatttatttttattaatgcttatctttcagaaaaatactctgcaacaatttttatgctcagcagtcagttaattgcagcaatttttgccatatggataattaaatctaaagataatgcacatcttatgttactgctttttatcctgggtctcttaggaatcagtactattctttatagtattcttatccaaaaaactgttccaatagctattctccaactagcttcaggcttaataacaatgttttgtataataacattttctatattagtgcatagtcaaaaatgtatgtataaaatacttgcactatcaatttttgttatgaatatagttggatatttttctggatatgcattatggaatatagcaatattcttaaaaaattcctctagctctattatacatatacacattcctatattaggaattgtttcagttttatcaattctattaattcaatctttatattaccatattatggatatatcctatctatgttatatattaagttctcatgataacagtatggatgtgtatgtttaccaagacaaactaaatacccttacacctagagaaaaagaaatattgagtcttgtacaacaagggttgaagaatattgagataagtaataggttaagcattacagaggggacgttacgtgttcatctacgtaatacttatcgtaagttaaatattcaaggacgacaaagcttaaaaagccttcctcataatttataagtatatagaaagtttattttacattcactccaaaacctataacagtaaaggatttgaatgttacataattctaaaataatctttcctaccttatctattcggatatattactttatcttctgtatattatctatagtggtgggctgtactgtttttctactagtaaagcaaaatgcttcagacttattcttatataatttgttaactatcaatacgactatacttaaaaataaaacttatcctcaacatatctttcaattaaataaaaatagtaaccaactattttctgaaaaaaatctttttaggaataatcaaaacgtacctaacctactatatagtaatactattcacaagtttactgaaaaaaatgatactaaagatacatttaatttattgctattatgttctatctttttttttgctataccatacatcattttttatttatttgtaatatatccatttatcaacttatgtcatacaatagaatatttatatagcaaaaatagtaataaaaaaatatttaaaactactatattcgaattcaaaaaaattatttctatagtccaaaaaaatattattaaacaacaagaattatatcataaactacaaattactaaaacagaaaaaaagtatattcaacgtattaatagtatagattacacaacagggctattagataaaaagtgtattaatacgtatttatcaaaatatcttggttatagtgtattaactatcttaatgatagatattgatcattttaaagcttataatgatacttttgggcatgttgctggagataaatgtcttgctgctgtagcaagatgtataaaaaatgcacttaaaagaaaagaagatattgtatttagatatggtggagaagaatttattgccttactcccaaacacggcaatatcaggtgcacatattgttgctcaacgtatccataactctcttacgcaaatgaaaattccaaacactacttcaacagtatacccgtttcttacagtaagtataggtattaatgaagtcttaccatacaaacatactacaccaatagacgctgtccatcatgcagatatagcactttatacagctaaacataatggtcgaagtcaaacagctgtccattctaattaactgggattaatatatgaagaaattcttgaagttataacatactaaagagcgacatcaaaccatacccttgctaaccaacctatcacaaatgatactcctgcaaccccaaaacttattataatcatctcttggaatgaaggtaaaaatggttttctatgaataactgagactacatatgtaaaacataaaataataagaccagcagtaataaggcaaaagataagtgctataataggtgaagaacatattataaatggaactaaaagtagagttactgttatgaggtatgttacaccagtatatatagctgcttttagtggatgtttatttgttttctcagatcttcgagcaagatattctgatgcagccattgaaagtgttgctgaaacccctgtaataaacccagccatactgattactttattatcgtggagtgcaaatgtaaatccagctaaagctcctgtaagctcaactaaagcatcattaagtccaagaaccattgaacttatataggttaaaccttcagactcaataagaacagcaaattgtgattcatgcttctcttcatctgccattatatctttagcctcaggaatttcgtcactaatactttgatatgcctcaattgcagcaatctctctagattctaataaattgataacaaagactaatccaaaaatttttcctaatagtgtgaaaatccatactcttattgaacttattgatgggctaccccctatatacttattccaaattttactatggttatcctcatcttgggccatttgctctaaaatttttttattatgaagtgaatttgtttgcttagataacaatctatatatttgactatccgtggcttcattatcacgcatacgacaaagcatagcttgtgtttctggacgcatttactcttccttatcttctttataaaacaagaagactactatagtagtcttcttgttttataagaaacttgttataaatactatttgctttgttattataaacttgaacaacagataaatatattatacataataacgttcaagaaaatctttatgttgggcaaaagaccaatgctcattttttaaaatattaatagcatcatctctatttttattttttattgcagcaataaatctttcatgctcacttaaacgttgattttcccaatcgtcaaaacaagcagattgacaaaataaatgtagccgatttgccacagaagtatgtaacctacgtaataatgcattttcagttaaatctaaaaaaatatcatgaaatctcatattttcttcatgataagctgttgcttgattttgctgtaaaaaaagtttttgctttgaattagattcttcaagttccttaacatggtccatagttaaaaaatcaaagacttcattaaggcattcaatttcaagagtattgataacttgataggcattacgcaaaaaagcttcatttacaggtgttaaatatacacctttccgagcaacaatcgttaccacaccttcagattcaagacgaattaaagcatcacgtagtggtgcacggcttacttgcaactctttacaaataagatcttgattaatagcttgtccatgctggacacctcccgttgacataacccgtgttaaatattgataaacacgttcacgtaagggatctttttgttgactttttataaaagcactagcctcaatattatcatttctttctgctaacaccgtcatggcaacctcattaataatctagagcaaacttgctccatacagttaagttagtcatattctaaaggaatactcctttatcaaatgacaaaaatttcagagaaaataaaaaataaagttaatgttaatctattaatgtaaaataactatatagatttgtaccttcttcattttattcataatttactctgaaacagctcctgtaatatattaaagaagtttgaatattttatactttattaatatcaaacttcattgttttgccaaaggttagttagttatcaaatgaaaacatcttattgattagaaatagagttaaatatctaaaaatttactatatattatttagctactactattatatgttaaaaaatagattttgatatataagaacagttagtaaaaattataatcttaacaaaaataaaattttttaatttaatttttaatagttaactgctttacaaaaaaaaattagcctaaaaaactatcacagtcaacccctagtatttaattcttaaactacttattaatacaaaatattttctacaactataatatatggtaatatatagtttttcataatacaaaaaatatattattcctgtgttgttatttctacacgttcttcatgaattttcatgagacttttaagttgattttcttgttctgatgtttttgcaagactacgagctttctctgaccataatgtaaatttttttatatcattttgatataatgcactataagcaagatgaatatatgcttcaaatacatttccagactgaccaagtgaacgaccataaatataatgaacttctgcgtcttcgggtaatattttcaacaactgcttataatatgtctgtgcttctgtactattaccagcatcatctagagctctggcataaaaaaactgtgcaagcacatccttagaatctaaagataaagctttcttcaaaaactggatagactgtgtaccatcacccctattataataaaacattcctgtttcccttagtataagggcatcattaggagcacatacaactgccttatgaaaagcatcttctgcaacctttattttattttttctttctgcaagaattcctaaacccattaaagcaagacagtctttttctccagactttgtaaaaagccaatatgctgtttctggctcaccataacgagcccatataagagtcctaactcttttaaatcgtttattattttctactctagcctgtatgctttgtggcaaagaagcaacacgagaatgaatttcattaatacgttccccaatatccgggtgtgttgataaatattctggagtactagcacctgatgcccactgtttacgacgaattttttcaaaagcttcttccataccttgtggtttaaaacctgctttaactaaatactgtaatcctatttgatcagcttctgtttcatcagaacgactatagttcaacattgctgtttgacctgcagctaaacttccagcaaaaacagcgccagtggtatttcctccccctaagaaaacacttgcaagagcacctaatatacttgcaacatttacaatttgagcacgctccatacgacgagctatgtgtcgttgtgtcacatgagcaagttcatgagcaagagcaccaaccaattcagactcattctccatattcatgataaggcctgtattaacaaatacatagccaccaggaatcgcaaacgcatttactgagttatttaaaacgacacttgctttaaattgaaaaggttgtggaggcatagatgctgctaattgatctacaattgactggatataaccaacaatttcaggatcctctacaacagccatctgagaacgaacaagaagattaaattttttccctagctcaagctcttccttaagccccatactactaaataaaccagatgcataaataggagttaatatgagagaagtagaaaaaagtactatagtacaacaagaaaaaataacaactttaatataagaaaaaggtagtagttttttataaaaaatattatgtaataaagtaagaacagtccttaaccaatctatcaaaatgtggcatttcataatttctcatatgtgttaaaataaaaaataagctgaagcagttgctaacttacattgtaattattattctttttgttctaatatataatatattacaaaaagaacaaagagcataatataagtattatttattataaaatatcccacacctgaccttctgaagtgtcacgtatttctatacctaatgaagctaaggtattacgaacttcatctgcctgaacaaaatttttttcctctcttgcttgccttctcttactaagtaactcttctacttgattaacatcaattttatttctaataatgcgaattgttttgagatcttgtaaaaaactattaggtttttgaccaaatacacctaataaaatatctacttttcgtataatctcacgaaattgttcaaaaaccaccttcccatcagttgtggagtaaagagctttatcatcaagagcacgtctaactatatggataatattaaataaatgacctaatccagcagctgtattgcaatcatcttctagcgcagacataaatagtgaaaattgttcatctaactcagctaaaatagagctagatgaaccacctgagtcccaagattttctttcaagtgctttatctacctcagcaatacattcatacactcttttttgacttcgttctgtctcattcattccttcaaaagaaaaatctatagggcttctataatgcttttttaaaaggaaaaaacgtaatgtttctgggagatatgcttctaatatatctctaacaatcttaaaatttccaagagattttgacattttttctgaatttacttgaacaagcccattatgcatccaaattttagccaacggcttatttacaattgattcagtctgagcaatctcattttcatggtgtggaaaaataagatcaattcctcccccatgtatatcaagaggaagtggccaacacttttcactcattgctgaacattcaatatgccacccaggacgccctcttccccaaggactttcccaagaaggctctccaggcttagctgctttccaaagaacaaaatctaaaggatcttctttctcctcactaggtacaatacgtactcctatacgtaactcatcaggagttctaccagaaagttttccataatcagggaaagaacgaactctaaaataaacgtcacctgaagctgtaatatatgctttatcagcctctagtaatttttgacaacactctatcatttcagggatataatctgtagccttaggctcaatatctgcatttagcacaccaaggcgatccatatcttcatgaaaagcatttataaattcttctgcaacctctttactactacggccctctttattagcacgattaataattttatcatcaatatctgtaaaattacgtataaatgttacatcatatccttgatatcgtaataatctcaccaagatatcaaaaactatggcagatcgtgcatgtccaatatgagaaaaatcatacgctgtaattccacaaacatatatacctaactttcctgaaattataggtataagtggctcttttttcttttccatagtattatatagatgcataaaacctctccacatcacccataactaatgttttaactttatactatagaaacaaaaaagatatgattctaaaaacataacttaataattataactttggttaatcaaatgaagcaatacgctgaagatgtcgtccaccctcaaatggtgttgtcaaaaaaatattaacaatctctattgcaatgcttttacctattacacgttcacctaaacataatatattagcattattatgtagacgtgttgctcttgcttggaactcagaagtacatagtgctgctctaataccttttatacggttagcagccatactcatacctatacctgttccacaaattaaaataccaaaactgcctatttcatctaatacttgttcacaaacatattgagcatataaagggtaatcacaaggttcagatgtcattggacctaaatctcttactatataatcgttatcttgcaattgctctataagagtattttttaaagaaaatcctgcatgatcagaagcaatgtaaacttttagcaccctaaacctcaactacttacaaggcaataagcttttagcaatcgtctttgcaacacatctgtacaatttttactaaaagcactttttttcttactttctaactgaatgatatctttactcacaagatcaagctcagcttttaatttttcctgttcaactggagttaatgtatttacaaaataactcaattgtatttcaagtttatttttatgtttttttaatctagcaatacataatgaaaagaaaatatctaacccaacaaaccaacggacatatattactaacacccataaaccagtatacataacacaaaataaatcttggactttaccccattctatctgaaattccattatgttctctcccccctcccttaaaacttaaaaaatttaacactaagtaaaagttattttatcattttaccctacttcattcataagatatatactgtacatcaactccttcaggaagaataagttgtaactgagagttagtaaaattttgaagaaacgtttctctacctttaacaataaaaacaattttattgtttttgttatcaaacaaaattaccttacttggtagttttgtttgatcatcataagtaatagttaatgaccatccaacagtagaattttcccatttcactggcaaaccactttgagataattctaaagttccagataactttcctcctagcaaagtatatataatgttcccattagacatagataaaggagatactccctgaacctgttttccaaatacattataaaactgaccacgtataagtgatacaaagtcataaaatccaaatggtaaaggtttttctaactctaaaaataccttatctgtattagaaaaaactttagcttctttatctataatagaatatataataaatttatcctgtgttgcgtgtagcctaacaacaggagtattcatcccagccatcccatctaaacaaataggaaaatttccattactccatataataacagaaagcctttttattgctttatcagcatgatataataatgttccttttattctatatggagtactttttttcccctgctgttctgcatacctttcatatgtgtaccatatctcatgcacgtccttagaggcaataggaaattttgtttgtactgaactacaacttattattaatagccctaattccaataagataacataccgtaataagatgatcattatgatcttacagtccttgcaacttcttttgtattgcttctacatcttgtggctgaagttttatagctttttcccaacctattttagcatccttcttttttcctatagcttgagcaatgtctccataatgttcccaaatagtgggatcattactatcttcaagactcacagctctattaatttctacccaagctttttttatctctccttttgcaaaaaatgcccaagcaagagaatctacaatataagcacggtttggtataagactatcagctcttttaatcaatgaaagtgcacgatctatatcacgtttatcttcaattaaacaatatcctacaaagtttaaaacttcaggataatcaggataacgagaaataagttgttccataagctctaatgattcagacttttttcctaatccatttatagctacacctttcaaaaaaagaagtgttttctcctcaggaaacaattctaatcctttactaataacaataagggctttattatactcttttttattaagcaacaactgaacttctgttgtccatagctcttgttctaatggagctgcttcttgcccttgatgtagtaactgcattgcttgatttattttattcaaactgtaaaaaatttgtacacgcaataataatgtattaatataatacttatccttactactagcctcttcaagcaatgttaatgctttgtcataatttttataacattcatactcaatagctccaaggatataaagtataacatttatgtcacctgctgcttctgggcgctcttttatttgtttaagtaatagctctgcttgagtataaaatttattttcaagaaataatgtaacagcagtcaaacaaaagctgtaattctctgaactttctgttatatattttaaagcctgatcaggcttctttagtgataacattgtactaataagatgtagccgtacactctggttaccagagtctttatctagcaagtcaagatatactttaattgcttcagaataattgcctgttttttctaatagcttacctgtttcaaaccatgcttcaagaaattcagggttttcttgcacagctaacttcagctgactcatagcttcagatgaacgacctaatgctgctaaggactgagcatagcaatatcgaataaacgcattgtaataattctttggcaaagaagaaaaaatatctactgcctctttataattttctgtcttaagataaagtattgctagttcctgtctcactaaatctgactttggatgacgtaattgatatgcttgaagagactccaaagcttttactggataaccttcttcaagccagcaatcagcaagtagtagataaaatccaaactcatcaggaaataactgtatcccctgttctaaaatatttcttgctgtaataggatctttctctaaaagaaaccatgcggcactatctgtaaagaattgtggcgctgggctatgtttcaccaaaatactcattgcctcaagaacaccgctcttatctccaatcctaatcgattgttcaagcaatagaatgccatatgttacttgggcttctggagtaagattccaatgaatagtgttatgttgtgaatttttagcaacacaagcttgtagtgggaataggattaaacctatactcaagagcaattgtaccagtggccattgccttaatacattatgaacaaattgtatcacgttcatatattacctaagttaaaaattaatggcctatccactcttctgaaaaatcacctatttgacgagataaatgtgtacgtagcttttgtaataaacgtgcttctagttgtctcactctttcacgggttacactgtatttttcaccaatttctcgaagtgttacaggatcatctgtaagtaatctattatgaagaatatacacttctttttctgaaagtaagggtaatatatcttttatcctatcttgaagaagtatagctatttcttgaccagcaagactctcttcgatcccagggttaattgctggtaaaaaatctatacgtgatgcatttcctgtctcttcaccaacagttacatccaatgacatatctgatgcatctagtcgttgttgcatctcaataatttgttcttcaccaacacctaagcgtaatgcaagtgaggatgtatctggatcaaaaccttcagcaaggagtttttgtctctcacgattaagattataaaacaattttcgttgtgcctgtgttgttccaatctttaccattctccaattatccataataaacttaagaatatatgcacgaatccaaaatgctgcataataagaaaacttaatacccttatcaggatcaaacttattcacagctcgcataaggccaacattaccttcttgaataagatccaatacattttgcatccaacgacgttgaaagtccattgctatcttaaccacaagacgtaaatgtgaagaaatcaaacggaatgcagccttactacaaccttttttctgtacatcctgcgctaacctaagttcttcttcaggttttaacataggaaagcgactgacctctcttaagtaaagctgtaaagaatctcttgtagccgttgttgtagacagtgtcacttgagaagacactacagtttcaaaacccatttcatcaagctcactatcttctataagatcacaaagaagatcttcactactacttaataaagtatcatccatttcagtatctgggtcttcaatttcactttcttctttactatttctttttatcttttcatattcaactttgcttgagctagctttatatgtgtcatcatttttcctttttttactgcaaaaagattgctctgaaatacttttgtcaagtaaaaaaggagattgtatatcgtaattcatagttcactctcattgttaattttgatgagaacggatttaaatatagctatattcctagtaggatatactataaattcaatttattattttcaataattttcccttttaataactttaaaacataaaattttaggctatactaaaaaaaataaataaattttttctagagagttaaagtataacctattacttctctaaacaaaaccattacctcttttgatataatattcaatagttactaaaaaatcatcatataaataaaactatgaagttatattctctcattttaataaaatataatatgttatattaagttattattctacttttttcagctcatttaaaaaaaggaagtgatattttatagttataagatacttaactaacaataaatcccatttaatccaaaaaaagatattttcaatttttatgatgcatttctgatgtaaacaattaaaattatctatagtttgatgaattaaaatagatattttaattttatataatttagtagctatacacatgttatgtgataaaaatatttttagctattttaactatcgttttttaaaaaatataaaattatataaaggatataaaaatataaaaattatataaaatataacatatgaatataaaataataaattttattaaataaaaaaataaaataataaaaaatttactttaataataaaaaatttatctttataaaatataaataaaacaaaattgttagaaattaaactataaatttataatttatctattataattatatataattatattatataataaatgttacttctaaaatacagcaatatagttttcccttgatattttaattcatattatttattatataagtatattttatatattataattgaataaaagcgagttatgctgattaagaaactggtttttattatatatttatattatcataatatagtatatagttactatcatgtagatatataataaaaaattgtgataatattaaataatagtaatattaactttgatagttttgctattctttaacatctgtattactactttaaatttaacttgattaaataaaaataacaaagtaataggagatttcatgtatactattcgtactatttttctatatacattatttattgctttaacccatatttcgttagcacatgctgaagaaataaagactatccaagggaaagaactagcttatttcatttcacaaaataaaggaaaacctattttcataacagtttttgcaacatggtgtcctgcctgtagacaagaaatgcctgggattattgctacacaacaaaaatattctaaagaacaagtaacatttattggtatttcacttgatgataatgtagaaaacttacaaaattatataaaacaatcaaaaattacctttcctgtatatattgctggctcaacaattccttcaatgttctccatcacagcaataccacacaatattatttatgataagaaagggactcttgtaatgaataaggctggggctctttcagcgaatgaattaaatactatgctaaataagtatatcaaataaaacatcatgataggctagtagtcaaataagaaaaagaataactataaataattatattatataaaatttaatactatatttttatagtatatatatatataattaattaaattttgttttctatatctattggtgggagtgaaagaaataataggaataaagtatactatatatcatatatatatattaaccttactagttttgtcttatttttttaagattttcttagttttaattaaaataaatatcatatataaaaagtcaagtagtaataataattttttctttgtaagtaagtatgaaaaatactattaactctacctagataatatatatatatattgaaaaatattactttaactatacatatcaaaatatattctcataactctaaggacttattataaggtaatacggttatggttgaacatattatggatatgtactatataactcttcatattaaagaaaatatctctttatatcttgtagtaaggtttaaacgagttatatctttgaacaaagttttatctatagttactacttgatattaagatgattctttctaattacttcttaattaattaggaacagaaagtggatagcaaccttcaccaaatttttacgatcagtatacaaacagtaatccttaacaacctattatggttatgtggattggagtctttttcatgattgttacctgtccaaactgcctaacaaaattcaattttcctgatagtcaaggacgccctaacacaaaattgcgctgttctgtttgtaaacatatttttcctcttatacaagaagagcaaaaacttagcttcaatactgttaactcttccaaatcttcaagtggaggggaaaagaaaaaaaaatggagctccacaaaaaaattacttctgcttttcatactcctaactctaactgcaggtatttatgcctggtacacatacccccaactaaaagatgttgttcaacattttctcttttcagaaaaaaaagaagaacctactgacttaataagccttattgctcttcgtgatgttgtccaatacaatattaataatgaaaaattaggaaatatttctgttatagaaggaaaagttgttaatggattttctgatcctagagaattaattagactagaagcttctctttatgacaaaaatggaaaactccttgtatcaaaagaacaacttgcagggactagtgtatcactttttcaattacaagtccttggcgaacaagaacttgaacgtgcccttacaaataaaattgatatccttgctaacaatacgaatatccctccaaaaggtgaagttccttttatgatagttttttataatcccccagacaatgctgctgaatttggtgttaaagttattgacgcacgcttacctcctaaataaaaattgactaatctctattactattcatggctaaacctcgagaagtctatatctgcattgaatgtggagcacaattcccccaatggcatgggcaatgtcttacttgtaaaacttggaatacactaaaaatacacaatgcaccttctacaaccgctcaaaaaatatataaaaaactaaaacctataccaattggtcgtgttgaaacctctacctatcaaccattcagtactgggattaaagtattagatcatattcttgggaaaggacttgtgcctagtagcgctctacttattggtggagaacctgggataggcaaatctacactattacttcaacttgctggagctacagcaacattagggaaaatcgttctttatgttagtggtgaagaatcactaccacaaataaaagctcgtgctgaaagattaactgtccttcatgataatcttttatctatggcaacatctcaagttgaagatatccttcctctacttaatacatctgaagctccagacttacttcttatagattccgtacaaacacttacttcaagtaatgcagaaggattacctggcaatgttagccaagtaagagcagtagcaactgaacttgttgaagcatgtaaacaaggaaaaacaacagttatctttataggtcatgtaactaaagacggtaccctagcaggtccacgtctactagaacaccttgttgatacagttatctctcttgaaggagatcgaagacatatatttcgactattacgagttataaaaaatcgatttggacctaaccaagaacttttaatttttcaaatggctcaacatggtcttgaacctgttgctgacccttccacttattttttaggtgcaagagatcctagtttaagtggaacagctgttgttatgactattgatagccaaagaccattagccgtagaggtacaagcacttgttacaaaaagctatcttgctatcccacgccgaacaggcttaggctttgatgttaatcgactacatttaattcttgctgttttagaaaaacgtcttcgattaaattttagtaatgttgatatttatgtaaaaataggaggtggaataaaactccaagaaccaggaatagacttagcccttgttgctgctattctctcttccttctatgatgttcctttacctgaacgttctgtattctggggagaagtagatctaaatggtcaaatacgacctgttggctctcattctatccggctttcacaagcttctaaactaggatataatcctattttttaccctaagcatgaacaaagtggattagcaactgtcatggaacttcaacaatcattattaaaaaaaaaaaattaaaaattattttaaaatattagatgtataatcaataagatctttaaatccatatagaacttatagtaaagtcctattgcctttcttttaaatcagacctatccatattataacaagtgaaaattacatgactcaatcatcttataatccgatagaacaagaaggtagccctgaattactacttcaggaaaagataaggcgtcctaagatgtaccaagttttgctacataacgataattataccacaatggaatttgttgtttctattctaatgaaaatatttcgcaaaacaatggaacaagctacttctattatgctctcagttcataggaaaggtattggtgttgctggtgtttatacacgtgaactagctgaaactaaagttaatacaacacatatgttagcaagagaggcaggatttcccctccgttgcacgcttcaggaggtagacgaatgattgggaaagaaatgcaagatgttatcaatattgctattactgaggttaataaacgccatcatgaatatctaaccctagaacatcttttatatggcattgtatccgaaacaacaggccaaaaaattattgaaagttgcggtggcaatactgaatctattcgtgcacaacttgaacaatttttttctacttacttagatacacttgatgaagcaataccagaaagcgaaattccacaaacattagccatacaacgtgttcttgaaaataccatagctcatatccactcttcaggacgtacacaaatagaagttggagatgtacttgctgccttattagaggaagaagaatcatgggctgcttactgtctaaaaaaacaaggagtcacccgtattgctgtgttagaatttatttcttatggacttccacacagtgaacttggcaatgatgactttgtcaaaaaagcagaagaaagctctgaagaaaaaaatccattaacaaaatatacaattgaactcacacaaaaagctcgaaatggtgaaattgatcctcttgtaggtcgagatatggaaatctctcgtacaattgaagtccttgcccgtcggaaaaaaaataatcctctatatgtgggagatcctggcacaggaaaaacagctattgcagaaggacttgcgttacgcattatctctggaaatgttcctgaagaatttacatcgtcacttatcttttctttagatatgggagcactgcttgctggagctcgttaccgtggagactttgaaggacgtattaaatctgttctttctgagctatcaaaacaaccaaaagctatattatttatagatgagatacataccattataggtgcaggctcgacaaatggaagtgctgtggatgctgctaacttactaaaaccaatattaacaagtggtaagttacgctgtattggctcaactacacatgaagagtttcgtaaccactttgtcaaagatcgagctcttgctcgaaggtttcaacgaattgatattcatgaaccatctcaagatgactgtattgctatacttaaaggattacaatcacgttatgaaaagcatcataaagtgaaatatacaccagcagcgttacatacagctgtaaaactatccgccagacatattacagatcggatgctaccagacaaagctattgatgtccttgatgaagcaggtgcagccgtacacttacgagcaggcaataaatcaaaagtattagttactagacaagatatagagaaagttatttctcgtatgacgggtattcctataaaaacagtctctggaaaagaaaaagatagattaaaaaatcttaaaaaagatttatcttcacatatttatggtcaaaatgaagctatcgataaagtaactaaagctatattccgctcaagagcaggactcaatagaggaaaccgtccttcaggatcctttttattttatggacctacaggtgtaggaaaaacagaattagctaaacaaattgcagaaaaacttaatattgcttttcttagatttgatatgagtgagtacatggaaaaacattctgttgctcgactcattggttctcctccaggttatgtaggttttgaacaagggggacttttaacagaggctgtgaaaaaaacaccttattgtgtagttttacttgatgaaatagaaaaggcacatccagatatttataatattttattacaagttatggattatggaacactaacagataatactggtcgtaaaacagacttccataatgttatattaatcatgacttcaaatgctggcgcaagggaaatgggaataacaaatatgggatttgtatcagatgatacaaatacaatatctcataaaggacgcaaagcagtagaaagtgtttttagtcctgaatttcgtaacagattagatgcaatagtaccctttaataacctttctcctgaattaatgaaccatattgttgaaaaaaatataaaagaacttacaaaaggtcttgcagaaaaacgtgtttctgtcatgttatcttctgaagcaaaaaaatggcttgcccaaaaaggttatgacaaaaaattgggagcaaggccattacaacggctattaagggaatctcttgaagatcaacttgcagaagaaattctttttggaaaattagtcaaaggtggacgtgttactgtaaaaccaccacttgaagaagacagtaagcttgttgttatgcttgaataactttttataaaacatatttattttgtagtaattgattcttatataaggagtttttactataatatttcttaagatctattaggaaaaacatcttatgctctctgctctttccaatgatcctatgtattttcctcctcttgaaacagcctttgacaatggactactggcttatggaggtgatctttcccctcaacggttattatctgcatatacaaaaggaattttcccctggtatgacaataactcacctattctctggtggtctcctgatcctcgatgtattttactacctgaaaactttcgaattcctaagactatacagcgtgaacttaaaaaatgtactttttctgttacaataaataacgccttcacagaagtcattacagcttgtgcaactctacctagaacaaaacaaaaaggcacatggattacacaagatatgaagatggcatatatccaactacataaactaggattttctcattctatagaagtttgggataattctactcttgtaggaggattatatggtgtagcattagggaaagcattttttggtgaatcaatgtttcacattgctccacatgcctcaaaacttgcgttagtatggcttgcacaatacctgtggtcatataattttgattttatcgactgtcaaatgcctactacacatataatgagatatggcgcaacactcatttctcgtaatgaatttcttactcgactgacaattgctgttactactggaacaagtcaggcttccacaaaagaagccctataatgactactaataaaaggtaaacaatcgtccttccccatttaaaagaaactatttttacctcatctttaacactttcttcaaagtcttctgtagatgtttttctattaagttccataatcccctcagtcagttaataacatctcattttgatacattatagacaacatacctattgttattatcactcactatatatgtaataaaaattatttattagcttttatttggattaatctctagtatgttagagtttcttgtttgaacccactgcctcttcaaagactcagcctcactacaacaacttgagcatgctcctctaggaaacaaaagacaaagagcttcatctagacaggtagattttgtttctattgctgtcaaaccattacaagttttacataaacgtatacgttcatattgagtatcatgtatcatatctgtgtcataatatatagtcctatttcgaacccaccaacaaccatcttgttggccatcataaggttttactggtggataaaaatactgactcagagcttgttcacacaccttttttattgtttctgtaactcttttaggttgacaaatatctactttatcaagatcaggttcttgtaaataagaaaaaggtaaccctgccaatgcaagacaaatacctaaattcacataaggcaaagcaccctgtatggaataaccaccttctaatacagcaatatctggtttcaacatttgggtcatacatgcatacccttcagctgtaagatacatatttgtcaaaggatctgtatagtggttatcctgaccagctgagttaataataatatcaggctgaaattcatctaaaataggtaacacaacatgctccatagcatataaatacccctcattccctgttcctggaggaagagggatgttcacggtttttcccagtgctgcaggtcctcctacctcttctaaaaaccctgtccctggataagttgtacgaccatcttgatgtaatgaaataaaaaggacattaggatcattccaataaatatcttgtgtcccatctccatggtggcaatcagtgtctacaatagcaattttttgtttcttatatgtctgccgtatatgttcaaccattactgcttcaatattaatattacagaaacctctattaccatatgttaccctcatagcatgatgacctggaggacgtataatagcaaaagctcgttcaacctctcctgtcagtaccaatttactagcatgaatagctcctccagctgaagctaagtgagaatttgaacaaactgctcctacatttggcaaacaaaaatgaacactttctatatcacaatatgttgagagactaggttgatattcttgtataccaggaatatcaaatattccctcttcatagagttgatcttgtgtatacaacaatcgctcttcacgctcaggatgagttggactaatagcccaatcaaaagcagggaaaaaaacaacgccaagtttatgttgaacatttggaaacatatagctcctatcaagtccaaccaatagtataaaatattctataaaaaattatgaatacaatccaaaagacaacttattattcttatactgtaatctatatattttcactattattatgtaacgatatctaaaataacgcttataactagtgtatctcatactataccttatcatttataaataacgatcttcagccattaaataatgttggacataatccataatcccttcttcaagactatggaaggacacatcacacccaactttctggagccaattcatatctgcctgagtaaaatattggtatttccctttcagttgatcaggcatatcgacataacgaatatcaggctttttattcatagcgataaatacagcattgagaagatcattccatgttcgtgcagtcccagaaccaacattaaaaataccatttacttcatgatgttcaaacaaccaatacattacctttacgcaatctttaacataaacaaaatctctcatttgtccaccatcggcataatctggatgatctgacttaaacaggctgaaaaaagaagaggttgttatttgctcataagacttacaaacaacacttctcatatcacccttatgatattcatttggaccataaacgttaaaaaatttaaggtttacaatctgattaagtaagccctcacgatatgcccaaagatcaaatagctgttttgaatagccatacatgttaagtggtttaagcgccaaagtagtaagcaaattatcagaaaaacctttagaaccatccccatatgtagcagcactactagcattaataaaccttgctccattctccagtgcataacgacaaaccatttgagtataatgaaaattattttccatcaaaaaatcagcatttcgttctgttgttgaagagcaggcacccatatgaaatattgctctaatatcttctggagctttacctttctgaatcaaatgacggaactcatctctatgtatgtagtctttaaatcgacggttaacaagattatgccacttatcacttattgctagattatcaacaacaagaatatcatctataccaacttcattaagaagccaaatcatagcactacctataaaaccagaaccacctgtaactatatacatgaaaagtcctccatcaataattgaatatattatttgataatatcaaaaaatctcctgaccttactatattactaagtaatatcatccattagtttatataataaaatattactaatataatatttactctacccttagtgattaactaacaaaacttactctttagtataagctacctcaatagcaaattcttcatcacttttatgttcaattggctttaagtgaataaaaggtgcgtttaatctataagattgtaacttccatattgcatccacaaggagctctataccttcacctgtttctgctgaaataaaatatattatctttccactagattctgcaacttgttttatgtgtgataatttttcaggttgtaatacatcaattttattaacaaccaataattgggtacgttgcattaaagtatgatcaaattcttttaactcttcatttacgatgtcgaatcctaaccatgggttatcctcatcaatatcttcactacttaaaacatgaattaaaaaacgtgttctctcaatatgtttaagaaattgatgaccaaggccttgtcccttacatgcaccctcaattaatcctgggatatcagcaaggacaagccttttatctggatcaagattatcgatcattactccaagattagggttaagtgttgtaaaaggataagcagctattttaggttgtgcagcagaaagttttgatattaatgtagatttacctgcattaggtagccctataattcctgcatcagctaaaattttcaactctaacctgagatacttctcctcccccatttcgcccttttgtgcaaatcgaggtgttcgcattgttgatgatttaaaatgctcatttccttttcctcctcgaccacctcttgcaattaagaattcaactcctggtctatcaagatcaactaaaaaatattctttatctaatagttgctcaaaaataattgtacctacaggtaaatgaagaatcaaatcttccccttttttaccatgacgctggctccctttaccaccttctccattttgagctctatagtgacgttgcacacgaaaatcataaagggttaacaaacgtgaatcagctttaaaaattatattacctccatctcctccatcccctccattaggtccacctttaggtataaacttttcgcgtctaaatgaaacacatccatttccaccttttcctgcgctcacgctaatagttacttcatcaacaaaacgcatgattatcctttcaataacaaatatctattcaatactgttactaacttgtttactgttttttctaaaaaattacctggctaattattatagttatatctagattaataaaaaaggaagaagtcattacactccttccttattaataaaatcctggaataattattatacggtgggttgtatatgcactctactatatcttttacatttacgaaaatatgtttcataagttactataccattaacttttgcaaataaagtatagtctcttcccattccaacattttctccaggatgaatttttgtacctagttgacgaacaaggatattgcctgccaagactttttggccgccaaaacgctttataccacgacgttgtcctggactatctctaccattgcgagaacttccaccagctttcttatgggccattttaatatctccttaaagctgaatacctgttacttttagagctgtatagtcttgacgatgaccttggagtttacgtgagtcatttcttctccactttttaaaaacaagaatttttttatcacgaccatgctcaagaactttagctataactttagcattattaatatatggtgttccaatttgaggagatgaaccaccaatcataaaaattttatcaaaaaaaatttctgttccaacttcagcgtctattttagaaacaaaaattttagaaccctcttcaacacagaattgttttccaccagcttcaataattgcgtacataaataatgtgcctcccaaaaaagacaagaaatactaatttgatattttcaatattgtcaagtaggaactttatctttagaatgttagatgtaacaatttttttagaaaaaaaatattttcaatacaataggaaaagaggaaaaaaaaaagatttttagaaaaaatttttatttctccaaaaaatgcaaaaatataaaaaattctaataggatagaagttattactgtattgattttcaagacttacttaaaaatttttataaaaaaatttgcattcccctcttcccaattcccatagagaagattatttatcctaacgattggtggacgctaagtccctgctgttttgattatatatcaaatgttgaaacaaattttgtttagtttctttttgtactctaaaaagaagacaaaaaattctttataaactgtacactctaaacaaaatagttcacaataaacagcaatacattataattaattggaggatactattgtcatgaacctgaaacctttgaatgaccgtgttttagtaaaacgtcttgaatctgaagaaaaaacagctggtggactctatatccctgatactgctaaagaaaaaccatctcgtggtgaagttgttgctgttggacctggtaaacatacagatgatggtaaattaatacctatggctgtaaaagcaggagatacagttctttttaataagtatgcaggaacagaagtaaagcttgatggtgtagagcatctagttatgcgtgaagatgacatcctagctgttattactggagaaactggccgcaagtgaaaaaggcgtaaataaaaagatcggtgatctttaataattttattcagttataatgaaaacactaattacacgcactctctgagaattttctcagaaaactatatttaacaattctaaaatcgatatgtttttaggaggaaaaccctaatggcttctaaagaaatcctttttgatgctaaagcccgtgaaaaactttcacgaggtgtagataaacttgcaaatgctgttaaagtaacacttggacctaaaggccgtaatgtcgttattgaaaagtcttttggttccccagttattacaaaagatggtgtatctgttgcaaaagaaattgaacttgaagataagtttgaaaatatgggcgctcaaatggttaaagaagtagcttccaaaactagcgatattgctggtgatggaactacaacagcaacagtccttgcacaagctatttatcgtgaaggtgtaaaacttgtagcagctggtcgtaatcctatggccattaaacgtggcatagataaagctgttgttgctgttactaaagaactaagcgacattacaaagcctactcgtgaccaaaaagaaatagctcaagttggaaccatttctgcaaactctgatacaacaataggtaatatcatagctgaagctatggctaaagttggaaaagaaggtgttatcacagttgaggaagctaaaggtcttgaaactacattagatgtggttgaaggaatgaagtttgaccgtggctacctctctccatactttgtaactaatcctgagaaaatggtttgtgaacttgataacccttatatcctttgtaatgagaaaaagattactagcatgaaagacatgctaccaatcttagaacaagttgctaaagtaaaccgtccactccttattattgctgaagacgtagaaggtgaagcacttgcaacacttgtagtcaataagctccgtggagcactccaagttgtagccgtaaaagctcctggttttggtgaacgccgtaaagctatgcttgaagatattgctatccttactggaggagaagcaatatttgaagatcgtggtataaagcttgaaaatgtaagcttgtcttctttaggaacagctaaacgtgtagttattgacaaagaaaatactactatcgttgatggtgctggaaaatcagaagatattaaagctcgagttaaacaaattcgtgcacaaattgaagaaacaagctcagattatgatcgtgaaaaacttcaagaacgtcttgcaaaacttgttggtggagtagctgttatccatgttggagctgctactgaaactgaaatgaaagagaagaaggatcgtgtagaagatgctctaaatgcaacaagagctgcggttgaagaaggtattgtccctggtggtggtactgcttttgtccgctccattaaagtccttgatgatattaaacctgctgatgatgatgaacttgctggacttaatatcatccgtcgttctcttgaagagcctttacgtcaaattgctgcaaatgctggctatgaaggttctattgttgtagaaaaagttcgtgaagcaaaagatggttttggatttaatgctgcatcaggagaatatgaagaccttattaaagctggtgtcattgatcctaaaaaagttacacgtattgcattacaaaatgcagcatcagtagcctccttacttctaactacagaatgcgctattgctgaaaaaccagaacctaaaaaagatatgcctatgcctggcggtggtatgggtggtatgggtggtatggacggtatgtactagtcctatcttcagtacaacttagatgtataaaaaccccagaagcaatgcttccggggttttatactttcagcataaaaaattaatatttaatatacagacacattattttggtatttattatttattatgatcaaatatatagactggatacaaaaaacaacaatgatgtttaaaaaggcagggatagattcaccaaaactctctgcagaacttatattaagtcatgttttaaatattacacgattacaaataataatgactccttttgaacctattccaactaatagctactcaacgcttaatgatatcatgttaagaagactccatggagaaccaattgcatatctcacagggaaaaaagaatttttttcacgagaatttaaagtcactcaagccacacttatccctcgcccagagacagagttacttatagaatttgtattaaaccatattaacccaacacaacaaatatactttgcagacttaggtacaggtagtgggtgtattgcaattacactagctgctgaaagaaaaaattggttaggtattgctactgatatctctagtgaagcattaaaaatagctaaacttaatagtttaaaaaataacactcatagtcaactacagtttcttcaatcagattttacacaaccactctgtctaccctcttcattagacttatatatcagtaatcctccatatataagtgaaaatgaactgacctctcttccgcatgaagtaatatcttttgaacctaaaatagctcttacaccacataaatgtattcatcttgatgaaataaataccgttttacactgctataaaaaaattattacccaagcagagatatcccttaagcctggaggaataataattttagaacatggagcaacacaagcagaagctatcttattgttgttaaaaaacaacatatggacaaatgtaataagtcatactgatcttacaaataaaaatcgttttattacagcatataagtataaaatataacttaattatgttgtaaaaaaacaaaaaataaaaataagatataaatattttttttaataaaattaagcaattactaatatctttttttggatcgtttattgcataagaaactttggaggataactatgcaacaaacaaccattcaacgttcaattacattttcaggtataggtgtacatagtggccaatgtcttaatgtcacgttacaccctgcatctgaaaatactggtattgtttttgaagtgataactggagatactcgccatactcttatcccctctccttctgctgtgatagctactaaattagcaaccactattggtaataaaaatataacaatatcaacagttgaacatcttcttgcttccattagaggccttgaaattgataacatccgcatttgtgttgaaggtgcagaaatacctattatggatggttctgctaagatattcactaatgaattactccaagcagggattaaatatcttccagcaacaaaaaaaattttacaagtgattaaacccgtcgaattcattaagggagagaaacgtattcgtgcattaccgtataatggattcaaactagattatactattaattacatacatccaattattggccaccaacgacttgtattagatgttacaccaacgacctttctttcaatagctaatgccagaacttatggctttcttaaagatgttgaacaaatgctaaaaaatggcttagctcaaggtggctctcttgagaatgctattgtacttgattctacaaaagttattaatcctgaaggattacgttatcctgatgaatttgttcgccataaagcccttgatttcattggtgatatggctatgatgcatctacctcttcaaggatattttgaaatatattgctcaggtcatcaacataacaaccaattccttcataaactacaggatgaaaatgcattagcccttgtaacacttgaaggagaaaaaacacaaaatctctaccaaaatattacaccactatataatgatgtattagctctactttaataaaaggaaaatgtgtaatctccatcctactacataatatttagtatctgttaagttacataattcaatatcatatgaatgcatcacgctctcctattatacttcttccagaggcactacaaaaccaaattgctgcaggtgaagttgtagaacgtcctgctagtattattaaagaattagtagaaaacagccttgatgcaaaagcaacagatattgaagtaataatggaaaatggtggacatacatttatccaagtccgtgacaatggttttggtattcccccagcagaattaagattagcccttactcgccatgctactaacaaaataaaagatttaggagacatatggaaaatccattcgtttggatttcgtggtgaagcccttcctagtattgcatctgtatcttcttttaaaatagaatctgcctatacaaaagaatctaacaatactgaagctgcatttctgcaaatcaagcatgggaaaatagaaaaagagggtcctagctctctttacaaagggacgattattactgttcaagatctatttgctactgtccctgctcgccttaaatttcttaaaagtcctgtcacagagcaaaaacgtgctcaagaaattttttcccgtttagcattaactactaatacaactatgacccttttttcaggagcaagagagcttttaaaatttcctgcagcacattctttacatcaacgccttaaaatcatttggccagaagaattgacatctaaccttatacctgttgataaaacaacacatgacattagaatacatgggctaacttcaccaccaactcaaacacaactccgttcagacagggttcttctctatgtaaatggtcggacactcaacgataaacttatattgcgtgctatttttgaagcttataaaggtcggcttatctctaaagaatatcctcaagcagtacttttcattgaaatttctcctgaattaatagatgtaaacgttcatcctgcaaaaactgaagttcgatttagagatgaaaaaagtatattctctgctattagcactgcactaaaagaagctattaacaaaactataccaagcttttctttacagcaaactgatacagacatacatccaaaaggattttggggtgaagcagatcaagaatatatctttcctataaagaaaaattctaacatccaccctacacaaactgaagtttgtactacacaatcaacaacaactgactctcatggtttctcattacaacatatgttacaaaatacgtttgtccttgagccagattgtcaacaatctttatctgctaaagaatctacttataccttagcatcatcttattcatctcatccttcagataactcttctttactacctaaccttacatcaaacagtacagattccaacaaagaaaatgagatctcaattaaatatatagataaaaaaatgtgtattgggccctatcactacttaggacaaataggggatacctatcttattcttgaagatataaggaaaaaaaatgaacaagctgagcttattatccttgatcagcatgctgtccatgaacgtattttagcagaaaaatttcgtaatggaagtttaattaaccagtctcaacagcttgttttacctattcaattaaaactgcactactcagaacaagaagagctccaagaaatcgctaactccctaacttcccttggatttatattctctcttaaaggagatattcttcatgttgagtctatccctccactacttgatcgtagtcaagcaacaataattcttcgaaaagccctctcaaggcaacaagaaaatatagaaaagctttggatctcaatggcatgtaaagctgctattaaagctggcttacctctacctccagatgaagctgcattacttattactcaatggatttctatagaaaaacgtgaaaactgccctcatggacgaccctgtgtacttgtttggacaatccaagatttagataaactatttaagcgtagaagctaattttactttcaataatatctataaattattatcgacgtccttcaataattctcatatctcctggtgctgtcatcaatactgaatgctgaatatctatttccccttctgcaggaagagtcattttccataaatacatatgatcttctattattggcttaggattagactgtgtagtgataataataccaatatctcctgactgaggttctggttcttcaacaaccactttaacaggtactgtatgatcattacaaactttaatattccagctccaactatgactttgctttttatctaaaaatccatcacgtccactctgacttttatccaagatcatttgggctgtgactctaggatcgacaccaaaataaatatgattttcttcactacgtaaagtaaagtaaccattccccaccacttttccatcaaccataaattgagcagagccaggaattaaatctacagagctaggaatatcaatatttgcgacaagatatgaatgaggttgtactgatggtcttaacaatctaaaaaattttgcatcccaatcatttttatataacataaaacgcatcaccattcctgcaggaactgtaactttaccaagagaccaagttgtaaatgtaggctcttcttgggcgtgaactataggcacagatgattttgccaaatacattgcattatctgctataggagacacttcttgtccttgacgatatgtttgtataggggcaggtagtatcttccagtcaggtaaattaggaggcactaacgcactcccaatatttactgacgccaaagttatatctgcatttctccagtcttgcccagaagcctggcgaatttctgcttcttgaacaacttggacaatacctttctctggtaatgcatcaaaacgataaataggattccacccacaatcagaaagcatatatccatattgaactatcacttgcttattaggttttttgtttgttttatctggtctaataactgctgtaatagctgtagcatatgtatttttcccaccagcatccacaatggctttttctaataactctaattcatacaaagctttctttaaagctggctctatagttgactctgcaacataaagttcctcaatttttgatcccatcattgaatcaaattttttaatttcttcaatagaacgactaggacattcaggattactccaaagagcaatttttgcttttactgctgcaagtttcccacgaatcaaagcaacttcttgtactgcctttgtataacgttctcgaattttagcaactacaggactatcaatactagcaatgggggttgtttcaatacttcctataaattgtccctcaatacttaaaagtaaagagccaagttgtgctcctgcaggaagttcaaaatacactttatcatcttgaacaggtaactcttcaacaacctggatccacccaccagtaggatataaagtgatagccacagggttagttggagcagccatagcaataatagttctactaagtacatttatccctattaaaaaaagaaaaaattgtatcttcaaactagattgcatgacttcctccttaattatataaatagagtaatttttaggccactaaaaaataattattcttattctttaaactatgttatacgtagccatgacctaatgtactccacaacattttttatactttttaccacttccacaaggacataaatcattccgtccaacacgatcagtttttttcacttgaaactttgtttctttctcatgactagctggataccataagtcattaattggctcatgttgaaaaaaattatcttcttttttttctaaatgtaaccttgtaaaagtacgaaagactccttctctaatattagcaagcaattcctggaaaagtacaaagccttcttttttatactctaattttggatctctctgaccataaccacgcagtcctataccttctcgaagaaaatccatattccttaaatgatctttccaacaacgatcaagttcttcaagaagcacataacgtagcaaatcattatatgcctctccagccttagacttcaacttttcaaacatagaaagaattaatgtctttgcttgttcctttgttggaagggtgttatctatagacattacctgtgaaagattcataatatcatataactgggtatgaatgcttttatttaattcattattatcattatcttctaactctatataaatatcacttaataattcatctaaatactctaaaataatatccattggctctggatcattcatgatattgtgacgtaatgtataaattactgtccgctgctgattcataacattatcataatctaatagacttttacgaatttcaaagtgatgtccttcaacacgtttttgtgcactttcaatcgcccgagataccataatattttcaataggttcaccttcttccatacctaatctttgcattagccctgaaagcttatcagaaccaaaaagtctcattaaatcatcttcaagagaaagataaaaacgtgatgatccaggatcaccttgacgccctgctcgaccacgtaactgattatcaatccttctactttcatgacgttctgttcctaaaatatgtaatcccccaagctcaacaacactatctccaagaacgatatctgttccacggccagccatgtttgtagcaatagttactttacctacttgtccagcttgagcaataatttcagcctcttgcgcatgatgctttgcattaaggacattatgagatatattttttttacggagcatagaagaaataagctcagaggtttctatagatatagtccctactaatacaggttgcccttttttatgaagctcaatgatagcttttacaatagcatcaaatttttccttacgtgtacgataaattacatcagaatgatctttgcgaatcataggtttattagaaggaataacaactacttctaatccataaatttgtgcaaactctacagcctctgtatctgctgtaccagtcatccctgcaagcttattgtacatacgaaagtagttttggaaagtgatactagccaaagtctggttttcagcagcaacagtaaccatctcttttgcttcaagtgcttggtgaagcccatcactaaaacgtcgacctggcataagccgtcctgtaaactcatcaacaatgacaacttgatcgtctttaacaatatagtcaacgtcacgacgaaaaatataatgtgctttcaaagcctgtagcacatgatgctgtatagctatgttactaggatcatacatattatctataccaagggctttttctacttgcacagcaccttcatcgctaagaatgactacttttcctttttcatcaatagaaaaatcctgttgtggcttaagattacgtataattttatctatctgagtatacatagttgtagattgttctgacccaccagagattataagcggtgtacgagcttcatctataaggatagaatctacttcatctataatagcaaaaaagtgtccacgttgtacaagctgattaggataaaacttcatattatcacgtaaaaaatcaaatccaaattcattattagtaccataagtaatatcagcagcatatgcttccttacgagcatcatcagaaagccctgatgtcaacacacctgttgttaaacctagagcactatataatgcacccatccattcagcatctctctgtgcaagatagtcatttactgtgacaacatgtacccctttaccttcaagagcatttaaaacaacaggaagtgttgccattaaagttttcccttcccctgttttcatttctgctatcttacctctatgtaatgaaataccaccaatgagttgtacatcaaaatgtctcattcctaacaccctaaagcttgtttctcttacaagagcaaaaacttctggtaataactcatcaatagtacgcttaccttcttgtaattgttgcttaaatgtagctagttgtactgggatctctttatcagataaagctttcattgtggattcaagtgcattaatctgatctaatataggtgaaagactttttaaataacgatcatttttagagccaaaaatcttacgaataaaaaaactgaacatgaaaactccatgaggtataactctgtcactttatttgattattataatagcaacagataacgactagctagtgtcctaaaaacaacaataacacactatatctttaatccatttttttgatgaatataattctttctaattagacttaacaaatacgtggaagctgatctccttccaacatatttaacaatcgatatccaccaatcacagtgtgcaaaattacttgaccaggccttgttgttttcccagcatctgagacaaaacctatctttcttgcttcactaccctgtgggaatgatctcataacatctagtgctaactcctccttttctgatggtaaaatacaaagtaacttcccttcatttgcaagatataaagggtcaagccctaaaatatcacatccagatcttacaacgtcatgaataggcatcagtgactcttcaatataacaaacaacgctagactgtgaagcaatttcattaagtgtagtagcaagacctccacgtgttggatctcgtaatacgtgaatgtctctaacttcttgaataagttgctcaaccatcacatttaatggtgcactatcactttcaacttgacttaaaaagtctatcccttctcgttggccaaatacagttagtccatgatcaccaatagaaccacttacaataattacatctcctggctctgctcgactgcctgatggagcaggatcaaccaaaacttctccaataccagttgtattgataaaaattttatcacaacatcctctaggaacaacttttgtatcacctgtaataactttaattgacgctgtatgagcagcttctgccatagatgctactatgcgctcaagaatatcaagctccaacccttcttccaaaataaatgcacatgttatatataatggtttagcacccaacatagatacatcgttaattgtcccatgaatagcaagagaaccaatattgcctccagggaaaaataatggtgtaatagtataactatctgtacttatagctacaggtgacgaaagagagactatggcagcatcattaagggtccttagtatatcattatcaaaatatttaaggaatagacctgtaattaatcgctgtgaagctcgaccaccactaccacaatctaaaagtaaactatttgtcataactttcttctactattttaagatgtaataatagtaagatacactattgtagtgtacaatataaaatactgcaatcacttttactcgataattctatatgaattatcatagctatagatatactgagcatatattaattatacctattacagtttagatactgatttttctttttacttttaaagtcataatagagaaaataatagccacaatatttaatagactgaaaatccaaaaattcatatccattgctgctgtaaatttatccatactttttgccgtaagtatttctcctccaaagtaaatattcattgttatagaaataataagcatactaagcagtaatccaaacgttctcattgttccaataagaccagcagcttgactcatatgtttactatctactgcactcataatagctgtcatattgggagaggcaaaaagaccagcacctaaccccaagatcatttgtatatatgcaatttcaaatatattagagtgaatttcaagaattatagctaaaaatagtccaaccccacacataatcataccaacaatagcaatcttaatagctccaaaagcatctgcaagacgacctgcaatcggagaaataataacttgtacaaatggttgcaacgaaaggattaaacctgtcgttaatacactaaggccatagcctaactgtaaatataaactaaagtaaaaagctaaaccaaatatagaactatagtttattagtaatgcaaaaatactatataaaaaagcatgattatgaataagaaatttgatgtcaaggataggatgatcttcagttagctcaacctttaaaaaactaccaaaaaagataattcctatactcaaaaaaactattggccatattccatttaatatccatatcattcctatagataatgtactaatactaattgcgtataagatagaaccagtccaatcaaaagggtactctgcatcaatataccattcttcctttactgtgtatttcataagcaaccaagcaataagaccaataggaatcattaagtaaaataaatatgaccaaccaaagaatttagccataatgcctgcaagacaaggactaagggatagtcctaggtaaattcctatagaagcaatacctagtgtttgtcctagtcgatcttttggagaacaattagttaatatagatagtccactagtgttcataagcgcagcaccaatagcttgaataaaccttaatataaaaaaaaatgtaatgttaggggaaaatggaagaatccctgaagtacaagtaaaaagtccaaggcctataagaaaaacccgacggagtcctaaaatatcactaatacggccagcaattaagtgaaagatagttaaagataaagcataaacagcattgataagacttaactctacagcagttgcattaaaatgcataccaataacaggtaaaagtggtccaacaccagctaacatataaggcattataaactgagctgttgctactgctataataactgacttcaatgagtatgtttttctaggatttatcataataattatataaaaaaataaaataagataacaatctattggtaaaggaataactacaggtagtaatatatattatatctttttatagaatattaaaaaatagtaacaatacctataataattatattagcatgtataaaattacatatagttattgaaaaaacgtaactatataaatctatactaaactaatatagatttatatagttacgtaaacaaggttaagtgactgcctattaaaaaataaactatacttattaaccaaaaatttctgactctaaacctaacatgttttgggcaatatccttactgtttatcttataattacctgactctatagcagccctaattgaagctaccttttcttctcttatatctatagagtgcatagcttctctatacacttctacatatagtttgcctttaggggaaagaattactttatcttcttgaggataaggttcccctgacgtagcatctgttttccctctagctactttatttgatttagttatcaagtcaccctgactcgtaaccattccatatggattattatttacatctttgatatccatatttttcctcttaggaaaacattagtgctacaacatagtagtatttactttatccaagatcattgtccaagcaagacataatatctcagtttgtaattttgagcctactttttcccattcattattaactttcaccaatataacaacttcaggactctctgggggatattgaaaacaaattttattattaaacttctctattaattctttttgcacatcttgtaccacagatgaattataaccagtgataagaaaatttttaaaaaactctttagctactagtctaactaatattttcctttttattatcttagataaactaagcggctcttctattaagctaattgcttgacgataacgttctaaccttcgtgctgttactagttgttgttcatacttttttaacatattacgtgtctgaaaagaaattattttcataacaattctccttcattcactccatcggtaaaataagaagaaactttatgttaaactataaaagtgttataatcactttaataactatttgaactcattaaattaaagaaacatcattttggtataactcaactaacaaagaactatagtataattattaaatatatattataatacctcttggctattaaaaatagcatacataactctttaaaattataatgcttaatagactagatatactattttactttaaaaaaatataggggaatttatagctttttatatttattgtaatttttaataataactacttgcttttccagggcgctaatgtttactatagcaacattaactattttatttaattggagtttttactatgactcgtaaggatagaacagaaggtatatatagtcgacgagaggtacttgatgaaagtgaacgtcgtcaatattatcttattcaactaaaagaattactttcatacgcctatcgctattctgaagacgtcaaaaaacgctttgatcgagcccaatttaatgttgaaaaatttaaaacactttctgatttaaaacatatccctatccttaaaaaaaaggaacttatttttcttcaatccattggccctaggttaggaggattacttacaaaagatattggtgatttaaaacgtatttttctttctccaggtccaatttttgatccagaagatcgtactgaagactactgggggtatacagaagctttctactctgttggatttcgacctggagatgtagtacaagtaacttttaattatcacttatccccagctggacttatgtttgaagaacctctccgtatattagggtgtgcttctatacctgcaggaccctcagacgcaggaacacaactggatatcatgcaaaaattacgagtatctggatatgttggtactgcaagttaccttatgcatttaacccaaaaagcagaagaaaaaggtattaacctccgtaaagatctttttcaagaagtagcctttgttactggagaacgtctgtcagaaaaaatgcgttcacaacttgagaaaaaatttgatattatactacgtcaaggatatggcactgctgatgtaggatgtattggatatgaatgcttccataaaactggattacatatttctaatcgttgttatatagaaatttgccatcctgacacaggaattacccttaaagatggtgaggttggtgaaattgtagttacagcttttaataaaacatacccacttattcgacttgcaactggtgatctttcctatattgatcgctctccctgtatttgtggacgaagtagtccacggcttggtagtattgttggacgggtagatacaacagctcgaattaaaggaatgtttgtatatcctcatcaagtagagcaagtcatggctcgatttgaagatattaaacgttggcagattgaagttattaatcctgatggaatcgatgaaatgattctttatattgaagcaaataattttcatcaggaagaagaacttcttcatctctttagagaacgcatcaaattacgcccagaactaagaatactagttcctgggacattacctccacatattaaaccaattgaagataaacgagagtgggattaatatagtaagtcttccattacaactagaggaaattacccacccatatatactaaataataaagagttttaactttaagttaaaactctttattatttagtaatatttttataccttttaaataaatattgtagctatacgttatttttactattatatttaattttaatattaaatatatttttttactgtatttactaatgaaacatattgtgtatacttaatgttagtattatttacttataaatatatagttttattactacaaaataatataaaatttgttattaataatagttataatacaatatatttatgataatagataagatatagtactatcgctatagtaaatatataaagtaatctatttaagttatatataatttatctattagtactgatagctgtttttagtatttatattataaaaaatgttaatgtaacatgagataggtaagataaagatacttctgcaaggtctattataagacacatttactgctacaaaaccttttaggagaagctaacatggctatgacattgacaaaagctgctatcgccaaaaagatttgttctaagtcaaacattagtcagcagagtgcaaaaaggagcttagatattatgctttcaattatgaaaaaagcactcaagaccgaacatgaagtattattaagtggttttggtaaatttgaaactttcaagaaaaaaacaagaaaaggtcgtaatcctcaaacaggcgaagaaataactttaaaagaacatgatacccttacatttcgtatttctcgaaaatttaaagaacatatgaaaaaattacattaaaaaaaaatcaatatttatatccatgaaggccaagtagagtatggctttcatggattataatgcatagtaataatatcctgacctaccctaataaaacatcaaaacacatcattaccacaaatcctaagataattgccatactggaagaatctccattaccagaagcataagactctggaacaacttcttctactacaacaaaaatcatagcgcctgctgcaaaagccaatgcaaatggtagcaaagttgttacagtagtgacagcaagcgcaccaataataacagcaataggttcaacaataccggaaaataaaccaaaaagaaaagcttttttacgtgaatagccttctcttaataatggtccagagactgcaagaccttcaggaatattttgtaatccaatacctaacattaaagaaatcgcactagataacgtagcttctggtgttcctaaccctgcagcaccaaaaacaacacctacagctaacccttcaggaatattatgtaatgtaatagcaagaacaagcaatgtactacgtggtaacttactttttctgccatctagaacaccttctacaatatgaatgtgtgggagaatataatcaagtaatcgaaggaaagcagcacctaaaattactcctgaaccaacaggcactaatgaccatttcccaagatactcagacatttctagtgcaggttctaaaagtgaccaataagaggcagcaatcataatgcctccagcaaagccaagcattaagtcaagagtacgtctagaaaactctttagatataaagacaactgcagcaccaactgtagtaaatccccaaatcactatccctgcaaggagagccattcctataggagtattaaaaaattgttctattatcatagtaaataactacgttacctatttagttaaataacacatatattaccacaaaataaaaaaataaatttcattcatgtgatccattaataggctgacaagaagagcaccagactgtcatccttccccctatacgtgttccttccaaatcttttttacaaactacacaaggcttcccaaaacgtccatatacattaagtgaattttgaaaagcaccaacattgccatcagctgccctgtaatctttaatagaactaccacaacttgcaatagcttctaataaaacttcttgcaatgcatgataaagtgtagctattgactccatagataactgtgaaacagtagccataggtgaaatttgtgcacgaaaaagactttcatctgcataaatatttccacatccagcaattactctttgattcagtaataatgatttaatattacctctcctaccccgaaaacgttctataaacgttgaaacatctatctctaacggttctggacctaacgtattccaaaatggccatactggttcttcagttgtcgataagatacggacatatccaaattttcttatatcttcaaaaaaaatagtattaccatcatcaagggaaaaactaactcgtgtatgtgtggttggacatctatcttgaggatacacaagaatacgtcctgtcatctttaaatgaatacataacgtataaacatgactatctttaataactaaaggaataagaaggagctttcctctcctaaaaggttttccaaatatagccccaataagtacatccagagatatatctccttgtacagaatcttggttatatacagtatagttcagacacattctgccattaattattggttccaatgttcgaacaatagtttcaacttctggaagttctggcatatcgatatactaataattaaaaaccttctaaataaaactttagaaggttcaaatgacttttagtaaaaaattaactaatgaggggtaacagctgcaatagcaatcatatctgtatgtgctcttaacccatgtggttccctaatattaccaatcaaaatttcaccttttttagcagggaatgttccatcttctttaagaaaaacaccttctccctcaataatatatatagcaagttcaccatctatatcacgatgatgaagaggtaattcttgcccttttttcaaattaaaatttaaaatataaaagcttgaacctttattaaccatttgttttttcatgctgatatcattaaattcagcattttcaataatatttaatgtgcgcatcttattacccctaagcctatctaaggcttatcattatattataactctagctaggaattctccccaaatgaaccataatgtaaaaacatattttacttttttacttcatcagtaaaaataaaaaataccctacaaattaataaaactagtattggtaccgggagcgagacttgaactcgcaaggggttgcccccggcggattttgagtccgctgcgtctaccattccaccatcccggctttatttagtttttatggtataaatatctctttggtcaagtttataaatgctaaaaagaaaatgttaactaattgctattacaatttttaactttatattactaacggatataatctggaatattcaatataaggttgcgtgtaaatgtaaccattttgtctagcatccaaggaaatgctacaagaagtgcaacaaaaatagacacaactttaggaataaatgttaatgtcatttcttgaatttgtgttgcagtttgaataacactcacaactatgccaacaaaaagtccaatccccaacattggcatagccattaacaaagccaactcaatagattgtcttgcaaaaccaatgacaaactctggggtcataattttctccttataataaaactattccacagtagattataataaaaagctatttactaatgagccaataagtaagttccaaccatcaatcattacaaaaagcagtagcttaaaaggcatagaaaccatcataggaggtaacatcatcatacccatagcaagtaatacacttgagacaaccatatctactataagaaatggtatataaataagaaacccaatgataaaccctgtttttaattcactaataacataagcagcagaaagtaaaattgttgggacatcatctttatttttgggttgttccatcctagcaatagagtaaaaaatagatagatctttctcacgtgtatgtttaaataaaaacgtccgtaatggagcttgtgcacgtgttaatgcttctgaaaaacctaaacgttcatccaaatacggctgtagtgctgtatcattaatttgtttcccaacaggaaacattatgataacagtcataaaaatagctaaacttgcaagaatttgggtaggcggaatctgctgaatacccatagcttgtctaagaaaatgaaatactataataattcttgtaaaacttgtaacagtaagcataatggctggtgctaatgaaagcaccgttaacataaacaagatttctaataataaagaaactttctcaggttctgtctgtccaccagacagtgtaagttgtaaattaggtatagctatgtcttctgcagcttgtatacttaatggaaaaaacaagttaacagaaagaaagataataacacatattatacaaatggaatatttttcaggaactttcagaatcatgttgctcggccccattcaacaagtgttcaaaaccctgagcatcacgttcattatatagtatagtatcttttaataaaataatatttttctctgtaataccaatcaaaaggcgtctatctaaaaattttataacagcaagacccttttttgctccaagtggtaactgagcttccatccttagtgcatctcgaggaagagctgtaggagaaggaataaaattaaattttccataacggcgaaccagccaaactgctccccatagaccagcaagtaataaacacataaagcctattgcttgaaaataatttccccatgaaaaagtggcatctgcatgtgttgctacttcatttgctgtatggatcgcctgatctacgactgtatcaaccttagaaaacttgtctacattacttcctttattttcttggacaacagctatagtagaaaaaagggaagaaataagatataaccatgccattgaatataatccccttttatcccttctatgctaactgttttacacgttcaataggactaataatatctgtaagccttacgccaaacttttcatttataacaacagcttcacctcgtgctacaagtttcccattaacaaaaacttctagaggctctcctgctagcttatttaactcaacaacagaaccttgtccaagctgaagaagctcattaataagaagacgagtacgcccaagctctgcagaaacatctaagggtatatctaaaataaaatctaactctcgacgacttccctcaggtctaggagttcttgcaatgtctgtcatatctttaaacgttgcttctattgcatgtgaaccaaaacctttttccttttcttcctgaacagcttgttgttctgtttctgccaaagcagaagcccatgcatcagcaagctcttcttcctcaacttttgcagattcttcctctgttttttcaagagaggcagcccattctgctgcaagctcttcttctgtagccataactacctcatattactgaataacaaagtctgtaaagtatatccgtacaactcttggttctcctaatatttgattaagcctagatgcaacttcattttttaataaaacttttccttctgcagaaacaagctcatctgaagttttacttgataatagtaaaataatagcatctcttactcgtgcactctgtgttaaaagatttgttatagcttcttcagaacttaattcaacatccatccctattctcaaatatttactccctgaaggatcagcaagatttactgtaacagaaggaagagagacaggttttaagagtggttttggatctgtaggtgatgatccttttcctccttcttttttattagcattatcagattgctcctgcgatgttccagggttaccccctccctctaataaatgcttaaatgttgcatcagatcgtaaaaatagccaccaagaagcacctgtaatcacacctagtagtaataataacacaagtaaaataataaaaatttttaatccagagcgcttttttggttttcctcctgtgtcattattttcaggtaattcatctactggcattgaaatactccttcaaagtcaatttcaaagtcaatttacatcccaatagtaaaaatgatacctataaataatactctacactgtagataaatcaagtaataactctttgatattacagtcgtaataaagaaaaaatttcctctaattgtttaatcgatgcccaaaaatacttgtacctattcgaataagtgttgctccctcttttatagcttggatataatcatttgacattcccatagataattctggtaaagtaatatctaataacacttctaatctatcacgcagctcacggagcttagtaaaataacaagaaacaacttttcctttatgagtaataggaggaagacacataagaccacacaacttaagtttaggtaatgataaaatagtttctgcaagaaaaggtaactcagctactgttatacctgctttctgtggttcatctcctatatttacttgaagtaaaattttttgacttggtccatcctctggaagacgggaagataatagttttgctaactttatagaatcaatagtatgaatatactcaaattgaccaacaacattctttattttatttgtttgaagtcttcctgtgaaatgccactctataggcagtccagaaagttctgattgtttatatatagcttcctgaacatagttttctccaaaagctttttgtccataattaaatacattcactattgtttttacaggatggaattttgaaatagcaataagttttactgattttttatcacgtccagagcttacaacggcttgctgaatttgatcatgtaaaaattctaatcgctcttttaaaaattcttcagatatcatcctatttcctctgtaccaaaaccaagttcatacaaaaactgattatcattaatccaactttcacggacctttacccataactctaaatgtactttcttccctaacaaagccttaatttctttacgtgccattgttcctatagatttaatcctttcgcctgcttggccaatgaccatagctttatgtgaggctctagctacataaatgacagcatatatcaccacttggttctttctagattcttcatcccatttttctacttcaacagctacagcatagggaacttcttgatataactgctcaaataacttttcccgtattatttctgctaccatgaaacgcactggaactgtagaaagttgatcctcagggaatattgcctcaccttcaggcaacttcaaacaaattgtatctaataatttatctgtaccatttttataacgtgctgaaataggaaagatttctgccgttgggaaatactctccaagtttagctaacattggtaacatacgagacttatcatgaaatacatcaattttatttactacaataactataggacgtacttcttgtctcaaaacttcaacaaaaggctcaatatccctatccataaggtcaggtttttttagatataatccaccatctaaaacacaaactatactatcagcaatagcaagaccttgccatgcagattgcaacataagctttccaagctgaccctgtacatgattcttttcggaacaaattccaggtgtatctaaaaaaataacttgcatatcatcttgtgtaagaattccacctatcttatttctagttgtttgaggctttgaggttacaatagcaaccttttgacctacaaaggtatttgttaaggtggacttccctgcatttggtggacctataagtgctacccaaccacaacgatatgtttttaatttatctccaatattactggatgactgtgtattcatattagttacttcatcactcctataattactctaaatacgttaataatattgagtaagtaatgttaacgtgacatagttattccatatatctatatatagttaattattttattctattcattccacttgggacgacataaacgttaaacaagctaacaactattaatcaccttaaaagttaagatgatccttcaattctaaaacatgattacatatataagacaagttaattatgattttggaccatagctcgtaatcgtatgactctatcatgaatatcggggtgggtactaaataaagtagccatattcccactaaacaatggtgcaacaataaataattctgaagttgatggattaccttgttgcattggaatctgttggttccaattaaaaagtttttccaaagcccctgcaagaacaagaggtttacctgtaagctttgcacctgttgcatctgctaagtactctcgtgaacgagaaatagcaaattgaatgattgttgcagcaattggtgcaagtaatgccatagctaatactacaagaggatttgagttttcaccatcttcattgtgttgtccaaaaccaaaaatagctgtaaactgtaataaattggcaatagaaactatcgccgaacctataacacttgctactgtttgaataaggatatctcggtttgcaatatgtgcaacttcgtgtgctaaaacgcctttcaattcttctggagataaaatacgtataatcccttccgtaacagctacaacactatgttctggatctctacctgtagcaaaagcatttggtgcatcttcaggaataaccacaatccgtggcttaggtatacctgcactttgtgcaagctcttctatcatagtatgaatcataggtgcttcatcaaatgataaaggttctgcattatacatacgtataacaaagctatcagaataccaataactccaaatattcataagtaaagctaaaccaaaggcaataataaggcctgtcctcccacctaacaccccaccaataacaataagtaagccagaaaggactgcaagtagaataaaagtttttatttgacttgtcacaactctaatactccttaacaacaattttgtattgcaatccatataatccaaattatcttactatagtaagaacaggaatacattttgacaagaattaataagctaaacttgattctttaagcatattagttaccattcaatcctagcctaaaagctttattaattatactatacaaagtaattagttatattgctatgcattaatttaccatatgttataggataactttgacaatgacttatccacctataatgattattgccttactaaggagctagttatgtatattggacttgatatgggtggaactcatactgatgcagttatcattaataataaaaccgttgttgctgaagcaaaagtacctacaaatcataaaaatttttcatcctcaatagaacaagctctaacacaacttttttttacatcaaaaatttcttcctcactagttacacgtataacctttggaagtactcttgctatcaatgctattgttcagaacaaacaatcaccagtaggacttctcttaggttctggcccagggattaatcctaattggtttactattggcgagcatagctttcttacatctgctaagcttgatcatagaggtatagagattaatcctttacaaagaggtccactacaaacatgtatcaatgaatggaaaaaaaatggtattaatacatttgcgtgtgtatctaaattttctattcgtaaccctaaacatgaaaatgacatggaattagttatacaaaaaatatttgaacactatacaacaccagttatctcaaaaggccatatgctatcaggcagtttaaatttcccacgtcgtattacaacagcatactggaatgctgctgtatggaatatccataataaatttataacttcgattgaacttgtacttaaaaaattttctattaatgctccaacttttttactgaaagcagatggtggatccattcctttagcactatcacgttctatccctatagaggctattcactctggcccttctgcaagcatcatgggactcatcgcattatatcctacttctgaaacatgtctccttttagatataggtggaacaacaacagatatttctatcatagtaaaaggtaaaccaatattatcaacatcagggctaattatccaaaaaaaacctacattgataagagcattagcatcttactctatacctcttggaggagattctttagtaaatattcaactaatggatggaatcccccatataaaagtaggaccactacgtgaaggacctgcaatggcttttgatggggaacaccccacatttcttgattgtcttaatatcttaggctatgcacaagtagggaatattactaaatcttatgatggtatttccttactttctaaaaaatataatataattccacaagatattgcacaatctgttgtatactcagcacaacaacaactacaagaaggaattagccatcttctcaatgaaataaacagtaagcctatacatacaattgaagcacttcttgaaaaccataatgtacaaccaacactatgcatagttacaggaggacctgctagtagtattaaaccattattaaatactatactaaatctacctataataacaccaactaagtatactttagtcacaaatgctattggagcagcactgacaaaaccaacagctgtattagaactttatgcaaatacagaaagacaagtttgtttagtaccatccctcaacacccaatatcctattcctaattcttactcactcaaagaagcttgtcatgacgcatctaacattctgaaaaaataccttcaagatattacaaatacaacaacttccccaataatagatattattgaagcacaagaattttcaacactagatatggttggtaaaaaaggaaaagatatcagagtagtctgccaagtaagacctgaacttgaattctctttgaattaacaataactgttattcatagtagattgagttatgttataaacgtttctattcagaatctgtattaaagtttggcaaattttttgtgggtcaaaataaggagcataagttttagttatcaactctgtagaaatcaattctataccatttcttataagccatttataaggaatacctcctggatagttatttgtatttctatctacaagtattatatctggataaatattctgttttgcttcaccgcttcttaagatatatcctagatattgtatttgttcttttaaagaaagaccaaataactctggatcattattaagattaggaataaaaacttttggacaacaggtattacatattgcttcagcaatccccacaggcagtaagtttgcaaccacagaagaaaaaaaacttcccataggaaaacaaatcaagtcagcagaatgaatatattcacaaataaacgtatctgccttaagaacagctaattctactttgtccagtgattttgaaaaccatattttacgtattggtgaagaaacttggctatctttctttcctgtaaaacgatgttgacctatataaatttcaccgttttctaactgtacacataaatgtatattagcatctataagaggtctaacaacacctttactccctaaccagtgagaaaaaaatgtcactgctgcaaaaagatctctgttttcttgtaaataccttgatgtcaaaagaatgttacctatacttgctccagataaatcaaaaccttctggtaattgtgtaagaaaaaaacgaatttcttcctttacaaattgtaaagtgacatttgaaaaatgatacatcattggatggttaccatccctcagttgacacatttcatctaataatgcctttgatgatgcttgttttggtaacctgtattcaaataaaaaaatcttttctttatattctggagaagttctatctgctagagatatcaatcttgaacgtaaatcccccacagcaggcatagaaaaagcttgacgtaatactgcagaactcccaccagaatcaaatggtgtaataagatatgtagcattctttgtgtactgtgtaagacacgatgctacttctctaagagctgtcccaccactaaaaaatacaatcttaggatcaacaactaatccctgctgtatacttaaaccataagtaagtgtttgatatttcattaacggtgacaacttagtcattgatataccctcttccaaactacctataatataacttagctataatatctaatagtttctctctacattaacttaatagatctctaaataacctttgaaaatactatatgtaacatatacctaactgtaatttactactctatctatattgaccatgaaaatagctagttacatctgcatgcaattatatatcaagttataaaaacttcaatttatctaattttgtattaaatttaattgtgatagataagtcctattacaactagcgagctctctatttttaacatctagctatattataattgttaataacaaacttattgaaaagttaaattattcaattttaacaaatctaatatttgttgtactacttactactaaagttattcttcatcataagaatagcgtatataaaagtacactaacaatacattaatataatattattgctagctaacctaattagttatctactaaggcctaattatcactactccttatccttgataataaaaactaatacatctctgtgtttttattctttctttatagatttcatatagacaaataaatcttgatgtcttgtcagattagattatgtaagctattttttatatactacattagtaagtaacaaaaaatctggctctatctaaatatatcttacttagagatcaaactagattaaatgactttattctttttaatcaaaaaactatatatgataataggacaaaacaatttgtctgctggagatattcatgactgatgtaacactccctaaagcgtatgagcctaaagacatagaaacatattggcgtgaccattgggaacgtaacaatacctttactcctaacctgaatgaaaaaggggagccattttgtatagtcattcctcccccaaatgtgactggaattttacatataggtcatgcattaaacattacgcttcaagatattctttgtcgtcatgctcgacaacaaggtaaaaaagttctctggataccaggaactgatcatgcaggcatagcaacacaacatgttgtagaacgtatgcttgctaaagaaaatgtatctcgtgaacaacttggtagggaagcgtttatccaaaaagtttggcagtggcgtgaaaagtatggtacacatatccttgaacaacttcgtagaattggggcatctgttgattggacacgtgaaagatttaccatggatgacggcctctctcaagctgttcgaaaagtatttgttgagctttataaacaagggtatatctataaaggaaaatatattgttaactggtgtacgtattgtcatacagccctctctgatgatgaggtcgaacatcgtacagagaaagggaatctttactatgtccgttataaacttgaagatggttctgacgatctaataatagcaacaacacgtccagaaaccattgtagccgacacagggatctgtataaaccctaaagacaaacgatatactaatttcatcgggaaaaaagctgttgttcctattataaatagaattgttccaatcattaccgatagctatgtagatcaaaattttggaactggagttttaaaagttacaccttgccatgatgttaatgattggatgcttggtcatcgacataaccttgcttttatccaagccattaatgataaaggtatcatgactgatgaggcaggaccttatactggactctctaaagaagcatgtcgtaagcaaattgtagaagaccttcaaaaacacaatcaccttatcaagattgaagatattgagcatacagtaggatactgttatcgatctcatacagtaatagaaccgtatgtttctgaacagtggtttgttgctgcaaccaaaatggctcctcaggcacgtgctgctgttccagaacaaacaaaactttttcctaaaagctggttaaaaacttattacaactggctagataacatccgagattggtgtataagcagacaaatatggtgggggcaccgtatccctgcatggacttgtacttcttgtaataaactttttgtagaagaaactgaaccatcatcatgtccatgtggctctcataatcttatccaagaaacagatgtacttgatacatggttttcctctgcaatctggccatttagtactcttggttggccaaataaaactccagaactggctatgttttacccaacctcaatccttgtaactggctttgacatattatttttctgggttgccagaatgatgatgtttggccttcattttatgaaagatgtaccattccgtcatgtatatattcatgctcttatccgtgattcagaaggacgtaagatgtctaaatcattaggtaatagcatagatccaatccaaatgatagaaaaatatggaacagatgctttacgatttacccttactgcatttgcagctatgggaagggatattcgcctttcagaagaacgaattgaaggctatagacatttcatgaataagctctggaatgcttctcgctttgcattgatgaatcttcccacagattctgttcaattagtatcaatagaagagattacagctctccatcataaatggtttttacaccgccttgaagaagtaaaaatagatgtaaacgactctataaaaaattatcgctttaatgatatggcccaaacactttacaaattcttttggaatgaattctgtgattggtatctagaaatcataaaaatagatttcaaagaagaaggattacacaaaactcaagcacaatatgttctttggcttggattaaaagaactacttattctcctacatcctattattccctttatcacaagtgaaatttggaaggcgcttcctggtcatacacaagaacttgcttgtgaaccctttccttcaactcgttctcactgtctttctcctaacgaagctaaccagatgatctttttacaagaggtaataagtgctattcggactatcagagctgaactaaatatttcaccatcttataaactctctgtactattacgtcctatcgactctatccaattatctcttctacaaaaaaattctaaccttattataacacttgctaaattagaaactcttactattgattctaaccaaaaagctcctggtccttcagcaaaccatatcatccaacattgtgaaatcatagtttttctatctggtgctattgactttaatgcagaatacaaacgactaactaaagaattaaataaaattgatactgagcttcaaaaaataacagaaaggttaaaaaataaaaattttatacaaaatgctcctaaagaaattgttcaaaaagaacaggctagaaaagatgaacttttatcttctcatcaaaaaatatatgtattaatgaaccaatatcttaataatattgataaataactacattaatagtatgtataaataattttattacttttataataaaaaaataaaaatgagtataaataatacaaaataaatatataaatagtataataataaaaatttatgtatatacattagtataattaattataaatttatattataaaaattttaagttttactaaataactaaaaaaatttttatgtataaaaatatgttatatattattatattttttatgtattaaatctaaattataaaatatatagtactaactacttaaaactgtataattaccataaagatagtaatactacttttatattttttctttttttttttgaaaaatatttaaaaaaatgcttgaataacaacttgttatagactaatcttatatctagttagttgagaatattatattgaatatatctcttttaaaaatggaaaaaaattttaaagagatataataataaaattaagtaaaatttctaatagtcataattatagaaatacaaaaaaattacattagagttattttttagtaaaaatatgactgtggaagatagaataataaatttctacaaaataataaattcctacaaatatttttaattcaataactataataaatatatagtcatatattgttttactactaataaaatattgagaatgacaaaagaagtaatgtagtatttatagctaggtttgtatacaaatttaaccttactactaattattactattaataacttttaagtttagctttatactaggaccttttatacatattctttgaaagaatttagttataaaagtaaattataggaagtcatcaatgtaataaattttaaattttttaattatgtaatttaagttagttttggcattagttaaatttagatgtagtaatttattaattttaatattttttacaggaagaggttatggcatacctatctatttcaaaaaatcaatgtaagtcttttttaataactctagtaactatatttataatgacatcaataccacaactagctgaggctgttgaacactttgctaatggtgtccccacagtagtacaagatgttaatgtcccagctgactcatactttggtggtgctgactcagctgtaggtccaaacccaatagcttctactcaccttacaatttctacaactcaagggtttggacaaaatgcactagaatttgttgtgggtggtagccttgcaaatggtaatggaaatccagccaacataaatggagatatagtccttattgttgaaaatacaaatactcagaatagtattattggtggtagtatggcaaatgctgcccctgtaactattggtggctctatttttatgactcttagaaatgttactgcagtagatccaatttttggtggctctgtagatgtacgctttttcgcccaacagcaacctaatgaggatcaacttgtaggtggagatattaatataaatctagagaatgtaacaactccagagttttatggtctaggctacgcaaatggtgtaatacctgttaacgtcctcaatagaaattttttggtagctgttcagggaaatataactacaaatatttctaattctaacattgcaaccgttatgttaggttcacactatgatacaactatggctgtaggaggtaatggaacaataaatgttgataattcaacaattggttatctttcagctagcaatagtagcgactttgttaaccctgacttaacaaacactgttacttttaatattggtcccaacaacagaatagcaaatatttttgcaagcaataatggtgttatcccacattttattgtaaatatggatggatctggaacagaaatacaagagttaacacttggtaatgtaattcgaggtggccttgtacttacttcagagctaaatctatctcaaggaacaataaataatttaatcactggtaatgaatattacgatagatcaggattaagaactactgtaaatgttagaggaggtacaattggcgtattgacttcaggaggttctgactattcagaattaaacttcattcctggagaaatatccactatattagcaacaaattcaataggtaaccaagattttgcatctctttctcaagttacaatacaccaaggtgctgaaactctttggggaatgagagatgaagtatttgaacttcaaactaacaatctacagttaggtggtgaactatttattcctgctgatggaactggaggagtagccctaatcacaaatcatattattgcaaattcaggtgtgataactccggtaaatatgtctccagaaaggatgacccctatcattggatttttagaacctactggtgaggtagcacagttaacaatatatggaccacttacagttaaccttagccattctccagaaattcttgggaaaattattacacaacctatccctattgcagttactaatagtgatgtttttggtacttctaaactatttgtggaacataacacaaaaggactaatttggagtgatatcatttttaatcctcaagataaaacatggtatctaactaactttagaggttctgaagacttctacggactttcagcagcacgggaagcatctaattggttaagacaacaacatatctggagcctacaacgtcgctctaataaattattagatcatggtgtagatgggttatggatgaatgttcaaggtggttatgaaaagcttgatgcagcaattggtgatgctaagatgccttggattatggcaagcttaggatatgattttatgcataagttaagtgatttttataacttaaaagcactttatggattcggatttggatttgctacaggtaaaaataaatggaataccataaactcaactactaatgatatctacatggggctggttggtgcctatgttggccttatgcatgaagccacaggcctttatggtacagtatccggacagtttgcaactaaccgtacaaaaacaaaatgtacaggctttgatgaaacctataactggaaagaaaatgtaccaacagaagctattgaaattggttggaaatggagcattgatgagtttaaaataaacccacgtggacaagttatttttgaacaattatctaaacatcactttagtctctcacaagaaggtgatactgctatcttagataaagaattcttaactacaaccgttataggtatctctggagaatatgatttagatttaagaagtaaaataataaagcttcaagctagtgttgactggattaaaggcatctctggtgactttgcagctaaatccgaagttcttaatatgaagtttaaagataaaaatgatactagtacatttagaggaacactgggtgctagtgcacaacttctagaaaactttgaagttcaccttgatatttttggtgatcttggcaatgataaaggtattggtggacaggtaggagctacttatagattctaactgtaaaaattagatatgataaagaggcttatggaattattcacaagcctcttttatatctattcaaaaaactataaatttaattttctgattccatcaccagtaatcataaaattttacaaaaaataattcatgtttcaataactaatttaaaatactacaatcttaaataactttatcacattattatctctacgttttttctcttactccttgaaaaaacttgcaaactaagctaatagacactattatatctaaagattagaaatagtagttacctacctaacatatatctaatctataactataggttagggagagctgatatggataatgaactattccaaaatacatttaaaaatattgtattacgattagataatggtacagagatgtcttttttaggtagacagtttgcaggtggtgcttggtatgatgaagaaacaaatatacttacacgacaacatctttatgttacagatacaaatgaacatatttattctattgtatcaattgatggaggtaaaaaaagcactagggcttaccgtgtaaaactttgtggaaatcaatgtatacttaataatggtcgtacagaaatgatacttgaatttgaaatgcttatggttgcagtaagagctttaacaggaattgataaagaagatacaccatctcttaacataattgaagaaacacttcgtgctgcaaatgcataatcgtacttattaactcctatagatatttatccttccataagaatattacataaatgaatactataccataaaagttctattatctataataatattattaccccttgaatccccataagttgtttatattttattttttatcattaaaaggagctaggttgtgaatacacattatactcttattcgtgaagttaaaattcctgaagtttcaggtattgctaaatattggcgacataatggtaccaatgctgaaatcctttctatctctaacaatgatgagaataaatgttttggtgttacatttagaacacctcctcatgattcaacaggagtagctcatattcttgaacattctgtattatgtggttcaaaaaaatatcctataaaagaaccatttgtagaactacttaaaggttcattacaaacttttcttaacgcattcacattccctgataaaacttgttatcctattgcaagtgcaaatttgcaagacttttataacctcatagatgtatatttagatgctgtttttttccccctgattactaaatcaatttttcaacaagaaggatggcatatagagatagaagatacaaaaaaacctcttacatacaaaggtgttgtatttaacgagatgaaaggtgtatattcttcacctgatgctatacttatggaaaaatcacaacaatctcttttccccaatatgctctatagccttgactcagggggagatcccaaaattatacctcaacttacatatgaaaaatttatagagtttcatagctctcactatcatccatcaaatgcacggttctttttctggggagacgaccctgaagaagagcggcttatgcgattactacctattctgtcacaattcacagaaaaaaaaatagacagcactatccctctacaatcctacttacaaaaagaaaacgtattaaaagtcccttatgctactggcgaacaatctgagaaaggacatattacttttaattggcttttatgtcctacaacagaagctgatgaaattttactacttgagatacttgaacatatcctcctaggattaccaggttctccattacgtaaagtgcttattgaatctggtcttggagaagatgttacaggtgttggatttgaaaaagatcttcaacaaacctatttttctgttggattacgctccattaacccagaatcatctcataaaatagaaaaattgattctccaaacactagaagatctctctaacaatattcctacgcctattattgatgctgctattaatagcatagaatttagcttaagagaaaataattctgggaaattcccacgtggtttaactgctatgttgcgaagtcttaggacatggctctatgacgctgatcccttaattccattacggtgggaaaaaccattatcagatattaaacaacgtcatgcaaatggagaaaaaatttttgagaaagctatccgaaaatggtttatagaaaataaacataaatcaatagttactctaatcccagattcaaaacttgcagagcaacgtgaaaatgatgaacaaaaacagttaaaacaaattaaggatagtctatctgaacttgaagtaaaccaactcataaaagatactattactctccaagaaaaccaacaatgtccggatacacctgaagcacttgcaactatcccatcccttacattaaaagatttaccacctaaaaatgctgtcattccctgcatagttgagaatgacaaacaaattactattttaaaacatccaattgatacctcagggattgtttatgttgaatgtctcttctctttagatgctgttcctgatgacttactctatcttgttcctctttttggtcgctgtttaacggagttaggtacacacaaacattcttttgtagaacttggagtactattagcctcaaaaacaggtggaattgatatctctccacttattactacaactaggggaactcaactacctgtagctaaactatgtataagtggaaaagctacagaagatcatattacagatcttttttctatacttgaagaaatacttttagaaacacaatttgatctcaaagatcgctttctacaaatggcattagaagaacgcgcaagaatcgaacaggccctcatccctgctggacataatgttgttataacaagactacgctcaccctatagtattgctggacaaataagtgaaaacattggtggtgtctcgtatttagaagcattacgtaatcttacagaacgcattcattctgattggcattcaatacatacagatctcaccaagttacaacaaattattattaataagcagcataccatctttaacattactgctagtgaaactcttttattaaaaacattaccacttattaatcaaattgaatataagcttccatatgtagaaaacaatcctatactacgcactaccaagaaacctcttataggagaaattcttcaagtaccatcacaagtcaattatgttggaaaaggttgtaatatctatgagttagggtataaatggaatggttctgcacatgttattacacgccatttacgaatggcttggctttgggatcaagtccgtgtccaaggcggagcctatggtgtcttctgtacattggatcgaatgaatggttctctcacacaagtatcatatagagatcctaatgtagaaagaacaattaaagcatttgatcagtccgccaattatcttaaaaatcttcagttaacagatagagaattaacacgagctattgttggtgcaattggagacttagatagttatatgcttcctgatgctaagggtatggcttcacttacaaggtatcttactgatgatcaagatgagatacgtcaacatatgcgtgaagaaattctaagtacaacaaaaaaacaatttacagagtttgctgaagtaatggcagaagtagcaaaaactggctctgtatgtatccttggtggctctgcagccactgatattgcacaacaaaataattgggttattcatcaattattataaaaaataggtataactttggttaaaaagttaaaaattttatgtaaaaggaagaggtatagtaaaaaaagtattaatttacactgtaattccatataaaaggaggacaagatgtctaagcgtgtgattatcattggtgctattgctgctgggcccaaagctgctagtcgcttgagacgtcttgaacctacaacagaaatacttatggtagataaaaatgaatatatttcatttggtgcttgtggaattccatactatatctctggagaaataaattctatagattcactacgttctactgcctatggtgtattaagaacacctgaatacttccaacaaaaagggattacgacatacaataggacacaagcaatatccattgatcgaaaacaacaaattgtacttttaaagcatcttcttacaaataaagaatacacagtttcgtatgataagttagttcttacaacaggaagcaaacctaagcttccaaccattaaaggacaacatctaaaacatattgtaactattagtaatactagccttgactctgctcaacatatccaaacattatgtgcatcaaaaaaaattaaacatgctgttatcattggtggtggttttattggattagaaatggcagtttcccttgcaggaaaatggaaaataaagacctctattattgaggttaagccacaagttatgccaggctatgtctcacctgactttgctgatatgctttgtcatgatcttacaaaaaataatgtagaaatttttacctctgagcaagtattacaattcaaaggtaaaaatgattccgttaattatcttattacagataaaagaaaaattgaaactgatcttgttatctttgcaacaggttttttacctgaaacaacactagcccaagaagcaggacttgcccttgatcctaagacaggagctatacttgttaacccatacatgcaaacctcagatccaaatatttatgcaggaggcgactgtgtagctgtacctaatcctattactggagaacatagttggttcactcttggctctttagctaatcgacaaggccgtattattggaactaaccttgctggaggtagtgatacatttccaggtgcagtagggaactggtgtatcaaactttttactttatctgcttgtggtgctggactcacacttgaaaaagcaaaatccctaggatttgatgccatctcagctagtattgagcaagcagatagatcacaatcataccctgaacatagtataatctctttagagcttatcgtagattgttcaaaccgtagagttcttggcattcaaggtatatgtagtgcttcagatgttgttaaagcacgcattgatgctataactatgctattacaatatggtcatcctacaatagatgatatttctaatgctgaaatgtcctatgctccaccattttcttcagctatggatcctattaatgttgttgcaaatgtagcagataatatactttctggtcagctagaatctgttacctcaaaaacattcacaaccatgtggaatgatagaaaaaataatactatcttctttgtagacacaagacctacaactgcctcaaaagaacttaaagaaaaatatcctaatgaatggcatactattccttttgaagaaatttcatcatatctttcagaacttcctaaaactcagccaattgcattaatttgtaatactggcctaagagcatatgaaacaatgtcatacttgcgagggaaaggcataacaaacacaatagatgttcttggtgggatgtatgcaattaaaaagcgaggagaagaattatagtctcacctcttacctactcatcatactaataatttcaatcttatgtaaatatggccattaattctggagctgctcttctatctttcccattacaacttataaaacgctgtacgctaaaacaatctatctttgccatagaatacagttctcttgtcactggtgtatcatgattacttaatacaacagggatgccttgctccgaagctttataagcaagattagccaaatctttttgatcatcataactgaaaactgttccagagtatgtagtaaaatttgatgtatttgaaagtggtaaatatggaggatcgcaataaacaacatctccaggataaagatttttaaaagcatccctaaaatcacatacagcaaaagtaatagatgtttctttcatcttctttaaaaaagcttccatttcttttttaggaaaataagggttattatatctcccaaatggtacattaaataatcccatggagttataacgaactaacccattgaaagaatgtctattaaggtataaaaataaaactgctctttcaaatggatgtatagaatgattaaaaatagttcttaatgtataataagtgttagcattattataccgagtagtaaaaaaagtttgacatatttttataaaaaattcgccttcttgttgtaatacttgaaatagccctattaagtcaggactgctatcatatatacaaaattctttaaatgaagcatttaaaaatacagcacctgaaccaacaaaaggttctataagacgctctccttgaggaagatgatataatatacgatcaagtaatctaaatttccctcctggccatttgagaaaaggcttcactaactgcatacaaattttcttataaaaaattaatataaaaacagagagagacttatagtttccccagaggagttggaccaggttttcctccggatttttcaaaacgtattatagcttctggcataattttttctaatgccaaaattcgattctcattcactggatgcgtacttaaaaattcgggtatagactttttatctaataaagaaaaatttttccataactgaatagactcttgtgggtcatagccagcatctgccattaaaagaattcctacatgatctgcttcatattcatgctcacgactatatggtaataaaattccaacagttgatgctgtaccatacacttgtctaaatatctctgcataagatgattttccatatttatcaatagttgctgcaccaacctctccaccaatttgcaaaaggagagcctgactcatacgttctgaaccatgcctcaaaataacatgagtaatttcatgtcccatgatagcagctagttgttcttctgttttggcaacttgtaaaatccctctataaacaaaaactgaaccaccaggcacagcaaaagcattaacagtatcatcatcaatagtataaaaacgccattcatactctgatttaggcaaaactgcagcaatccgcttacctatttcattaactttctttgaaaattttgaatctttttctattttttctttctctaaaagagaagatgttaattctgaacctaaaatctcttcgacacaagtgggtataaggagaagctggcttctttctgtatatggagttattgcacatcctgttattaaaatagctgttataaaaaaaagaccttgtagtattatagaatgaatcatactctttcccatatggtatggttaaagattattagcttgaccttattaaaaactaacataatgctatttgtggatatagtaaactttttattagacttttttgaggaacgtttttatgggcaaaaatctcattattgttgagtctcctgctaaagtcaaaactatcaaaaaatttcttggttctggctatgtagttcaatcaagcgttggacatatccgtgacctacctaaaaaaaatattggtgtcgatgaaagtaaaaacttttctcctcactatgaaataatccctggaaaagaaaaaattgtccaaggacttcgtgaaacagcagcaaaagtagatactgtttatcttgcaccagatccagatcgtgaaggtgaagccattgcttggcatgttgcagaacttataaaagataaaaatagtaatatacaacgaattcaatttaatgaaattacatctaaagctgttcaagaagcattaagtcatccacaaaaacttaataaaaatctttttgacgctcaacaagcaagacgtattcttgatcgcctagtaggatataagatatctccattattgtggaaaaaagtaaaacaaggcatatctgctgggagagtacagtcagtagcactaaggcttattgtagaacgggatgaagaacgttatacttttattcctgaagagtactggttattcaaagcaaatcttgaaggttctaaccctcccccttttaaagtagaactttggaaagttaataacaaaaaacctattattcctgatgcagtaactgctgctgcacttgaacaacaaataaaggataaaccatttattgttgactcaatagaagaaaaagaacgtcaacgttcaccaaaacctccttttataacttctacacttcagcaagcagctaatcaacgtttaggttatacagcaaaaagaactatgaatattgctcaacgtctctacgaaggattagagttaggggataaaggaacaaccgctcttattacttatatgcgtacggactctgttcgaattgctaatgaagctaaacttgctgcagcaacactcatagaacaaaaatttgggaaggaatatttagctaaaggtggtaatggtagaaacttcaaaggaaaagctggaattcaagatgcccatgaagctattagaccaattgatgttacaatccttcctgaagatgtgaaaccttatcttgcaccagatcaatatcaaatttatcgtcttatctggtcacgatttattgcatcacaaatgtctgtagctcaattccatgatacaataattactataaattgtgaaaactctcagtggagaacaaaaggagaacgtcttctatttcctggatttttagctgcgtttcccaacacaaaagaggaagaagatactaacttacccgtgctacataaaggagaaatactaaagctacattcccttataaaggaacaaaaattcacccaaccaccaccacagtttaccgaagcatccttagtccgagagttagaagaacttggcataggtcgcccatcaacatatgcatctattatttccaccttgcaagatcgagattatgtacgtcttgaagataaacactttatagctacagatttaggccgtgttgtttgtatgttattacaggactatttcaaaaatcttatggatgtaacatttactgcccatatggaagaactccttgataaagtagctgaggggaaacaagattgggtggaactactccaaaatttcagtgaaacttttaatcccacattagaagaagccacaaaagctatgagtcaggtcaaaactggtttagaaactgatattaattgtcctgattgcaaaaaacctcttgtcataaaatttggtaagtctggacagttcttagcatgttctgggtatccacaatgtaaatttacctctaactatctacgagatgataaaggacaaattcatcttcaagaaaaggtccaacctgaactgcaaaaaataggtatttgcccaaaatgtaataaagatcttgtactaaaaaaagcacgtacaggaagtcgttttattgcctgttcaggatatcctgaatgtaattatactgaagctttttctactaatgtgccttgtccttgtgaaggctgtaaaggaatgttagtagaaaaaagttctaaaaaaggtaaagtattctatgcctgtaatacatatccaacatgtgattatgctatatggaattggcctatacaaaaatcatgtccaacttgcagttttcctattttagtcgaaaaaattacaaaagctaaaggaaaacatcttgcttgcccagaaaaaaactgtcgctatacttgtgaactagaagaaagcgatatagaaacctaatgaaacctacactgctattaagtgaatattattctatatggtatttcttattattacttcatcttaaaaatacctaaattcaactgatggagtcaccttatgtctatttttactattccattagggatgttagaaacaaattgttatattatacaaaaaggtaaaaatgcacttgttattgatccaggtggaacttctcctgaggatctctctataataactacatttattacacaaaataagttatctatccaggctatattgtgtacacaccttcactatgaccatatttttagtacagcaatgcttcataaacaaacaaatgtaccagtatttgcatccacaaaagatgatttcttattaaaaactcaggcaaaaggaggaataggaaaactagcttgtccaaaaatagaaatttttcaacatgaagatttgacagaaggtctacacacatttaatacattttcatgtgaggttattaatacaccaggtcacaccccaggaggagtatgtctctattttaaagaaatgaatactctttttactggtgatacattgttctaccacactgttggaaggactgatctccctggtagcaatacaaatgatttatttacatctttacataaaaaaatctttgtacttcctaaatatacaattgtataccctggacatggtcctaaaacttcaatagaagaagaattaacaaataatccctacatctaactattttattttgctaattaatatagatactacctatctacaattacaataaggaaaactgttgtgtctaatagaataaaaaaagttgttttagcctactctggaggactagatacatctgttatattaaaatggcttattgctacttataactgtgaggtcattgctgtaactgccgatcttggtcaaaatgaaaattttcatgacattgaagaaaaagcaatagtaacaggtgctagcaaagcatatgttgtagatcttcggaatgaatttgctaaaaattttattttccccatgctaagagcaagtgctatctatgaaggacgatatctccttgggactgctattgctagacccttaattacaaaacttcttattgatattgctagagcagaagaagctgatgcaattgcccatggagctacaggaaaaggaaacgatcaagttcgatttgaacttgcagccgcagcacttgcaccagatattcacgttattgctccgtggcgtgaatgggatttaatatctcgaactgcattaactacttttgcagaaaagcataatatccctatatctacttctcataaacgttacagtaaagatcaaaatatgcttcactgtagcattgaaggaagtgaattagaaaacccttgggaagaacctcacattgaatcatatacaatgacagtccctattgaacatacgcctgattctccagaatatattacaattgattttgaaaaaggagaccctattgctattaatggtcaacaaatgatccctgctgatattatgtttacattaaatgacattgcgggaagacatggtattggacgaattgacatggtagaaagtcgctttttagggataaaatcacgtggtgtatatgagactcctggagggacaattatccatatagcacaccaagatcttgaaggtattacccttgatcacatgactcttcttactcgtaatcaacttattccttcatatgcagatgctatatataatggattttggttctccccagagcgtgaagccatacaagcattcatggataaagcacaagaacgtgtgactggcacagttaaactaaaactttataagggtatggcttatcctataggcagaaaatcttctaatagtctttatagctcccaacttgcaacctttgaagaagacacttcatataatcacaatgatgcaacaggttttattaaacttaaaagcttacgtatccgtggttatcaaaaaagttaatgaaactctcataaccttattataataattataataagataattatctctattcctatcgttaagttagaattgaagggaaagacatatgcctaaaaaaaaactttggggaggcagattccatgaaaagacagctagtcctgtggaacaatatacccagtctatttcttatgataaaaagatgtatgctcaagatattgctggttcaaaagcgcatgcttccatgctaggccgtcaaggtattctcacctctgaagaagtactactattactcaatggcttagactctattcaaaaagaaattgaaacagatacctttccctggaagattgaactagaagatgtccatatgaacatcgaaagcagacttacagatcttattgggactgtgggagaaaaattacacacaggtagaagccgaaatgatcaagttgctcttgacttcagactctttgtttctgataatattagtctctggaaaagacaactccttgaactcataggaatttttgttgcaaaagcagaagaatacaaagatactatccttcctggttttactcatcttcaacctgctcaacctgtgagcctagcacaacacttacttgcttatgcatggatgtttaaacgtgatgttcaacgtgtatatgaatgtaatcaacgtgtaagagtttcgccactaggtgcagcagcgctttcaggtactacctacaacattgaccccttctttatagcaaacgaactccatatgtatggtgtatttgataatagcatggatgctgtctctgatcgtgattttgttattgaagctctcttttgtgcaagtgttattatgatgcacctttctagattctgtgaagaacttattatttggtcaaatccagcatttggttttgtccaacttcctgatgcatatgcaacaggttcatccattatgcctcagaaaaaaaatcctgatgtagcagaaattatgagaggaaaagttggaagagtctatggtgcattatacaatatgcttactatccttaaggcattgcctctaacatataaccgtgatcttcaagaagataaagagcctttctttgatacaaatacaacaatacagtcatcactttccattatggcagatatgcttgcagcaattacatttaataaaaacaaaatggctagtgccctttcggatggataccttaatgcaacagaattagcagattacttagtaactaaaggactctcatttagagaagctcatcatacaactggatcaattgttgcattagctgaacaacaaaaaattccattagaagaattatctcttcaggattttcaatcaatatgtgataaaatcgaatcagatgtttttcatgttcttgactaccatgtttctatagaacgaagaaaaagtactggaggtactggttatcattctatagaaaaacaaatagaaaaactcaaatcttggttgacacaatagatagtatcatgaaaagtatttttgacttataaaaactcaacaccctataataactaaattactttaaaaataacttttaactacaatttacaactatgagaacatcaaactctattcatgctgttgcattactttcaggtggacttgatagtcttcttgctacaaagcttattatggaacaagggttaaacgtacgttgtctccatatgatttcccctttctttggcaaaccaaacaaagtgcaacactgggaatcattatataatcttacaattgaaactatagatatcagtgaaaagtatatagagatgttacagcaacgaccaaggtatggttttgggaaagtacttaatccctgtatagactgtaaaatgcttatgatgaatatagcatataatcgtatgctagaattaggtgcttcgtttattatttcaggagaagtcattggccagaggcctatgtcccaacgaaaagaagcactaaaccttatatcaaaccgtgtaaatatacaaaatatacttttacgcccactttgtgctcaacacttatcaccaacagatccagagcactctggacttgtagatcgcacaaaattacttgctttttttggtagaggtagaaaagaacaactacagttagctaattctatgggtatacaagaaatacctacacctgctggtggctgtaaacttgctgagaaagaaaatgccagacgctattggttagtacttactaagttaaagaacccaacagttcaagacttcaaccttgccaatgttggaaggcagtattggtataataattattggcttattattggtagaaacaaagaagataatcaaaaacttgaagttttagcttcccaaaatgatactcttataactcttaaagacattcctggaccaactggactagcaagaaatacaaccttatgggattcaaaaatcctttatgaagctgcaagtcttgttgcatcctactcccaagtagctataaaaaaagaaatgcctatagaactacaactaacatctcaaactgaaagtatatgtctaaccgtaatcccatcacgaacaggactattcacaaaagaatgttttcaatttgaagatgttaaacaagctataaaaaatgaatttcatccatcaatagcaactgcagtatcttaatgaaaaatcttattgtttcttatctcattaactacaacaatattcttaactcatattgaaataattacataatatcagatggataatctaacttaagttagaccactaatttaatctttaaaagtcaataataataataataataataataaggggaaataagagataatttaagatgattctttatcttacctaataaaactatgattaactactaaaaataactaaataattatcttaaataacccttttaaaaattataacaatagataacataataacaaaccatataggataagacaattaaccaaaaacttatgcactgctaagaattaatgtaattatacattcaatcaaaaattataaaaaataaactattattactttaaaaattaagtcttattagtgattgtaaatgaagtatagtatcacgccaacatgtataagttttattgggatatcagactttaaaaaagattttattgggaaattatttgctcaatatattaattgggcctacttaaatacaaatcacattatagaagcatattatgggatggcaattaaagacattatttataataataaaaatgaatcatttcttactatagaaagtaacattatctcttccctcaatataaaacgaaccattatttttacaggaaatacttgtagttataaaatggaaactatgcagtatctacaacacattggccctgttgtatatatctatactccatttttaaaaattcttccatatcttaaccaacttaaaagaaaagatatgttaataagtccatctatcactactaataactttgaagcatttttttatgaaagggacacactatatagttactggtcaacacacataataaatgacaatcagcctattcaaaaaattataaacatccttcttaacttattctataattcacaagtaaaaactaactaacttgctttagactcttcacttacaaaacctttagaaggtatttctattaattttgttccagcaatttttgaaagatatgtatctccaagagttttaatatgaccatctgtatttgaaaagtaatttaaatgtgactgttcttcttcaagaatattttcaaaaagctttgcactaatagaatcaccattttctctacagatattaagaagcctattgtactcatcaattgtttttgtctcaagatctgtatcataagaaaaaactattctaactttttgccccttagttaccttctcagcaagatcagatgttggttcaccatcaagttcttttatacgctctgcaaacatttctgcatgcctcatttcgtcaattgcaattaatttaacatttgaggcaaactggccataatcagaattatcaagattataatgctgattcatatattgactaatagcatgtaactccatacttcttgcataatttaatgcatcaattacctttgaaatacgttgttctttaattgttttctttgccattccgtttactccatagtatatttagtataacaggctaaaaatgatacagatacaataaaaagttattttaaataatctacaaattaaattaaagattactatcatccatctattatatataacgtatttaatcacaacaatcttaaattaaatacagttatattaaaatggaggatgtttactctttctatatgtattattttgaaaaaataacaaacacgaatataaacgtcaacttttatgatagactacccttttcaaatatcttattataatatataatctaatttatcgtaatgaatatcaacataacctcacacaatagataaattctaacacaattgttattatatattgtaaccagctaattaatgattattataataaatatatgcatattttctagttaaccaaaataaatgcgttttaaggattttttcaatgtgtggaattattgcctatgctggccatagacctgctatccctgttattattgaaggacttcgccatctagagtatcgtgggtatgactctgctgggataggctttatccaaggggaaacgctctatcatgttaaagcaaaaggtaagcttaatgctttagaaaaaaaactctctacctattcaccaatgctttctacagttggtattggccatacacgatgggctacacatggatctccctctgagtgtaatgcacaccctcatgtaaatgaagaatgtggtattgccattgttcataatggaattatagaaaactttcatgagttaaaacataccctttctgaaaaacagtaccagtttaaatcagaaacagatacagaagttcttactcatcttatcgcagaaggatgtaaacaatattcttctttaatcgaaagttttgcatgggcattacgccaagcaaaagggacatatgctgttgcccttattagtgagaataatccttctatggtacttgctgcacgtatgtctgctcctcttattctcggcgtcggtactggagaatattttattgcttcagatattccttcattcctaaattatacacgtgaagttgtattcttagaagataatgaaattatatctattacagataactcatggcaagttaatgatttatttacattaaatcctgtaaaaaaatctattcagactatctcttgggataaacattcagcacaaaagaatggttataagcatttcatgcttaaagaaatttttgagcaaccacaagttattgaagaatgtctttctgaaagaattaatcaagaaacggatcatatctacttcccagaattagataatttacctatcccaacacgtataattgttgtagcatgtggatcttcctatcatgctggaatatggggaagaaatatattggaacgttgggcaaaaatcccaacgctacctgaaattgcttctgaattccgatatcaagagcttattactagccctggagaactaataatagttattagtcaatctggagaaacagcagatacattagctgcacttaaacttgctaaagaaaaaggatgtaaagttattgcattatgcaatgttataggttcaacaattgctcgtgaagcagatgctactatttatacccaagcaggaccagagttaagtgtagcatctacaaaagctgtctgtagtcaaatgattcttttagctcttcttgcattgtattatagtcaacgaaaaaaaaccttagatattcagttacaacaaaatattttatctgacttaaaacaactaccacaaattttacaacaatcacttcctactatacaggataaagctaacgaacttgcaaaatgctactcaacgtcttcaagcttctttttccttggtcgaggagaagcataccctttagctctagaaggagcattaaaactaaaggaactctcatatattcatgctgaaggttatgcctctggagaaatgaaacatggcccaattgctcttattgataaaaatttcccaacagttgtaattgcactatacaataatctattttctaaatctcaatcgaatattgcagaaatacaagctcgaaatggaccagttattatactcacgaatgcacctcttcattctaacacatataatgaaaatcacttatggactataccaaacgcaggtttttttacaaactttgtaaccctttcagcattacaactttttagttatgaaatggctggataccttgggaaagatgtagaccaacctagaaatctagctaaaagtgttactgtagaataactaatcttttttacttatctccttacttttcttttataacttagtaatatatttattatatactactaacttataaacataataaactatcttatgttacaggatacctaattccaattataatctataactaaatcttgctattatataacatatctagcaacaattactatatatatatatatgtcttattgtactaatttttatatcatattttccttattaaagttaaaaaggatatcaataacacatattatctactttttttatacaatagtacatctatttctttttatacatccttcctatgcaataattgatctaggtacacttggaggaacaaactcacaagcgtgtgctatttctcctgatgggcttactgttgttggattctcaaatacctacctaggcactaagcatgcatttaaatacaaactaggcagaatgtttgatcttggtacacttggaggaaaaaattcaactgccattgcaagttgtgagtttggtagcattataattggtaattcagatataccagggaataatcataaccatgcatttgtatatacagatcatcatggattatatgatcttggtacacttggaggaaaagactcaaccgcaaaagctatctcacatgatgggaaagttattataggttcttcaatgacagaaaatggtgacgttcaagctttcatccaaaaaatgacaacattctttgtaaatgatcaaatatttttcactcctcaaggcaatctaattaacttaggaactctaggtggaccattctcatatgcaaccgatctttcttatgatggaagagttattgttggcagttcaagtactccacttggtgaagttcatgcatttaagcatacgcctctattgggaatgttcgatctaggaactctaggcggaacattctcaatagcagagtctgtatctcttgatggagatactattgttggttcttcaactacaaatcaaggaacaacccatgcatttaagtatacacctctattaggaatgtatgacctaggaacattaggtggtacttactcaaaagctataaaagtatctggattaggaaacgtagtaataggagaatcatcaatttgtaatgggaatatacatgcgtttaagtatagtgactcaacaggaatggttaatttagggaccttaggaggaaatcagtctcaagccataggactttcatattatgggactatagtagttggaaatgcacatacttttcaaaataaaatgcatggatttatacatacagatcaaacaggaatacttgatattggaacattaggtggagaggagtcttttattacagggatatcattagatggacaaataatttgtgggtatagtaatacttctaatggagctattcatgcttttatccatcgtactaatatagctgatattcccccaagaccacaatctgtaataagattacaacaacctctttcatctcctgattatactccacctgactctttcagcatcattactagtaatccttccactcctacctcagaaacaagctctcttagtaaccatacttctcctccttcctctccctcaacttcaacccctcttacttcttattgtcaccacttcccttcatctttttataaacttacaaatatcacccctctatctagtaatgatacctctatggtcatggcttctcctcctgcctctccttcaacttcaacccctcttacttcttattgtcgccacttcccttcatctttttataaacttacaaatatcacccctctatctagtaatgatacctctactgttataacctctcctcctgttcattcttccaataaatcttatctatcaacgcctaatagtgataacagcttaaaaaataatgattgtctttctccacaatctagcgctaatagctcaccaatttgtggacctgattcaatattacaaaggttacaagcagtagcaacaaagctggaaatatttcaacaacagcaacaaacctcttctagcagtaatcctgaccaaatagatgggaccttacaacatagctcttacgtttcctcccctcaacaaccttcaagaaattctgctacctatcattcttctaacactgaatctcctgatacttctgggaactttacacctccagaagaagaagaagaagagcaacaacaaattattcagagattaggagcaacaaatcctcaattaaaccaagctaactctcaagtaagtacacaaacaacatcttcatcacaacaagtaactcctgaaactgaagtttatattcaccacctatttaacccaagaaaacttgttgatgtacataatacatcactagcgttagaacttgatgcagcacagttatcaaatattcttgcaaacaattatgaagaaattaaccaagcactcaactctgattgtaatacatttggtccatatggattttgtttaaatgttgggaaccgttatttatcgactaaagactcaaaagtatctcaatctataggtatggttaatgttgctttcaaatttactccttatttaagaattggacttgctttggacaaagctctaacaaaatacaataatcaatataaaattaaatgttcagaaccgcttacaacattatattgtgtctatgagcaatcaacacagtctacaggaattaagtttaaaataactggaacccaaagaatatctgatgtaaagattgctcgaatactactaccatatacagaagaaggtaaaggacatacaaaaatgaaaagttttggatttgaggcacaagctggttatgggtttatgttatcttctaattggtctctccagccaattgttggtgtacagcatataaatattactcgaaaaaagtatcaagagtttcctcaagttcaattcccaattacctataaccaagcaggaattcaaataacaaatgtagaaacggctgctcttctagaaggaaaagtaactaactggttcaccatagattttacaggaagtataaaacacattatacatcaaaataataaaagttatactgggactataccatatctaggagagttcaagttacctttcaacacaaaaaaaaaaaatactatgctgttagagttggtacaacatttttacttgattctaaacaaactttacgtttacaaatagaatataatcaatctttttttcataaaaaaaataacctttgtgtaacccttcaatattgtgttggattttaaacactaaaatagaaagcagtacctatttattaattattagttgtatctttatttcttatataatattaatagatatatctttatgatagttatataattaaattaatttatttagtactattatatgctaagatgtgagcttagctttatattacacatggttaactcactatctatctattaagttgtaacttcttttctttcagttacatattgttcaaactaataactagtaaaaaatgcactcatacctattagctgtacctatgacaattctattatactagcagcatgttctccaccaccaataagcataataattacggcaactgaactacaaatagccccctatgccaaaagttccccatgagaaagatttcctaataagatcataaccaaaggagcaacaattaaaggagcataaaattgataagaaaataaaagaatatccattacattttggatactcatagaataattacagaactaattcctattaataatgaaaggagtctggcaacaaaggtttctctttaaggatgttcagttaacttaggagcaaagataggctcagctacatcatgaatcaaacatataacagtagcattaagaaaagcatctacggatgacattacaattgaaataacagctgcaatagctctaaccctcttagccctattaggaagaataactttcaaaattcgttagcatcctttgttaggttaacagccggagataaaagatcaatctcacctgtaactaaaaaaatggaatcgaaagcaagatagtaaaaaatacccccttagacattattgatgcattacgtccaaaattctttggatatatggaggtaataaagattctcccactaaaaaagataaaaataatccaataaataatattgatgttaattcattattaaaaatctgtgtatgttctaaggaaatttttgttaaaaaagcttcaattccacctaattcttgaagcccaatccataaaaaagaggaattataattactaatacagtaaattgaacaagatctgttaatacaactgaatgcatactaccaaatatagtataactaattataataccacaacccaataaaataccttgtgttgatgttaaacttgtatatgtactaaacaatacacccatagctccaacttgagtggctaaaatacctgtacataatacacatcctaaaatttctgcaataatacgaccttttttacctaaattaattcccataatatctccaactggtataccatgtcgaaagttatccatttttaggagctaatttcataaaaataaaaaagagtgctatagagaatccccataatgttattgcaaaacctatcccaccactaaatgctttagcagcattaccacttgaatagccgccacaaataaaaaatatagataatgtaacaaataaaactaaagaaaggtaagaacgtcctgctattacatactcattaagattttaacattacgactagctatcataccaactaaaaatacaataagaagataatgttctataattagtatatctattgaagtaatgtattccataaatttatacttttcttaaatattagaactttctttatattaattatataaaatgtttaattgaattaatttatataaaactagtaataataactaaacattataaataagatattctatctttagaataaaatattaatagttaatttgttacaaataaaagataaaaaataagtataatatactatttactctatagttatactatttgacatagaaaatcatttttcttagagagagtcctcagtttatacaaagacaaacttatttaatttttttttactcctaataatttttataaaaaataaaaattactgatattgacttcttactatgatatcttattttatgatatcttatttattattttaaataataccaaaatacactaaactagaaggttagattaataaaaacaatagtataagctataatatccactatatataggaaatgtttcatgagttctcagtacttccaacaaattatggaagatttttttaaagaacttgggattgaatcttataaacaacctgaattaacttatgtcttaacagcccaagactttggggaaattattattgctgaacaacctacacaatgggttacactactagctcaaataggagaaaaaccttttgattctagtatattatggtatcaagatatacttattgaaaattcccttttagataaagctactcctaagcccagtcttggacttatagggaaaacacttatacaaaatgcacaactccccttagaatacctcacattacaactactaaaacaatggattgaattctttcttaaaattgctgttgaaaatcaaaaaagatttatcgtaaattggaaagaaaatgtataaaactacttactatatttagtagattatatacttttacttagagagtattaatcttattgttgcttacaatgctaacacattgtgagttgtttgttttcctataccaatatctatttatcactctttatttctaatttttaaatatcaaaatatatgtattaattattggggttgcattcaaaatctactaattatagcttaccagattaatgatacatatgattttcctcatataaaaaattattattcaactaacctaatagatcaactccttatgtttattcttatttaactataaataaaggtagtgattatgtatcctataactagtccacataatacttctcaagtcacatacaatattcctaactggacaataaataatgaagaaacaaaattagctaggcttcaaaatgcattggaacaaaaatatcatataggattatctttaatgaaaacctgtttctccagaacgcctagtttaattgttggtagtattgttggggcaggggtaggttctttatctttaccactttccttaccttcagctactattgcaggtggtattacaacagttggtatacatgcatataatactttaaaagaaaataataatagtagtaaacaaataataaatcttattactagttcaatagtatatgacatagttcataataacaataaacttcaaaaagtatgcttagaacctttttctcaaataaaaggtgatttttacagaacattatgccgtttctccattgatgaaacagaacaagcaagcaatggtatttgtcatggccttagttttctttggattcgagaaatgatcattaatgcaaatgatccaagttctatgaaagaaagcctccagcaattgaaaacaataaatagttttcctcctaatgaacctaacagcattactatacatagagaactatatactaatgatgggtttggttactttaaattactacctgaatgtgaagcttgtacaccaaaatttcacttttgtagagaaaaagaaacctatggcacaatagctagtgaagatagacctgagaaaaatcctattacttttgggaagacattaatcaagtccctattagaaagtgagcttagtttcaaccaaaaatatgcaaccattacactaagtttatcttgctcaaattggctagaaaaacatagttgtgctgtctctattgaaacaccacctttaaaaaatgaagagagagaagatattgataacagtagccaaccagttataattaattattttgatcctaattatggtcagtttcaacttaaaacatcaatttcagaagctcctcaaactttttctgaattctttcaatatttcaatagtattgcctatccttttgtaaataaaaattactcttgtgaaataatattcaaaccacataaaaatgctaaaaatagaatacctcaaaatgcattaagattaacattgtgataataaatgagtaattaaaaaattaactacaataattaaaaatagtaaaaataattatatataatatatgctgactacattgtttaattattaataattatatcctcattatagtactaagcaataaataaaaaattgccttactaatgatatgatactgttatataaataatataattttactagtatcactatatagtaatatataattacctatactatctatataacaaatatcgttaagaacatatattttataataacgtataaaatctatttttttaacttaattaaaacgtattacaaatttttctacattaactttgtaagatagaaaatattttagcctctgtataaagaatttttgactaccttcattatattttgtaaactagtataagtaaggaaacaacacaacagagatatcaatacaacaccactagcttactcttgtggaatagatggtaatggatgatgtgctttactgttatcttgtacagaagtcttattgctctgttgttgagtgcctgatacatccagataatttacataaattggctcttgctttagctctggctgatgatgttgtccctctcctggatttaaactagaaccttctgactgaacttgtctagtcctataggaacataatcctttaactccattaacaacatattgcactccatgaataatagctgctcctaccctacctagactactttgaatcgatgtaaccatccttgacaaaaaggaagactttgttttctttagtatagacttaccaggaacagcatctggatcatatgtagttctgacatcacttcctggagaatatacatacgtgctattactactctgatcaaacctaacgcctctatctccagtagtctgttttaatatagacttaccaggaatggcatttggatcatacttagtgttaattctttcctcttcgtgtgttacgtcatcttcatgaggataggaataaccggaattgctattttcatcgaatgtcactcgtgggccattattaaaaagtttcattacttttatcctccacatatatactttaacatattgatattattaatatataaatatacattgttatggggactaattataatctaagctgtatattctcaaacaaataatgtcctatttattaacctaaccaattctatgtaacaattacctaactgactccattcatttcaactatctttagttattcttccctttattaccacttgtagagatagaagttgttttaatttcagcataaatgggttctgttacatgtggacctggtgatacactctttaaattttcgtatataacaggcttcattttaccaggagaattaggcccaagggtaaaatcaagttctgcataaataggctctgatgaagggttgttttctggaataggaggtaacggacgctgtgcaagaggggtactaggatgaacaactgtagcataaattgtatctggagaatcaacaggatttgatgtaaatggtccagatgtattctcgtgacgaggaactatccttggtgtactacttactttctttccttctgaagtacctgttgtatctttttttgcatcataatcttttaaagcttgatgtgtacgagcaccaatcattttcatagtagaatgctttaccctctgaagagtattactccatgacgcacgcaatttgcttaaaattgagctctcttttttagtaggctctaaagatttgttttttacagaactactagtaccagtggcattaccattttcttctactccactattatgactactgctatgtttaaattgaattttcatcttaccctcttacttctttacgttgaatactatcaagtagagcaataacaatcctatatgatatgtaaaaagtatatgtatctcctaactatatgcccaactaaaaactcattaatattactctcatagaaatttttacaagacggtaatgtcgttatggaaaaagcaaactaatatatcttcatctacatcctagtattgtcataactctataaaaaatttataattaatcagtaaattttgctaaatagacgttaatctttttcccctgctttgcttcataaaaaatacacatgttagaacacaccaaatattaacccatcacaatcttgtctcatttttcttcttccaaacaacgataactcagctaattaatatttagatagtccatactacacaacaatcatttactggtattaacgctatctagacaaataactaattacctttgatagaatcataggtaactatctcctactattttccttttcaggtcagaaaaaaattttaggacaattacaacaaaaaataattctagcataaagtatacctttaactacttcttaataaaaattcaggggattaactaaagtaatacataaaaaaattgaaggaaataaaacaaaatcaattaatcttgctattatcattttaaagaaagtataaaaacaattttatagtatagttatagtatagttatagtataagatattatgatgtattttagcataatgtttactaagtcaaaaaattgattgtaatcagctgttaaaaaggtagaaatatcttgaaagatattcctacctttttaacagctgattacatatttatataaatatttttatgcttgtttcttaaaatatacatagctacatattgtactctctcgtagagggcaaataaaaatgtacattatgttatgtatagttaaaaaaaacataatatgcttctcagtaatagccttactcagccagactatagttatactccacaaaaaatagtgtatttctcctcatcttaatataaagaatgctcttctttagttacatgaaggggaaaatacaattcaaccatggaggtttatagaaaaagtattcctaagggatagtaagacatttgatgacatattgataaagactaatattaagcttaacaatatcttattgataagaaagcaacttttttttacctgttacaaactataatcaatattttctttttttaattaaaactcatctaaataaaaatataatctaaggaatactccttaaattatatattactcatcattaataatgttaaaaaatcaaaaataaatagatatctcaaccaataaaagattatctgtcaatctgtaaaactcttaaaactagataagttacctatagtaaagaaagagattcaaaaaaatattgttataaaaatatctatccacaaactgcactctaaaattgaagttaaatatcttgcatacttctaagtagattactaaaatttactccatagtaacccctaccaatatttattcttatgtattctctataacctttatttcacgtttattaattaataagctataacaatctatctctttatatcttgctgtattatatataatttctctcatatcaactctcaaccattttaccttaaaagtcgtaccagaaatgaattcccatacattgaggttttatacttttatctttttcaccatcttttgtacggattccaacattaacaccaactccacaattatgagtaattttaaaatcaatgttacttccaacttcaagctgtttatatcttgatttatctttaccgcttgagatacttactgaatacaatgatattggttttgcggttacacctgtattatttctctctcctaaaatagcagccccccatgcttggattttacaaacatctgaaatatgccaatcgactttcaatccagctctatgttcaataacatgttctctagttgcacttatttttgcgggtaatatccgaccagattctttatatgaatcccaacgagctgttgcaatagatacttcagcataaggtgtaagcatcatcattggagtaatttctatattataccctacacgtgctatgccaccatttgttgaagtatgtgctgcacctttagttgtgatacgttcaccagcatgagtaaatacacgtgtattttttgtttcaccccatccaaatgtgccttcaacatatcccataagccctggttcagctacattccatgcagcaataactgaagcttgatttgtttctgttttagctttagctccaccatatgcttttgctatatctactccttgatactctttttttctctccctaccttgagatatagctgtaccaacccataattttggaaacataggtatagcatacattacaccagcttgtgttgaagccccgctatttctttgactacttgcttgtccactgagtgaaccaaatatacggaatggtttctcagatgttaatcgtgctgtattcatatttaatgctaacactctcatagaattttgtacttcttgtatagctccatgtataacataactcagtccttttacagacccttgatttgctattacattatagcctgattgaggttgtgttggttttttatctttatcttgatatactaataagtttaaaaaatccttcactttctctaataattgtctactatctccttgtccttgaatattattagcaccaaaccctggagctggagccatattcccaagaggatttccagaaccagaatctatcaaaataaattcactccaatcaccttcacttcctagatcacttgaactatcactgctatctagatcacttgaactatcctgagtatcactagtataactagtaatgtcactggaactatcatcaaaatcatcttcgaaatcactgtcatcgaatttatcatcaaattcgtctgcactatcactaacagaaccttcactgttatcagtatcagtatcaatatcagaagaaacctacactaaccccctatgccacatatcttctaactcttgtccaagagactctaattctgatttcaaactttcattttttttatgtatagcaaaaagttttgcacgtaactcttcattttgattggaaatctggaaaaaaccatacataccttcatacactctttctcctttttctaggtcttccttaagcttaagccatttttgtcttccttgttcataattttcaaccaaacaagaagaagataatgatgatggcgatgataacctatctctctgataatcttgtatatcttgatgttgagcaatcactccagcaaataaaagctccatagcagctctattctttttatagtcttcactttgtcttcctgtcggctttaaaggctcttttaagctttgtgcattccacccttcttctttaaaaaaaaaagcaccaagtttactttgtgcctctttaaatgcattgtttggctcatctcttggacctataggcttctttgttggctgctgtggtggctcatgccgtttttgcataaagacttccagtttggctttagcagtatcaaatgaatcaccaggctctccctcctgatgaagacttaatggacaagaactagatgaatccaccaaacgtccattttgataagagcttgctgagggagaagcagatgactgatctctttctcccctttcgcttatagtattcctagaatatgtcccatttaaaacagaagaaaacaatgactgtccttgctctaaaaaatcttgtttcattccatgctctacagcactactttcaggatgaggagcatcccaaccatcatcaccccagtcttcatcattatcagagttatttgatgtagttagttttacagaggtagttaagggaatacttaatctttgaggcttttgaggtactagtggtgcctgttttatagaggagtcttgtgtagtagtagtagtagttgttgttgttgttgttgttgaaatattacttgttgagtctattttcacagacatcttactacttgaacttttagttaatggtttatccacctcttgagttacttttaccacagaagagcttgaaactacacttgataatgttgccgttgaaataacagaagagctaactagagaagaaggactggctgaagcaaaaggtgctctcacttgttgcccttctgggactggctgttgtctttcttgactatatgctacttccagtttatgtagtctatgttccgcactttctacattactggcagcttcatttaactttttctgtaatctaggatcatcaggatttctctcaacttttttatttacttccttatatcttgtaacacacttctcaagctcaactcttgcctttgtaagatctttttttttattttatgtggatcggtcttacctttttgtttacttatagtatgactacttaaatcctcatccctttcacttgaactaacactagaaaaatattttcctaacatttctttaagctctgattctaaaatcccaagtactgtttgagcttgtttaactgtttgaaaggaggcatttaacccctcttttgtttcatgagtactaacctgctgtgatctaagatcttctaataatttttttgcttcttcaattttctctacttttttttgtatttcttttcctgaaggctgatgtgatttatgtttagaatgatgaagaggttgtttcacttgtttaacatgctgtctatcactactttctctatctgaagcaaatactttactctttccacataacaaacaaagtaaataaaatgttgtcaaaatcagttctttttttaaccatcttgctcttaaactctttttacagataaatttagttgtaagaaactttaataaaatttgctttactcttataataactgtaaaaaaatatatatatatatattattttaattacattaaataaaaatgtatctatattcttactaaattttatatacataatgcatttctccataaaatacactataatatatttatcgtgtaataataaattatatataaattatgaaaaattttttatgatctataaaaataattatttaagtataaataaatataattataaataaatgtatgtagctacattactatattgaatagatatatagaaaattatgaataaataaattgttaaaatctatattaacattatttataaaattaaatatttatgttttattataaactttattgaataataaagagatacgtataaaaacatacaattaaaaattaactgcatgtatttatattactataaaaaatacatatgtagtagattataaataaattaaattatctaaatctatattactatatttatatagataatatgttctactttattagacactattttgatatgtaataagcaaaaataaagactgttaaaaattaactatgttcttttctttgatgggacaagtgatatgaaggaattactatagtaacaaaatatcctaattttttaccatattaaactactatttcaataggttaaacaaactcctatttattttttattataactaataaaaacaaaatatacttttatcctaactgaggaataagtaaaatatattttaatatattttatgtcaactaaaaaattatttttacatactttttataaagttaaaggtataatttattattttactataaaaaactattttttatttgtataactatttaacacatagctatataaaagtataatcagtttttatatagtataatacttcttatatagtactatatacatatagatataattattttttacatagattatacaaaatattttgactattgatacatttatattatattcagcagtaaacagtagaggatattatcatttttttgacttacaaaatattttcattttgtattttatacaaggctaattatatcgaataaatgttctttataaggacaatatagtcactcatcatgaatacaaaatatctttttatatctaaaatgaaaaattacctaattcctttaaactaattctttttaagcaatattataatatataaatatattataaaaacatatcataactcttagaaagaacataaacctttcagcttgagcacaaacagcaatcataaagcatctcgagcatgtgtatctctaacaactatttcacatctattataaataaactcttattttaaacgtcaaattaatgactgccttgtttactcccataaataacacaaccacatttatacaaatcgatccttcctgttgctatctttccactttctgctagtgagcaaaaactttaaaaaactatatgttatcaataattgttgctttaaatgatgttaggagatggaacctcaaggacataaaataaaaaagtttatctcctccataggacatccattttacaataataccttaacaagagataattcattaatcttttgaaaacacaaatgaaaataaaaaataactactaactataatataataatttatctattaatttagaatagttcataatcatatagctaaaagatatccttaactactttgtaataaaacttaactgatacctatttttgttattaggagttttagcaatatttttatccttaaccttcacttttaaaaaagtatagcactggcaatacataacactacaccttcttaagctcacaggacatacaatgattggctctttttagaaaaattgaaagttattaactaaaaagatacgtttggatttataattaaatagaagacacaatccagactatttaccaaactaatcataataacaaactaatttattttaatgtattatcaataagtactctatacattaaaaagtcaggataaaaacaggataaaagcagataaaattataggataaaattataagatatgaataacacctttaaaatactggtcgggatggcgagattcgaactcacgaccccttgaaccccattcaagtgcgctaccaagctgcgccacatcccgacgggctgacagatacctttaatatgacaattatgtcaatagacttttcttaccttatttgtatataattattaaaataataactagcagattgtcttagcgtacatactgtatctaaaaaataaacctatgaataaacgacattgattatatatacattacctgttaaagaattatcttattttaataattagttaatgttatcatttttttactatttaatgataccgataaagcagcttttggaggactccaatgattcagacttcccctattccagttaatctttctttaccctataaaattgctgatatctctctagcagatttcgggaaaaaagaaatgcaactttcagaaagggaaatgcctggtcttatgacattgatccaacgctataaggagaaaaaacctttaaaaggcctaaaaattacaggttctttacacatgactatccaaactgctttacttataaaaacactttattacttaggtgcaaatattcgttgggcctcatgtaatattttctcaacacaagatcatgctgctgctgctatcgcagacctaaattatgccagtgtttttgcatggaaaggagaaacattagaagaatactggtggtgtatagagatggcacttacatggcctgatggttctggccctgaccttattattgatgatggtggagatgctacacttataatccataaaggggtagaaatcgaaaaaaatcctgagttattaaaacaaagccatagtgataaagaaataaaaattattatggatcgacttaaagtaatgtataatacttctcctactcactggacgaaaatagctaaaaatattcgtggagtctctgaagaaacaacaacaggggtacatcgtctttaccagcttgctgaagaaaataaacttcttttccctgcaattaatgttaacgattcagtaacaaagtctaagtttgataacctttatggatgtagggaatctttagcagatggaattaaaagagctacagatattatgatcgcagggaaagtagttgtcattgctggatatggtgatgtagggaaagggtgtgcacagtctatgcgcggctttggagctcgtgtaattattacagaaattgatcctatttgtgcattacaagctgctatggaaggctttgaagttatgacaatggaacaagctgcagctgaaggcgatatctttgtaacagctacaggcaaccttcatgttattacacataaccatatgaataaaatgaaagatgaagctattatttgcaatattgggcactttgataatgaaattgaaatgagctggctagaaaataattcagaatgtaaaaaagtaaacattaaaccacaagtagataaatgggtcctccccaatggacgatcaatgattgttcttgctgaaggaagacttgttaatcttggatgtgccacaggtcactcaagttttgttatgtctacaagctttacaaatcaagtccttgctcaacttgaattagcccataataaattagaaaataaagtctatattcttcctaaaaagcttgatgaagaagtcgcacgcctacaccttgaacgtcttggagtaactctaacaacattaacacaagaacaagctgactatattgatgtccctattgaaggaccatataaatcagaacattacagatattaaaaataatatttaactataaatttaataatgctagttaaccatattcaaaatatattttttaatatattgtatattccaataataaaaaatataattaaaacaattaatggattaacacttatatattttgctgaataatagcatatagcatttaacatggatatacccccaacctcttctaactaacgtttctaacttaatagttaatttttactaattacctatcattctacctaattcaatatgtttttattttttatattgcataaataaggaaatactcatgagagtagcaattatatcatcttcttttgctcgatatgataaaaaaccacttgaactacttagccaagctggaattgaatatatccttaatgaacaggggtatcatctcactgatgaagaactaatacaaataatagatggttgtgctggtatcattgttggttcagaaccattacccaaaaaagttttagagactaacccaagactcaaaactattgcttgctgtgggaaacatcttgataatattgacgttgaatatgctcaagaaaaaaatattattatttataatcctcctaaaggttatgcaattgctgttgcagaatttacagtgggccttatcctatctcttatacgtcaaataccataccaagataaagaagttcgttcaggagtatggcataaacgtataggaaatcttttacatgggaaacgtgttggtatcataggtcttggacaagtaggaaaagcagtagctgaacgactattaccatttggtgtagacattgcttataatgatccaaatgtatatagtactacattccaaaaatttgatcttgataaacttatagattggtcaaatattattactattcactgtagtaaacctataaaagccggccctattcttgacttgggaagactttcactaatgcaaccaggaagttatattattaatgtagcacatggaggattaattgatgaaaaagcattatgtggacttttaactgcaggtcatttagctggagctgctctggatgtctttgggaaagaaccatatgatggtcttctaaaaaatattaataatacaattcttacaccacacataggagcttatgcaaaagaatcaaaaataattatggaaacagatgctgtaacaaacatcattgatacattaaaaaactcctaatttaataattgctccttaacaaaaataaacatgtttgatacctctactcttaatagtgctcaacttgaagctgtcactgcaccagatggtcctgtccttgttattgcaggagcaggtagtggtaaaactcgaactattatctatagacttgcctggttagctgaacaaggtattcccccatcttctatgttacttcttacctttactcgtaaagctagccaagaaatgcttcatcgtgctacaatgcttcttaattatagtcttggtgacgttaatggtggaacattccatagcatagctttttctactctacgtcaatataaaccctcctgggcaacagggaaagtcactataatagatgcacaagacaccctaacttctctccaacactgtaaagaagaactcaaaattgctaaaggtgatcgttcgtttcccaaactacaaacagttgcagctttattaagtagagcaagaaataaagaaataacatttaaggaacttatacaaaaagactctcctcatcttatctcccatattgattcattaacaactcttgttgaacgttatactacatataaaaaacaacaaaatttacttgattatgacgatcttctttttgagtttgaattacttcttaaaggtgatgaatcaaaaaacattcctccattagctccattatttcaagaacgttatcaatatattatggtagatgaatatcaagacacaaatcgtgtccaagcacgtcttgttcggcttctttctggaaacacaaataatacaatggctgtcggggatgatgcacaatctatttatgcttttagaggagcgacagtaaacaatatcctagaatttcctaatctattcccagggaccaaaattatacgtctagaagaaaattatcgttctacccaacctatattagatacagcaaatgctatacttaaagagtcacaagaaggttttcataaacatttatttactaatcgtataggaggagaaaaagttcgccttatacgatcattaagcgatcttactcaggcaaatcttattgctaatcgaataaaagaattactatctatatatcctcccaaagaaattgcaatcctatttagagcaggatatcaatcttaccatttagaaattgctcttgccaagcatactattcgattcagaaaatatggcggcctcaaatatactgaagctgcccatattaaagatatgatggcatttataaggcttattgttaatccactagatatgccatcatttttacgtattgctgccttttcaaaaggagttggccccaaaacagctcaaaaaatttaccaaatagcagcacaaggaaattttttagagcttcaaaaagtttgtaataaataccctgatcttcttagtgatatgactctacttgatgagatacgacaacagcctttagaacctacagaaatattaaccaaagtctttgaacattatcaaccaaaacttatagtccatttccctgaagattggccacgccgtcaacaagggcttgaagaacttatacatattgcttctgcctatacagatcttgaacaatttattgccgatctttctttagagactccagaagaagagctgaatgaagaagaaagcattgtgctttctactattcattctgcaaaaggtcttgaatgggatgctgttattatccttgacttagtagaagatagatttccttctagacattcgcttatacgctctgaagattttgaagaagaaagacgccttatgtatgtagcatgtactagagccaaaaaacagcttgaactttctgttcctactacactctataataaacaatatggatgcaatgaacctgcaatcccaagcccttttgtacaacaacttccaagtatagtaatagaggagtggcaagaaggttattcaggcaacatatataaaaaaattacaatacctactaatcaaccagatagcaaaacatgttcccaaatacctgcttctaacaatacatataataaagaagagttatcttatagtttttgtcgacacaaaatttttggtagaggtaaaattatagaatatttattacctgataaatgtagagtaaacttccctggatttggccttaaagttatcttaaaagactacctaactattgaagattaataataaagggatattatgaaccagtattcttcattggtttcagaagaacatatcctctcgtgtattaataaatattttcctgatcaatctcattttatcacagctggtagaggtgatgactgtgccatactttctgtaacatcacctctatgtattagcactgatatgtttattgagaatattcactttcgccatagctactttagtccagaagatattggttggaaagcattagctgtaaacctaagtgatatagctgcatgtggggcacaaccaataggctttactgtaggacttgctttacccttaaatacatctatagatattctagaaggaatatattctggaatgtcccgtcttgctaagcaatttaacttaccgttattaggaggagatctctcccaagcatcagaactctctatttgtattacaatattaggggaaactcatgctcctttattaagagcccaagcacagccaggggacattatttttataataggacaagttggacttgctcatactggacttcaacttttagaacaacaggggacaaaagctattgaactatatccaaaatcatgtatggctcatttaagaccttttcctcttattcatgaaggtcttgctctttcaaaaatggcaaaaagttggtctcagcaaaccaacactcctcacagactagcattaatagataactctgatggtcttgcacaagatattcctagattactagggaaaggaaaaggagcagatatcaccatacctgcccttgatcatgaaatcattcaattcattgagtcacattatacagaaaatgaatactctcctgacttacatgcagttataggaggtgaagactatagtcttattggtacatgctctcctaactttggagcaaaattaaacatggttatatctaatcttactattattggttctgttacagactcagaacctatcttatttaatggacaacaaatgcaaggatttgatcactttagggggaattatattaacccctcgaacaaattatagaacatatatctataacttaatgtagttatacattctccttagcttcattaatccattgcataagtggtgtctccacttctttacggatagacattaaatgctcttctgtgtctgcttcaaatcgtgttactaatacaggttgtgtatttgatgctcttactaaaccccaaccataagggaaattaattctagcaccatcaatttcaattgtttcatattgagatttaaaataattttttactttttcaactacagcaaacttaattgtatctttacaaggaatattaatttctctagtagcaaaagaaggaggccaaccaggaagttctgacattggtttttcttgagcagaaaataaacttactaaacgagctgcgccataaatagcatcatcaaaaccataccatccatctgaaaaaaacatatgtcctgacatttctcctgctaatggagcattaagctctctcattctagcttttataatagagtgacctgttgctgacatcacaggatttccaccatgcttctggatatcatcaaaaagtctatttgaacacttcacatctccaataacaattgaacctggcttatgtacaaggagttctcgtgcatagatagacagtaattcatccccaaataataaacgaccatttgaatcaatgatacccaatctatcagcatcaccatctaaccctatacctaaatctgcatgttcagctttcactttattagccaaatctttcatattttcttctaccacaggatcaggatgatgatgaggaaaatttccatctggctcacaataaagacaggttacctctgcacctatcctctttaaaatatctgcacaaatagtaccaccaacaccattgcccccatcaacaactactttaactggacgtaacagtttacaccatgcttcaacagcagccatatatgatggtataatatcatggaaagataaaacaccttgccctgaagcaaacgaacctacttcaaataatttatgtatactttgaatctcatcaccataaattgtagattcacctgcccaaatcttaaagccattatattgcgatggattatgacttgcagtaatcataacaccaccatgacgattcaaatacttaactgcaaaatataaaactggcgttggaatcatcccaatactaattacatcaactccagttgataacaatcctttcactaatgcattattatagtccaccgatgattttcgacagtcataacccacaacagccgatgaaataccctgacttacaaaatatgttccaatgaccttacctaacttttctacccaatccaaatcaaaatctacatctacaatacctcggatatcatatgcacgaaaaacattacttgttcccatgaattctccctatttattgtacaaaaattaatataataaaattatttttctcatagtataaaaaaattctatcttaatcctgtagaaaaccttattaaataatcattctacaactatttcataaataatgccagtaaactaaaatcaatatacatactatattacctcttataatatttaagattatagatatactactaaaaatatatacacttctaaattaaagttaaatttagtaacttccttgaccgtaaaaatattatgttctattgttatccattatgaattgggactgggaaaagctacaagaaaaacgacagaggcaaaactggggacaaggtcgtacgccaaaagactcaggtaataacacaccaccaccaaatggctcagatcctaaccctgaacaactttttggaaattttttcaaacagttcagacttaaacctaacagtgggaaagtaaaatggattatacttatccttatttctttgtggttattatcagggatttatattgtaaatcctgatgaacaaggtgtagtcctccaatttggaaaatataaccgtacagttgatgcaggcccacactatgctctaccttaccctatagaaacagtatataagccaaaagttacccaagtaagacgggtggaagttggctttcgttcaacctctcttggtggtacatttcaacaaggtgctacacgaactctacctgaagaagcatctatgttaactggtgacgaaaatattgttaatgttcaatttagtgtacaataccaaattaacaatcctgtagaatacctttttaatgttactaatcctacagcagttattaaaagtgcagctgaagctgctatgcgagaagttattggtaatagtatgattgactctgctctgactgatggaaaacttcaaattcaaaatgaggctacagaattattacaagaaattcttgatcgttacaaagttggtatacatgttttagcagttcaactacaagacgtacatcctcctaaagaagtaagtgactctttcaaagatgttgctagtgctcgtgaagataaaagtcgtattattaatgaagctgaagcatatcgaaatgagcttatacctaaagctaggggactagcaacagaaattgaaaataaagctcaagcatacaaagaaacacgtattcgtaatgcaaaaggtgaaacagcaaaatttcaagctttgcttttagaatataatcaagcaaaagaaattactaaaaaacgtatgtaccttgaagcaatggaagggatattaagtcaacctggtatagaaaaaattattcttgataacaaagttgctggaaaagccttaccacttctacccctttcccaaaaaggactctcagaatattctgtaccaaaagataaaataaaggaaaataagtaaatgcaacacaaaatttctattcttgtgagtgtactagttattatccttattattagttcacaatccattttcattgtaaatgaaacagaaaaagctcttgttttacaacttggagatcctgttgatcgtatttttgggccaggattacattttaaaatcccatttattcaaaaggtaattttttttgatgccaggatattagattatgatgcacgtgcagctgaggctcttacaagcgataaaaaaacaatagtccttgataattatgctagatggcgtattgttaatccattagaattttaccgcaccgtcagaactattcctggagctcaagcacgtcttgatgatgtagtatactcacagttaagagctcaagtcggtagccatactctcactgaagttgtatctcaaaatcgtagtaacataatgtcagatgttacacgccgcacttctgatattatgaaagaatatgggattgaagttattgatgttcgtatcaaaaggacagatctcccttcagaaaatcaacgtgctatttttggccgtatgcgtgcagaacgtgaacgacaagcaaaacaataccgctcagaaggtgttgaagaatctactaaacttcgctctcaagcagacaaagaacaagcaattatcttagcagaagctaatcgtaaggcatctattatacaaggtgaaggtgatgctattgctacaaaaatatatgcagatacattccaaaaatcaccagaattttatgaatttcaacgaggtcttgaagcacttaggaacggactaaaagaaaatactcatatggtcatcacaaatgatgatctattctttcgccccattcaaaaataatatgaggcaaactctccgggagaacgctatgactttctttcaagaagtttatgaccgagttcgatttgccacaaatacaaagactcaagctgaattggcaaatatacttgaaattagacagtctagtatatccgatgcaaagcgaagagattctgtcccccctgaatggtatataaaactctttgaaaagtttggattaaatccggattggattaagcaaggagtggggcctatgtatctccgaacagaacaaggatatattcctagagagcttccattaacaggtgtacaagaaacacctatgcattatggtgatcctatctcaaaaagtgtattacatactgtcttttctatgaggtgcaattacatagaaaatagtaattcactacctatcttacagcccactgggaaaattgcattacctcaaccatatacaggagcaaatatccttgtatttcaaaccgagtcagatgcgtttcttcctctagttcgtcggtatacctatctaggtattaatacagactttacacatcctcaatctggagaaatttacgctgtttttatgccatatgaaggaatagctcttaaacgtctttttttaagtacacaaaaaaatggtttttgtttatgtacagatcaaaatgatagtcacgaaagcttcttacctgctcaagaatgtcctatacgtatactaggccggcttgcttgggttttccaaaccttttaaatattaacattaatctataatattaataaactaaaatttagttaccctaacagaacttctaataactatctgctagggcaactaaatcatatgaatgagattccataatatcggcctctatgagttccccaggctttatatttggtccacttatatataccataccatcaacttctggagcttgaaaccatgctcttcctgtatacaactctggccactctggatgaacattgtctacaataagggataaccgcttaccaacaaaatttttaagccatttttcactaatttttaattgaatttccattaattctgcttttcgttgttcttttactttttcaccaacttgatttggcatgacagctgccggagttcctgcttcagctacatatgaaaaaatacctaaatgctgaaatttaatttcctctataaatttgcttaaatatacatgatgtccctctgtctctccagggaaacctgtaataactgatgttcgaaggacagcttcaggaaacacagatcgaatattatctataacttttcttggattttttgcaaatggtcttcccatacaggaaagaatatctggatgtgcgtgttgtattggaacatcaaaatatggaacaaaaggttcacctaccgatttcaaataaagtaaaaaatcctttgttaatcctgtaggatatagatacataagtcgtaatcgctttaatccatctaaaactaataagtgatccaatagagtttttaaaccatagttattaggaagatctctcccccatgctgttacatcctgagcaacaagtactagctcttttactccttgatcaagaatatgacgactttctttaacaagttcatctattgaatatgagtgtaacgaaccacgtatagaaggaattgtacaaaaagaacatgagtgttgacagccatcacttattttaagccatgcataagatttgcctgtagttattatacgatcagtgactaaaaatgtagactttatatttaatgctaacaaaatttgttcgttccaactttctatctctttattatcaagccataaatctacttcaggaatatctttcttcaaaattttttcaccataacgtccaacaaaacatccagcaactataataaaaggtttttcagataactcttcaacatcagcaacaagttgtaaaatagtatttacagactcttgaacagctgtgtgtataaaactacatgtattgataaaaacaaaatcggcattattaggataatctataaaagttaaaggaatacctaatgaacccaataatctttcggtatctaccctattttttggacaaccaaggcttatagcatgacaacgtaatgatggagagtgactattcataaaataacctcaataaaaacttgacccattacaatgttaaggtcactgtatggcgataaaaattacctaatataccttgctaacgacataaaaggaatttcaatggattcatccttcaaccttcaagcacctgatataaaaactacagaaaaaaacaatgctatccctacagtaatacttgccacacgaaatacagggaaaattcaagaattaaaagatatgttatgtaattttaagttacatatactttgtcttgaagattttcctgaaattccagaaatagaagaaacaggcaaaacttttgaagaaaatgcattaattaaagctaaggtagtatcacaatatacaggactcatagctattgctgatgactctggacttgaagttgatatattaaacggtgccccaggtatatattcctcaagatacgcagaagatataccaaatatacataatttaacaatagatcaacataacatatcaaaacttctttccatacttacaaacgttcccttaacacaacgaacagcaaaactatgcacaacaatagttgcctataatacaaatggaaagtatatcactgcaaaaggaataacaaaaggtttaatctcattaacatcaaaaggaaataacggctttggttatgatcctattttttttgatactaacttaggaaaaacatttggagaactccctcttaaagaaaaaaaacaatatagccatagaacaaaagcattaaagaaacttttagaattatggccaacattatataatgagatataatagttgtattctactattctactttcatttttttataaaataaacaaagttttggtctagttatcatgattaatttactaaatattacttatcctgaatttgaatcacttattgtaactacgcttcaagaaaaaacatatagagctatgcaaatatggcagtgggtttggcaaaaacaaataacagatattgagtcaatgaccaatttaccccaaaaaattcgagcttctcttactgccttaataaaaattaatttgcctgaaatagttacaatacaacagtcatctgatggtactaaaaaatttctacttcgtctttctgatggagctttaatagaaactgtcctaatacctagcatagataaagcaggaaatataagaataacacaatgcttatcatctcaggttggatgttctatggggtgtactttttgcagtacagctacaatgggatttattcgaaacctgacagcaggagaaattgtaagccaagtacttttagcaaaactacacttaaacgataataagccagataaacctattatccgtaacattgtttttatgggcatgggagaaccactactcaacctaactgaacttacacgtgctttacatatcttacattcagaaaaaggactaaacttctctgctagacgaattactgtttctacctgtggcataaaaaaaggaatccaagccttaagtgaaaatggcttagccttcttagcactatctctccatgcctctaatcaagagctacggagtacaataatgcctaaggctgcaaaatgggatcttaaagaacttatagacacactaaaaaattattccctaaaaaaaagagaaaaaattacatttgaatatttactattaggaggaattaatgactctcctgaacatgcaaaagaacttgctaaacttattactgatataaaaggaaaactcaaccttattccttataatcctgcgcaaggacagccttacttaaagccaacagaagaaaacattctcaaatttcaaaaagtattatggtctaagggaattgttacgatcctccgtaaaagtaaaggacaagacattaatgcagcttgcggtcaactaaaaacaacttatctctctcagtcttctagcactatttattaaatataataaaaattattgctctaacatagatattataagagatgcacatttatctgcccctccctttctgctctcaagccaagtattaaaacgtgatataatctcctcttttggttcaggatgttgtaactgacgttctaactgttctattaattcaaacggagtatgacaaattctaataaaaaaagaaaaatcttcatgttctacatttaatggctcaaaaacccatgaaaaattatctaagtacttaccaacacatggaatttttccaacacttaatggttcaagaaaattttgtcctccaaggggtactaagcttccaccaacaaatactgcttgagctaaattatatagcttatctaactctccaaatgtatcccaaattataactggtatactagtttgatatagttcttctttatatggtgttaaaacagaccttagctgagtggttattccaacaaaatttaatttttttatccactcttttactctagattcatgccgtggtgcaactataatacaagtatcttttccatgacgagaatatagttttttaataacaggaactaacaatgcctcttcttcttccctaactgaagctaacaatataataggtttatcaggtaaaatttcagtcaatacattttttgaggaatcgctttgagataatgtacaaattgctctatcaaacttaatatttggtaccactcctacacaatattcaccaaaaagagcagtaaaccgtgctgcatctgcagaagaaatagccgctacatacttaggtgctatagctctccaaaattctgggaaaaaccaactaaaccagtcataacctctcaaacttttttctcttacacgtccattaagaactaagactggaatatttcttttattacaggcaaaaagtagcccaggccatatttctgcttctattaatactactaactgtggagagacttgtattaacgctttttccataagtgcaggttcatctaatggaacatattgaacttgaatagaaagatctgatcgagaagattctaaaatactttttgtttcttctaaaataatacggccttggggagtccaagttgtaagaagaatatgtagagtggaatcctgtattggtaaatgttcaagtaatgaacgtactaagtaggcttctcctcctgaggaagattgaatccaaatagttgcaggctctgcccaattagtaggaactagacgttgagaaaaattttcatgtaaccgtttatgttgttgcaaaaatggtctagcaagacgccacaaaaaggtatacccttttgaaaacacatcaaaactattcactcttttatttcctatgatctctgattgcaagctgaatcaacttttcaactaactctgggaaagtgagccccatagctgctgcctctcttgggacaagacttgtagcagacattcctgggattgtattaacttccaaaagaaataacaactcatcgtctctaagaataaagtctgcccgactacatccctgtaaatttaatgtattatgagctctaagggcatactcttggatatgttttaatacatgaggctcaagaggcgcaggacaaatttcctctgcaccattcttagcatacttattataataatcaaaaaatttaccctgactacgtattaaaataggaggtaatgcttgatcatcaataacaccacaagttacctcttgtcctataatagcttcttctaataagacttcctcacctgcattaaacaatgcttccatagcaataaatagctcttcataattagttaccagatgtacatttacacttgagccaccaatattagatttaacaaaaattggataatttaacccaggttcccaagttacttctggctttaaaggcagaaagacacttttgggtgtaagaagcccttctctacggaaaagagctttagctgcagctttatgtagtgcaagcagtgaacctgctggacttgccccttggtagggacagcccactctttctaataaagcttgtaatattccatcttctcctggtgaaccatgtagtaaaataaatgcaacatcttgcttttcagccacttctacaattttatcaaaatcatatagtggatcaagacaagtaactgtatgtccatattctatcatagcagaagttatcaattctgcactctgaagggatacttcacgctcggaagaccaacctcctgccaataagagtatattcatatagaggtaactccaactgcgttgaaagaacgcgttctatatttttaagatgttcccaacttctataaatagctttacgggaatcttctgttttaccataacgaagtattaagtctgtgtaacgattttcaagagatacaggaatattatgttgcactctcttatctgaatacataacaataaataatggatgtattaaacattttggtaagctccatttccactctacatgatttaaaacaacttggccaagcctatagtttcctgtagaagatattacccatgaagctcctagctgagcatgactacctccatagtgcactgtataactttttgcaatatcatgaagaagccctccagctctacaactttttatatagtttgtatagccaacctttacagcttgcttggctaatgcttctgcaaaatttgcaactactacactatgttgtctgatattatcaaatacaccatatttatcccataatgttatacagtctttatcacttggaacaaaatttgagtctatatcatagtaaagcgtaggtatgacattagagtttatcatatattttagattttcaacagtttgacacaacagtttgaggaataaatatttaatgaagtatttgagaaacagcagtaacgattttatagccgtacgattttcagtagattacgatgctatgctgtcaaataaccctttctaactacaagtgtcaatttaataataataataataataattattattattattattattaagaatatgattataattccgtaggatgcaccgctctaaattgtactcatttgtttttattaactcttccataaccaaattagtagctagtcgtttttctatgactttttcaaatcgtaaaatattacaaagatgactttctatatatttcctattaaatattaaacagatatattttatctgttgtggatacttgatgagaaatccttttcccaataaaaagggatatcatccctccataataatattttgaaaactcaatacaggtttttattatttcacagcctatcggccataaataattagccaactcaacgtcattactattaaccgaaagtttacattaaccactatctaatgagacctattttcaaatgttttattaataaatatagatagttatgctttcccaatactctttatgccaataaagtttttcctgtatgtatatctccaggaatcaatatggccatagtttataattcttttctcattatgtaatttttgaaaaaaaccccttgcttttcaacttcttgaagtctaattatcttatatccccaattttcaaagaaggacttagccgtaattgaagcataaacaatgatacattttgttccaacttcgttttccagccgattgcatagtgctgttgctacacctctaccttgaaaatctttatgaacaaataatctgtctaaatatcctgtttcatcaatgtctccaaaacctataatcaaatctttttcaattgcagcataagtaagatgtttcagaaatgaagtatcccatttcttaaaattaatattccctgttgcccatacatttaattgttgctcagtataatcttttatattcacagcatggactgtttcataaaacaatcgtgttatttgttctaaatcaatagatttatattgtctgattttcatatttcaaagttacaaaaagcaaattaagatacaaagtaaaaaggtattatttttatcctaatatgactccaataatttttaggaagtcaaaataaacctaaaagattcctgtaactaactataaaactttacttcaacttagttaataaagacaacactaatttattattatatagtactaataaattaataataagtagctagaaaaaggaaaataaataaaattaaacttgttatatatttttaattaatatcttttgaaacaaaagataaaaaacacataacgtaataatgtaatttataagtaataaaatagtaaaagataatctattcaatcaaaaaactaaaaaaattatagctagtagcctcattcaagcaataccttcaattactgaaaaagtattatattatctctaataatttgtactaacaaaaaaggagggtggtgactccctcctctaaaaaactacttaatataatcctacaagggaaaaaatatttctatatcactaaaaagtagttatatagaaaaacttccacctgttgaagatgatgaactatgaggttcaagacgatatcccatttctaaagccatcttttctaaaggtgacacattccctgttgtcttcataatatgtaataaagtctctgctcctaattttgctcctgtgtcataaggatttacttcacgtaataaggttgaataaggcttaccaactgcttgtgcaattgcttttgctccaagaggactttctaatacaagatcatgaactgcactaataagatcgttaggcatgactcttctcctaaactacaagtttacatttccaagattactagaaactttcataaccacatacccataaagtcattaaaattattaatacaaaaaaattaatttacattacactccatgcattggagtttaaactttcatccttcattttttgttagtgttataatggagcaaaaaaaatgactaatgtaaggagtattataagggtagcaacttacaagatcataatacccatatttataccccccccctataatggatctaataaaaaacataactccctaaaataaatattgtatcaatacaattaatacatataaaaaaatactacttcctattataacttttgatctctcataataacataataacattacatagttattacactttaataattttataccttgttttgactataaactattagtgtatactttatgttagtatcattaaaaataaaataattcattaacaatgaattataatatatcaaaaaaatttctttttttatataaatgtcaactataaaaattagttaccatctatataataacaacatacaaaaaaaaaaaaattacaaaaaattatgattgtactgtaaattattagacgctataatagttatactatattaatactattaatttaatagtattaatatagtataactattaataaagaaatatttagtctattaatataatagaaactagttttttatgattataagaagggataatttagaaaggactataacaaacaaatattataaggatggctatttcatacctatggcttgaccaagtttccttgcaacttttttcactttttctattggacgaccttctgtaattgcctgaaattccattaaaagttcttgttgtctctctgttaactttgttggagtaacaacagatatctttacaagtaaatcaccatgacgtttctgccccacataagggagtcccttatttggaatgcgtaacacagaaccactctgagttcctttaggcacttttaattctaatgtttcatcatctagaccaggaatacttaatgtacaacctagtgaggcctgtggaaaagaaatatcacaatagtaaaaaagatcttgtccttgccgttgataaattttgctatcttcgacagtaactgcaatatgtaaatctccagatggtccaccatgtgtaccaggctctccctctccacgtaacctcaaacgtgttccactagctatccctgcagggatatgtacagttagttctttagactgttgtgtaacccctttccctttacatcgaggacacaaatgggggatggtagatccttcaccatgacaaactggacaaggaataataaactgaaaaaatccttgagaattacggacctgcccagaaccattacattccttacaagtttctggtaaagttcctggtgcagcacctgaacctccacaatcctcacaagaaacatcttttgggatagttatagaaatgtcagaaccttttacagcttgctcaaaagacactgtaagtttatacaataaatcagaacctgctgttgctctaggtgtattttttctacggcttccacccatcgaaaaaccaaaaaaatcaccaaatatatcaccaaaatgagaaaaaatatcctctgcagaagaaaagccactaaagcttccacctaagcctgcagctccaaactgatcatatcttgcacgctgttcaggatcacgcagcacttcataaacttctgcagcctccttaaagcgttgctctgcttctggattgtttggattatgatctggatgattttgtagggctaattttctataggcttttttaatctcttcttgagaagcattacgagagacacctagtacttcataataatcacgatgaaccataatatttattaactaactaaataaaatgttaaatattaatcaatagggctataataactcatatcttcagggaaaattttaccagaagcaatttcacgcaatgctgttacaatttctttattacgagagggaactaatgattcatagccttcacgatattgatgtacacgttttattgtcatctgaacaagcaaaaatctattcccaacacgtttctggcaatcttccactgtaatacgtgccattcaaccctccaacaataatgaataaaagctatctatagcttgattagctttatttaaaaagaaaaaaaaaaaaaataattctcatcactcataatgtcaactggatattttctatagattattatcattatatcaaaaagttatataataacaacaatcatattctattttagctatagtccataacaaattcaataagtgttctaacagaaaaacctgttccaccagtaggacatagatccttttttttagaagtaaagctagggccagcaatatctaaatgtgcccactttgtatcttcttttacaaattgctttaaaaatactgcagcagttgaagctcctccttctctacctccaacatttttaaaatcggcaaagtcactcttaagactttcaaaaaatctatcatcaagaggtaaagaccaatacgattctccaactaactcaccaatattacgaattttatttacaagctctatctcatcacaaaaaacccctgcgatatcgtctccaagagccacaacacatgcacctgttagtgttgcaatatcaataagaacagctggagtccaatgtttttgtgcatatgtcatagcatcacataatactaatcttccttcagcatctgtattaacaatctcaacagtcttatggcttaatgtgacaactacatcgccaggacgagtagcttttccatcaggcatgttttctgcgcatgcaagtagccctataactttaacttgtggtttaagttgacccaatgcctcaaataatccaagtatagcaccagcaccagacatatcacacttcatttcttccattttagctgaaggcttaatagaaataccacctgtgtcaaaagttatacctttacccacaaaaacaagaggatcatcattttcatgccctaatggtgcatactccaaaataataaactgaggttcctgggaagagccttcagccacagatgcaaaagcacccatacccgcagaaataatacttgctcgatccattacttcacacttcatattatattttttagcaatctcaatagactttttagacatctggataggtgtcattatattagcaggagtattatcaagagtacgtgctaaattaacggcagttgcatgaacttcacctcttctggcagcattacaaatagtttcatcagcaacagtatcacgaaaaagtaccccaatccattgtgggtcctctggaagctctttaagatcctcttgagatttacagtcaacaaatctatatagtgctagtccaatagcacaaatgacttcttcaattattctttcaagattataatcaaagcgttcaaatgatcttacaagaatagaaaaattctttaatcctaactccctacaataactacttgctttaccaatagtattccttaagttctcaagaagtttaattggggtaatttttttacgctttccaagtcctacgataacaactcttgggatagttgttgaaagtggaccatataccactaccacctctccttttttcccttttacatcttctaatgctggagcaacttctaaccatggaagtacattaagtaattcagcataagcctctttaaaaatttcatcttcaaaaaaaggtataataatagcatctgttgaccagctagatactccaatctgaaaacgtacttccataaaggtctccttatacaaaaaataaagtcaaaatagatcactcagacagataaataccatagctttttagctttctatataaataacttctttcaagtccaatagcttctgctaatcgggtaatatttccttgataagcatgtaatttttcagttaaaaattttgtttcaaaagctattttagcctgtttaaaatctatatctgaagaagttataatggaagaaatttcttgagaaatattaaattgctttttactaggatcaatacttcttttagtatgcatttcctgaggtagatctgtcaaacatactttcttccctgaataaagaataaccattcgttctacaaaattaagtaattctcttacattccctggccaacaatattgtttcaatacagggaagacctcatctaaaaaaataggcggctcacgtctataacgtttactcaactgaatcacaaacctatttaataatagctcaatatcagaatcacgttcacgaagagggggaagatgcaatggaacaactcgtaagcgataatacaaatcttgacgaaatgttccatcgctaatagcgtcttcaagattcttatttgttgctgcaataactcttacatcaactttaatagttctaacactaccaattttttcaaaacattgttcttgcaaaatacgcaaaatttttgcttgtgtttttaaactcatatctcctatttcatcaagaaataatgttcctttatgtgccaactcaaaacgacctgcacgagaagcatcggcaccagtaaaggcccctttttcatgaccaaatagttcgctttcaatcaattcttcagggatagcagcacaattaacagctataaatggtttttgatatcgtgagcttcctttgtgcaatgcttgtgcagctaactctttacctgtaccattctctcctgtaagtagtacccaagcatctgttggagcgacctgtgataataaacttttaaattttaagataacaggagactgtcctataaactcactctcctcaggtaatacagtacgtagtaatttgttttcccttcttaatcttactgtttctatagctctattagctgtaataaggactttttccaaagaaagaggcttttcaataaaatcataagcaccttgacggatagctgttacagcagtttcaattgtggcatgacctgaaatcataataacaggtaattcctgatgaagagcctgaatatggtctaaagccataagaccatccatcccaggaagccaaatatcaagaaaaacaagatctggagactctacatcaacacacttaagtccttcttctgctgaagctctttctaaaacttcatggccctcatcttcaaaaattcctttcaatgaaaatctaatagagtcttcatcatctataataagtatacgtgctgacatgattactagcccctaacctatactgctttatatatgttagaattaatatatctaaataacaaaaaactaactagttaaaattatactaataaaaatttttataataagaatatcaaaataatcgtcttactatcttatataatataactagttatattttgctgttgactatagctattaaataatacatagctgttactctttaaataaaaaacaataaaacttcttgaccagatctatctctcagcttcattatactagttatgcaaaaagtatgttatttttttcttataacctttttctactttttcataacagaaaattatctctttgctacatcaattaccacttccacaattaaccaacaacatatagcatatacagttacttttacctctccagaaaatcctaatcttgcaacagagatggaaacacatagtgaattagtaaagcttgcaaatcaatctttagatagtaaaataggtttaaatttacgtgttaaagaagatataagtacagcacaaaaaattcttgactcgaatggttattatagtggaagtgtcgagggaaagattgactggcagacgaaccctattagtatccaaatccaatttaaaccaaatgtacaatataaaataaatacaatacatatccaataccttgatagtgaacttgcatatctccctctttccttagaagaattcaatctctctaaaggtaatcctgctcttgctgttaatatcctatcctctgtaagtagcctcatgcaatatatacataataatggatatccattagccaaaataaaaaaaactcaatacataattaatcggatggattatacatttgatattgatttagtaataagacaaggaccgttactccatatgggtaaagtacaacctcaacataatctcaatatttcaacaatattcctaaataaaattgctacatggaaggaaggaagggtatggaacaatgcactccttgattcttatcgaacacggcttcaacaaacaggccttttcagttctataactctcaatccaaggaatcaaaaagaacaaaatggtaacacctctatagaacttgttgcaacagaagcccctccaaggactattagtggtggcttacaatactcttctgatcaaggtattggtgcacgtgggacttgggaacatcgaaatgtttttggtaatggagaactttttcgtataacagcaccaataagtcgagatgatcaaaaaattatggcaaacttccaaaaaccagcctttggccgtccaaatcaatcattaattagtgaagcacaacttaaaaaagaaaatacaaaaagttacaaacaacaacttgcatctattgctttaggaattgaacgacaatttaatagacgttggtttggtagtagcagtctttcagttgatacaggatttatggatgatcgagattctataaaaaaaatatttactctttttggcatccccttatcaataacaagggatagttctaaagatcctcttaatcctatccaaggaacaaaagctaccttaaatgttactccttatattggtaaatataaaaaaaagattttgactttacgtagtcggtttgattttagcttttacatagacgttcttaaaacagggaaacttatcttggctaacaaaatagcaataggttccctcctagggaaagatatagaaaactatcctgcaatactaaggttttatgctgggggtggtggtagtgtaagagggtatgactatcaatcattgggaccaaaaaataaatatggggatgctattggaggactttctttttcaactattagttttgagttacgattaaaaataacagaatccattggcattgtgccatttattgatggaggaaatatttacgaaaaaaaatttcctgactttaaaaaatcaatatattggggggtaggccttgggctacgatattatacaagttttgcccccatacgtttagatatagcaactccacttcaagatagaagccataataaacactttcaactttatattagtattgggcaagcattctaatgaataacacaaaaatactttctaagttactctataccctcttaggagcatttacgttatttttaggacttattattacaggcattctttttatacggacctctacaggcattgcttggattaaaaatacagtttcttctttacttcaacaacaaggaattatactacaagtatcttcaattattggaccattcccagaacaaattactattaatgaacttagccttagtgatgtgaatggaacttaccttacaatatctaacttagaaatccaatcaaacttatgggctttattcaaaggtcaacttgaaattctgtcttttgaacttaatgatcttgtattatatcgcttaccctcaaataataatctaaaaaaatcatctacaagttttgtgttacctcacatatcatttgatttaactccatggtggactgaacatattcgtattcaaaacatccatattaacaatacacaactttcctctgatattataggtattccattggtattatcccttgagggtgatggtacattaacaaattggaatggaacatttcaactatcctcttctaacaaaacaaaaattataggaacgcttcgttaccaagggaataagacacaattttttgaatatgttcatcctacacggatagtaacactagagatagacagcgtagctgataaaaagtcatataataatagtatccttgaacaacctctacatttacacctttctatttatcctgaacataatagaattatcttacactcattactagctgaatatggtagctggttacttacatcagaaagtattgaagtatctaatgagcaattaaaaggaaatattttattaaaatataatggagaagctactcatcaacttcctataaaaaaacttaactcatcaattaccctcagtggctcactaaataaacctaattttagtatacaaatgacattacctgaaattaacattacaaaaaacataatagatcttcaaacagaacttgttattaatctaggacttttctctactcactctgatattcttacatctgggacaattacagtacagggagaaactatacccaatagtattctttccagtgcagttgatataatagcctctacaacaacacatacaattaccttagagcatgcaaccttaacatctccagaaatgcatttttccctatctggagaatttaatagtcttctaggaaatatcgatgcaaacctaaaaggtaatactccaactcttagtatattttcttctcttcttggactacctgatcttactgggcaaagtaacattactataggattacaccgtcaagggtcttcctcttcaatagaaggaacagcaactgtctcacttaataatatgaactggggagtacaagcattacaggggacattaggtgataatgcaactctaagtggaatatataatttaactcccatagactggtctatttctttaaacaaattgaaattaacagcaaagaatgtttatgctgaaggccttattaattttcaaaaaaaatacatagatagctctataaatcttataattcctaaccttcagctaatagctcctcctatatctggagagttacaatccttaattacagtgtctggaaaacttgacgcaccttctatagaaagcaaaattttttcatcacaactcacctggaatgcgctccaacttaataatcctcaactcataataactactactcaatcttcttcctctgcgattaaaggtaatataacactctcggctgagccagcttcatctgaggcattaaccttttcaagtaattggggaatcctacctacggaaatactagtagaaaaaattataggaaatatattaggagtaaatcttgatggtaatattaaaataacaaaaaaagattaccttataaatggtgatattattgcagaagttcagtcttggaaagatattgcaaacatattgcaaatacctattagaggttcagcatcaataaaaatacagtttgatccaaagaatcaacaatgtatttctactcaatggcaattaaaaaatttcatattaggtaataattttaatgtaactactataaaaggaagagcagatacaatacaacttcataagaatcctacaattgctctctcttcaaaaattggtgctggtacatatgaagactttcaatggacacaagggacgttagacataaaaggcacattaaaaaattttaatagtaaaataaatatagcaggacaaacaactgtaaacgcaaactttcaaacaaatctttttgaaaaaaatattaatataactactcttaatttaaaaaatattcaaaaaaatataggaattaagctccttcagccaataaaaattatagtctcacctcaacaatttgttcttaataactgttcactagcaattcttccatctggaacaattacaactgatatatatgttactcctcaacgacttaatgctaatgcaatcattaaagaagtttcacttctctctttccaaccatttagtatacttcttcctcaaggaaatataaatggacacataacacttacaggaatacctagtaaacctaaaggaacactctcatttgatattctaaacatacattatccaaggccaaatccatcaatagcaaacttacatgtagaaggggaaattatatcttctcctaacaatatatgtaaacttaatgcaaccctaacagaaaaaaaagagcctatacctatatcaatacaagcaacactcccttttgagttcacagaaaacaatatccctatgctatctaaaatgaggcctttttctgcccatatcaagtggactggaatattagatacactttggaaactcattccacttactgattacattatggctgggaatggatctttagatgcttctctttctgggactttagatagtccaacatatgcaattataacaacactttctaatgctaactttcaagatctctcccttggtctttacttagaaaatatcaatgctaaattacaggtcttttctaatagaatctcccatattcaagctacagcatctgatggtaaacaaggtagtatacaacttattggtaatattggctcatctaaagaacactttcctttgtctattaatggctcctttacaaaccttgctccattacaacgtaaagacctaagtcttacactttcaggagcagctactcttgaaggaacattaaaacagtctgaagttaaaggcgatattgttattaaccaaggcgaatttcaacttactgaagggttaaccagtaatattccaactcttaatgtagttgatagcactcaacaacaaaatacaaagaccaaaaaagctacctatcaacaacctaccttatctattgcgttaagtatcccgaatcgtttttttgtccgtagtagtatgtttgaaagtgagtggggagggaacctaactattaacaaagtcataacaagtcctgttattacaggagcactaacttctataagaggaaattttaatttactaggaaaacaattttctcttgctaaaagtacaatatcattttcaggatcagttccaccaaacccactactcaatatttctttaacatattcatcaccttctattacagctataggcattattaaaggtacaactagtaatcctaatattactttttcaagtacaccacctttacctcaagatgaaatagtttcccaagttctttttggtaaaagctcacaaagtcttagcaggatacaagccatacaacttgctcaagaattagcaaacttaacaggatttaatactggaagtatgaatttcctaacaaatattcgacagacattagggttagatatacttagcttagggacaacttctaatagaaaagccaatacatccaactcaaacgatcaaatagaagatatccctgttatagaactaggtaaatatattacagacactgtttatgttggtgttgaacaaagttatttagatagtaatgatactggggcaagaatatcagttgaacttgcacctaattttaatcttgaaggtagaacagggactcaatatagtgagataggtattaattggaaaaaagattattaatggcttattttttatatctaaaaaggatattttgttattaatacaaaatatcctttttaacaaaattatttccctcttccacttttcaatggagtcattggagctccagaatcaggttccatattattatatccacccataccatagtatcccataccatgacgatgcatcaacccgctaccataaatatagtggccacgaatgcctacttcactagataacttctcatacattttttcatattcagatgataattctgtatgcattttagcaatttcacgagagagctcttgaatcactgaacgatcaggtttgctactttgtgccatagcttgcaactctagacgttttgctaaaatcttttctcttaattcctgggtctttttagcaaactctttaacaatggtatcacatttagtttgcatctcaggtgttaaatattgataaacaccactaccactttttccattattatccccccctggacaaggagaaagcctttttgcgtcaactaatgtagtattaatacatattaatcctaccataacaaacataataaaatatttttttaaaatgccattcattaaccaacctccatagattaaacttcaatagatttactactcacccttatcttcattaactcatcttttaacatttaacattaaaaattcactataattacagtacatattagatcaaactataataattatataatcatcaatgacaaaaatttgtctcttgttaagagcttactaaagttaacacagctatgcaactagttgtaactaaataatcttttatcttctaataataacaagacattccaattaagatattatatatagattataaatatagtaggacctcagctaagctgaggtcctactatatttataattttctggtcggagcgactggattcgaaccagcggccccctggtcccaaaccaggtgcgctaccaaactgcgccacactccgctattttattatatctattacaccacaaaataggtaacatcacaataaatcaaaattacttggcaataatacgaaaatcatcacgacgattttttgcccatacagctggccctgttccttcaacagctggacgctctttcccaaaacttattatctcaagctgagatggatttactccaagcatgactaaatattcatatgctgcacgtgcacgacgctctccaagtgctaaattatactcttgagtaccacgagcgtcacaattaccttctatacggacacgaatacaaggatattcttttaaaagttcagctttcttctgcaacatatcacgatattcaggtttaatatcatatttatcaaaatcaaaataaataatcccatcagttatagtttctgcagctgcattaattgctggtgctggagcaatacactccgttgctaaagattgttctacatcaacactctttttacaacaaccaaaacctgcacttaatactactaacagaaccagaactatgccataacgtctaaatacttccatttcctttcctcctaagtctcttcacacactgtgtttccccagccatcgattaacacaccactagttaattctaatatttttttactttaacaaaatttacttatttattatacataaatatattctagctggactaatataatagctatctagctttatttgcaactgttattttcccccaacgtgggaacgatgcatcgccatgtcctgtagggatttgctttgcatctccaccatgacgtgttatcaaataaatctgctttttaccactacgtgttgatgtaaaagcaataaaatagctatcaggagcaaaagatggttgctcatcattaccagggccaaaagtaacttgtctctcaattcctgtcagcaaatcttgtacaaaaatacgattaccatcatctgtcaatcgagaaaatgcgatgagtgtcccatcaggactcatagtaggctctgtattataacaaccttgacggctaacacgactaacttgtcctgaagaaaaatctttcataaaaatttgtggattacttagcctattagaacaaaatgccatttttgttcctttagcatcaaatgatggagaaacatttatagcagggctttcctctagcactttctctttttgaaaagtatgatccaataaaaaaatatctggatacttaccagtagaaaggctaactgctactttattgtctggcataaacacaggtcctataaccgtattcccagggaaacgaattctctggattttatttgttaacctatcccaaacacctagagcatgtgatcgatcgtctaaatgtgtaaagacaataaaccttccatctatagaccatgaaggtgacattgccgttcctgaaatatctgttatctgacgtaattctttccctgttggtttaactagccacacatctcttacattcttcccattaccttgtttcacaaaggctaatgtagaaagaaaaaaatccccactaccggttaaagtcttcataagatctgcgcaaaacttatctgctatattagaaatttcacttttaacaacaccactatatgctgtaccaaaaacaaacttgccagaatatgtttcatataatcttaattcaacactagagtcagaatgatctccctttggccaaccaacagttataagtaaatcggaacctgccaattgaaaacgtttaaaatctatatttggcggctgataaccctctagcgaacttccatttaaaattgccttttcatcagtaagcctcataaatggaagataacttagattattacgaatagctctatcaagatcaatgccaagatctgttgcaaggactcctggggagataattggtctagccatagctacatgtacaatattttgaccaggaccataaatatctatctgcatagctgataaggctggatgacataagcatactaataataaaattatcaatattcctaatgatctgtaagtgttacctctactcataataataaacaccaataaaaattatatagttaggtatagttagtaaaaatagtcagtatttaacttagggtactaatttatttatcctctaacacaaaaaatcattttaagtgattactctctctattatcagtttacaatatcggctactaatcccttattatctatcaaaaattagatttcctcgaaaagactaaaaatatttcttaataaaattatcatatctatagatgaagtagcaacatgttagttcactttctacataaaaagctatctatataacaaaaaacgttagagaaagagtaaaataattctattttaaaatatctataacaaattataactattataatattacttttttaagagccaaatatccttaactcaaattaacctaaaaaatattttcttaattaacaagatattacaataagtaaaatttttaagttgtctaacctgttacaacatacggaaagtattactgaacttctagcgagttaaaaacaataatcatatcttgctgtgcaggtgttggtggtggtggtaatatttttgtcctaattaccgcatttacagcagaagcatcaaaatctgatctaccagaactacgctcaattacacaggaaagaacattaccatctgcatcaatacgtacatggactagtgcaactaaattatcacgagaatacgttgggatactccagtttggtcgaacagacatcattactaatccagcataaatatcatgtaatccaccacctccaccattaccatcacttactccacctccaccaccgactgtagaagtttgttttttaaacccagctaacgcattagttacagaagtattaggagaaactttttgtgatttttgaatatttgtctttttctttgcatctaataatgcatcttttaaagaagcactccctcctattggttctgtcttctttactatttttttagctggttctccttttggttgcattttttcaacttttttagctaattcttgttttgcctttggagtatctaaaattttttctgtaggaattttttgctctatcctttcattaactgctatctcttcccttacaggaactgcaattggttgaagttggttttgagactcatgaccacctattgtttcttgtctaagaggtacaaaatcagaactagtctgaacagaaggattctttagaactggaatattttctattgggatagaaggtgtaactgttgaagttttagtaggaacagggatctgctgtcctaatacaggagagggtagtctaccacctcctatagactccatagttaagctaatctgaattggacgctcaggtcttacaatagtcttagtaggccaaaaaactataattaagatcaacccaatatgtagaatgagtgatgcgatataactaataaatcgcataattctatttacctttcacctatgacacaaaaatacatctattcaataaatgaataataacataaaaattttgtccttgaccatagtaatcaaaatatcattactttttagaggttaccccagagccaatctcttccctagtcgcaatcataccaagtttatcaatacctgcctcacgaactctccccattacctctacaacaacgccataaggtatttctttatccgcctgtaacaaaagctctttattttgagacctcactaaaagatctaatttttcttggagttcatccatagaaacaggataggtatcaaggtacatgttaccatctctacggatggttaaaataagattttctgactctagtggtagtgtttctacagctctagtttgaggaagatctacttctaatccttcagtcatcataggtgctgtcaccataaaaatgataagtaaaactaacataacgtctacaaatggcgtcacattaatctcagaaacaaaactacttttcccccctaaagatgcccccataattccaccaaaaactttctctattttttctactaattaagtatgaatgtataagtctaaataaattatccttaacctatctttatgtcttatttgcattaagctcacgatggacacgattaagaaacattcctgcaaaattaactaatttagattcaagatcccctaatttcccaacaaaaatattgtaaccaacagttgcaggaatagctacagcaagcccaaaggcagtagctattagtgcttcagaaataccaggtgcaacagtagcaagagaagctgacttcatagcacctatagaatggaaagtatgcattataccccaaattgttccaaaaagtcctataaaaggagctgtatttgctgttgttgcaaggaaagaaagagagctagataatcgtgtcatttctgtacttactccctgacgtagtgctcgacggacattttctacaataacctcctcagagttcccagcctcttttgaacgattaaattctgtcactccttcatgtgcaacgacatacaacggtgaaaccatgtctcttccaattgagtgcacagcatttcgtaattctctagcatcatgaaaacgctcactacctaacactgtttttttcatggctaacctaatagctatccacttctggaacatcattgcccaacttagtacactcatgagcaaaagaattagtagcacaacctgaccaacaactgttgcttgagcaattaaagaaattatactcaaatccattctattcaccttaacaagaaataataagcacagaaaatgttttcaatcttctttataactaatattaataccttcaatatctttaattataagaacttatccttactaataaacatattagccttaaatttcgtacagatactactatgatacgtcaagctatatcataaagaagatacaataactagccatagctaataagttactgttactgtttttatagcatatatattactttttaattaagcaatgcctgttttttatagataaaaaacacacagagcctacaaggctacttgacagatactttttaggacaatatttaataattcttaaatgctagctgactcatatctatctaatttaatatagtttctcagtttagcatatagaaggaatttatataataaaagttgtagttactcatactaccttaatttaattaatttttaactaagctatatctctctttatttttaacaaattaagtactataattagactatgtctcaaatattatctacaactattcttaattaaaaaaccttcttctaatcaaattagcagtctacatttttaattataaaattggctaaaataaaaatataaatactaacttaaaggaaatatttatgaaatctttaaagggcactagaacagaaaaaaatatccttactgcttttgctggtgaatcccaagcaagaaatcgatatgactacttttgtgtaactgcacgagaagaaggtttaatgcaaatatctgaaatatttgctgagactgcacttcaagagaaagctcatgctaaacgcctttttaaatttcttgaaggtggtgaagtagaaattcaagctgcatatcctgctggagttatttctactacagaaaataatctcctggctgcagcacatggggaacattatgaatcaacagaaatgtatcctcaatttgctcaaattgctgatcaagaaggtttttgtgaaattgcatgtgttatgcgtaacatagcagaagctgaagcataccatgaaaaacgttatcttgcctttgcaaaaaacctaaaagaaggtaaagtgtttgaacgtgaagttgctatttcctggcgttgtttaaaatgcggctatattcatcatgggaaaaatgcgccagaagtttgcccagcttgtggacatccaaaagcatactttgaagtcttacataacccatggtaatagagatccttttatgtcagaaagtccaatcatgacagagccaaaagaaatgtggcattgtcaaataacaaactgtggatatatctataatcctgaaagaggagataaaagagctaaaattccaccaggaacggaatttgaatcgctacctgataattggcattgtcctgtttgtggtgcttctaaaaaaagttttaagccactaacagatagttaacttacttataagtcaaggagagaaatttctctccttgacttatttttttaagaaatgcattcaatttttctagctaactaactaaaactttttttaataatttatgaaaaatattgctgtatggaatactgcttttcttggagacacagtacttactcttcctcttatccaaactcttgcaaaaacttacccagaagcctctattgatttctatgttcgtaaaggtaatggctctcttttctcttcacatccaaatattaaaaatattattgaatataataaaaaacaacaattcataaaaagtacaataaaacttatccaacatataaaaaaacaaaactatgatctttggattaatgcacatacaagtattcgctcttctattattacactatgttcaaatgctaaactacgtataggttattctgaaaatatcatccaaccattatgttgtacacagctcattaaacgtaaacttggttctcttgatgagatagagcgtcttttagatcttctctcaaatttgcctataaaaaaatcaaatatccaatactggcctaatattgtcttaacccaagacgcacagcaacaagcaaataccttctggaggaaatatattttaggtcctgttttaggaattaatcctggttcagtatggcctacaaaacgttggttaccagaacgatttgcagctattttacatagagctataaaaaaaaatattcatgtactgctctttggaggaccaggagaggaacagcttgcaagtgaaattatttcattatctggtatgactggacaccccttactccataatctttgtggaacactcacgttacaagaattagctgcatttataaaaaaattgaattgctaccttactaatgattctggccccatgcatattgcatggagccaacatacgcctgttactgctatttttggccctaccgtaaaatgcctaggattttctcccagaggtgagcattcaactgtaatagaaatatctctttattgtcgaccctgtagtctacatggaggaaaaacttgtcctgaaaaacactttaggtgtatgaaagatattactattgatgtcgtatgggaaaacatagaaaaaaaactcttcctataactataataaatgtaatgcctctaaatataacataaccaaaaattgcatggcaacctttttcttctttcctcctcttccttctattacagggggtatgtatgttatacttactattgcaaaacatttacatacaattggccataaaagtacattagtctttcgtgagtactcaccttatattgatagcattacacctcaaatccctactacacactgggacaaacttacacttagcaaagatgatgtttgggttgttcctgaaggttggccaatggctcttatcccaggactacgttctcaaagtcgttgtgttgtctatgtacaaaactgggcatatttacatgggaaacttccagacaatgcttcatgggaacaacttcctgtgacaatgatcgctgtttcaaatcctgtagctttctttataaaagaaacaacaggaataaatgctcatatattacgccctgggattaaccttaatatatttcatgtaccaacttgtaagtcttttaaatctcaaaacagacctatacgaattgcttggatgcctagaaaaaataaagcacttgcacatcaaatacaacaaagtattaaagcaaaactttctagttgtaactcatcaacttctttagagtggatagaaattcataaaaaaacaccagaagaagtttctgcctgccttaaaacttctgatatctttcttgctacaggatttcctgaaggatgcccattgcctccattagaagcactagcatgtggatgtcttgtagtaggatttggaggatttggaggatgggattatatgcgtcaagcactacctaatggttatacaccttggtggcccttagaaaatcttccatggggaggaaatggactatatgtagctgatgctgatatattaggaactatttttgccttagaatacgctatagatttactacactctcataatgaagaacttaactctatatatttgcaagctgaaaaaacagttaaagaatattcccttaataatcactataatgctgtctcaaatctttgggaacagcattttatataatttagtaactatttataagatattaacataatttatttaaatttttatagaaaaaactctggaattttatatcccagagttttatcgataccccttgctttaaattttaataatattctagctaactctaaaaatctctggaggagattaaattatatgtaatactttataataactacttatagttattactatgctgccaacataatatgattgaaaaattctctagcaacaatactagatgggttatattcaaggactgtttcaatttgttttatagcttctttattacgacctaaagaaattaaacatccagcaagagaaatacgaagctcctctctatctgggaaaatatttacacactcttcaagaactgaaacaactgactcaaggcgatttaatttatagccttcacggacaaggcaattaagtgctactgcatttgcaggattagcatgtgctgctttttcaaaataagaaaaggcttcttcatcttcgcctaattccatcttaataagacccataccagctaatgctttatcttgaagaccaaaatcaaaagccttattataaaagtccattgctgtatcaaagtctccacgttgtatagctatagtagcaagacccatataaggttcaggctgtgtttccatagaagtattagcttttttataataatcttcagccttatcaaaatcacccataaacaaatagcattcacctaactctttgttaatttcataatcaagctgattttggctactcataatctcctccatatcctttttactaaaagttatacttaactaaattaataagggtgtattgatataaaggataaagcaatgcacatgccaaaatatcttttttaagtaaatttatagagttccatgtaatatagagcttatctataagatattgtcagtgatttgaccctatcatatcaaatatattaatagaattatcactggttacgtaatgactgcaatctctctgccaacatacgagcttttgcttcaccaatcccaggaatagcttctaaatcctttatggtagcacatgtcattgcttcaacagtcttaaaatgactccacaaaagttttgctgtggcttgtcctataccagggatacgtaataactcacctaacagagctgtattttttctagcttttctatgtttgccaagtacaaaattatgtgctgtatctctcacatattgcaaaaataataactctggagatccttcttttaaggtcagaggattcattcttcctacgacaaaaattttatctccaatattccctgcacgacgatctactctaccttcttcattccttgctttagctattcctgctaatataaatacgtctttaagatgatgctcattaaaaacacgttgtacggcatttatttgaccctttcctccatcaataagaactaaatctgcccaaggagggcctgactgtattcttcgttttgcccatgatgcaagagcagcataatcatctcctttaataaaaggactattatcttctgttgtactatatattctataatcatttttaagaggttgagaatcttcaaaaacaaccattcctacacgagtatttgtcccacttatatgtgatacatcaacacattctattcgaaaaatgggtttatcagtatgaaaaacttttgctaatttagctgacataggctcccctaattttgtctgtacagcttcacgagcattagttactgcaatatctaccaaattactttcaattatatttttaggaacctcaatacgaactgtactattacgtatatcttctaatacatattttaatgtttcaaaggtatcttcacttatttcgtctttattatttgttgattcaggaagccatgggacaataattcttggagggattgaagatataggactataaaattgacttaaaaaacttcctaaaagctcaggaccatcatcaagttcaagacctggccaaaaaaatgtccttccatctaacagttttccttctcgaacaaacaaaaaaccaagagctaacccattattaactaccgcaattccaataacatccatatcacctccctcagggagaacaacactttgtctctctatagtatgcttaatagcttggatttgatctcttaaggttgctgccttttcaaactctaatgcttcagaagcatacaacatatctttctgtaataactctacaagttctttggatttcccagataaaaataactctactttttgtatcaatacagcatagtctttagggtctacttcttctgtgcatggagcaagacattgttgtaaataaaaataaagacatggacgtatacgattattaaaaactttatctgaacatcgacgaagaggaaaaattttatggataaatttccatgtatcacggacagatgtaccagatgtaaatggaccaaagtaaacagcattatctttataagattgccttacaatttcaagtctagggaaaggaattcctttttgaattcgaaatagtaaatactgcttatcatcacgtaatacaatattatagcgtggacgatgtttttttatcaggctagcttcaagtaataatgcttctttctctgtattagtagatattgtttccaataaattagcatgattcatcattgcctttgttttaggcgttatcactaacccatcacgaaaataagataatactctctttcttaagtttctggctttacctacataaataatccgaccttgtgaatctttgtataaataaacaccaggagttgttggaatagatgatggatgaggtctctccatatttcctactatcttgaatacgttaaaaaatcagaggatatagtctcttcactatttttattcaatacaacttttattgctttcctctttaataaacgttttactaactggggaagaggtaaacctaatatcgtagtatagttaccttcaataatatctattaaaaaagctcctataccttgtattgaaaaagctcctgctttatcatttgactcacctgtacttacataagaagataaaatatctttatcccattggccaaattggatacttgctgtatcataaaatatttcatattgcacagaagtgatattttcttctaatggccacacaatacagcaacctgttataacttgatgttttcctccctgaaaacgagaaagcatagaaaaagaatcattgcctgattgaggtttgcctattatttcaaaaacatcatctttagtatatataactactgtgtctgcagcaatgataactgaacgtggttctaatgcagcagcagcaaaagcttttacttttgcagcccttataacatactctaaaggatgttcagaagaaagtggtaaaggctcactgtctacactaacaattttaaataaaagacctaattgctcaagcaaacttctacgtcttggagaggctgatgctaatactattggtacggtttctataaaaacacttgatactctttgttgagtcatagtttagtcctaatctatctctttctctaacatatttatttaattattgacttcgtaattaaaatataggtttattgatgtataaaaaagtaatatagagaacttccatattatctttaaataaggtatgaaacggtatctgatctgaaccgttatcataatggtgcctttgccttttctgaaagacaattaataaagctagaagtagtaaaagagctatagatcagacttattgaaaagtcattcaaaggatttgcaatgcccatttaccgtaaagttggtgctcgtcttacccaaatgcaggaattattctcccgaaatgataactggctgatcataattaatgctgatcctgatgctattgcatcagctatggctctaaaacgtattatgtcccgtcgaactgggaaagtatttattgcacgtattaatgaaattacccggccagataacctaactatgttgagacagttatatattcctcttgtcccatggagtgaaacactcctcccctttttccaaaaatttgctttagtagactctcaaccacatcatagtcctatattccaagacataccattctctattgttatagatcatcatcctattctacctgaatttccttcaaaagctacatattctgatattcgacctgaatatggtgcgactagtactatctttactgaatacttgcgtagtcttcatattagacctggaagacgtcttgcaacagcgctacaatatggtattcgaacagatactggaacattcactcgtaaatttacagatgctgatatcagagcctatcaatggctagctaaacatgcaagtaatacactgctaatacgtattacccgtagtgaatacttacaagactggttaaagtattttactcgagcctttacttctcttcatgactgtgggaaagggaaatttgccttcttaggaaatattgaaaatcctgatattttagttgttgtaggtgatttttttactaaagtttatgggttaaaatggactgctatttgtggagtctataaagaacaagttgttattgtttttagaggagatgaaagtatagatcttggaaaatttgctagtgaacgtttttcatcattaggctctgcaggtggtcatagggctatggcaagagctgaattcccactgaaacttgttgaaggaaaaaatttagaagtttttatatttcgaaaactttcagaacgtctacattcaaaaaagaaaaactctaagaaagaatcagagaataatgaagaactatcaacaaaagaagaacataaacatccatcagaaccattaaatacaaatcaaactagttaactattattaatttcttaatcttcttttactctctatgtaccttacgttaccattcaattttaaaaactaaaattacattcctttaaaattctaaataacctggtgttctgggaaatggtaatacatcacgaatattagaaacacctgttaaaagcatcactaacctttcaaaccctagaccaaaaccagcatgtgggacagtaccaaatcgtcgtaaatccaggtaccaccaatactcttctatagattgacctagttctctaattcgagacaaaagattatcaagtctttcctcacgttgactccctccaatcagttcgcctatacgaggaacaagtaaatccattgctgcaacagtttcttcgtcatcattttggcgcatgtaaaatgcttttatttcttttggatagtcaaaaataatgacaggatgtttaaaatattcttcagtaagatatttttcatgctcagattgaagatctaacccaaaagtaactggaaattcaaaatctttatggctagataataatattgtaatagcatcatgatatgaacaacgtataaatggcttggcaataatattctctaacgccttaataagtcctggttgaacatatttatcaagtaacattatgtcatctatatgacactgaagaactttcctaataacttcacaggttaactcttctgctagattcatattatcttgtaaatcagcaaatgccatttcaggctcaaccatccaaaactctgctgcatgtcgaggtgtattagaattttctgcacgaaaagtaggaccaaatgtatatacttttccaagtcccatagctaaacattcagcctcaagttgtcctgagactgtaagactacattccttaccaaaaaaattatcactagattgagaatcattgcttgagtgtgctgtagtaactctaaacatttcaccagctccttcacaatcagagcctgtaagaattggagtatggatgtaataaaaccctttcttataaaaataattatggatagcctgtgcagcctcagcacggattctaaaaatagcgccatacttatttgtacgaactcgtagatgtgcaatagttcttaagaattcatcagaatgacgtttcttttgtaaaggaaatacctcaggagcagcaagaccatgtacaaccattttttctacttgaatttcccagtcttgacctctgccaggagaaggtacaagcttaccataaacagatacacaagctcctgtattaacaccgtcaagcatatcccaagcagcactaccttcatttataatacattgtatattctttagacatgaaccatcattaagttcaagaaacacaaaccccttagcattacgccttgtccgtatccatccaccaacatgaacatctgcttgtgctgttttcgaacaaagaatttctacaatagtactaggtagcatatatacaccttaataaacaaatatactagaatgataaaaggaaataaaaacaatatatatacattatattctcttccgtctcactcctaaccgaacccactcaataataataggtaataaagaaacaataattattccataaataactaaactaaaatttttctttattaatggcatattacccaaaaggtatcctgcagagactaagcctatcacccaaatagctgcaccaacaatattataaaataaaaacctgctaggattcatataggtaactccagcaacaaatggaacaacggtacggataataggtataaaacgtgcaaaaataactgctttcccaccatgcttttcataaaaattatgcgctttaataagttgatctttattcaagagccatatgttacgactaaaaacatttggaccaatatagttacctatcatataatttacagcatcacccataattgctgcagttaaaaggacaataacaagtattggataatataaataacctgcacctacaactgtccctgcagcaaacagtaaagagtctccaggcaaaaagggagtaataactagtcctgtttcacaaaaaacaataataaaaagaatcacatataaaaaaattccatactcagccactaagggaaaaaggtgtgtatcaatatgtaatataaatgaaaaaaactgtcccagcaatgatgaatccataactctcctttgaataacaaggtcgctttctactaacatcttattaattatacattatagcatgctatagtatattaaagttaatgcaaagtttacaatagtagcttttgaataaaactaatgttaaaataaagaaagttgactaggttttttttgtatatgtttcatcagctgactacgctgaaacatatctggaagattaactaaaaatctagaaggagcaagccttaacacattaccaaatatagttctttgctctgaatagcttaaaaataatgcatctttggcacgtgtcatcccaacatataataaccgtttttcttcagcaatagtctcactattttcatactctttctctgccttttgtaaaagtcgttgtgtacctaaatatggtaaaagtccttcctctaatgctggtaaaaaaataactttaaattcaagtcccttagacgcatgtagtgtcataatttgaacctgttctgaatgactttttactaaatcaatttcttgtcgcaaacaaagccaattcaataaactctcccaagaaccatgtactttataggcttttaacaacttcttaaaactactggattcacgaaataaaggatcaaatggtgggacagattctaaccatgaaagaagtgctgaaggtcctccattccaaatatgtgttgcaatagaagaaggatcaggaactgtttgtattccaaaaggtcttccaaattttcttcctgcaagacctaataacaaagctacacgctgatcttcccaaaataattcagtttctggaacagaacaaggtacacctaatcttaccaaagactcttggaatggcttcatgagtgccttcattctgacaagaatagcaatatcaccaggactacatagtcctgctaatggatgaggttcattaccagcccgtgcatctaccaatgtatgagaacttcctccaattaattgagataccttacttgcaacccatgaagcttcacggcaataatcaggtgctgtaaaaaggtgtaataaccctttatcctttctagtagaagtaaggtttttactttgcttaccagaagcaagaagagctgaagctgagtaaacaacttcttttacagaacgatagttctctgcaagagtaataacttttataccaggccacattttactaagagctaattgaacattaggatgagcacctctaaaaccataaattgactggtcaggatcacctataccaaaaaaccccttacctgatgatggaacaagtaattttactaatgcaagttgaagtgaagaaagatcttgaatttcatcaacaaggactgccttccaaaatgttcctctgcttttctgcaaagtagaaatccattgttctaataagtcgctataatcaaccatattgcgtatttttttatactgtctatatttttcaagcataggaagatatgcctgttcaggcaatactgacgtatcaacttgcttttcacgtactagatttaaaatctcccaagcttttttgattaactttggttcattctcttcgttagctttaataaatacagcctgtgaagcctcctcagaaaggacatgtggctgactgccatcttcttttttgggccagtatccaagagctaaagcatgaagtgtatcgactctaattgttcccttccctatagaatttcgtatacgttcttgtagctcctctgcagctctacggctaaatgtaacagccaaaatttcactgggttttatcccactgaatagcaaatgttctatccttcctattaatgtccttgttttacctgcacctggtccagcaagaactaatataggttggatatcagcctttatagcttcattttgagaagttgaataagaaaagttagaagaagaactagtagtagttattatctttttatcatgatcttttttagttaaaaaaatatcaccatagctagccgccgttacactagaagattttggggaagacgtttctttctctccctccaaaagaacgcctgtagctgctaacaaaggcatagtcatatatttgggtgataaattctttattgtttttgatttttcttgtgttgttactcgaggctttgagcttctagaaaacatttttccaggtagaaatgaagctctttctgcatcactaaagactcggataatgccatactctccatcataaccaccttgacgtataacttgcccacgacgcatacgcacaatagcttcacctaattcattccagtattggcgaagatcacgttcagaaaccacatgaagtatattaaattccgttccaaatcgatgaataagttgtccatatttatcaagcactctcttactcattgagccaactcccaatatctctcctagtaactccacaagagggataaagggataataaggaggagtagctggcatataggcttctgtcctatcagctaattcaagaattcgatgcaacactccaattgtaagctcattcccacaaacaggacacatatttcccatacgcatggcttcttttggctcaacaacaacaccacaagcacgatggccatctaaataatatttcccctcatctgggaaaaattcaactgtacctttatattgaacattattaggtatagaagggaatcttccagtagaaaaacgtagtgcattaaaaattccatcataagatggtagtccctcaaataaattggcttctcgaccaattttatccccagaatgtgcatcagaattagaaattaaagcacaaccatctaaatgactccaaagacgattcatttcaggatcagaagaaagacctgtttctaaagcaaaaatatgtggtgcaagatcaccaaaacactcatccaaactattaaatcctgactttgaaccaaaaagagagaaccatggtgtccaaatatgggcaggaacgacagttcctctttcgtcaacttctaaaacaatctcaagtaaattacgacaatcaagaccaagaataggacgaccatctgaacgtaaattcccaattgactctaattttcgacatagtttctctatgctatcaaagtcaggcatgaaaatcatattatgaaccttacgtactaatccatcttttttgtaaatagagctaatttcaccctgaagtaaaaataaaggatctggtgaatcagaaggaatctctattcctgggacttcactctgaaggacttctttagaaacaggaagcttataaagccctgaggcttcatctaatataagttgttgttgtaactcttctctccacacaggatgtgtaatatctcctgtagcaataacagaaatacctttgatgcggctccaagcagctaaatgtggtgctgtaagctttttactggtagctctagaaaaacgagaatgtatatgtaagtcagcacaaaatatactcatataagatcctacaactgtaatatattaattaattatagataataaatagaagaaaagaaaaacattattgagagataataacattataataaaatgagatatagttatttttagaaaataaaaagtttacaacattttattattatagaattttttatatattaataaaaataatagataaaaatagtataatataatgctacccatagagcataattaagtatcctatagtacatttataatagattgaaaactttactataaaggaacaataaaagataacctttctttctaacaactatagattatattaaattacaatcagatataatttcagtcaggttaaattatatctcaccattgttgaactctatcttttagggatagttactatcaagtcaagctaaaaccatgctagcccaataagcttgtccaaaactaattcctccatctcctgatggtacatttttatgcataagtggtgtaagccctcgataccttaatgctttgggtaataaagaagatatagtttgattatttaatactccaccagataacccaacagttttaactcctgtattctctgagccaatcaaggctaaatctgctaatccttcaactagccctatatgaaacctgcgtgctaatatagaaacagatattttttgttgtaataactctattaattcttttaaaaaaactgttgtatctaattcataaatactatctttttcaactatagaaatagtaagactctcattacatgacatatcctgttgatgttcaagacgaatagctgcttgcccttcatatgtaatgtaatcacataatccaaataaagtagaaactgtatcaaataacctcccacaacttgaagtcaacttcactttatctttggataccatttctctgattgcactatgaatcgtccatctctcaggagaatttttccatagctgtcttacaaggctatctactccttctagttcatgtatttttaataatgctaaaaaaccgcttaacaaacgccatggttcatgaatagctttttctcctccaggaagaggaaggagtgatagtctagctagtcgttccccttgctcatatgacttcccttttacagcttctggatataaataaaataattctcctccccatatagttccatccataccatatcctgtaccgtcaagagtcaatacgagtgccggctctttatgtccatgttcagctaacacactataaccgtgtgcaatatgatgctgtaactgtaagattggtaaaccaaactctgcggcataccgtgtagtaaaatagtctggatgtaaatcacagacaacaacttcaggagaaaatccaaataattgggaaatatgttttactgtttgacaaaatgaccattctgtttctggttcagaaagatctcctatatgttgacttaaaaatatatcctgtccccttgtaaaacaaaatgtacttttatgttctgcacctaatgctataatgcaaggagtattatcctttaaagttttaactgttataggtagtggtgcatatcctcttgcacgtctgataaaatgccaattaggtgattgtcctatgttgtcctctcttaaacaaacaacagagtcatcaactggcacaataatatttctattatgaaataaaaaaaaatctgtaatagtattaagtcgtatcagtgcatcgtcattattatatattatagtaccaccacttacattagcggaggtcataacaagagcaggaattattctttctagctcagcaacttttgttaatgtattacataaaatgtgatgcagtggagtataaggaagcataagacctatagtagaaacatctggagcaatattttttggtaaactatgaggaattgctttcaaaataactataggacactctggtgattgcattttttggatttctacttcactaatataagcaatttgtcgagcaatatttatatttggaaccataacagctaatggtttatctgggcgatttttccgatagcgtaatgtattaactacgtcagcattagtagcatcacaaataagatgaaaaccaccaatccctttcatagcaataatcttacctttataaatatactctatagctaacaatattgcttcactattataagtaatatatctattatcatgatctgttaaccataactgtgggccacatgttggacatgcattagattgtgcatggaatcgtctatctaaagaattattatattctttttcacaggtaaaacaaaaaggaaaagaggacatagaagtatgatgtcgatcataaggagctttatgtataatagtatatcgaggaccacatagtgtacaacttataaaaggatattgataacgatgatcagtagttgtattcaattccttaacacaatactcacatgtagcaatatctggacttattaatgaagtatactgtatcccatcagagctttcttcaataagaaactctgtttctttatcctgaaaaccaagagattgcatagtaattgacgtaaattgagcaatagaaggtttttcattagtgatcatttctttaaatatatttaatttactatcatccccttgaacttcaatccatactccatatatagtattttttactttacctgtaaggcctaattttgtagcagtacagtatacaaaaggacgaaaacctacaccttgtactcgaccttttattgtataaccttgtctctttaactgcatattatataacctatttaacacgcccattaatcaagagtaaaatataagagtattactcctatgctagtgattaattagcataatgctatctattctctcaacaaatattatatagaaatataacaacatttataaagacttgccacaaaatcatagtctcgatatattaattttttctattgtaaaaactgcattaactttctaaatttttatttagaaaaacacagaggtaaagataatgctcttttcttttcgttttattacctatcccctcataacaatttttatattatatacttgtcataatgcgcttgctagtaataatgattcaatgattacctctgaaaattttgaaagccaattacgacttcttcttcataaccatcctgagcttgtccttgatgtactaagagagcatagcgaacttgtccttgaaattgcccaacaaggttctaaacagcgtcaacataaatcccttatagcacagtggaaaaaagacataactactccaaaaaatatgcatctggaaaatagaccaatccgagggaatccaaaagcacccgtaactattgtagcattttcagactttacatgtttgtactgttcacaagcttctaaaactgtacaacaaatgcttattgattataaagataatgtaaaatatatttttaaacacttcccgcttaaaggacatactatttcacaacaagcggcaatatatttcattgctgcatctttccaaagtaatgaaaaagcatgggcactttatgatcttctttttcaaaaaagagatgagctattacaaaacggtgaacagactcttaaacaagcagtaaaagaagtgggactagatataaaaaagttaatgagtgacctcaacaaagcagaagtaaacaatattcttggacaagacataaaagatgctgcacaacttgatattagtggtactccatactttattgttaataaccttatccttcgtggtgcattacctcctgaattattcacagaagcaattaatatggccttaaaaaatacaaaagaagtgtcaacatctccaaaataaattctaaaaggtgtcataactacaacacattactatataatgaaacctatgctagtatatttattacaatactttttagttagcttttttaacatgttatccatcttttcatgattatcaaatgtgatattgatacaattgccctccctaaaaactttcttaaagaaaaaaagacaaccattactttaggaaattttgacggtgtccatcttggacaccaagctttgttaaaaactatttatttaacagctaaaaaacagcaatctatctcaacggttattacctttgaaccacatccacaggccgtccttataggagaatccccatctctcctgactacaaaaaaagaaaaattaaagctaattaaatcaatggggatagatcttatcttccagctcaactttacatctacattagcaaatatgacaacggaacaatttgtgcaatcgattttattggaaagacttcatatggaaggtatagttttaggacacgacttttctatggggaaagaaagattaggaacacaacatgttttatcaaccctaggaaaaacaatgggatttacagtaacacatcaacctgttttcacatttaaagaacagcctgttagctcaagtcttatcagagaagctatccaagaaggagctatagaaaaagctaacttactcttaggtcgttgttactcaatagatggtactattatacatgggaaaaaacgtggtagaatgcttgggtttcctacagctaatcttgcattatcatctaatttaattccatctactggagtttatgcaacattagtcaccctagaatcaaatcaagataataccttttatatacctgtacaacatcaaaaaaatacatttttagctgtgactaatataggaataaatccaacttttggagattcaattcctaaaattgaaactcatttattaaattttcataatgatctctatgagcaacatatgacaatcaattttctaaaaaaattaagagaagaagccatattctctaatatctcttctctaataacacaaattaaagatgacatatcccaaaccaaaacaatttttaagaacatgttgtggcctcaatcactcagtttagaagatccagttgatcgcatggatgcgaccctaaaaacctaatagacgggtatattcaaggaggaattatatgtctcttgtcattaataacaacctgatggccgtcaatgctcaacgtaacttaagcaagtcttatggagaactgagttcttctgttcgaaaactttcttcaggtcttcgtgtaggaactgctgctgatgactcagcagggttagccattcgagaactcatgagatctgacattgcaacaacacaacaaggaatacgaaatgcgaatgatgctatttctatgattcaaactgcggatggtgcacttggagtcatcgatgaaaagctcattcgaatgaaagaacttgctgaacaagctgctacaggtacatataactccactcagcgtatgattattgactctgaatatcaagctatggcctcagaaattactcgtattgctaatgcgacagaatttaatggtataaaacttcttgatggttcattatcaggtaatcatgatgggaaaaaaataaattcaactggtgcagtacgtatccactttgggacatctaacagctctgctgaagattactatgatattaaaattggtggctctacagcttctgcattaggacttggtaatacagtaaaaggtgcgggtgctacagtctctactcaagctgcagcacaaaatgccttaaaagctatagataatgccattgtttcaaaagataaaattcgagcacaccttggtggattacaaaatagacttgaagctacagttgataatttaagtatacaaaatgaaaacttacaagctgctgaatctcgtatatctgatatagatgtaagccaagaaatgacacaatttgtacgtaaccaaatacttacacaaacaggtgttgctatgctttcacaagctaattctctaccacgtatggctcagcaacttattggctaaaaaaaaatatatatatacaacggctcctctttattaagggagtcgttgaaatatacaattaacttcactcaaaatatctttatctggtaactaaagaactaactattatctatgaaactatttattgtaatatgagttataaaaatttaaatactacgttcattacctatagaatgcttaataaattctctaaaaaacgtatcatgctttttgacaaaagtaactatttttgactccaacacaaaaggttttgaatctgctgtatattcaaaaacagctataataatcatacaaaaaacaaaagcttttaatgcaccaattactcctcctcccagccaatttatccaacctccagacttccatcctaaatgcttctgcaataacccactcataatagaggaaataatcattacactaaaaaagattgctatatatgctaaaaagtaagaccatttttgagaacctatataacttaataacatattaccgaattttatatataacatataagcagtccataagcttataataaaaattattatacctgctaattcttgtaataaccccctattaagaccttttaaaataaagaaaatacataagataactaatacaagatctaatatatttagttgatataataagttcataatataaaatatatctataatattgttattaaatttttaacatatctctagtcttctttaactatatattaaagtaggctagattagccttcaaatttatactatatataaaaatagttataaagtatactaagatatttctaaaaatgtataaaaatataaaaagtattgttaaaaaatctactaaaaatttttctacaaaataatttttttaaaagatagaaattttttcaaatattttaaaaaataatttagaatataaaaatatattgtgaaactatattctttctctaactaatatttattagtccccaacagcatagaaagcaatattatgtaacttaatttgcttaagtataataatattacctttcttataaaattataataatatcttaatagggaattgagttatttctaacttgaccaatatatcaaattcagaatacattataactgtgactaatcaatggaagggtggcagagtggcttaatgcggcggtcttgaaaaccgttgacgttgcaaggcgtccgggggttcaaatccctccccttccgccagaatccaaataatacctttaatctttaatataattttttatataaaaattataagacaaatttttaatctactcttatccaaaaattctttataaataaaaatagacaatattttactctacttgcaatgaacctctgaatgaatcaaagtttttgataccaagttcattacaaataataggtaatgcctcagcaatacgaaatgcaatatctggttgaataaaattcattgttccaatctgtactgcatgagctcctacaagaataaattctaaaacatctcttgctgaggtaatcccaccaatacctattacaggaatgtttacagccttacacacttcccaaacacatcgtagtgcaataggtttaattcctggaccagataggccacctataactgtagataacaatgacttacgttttctaatatctacagccattccagttagtgtattaatacaagaaatagcatcagctccagcactctcaacagctttggcaataatagtaatatctgttacattaggagaaagtttaaccatcacaggtttacttcctgcattcttacacacagcttcagtaaccttagctgctaaactaggatcctggccaaaaaatgttccaccactttttacattagggcaagaaacattaacctctaaagcagcaactccctcttctgctgccaaaatagctgtaagttcactaaattcttcaactgatgtcgcatatagattagctataactggagtttctttccaaggtaagcgtggaagctttttttgtataaataattcaacaccatcattttgtaagcctatagtattcaacatcccacatggtgtttcagcaattctaggtaatgggtttccttttcgtggctttaacgataagcctttaacaataatccctccaagttgagacaaatcaccataccctataaactctgctccataaccaaatgttccagatgctgttaaaacaggatttttcaaaactaaaggaatgcttgaagtcgtagtaagagatacggtatagttatccatggtgatcctcacaatgtaatttgatcagcccaaaaaacaggtccatttgtacatgtaggaacaggcataccagccatattttttactggccatttatctgtagtttgcacaacacaaccaagacaagcaccaaccccacaagccatttgtgactcaagagaaagttgtgttcgaacattattttcaagagcaatagactgcacaaactttaaaaatggggtaggtccacaaacaaggatcaaaccattacaagcagcatagtttttaacttgtgtactaacttgttcaagaaatacttctctatcttgaagagtattttcttggaaagaaaaaaaatttactttttctgataaattttcaataggatagcaatcattaggatatttatgactaaacatcatataaagatttttagggttgggatgagaatcaatatatccaataaaaggagcaataccaatccctccggccaaaatcagtgtaggcttttcttctgtactaaaacggttgcctaatggtccccataaatggaccatattaccactccgtaagtaagccatccgctctgtacctttaccagaaacttgaaaaaaaataactaattcttctttagttaccctacagatagaaaaaggacgtgcccaaggaatttctaaattccaactttgaggacgtatcataacaaactgtcctggagcccaacctttccaatctggaagttccaaacgtagtgcaaaaaaatgtccttgcatacctgcaagaccaaaagggatattatcaataactgcaaggttataaaaattggcacttgccataatagacctagccttattggtttaatcaattaatgataacaaaggatcatcttaaaggtagtgtcctatcaaaagaaggtcaagagcagaaaacttgttttttctttcaaaaacactctttacctttttactattgttacctaaattatattgttaggtaaagataataaaacctcctccaatgatatactatctactataaaaaattactaaacaaataaaaggcgttaaacagttatgtataatatgcccaaaggatttcgttttgctacagctagagctgggttccgtagagcatactgtaatgacacagctcttgttgttagtgaaacacctgctgttgctgcaggcacgtttactttgcacaaattcccagcagctcctgtccaaataggaaaggaaagactatctaataatctaacaatgcgagctattcttatcaattcaggacaagccaatgcttgtactggctatgaaggattaaaaaactgtcgccacactcttgaactcctttctaatgctattggttttaattcacaaaatattttacctgcctctactggagttattggtgttcaattcaacatggctctctgggaaaaagttattcctgtccttatagaacgactaggtaaagatggtccagaagactttgctaaagctattatgactacagatgctttccctaaatttactcataaaaaagttcaattatctcaaggtacaattaatattgtagcaatggccaaaggtgcaggaatgatctgcccacagatggcaacaatgctagctgttatactttgtgatgctgacattcaagtagagtgttggagagaacttatctcccatacagtaaacataacattcaaccgaataactgttgatggtgacacatctactaatgatactgtttatgctctttctaatggctgttctggtatttctattacaaataatgaatcattgaatcttcttcaagaggggcttacgtctatattaagcgaacttgcttatatgttggtacaagatggtgagggagccacaaaggttggacatatttatgtcacaggtgctttatctgacaccgacgcagagactgttgcacgtaccgttggcaactctcaacttgtaaaaacagctctttttggccaagatgctaattggggcagaattatagcagctattgggcgtagtcatgcaacatttgacccactagcggtttgtgttaaactttgtggtgtaactgtttttttaaatggtcaacccaccaaagataactttgatgacatacttaaagaaccattacaacaaaaagatatcctaatagaaattcaactaggacatggacctggtatgtataaacttctaacctctgacttaacacacgattatataacatgtaattcagcatatagaagctaacttcccatatataaattatagaaaaaatctttttaagagtaatactctactagtaaaaaattcttaaaccttacttcttagctataacttatagtaattttatacagttataataattataagtagatatcttcttattatctatatgttttttagtataacttttgtatatcgagcttattatgcaacctattatagttagttcaaatgaggcaggacaaaaactttttcaatttttaactcgccgtttaactgtacccaaaagcatattacaccgctggatccgtacaggacaaacccgtattaatgggaaacgtgtgaccccctttactatagtaaactttaaagacaaaatacgtattccaccttttgcatacgaatataaaaaaaaagatttaacaacctctcttatacataatcaatatgatataagccctataagctctcatactacttctccacttcccccagttatagctcactccccagagtttattatattttataagccagctggcctagctgttcatggtgggacaggacaaacagatagtttagctcaccgattatcacaacattatgcacatagtacttttatgccaacacctgtacatagattagataaagatacatctgggcttcttcttgttgctaaaacatataatagtctaagatatttttctgaactttttgcttcacatagtacacaactaacaaaagaatatcttgcatgggtagttgggatatgtccatggactcaacccatctgccttgaagatatccttactaaaaaacaaaaacaggataactattcaagacttaatagttaccaaaataaactacaacaaacttcagctcaaaaggcttcattaacagtacgttgtataaaacagtataaagataaaagcctattacttatcaagcttcatactggccgtacacaccaaattagaattcaactttctattcatggttttccaattattggagataaaaaatatgggaatacaatacgttctcacaatcttaaacttcatgctttcagattgagttttccaggatatacgtttactattcttccctcatgggatgataagtggcaagttactcaagaagatatacctaactaatttaattatgagatattatataacttgttacaacaatagcatattgtagatattttttttataccttatagtaactagcaaattatattgtaatagctaaaacaacattatatgttttccaaaagataactgggactattcatgaagtacatgctttctctatggattaatatcttattttgctttttttttattgtaaatccaatatatgctgaaaaaaaagaacattatattaatggaattgacgctcattatccaccttttagttttatagatgaacatggggatcctacaggatttgatgtcgaagcacttaattggattgcaaacaaactaggctttacagttgaacatcgtcctataagttgggatggaattattcctgcacttcttgcaaaaaaaattgatatgatctgctcaggaatgagtatttctccagaacgtgaaaaaaatattctttttacaagaccatattggataacacaaaaaatacttattgttcataaagatagtaaattaactcctgaagaaattttttatggagaaaatatcatagtaggagtacaatgtggtacaaatgaagcaacgtttcttgaaaaagagctaaaaaacaaaggttataaatataaattacgctattatgactcttcacctcttgtaattaaagacttgcttaatggaagaattaatgccgcagtcatggattgccttcctgttgataatgctattaaacataataaagctataaaaaagctttatatcatagattatagcgatgcctttggtgttgctgttagaaaagaaaacactcaactagcaaaacgtattgaagatgggtttctacttttacaggctgatccattttgggaaacactaaagcaaaagtatctacctttaagagaaaacccttagccaacttatatttatttaatataatctttatatatgaaggggattatattttaaaatgttgaatatttcctctgaactactacattctattaatattattatagaagctcttcctaatattttccaaggaagtttagttactataataactgtacttctagccctttttattggacttattcttggtataccaatggcaattttacaagtatatggaccaccatatattaggtatagtattcaaatttactgttggttttttagaggagtccctattctactcctcttatttcttttttactttggtctctttgaacttcttcaacttaacttctctgcagtcactacctcatgtattgtccttgggattgcaagttcaagttatcaaacacaaataatcagaagtgctatccaaatgataccttctggtcaactaaaagcagcaaaagctcttggaatgaccagtactcaagctatccttgtaattattctaccacaagcattaaggttatcaatccctggttggtcaaacgaatactctatccttcttaaagattctgccatatgttttgttcttgggacaccagagattatggcacagacacaatttgtagcttcaagaacatatgaacacttactactatatattgttgcaggaatcctttatttccttattacacttataggtgtttccttactccgtcgacttgaacaatatctttatcttcctggatatactgcctctctccattaaggatgtctttatgatagattctacatatcctattctctatgttaaaaatattacaaaatcatttaataataaactgattcttaataatatatcggttaacattaataagggcgacattaaagtgttgattggcccttcaggtgctgggaaaagtacttttctccaatgtcttaactgcctcattttacctgatagcggaggtatttacctatatggagataaaatcgatttatcaaatcactatagcttatctgaattacgtaaaaaagttggaatgatttttcaagactttaatctatttgatcacctaaccacagaagaaaatatttcgattgctttacgtaaagtagctaattattcttataaagctgcaagagaaagagcattagaagaacttgcacaagtaggattaatagacaaagcaaatctataccctgcacaactttctggaggacaaaaacaacgtttagcaattgcacgtgctttggcaatggaacctaatgttatgctacttgatgaaccaacttcagctcttgatcctaaattaacatgtgaagtcctaactgttatccaaaaattagctaataatggtatgacaatggtgattacaacacatcagatggactttgcctgtgctattgctacagatattctatttatggaacatggtgaaattgttgagcaaggttcaccatgtcaacttctctctccagaggctcaaacaagaacaaatggcttcttcaaatcttttatttctcctcttcaaagtaattcattatctatagagaaaccatctatcagcatgttactttcaggagatctttctcatgatctaactaatagtggtacagaatccatttctttccctgaaaaaaacgaaaattaatatgctgttagatattacatttattacccagactgttgtacctactcttaataaaggtctactggtatctattgctttaattattccatcagctattattggttttctacttggtgtttgtataggtataattcgtgtattcggaaaacgttggttacaacgtttaggaaatatattcactctcattttccgaggagttccccttaccgtccaacttatgattttatattttggccttcctaatataaatatttattttgaaccatatattgcagcagttattggatttaccctatgtactggtgcataccaatcagaatatatccgtggagcattgctctcaataaaaaaaggacaactccaagcagcttatgctcttggcttcactcgactaaaagctatactttttattattattcctcaagctacacgatatgctttaccaggatgtggaaatgagcttgtttatcttataaaatattcttctcttgcataccttatcacatgtatagagctcacaggtgaggcaaaaattcttgtctctcaaacagttaagcccatggaaatatattttatagcagctatatactatttaagctttgtttctattgctacctggatactaaaaaaattagaaacactgtatgctatcccagggtttggcaaaaaacatatcgactacttataacatatactatactaaaaaaacttctcttatgttatctaaaagtagttaaatgaaggatctcctcatgcctatccaagaaaatattagaaactttagtattattgcccacattgatcacgggaaatctactcttgcagatcggatccttgaatatactaaccttgtttcggatagagaaaaacgtgaccaatatctagataaaatggagttagaaagggaaagaggtattacaattaaagcacaaacagtgcgaattccatatataactgctgatggaaaaacttacatattaaaccttattgatacacctggtcatgtagattttaattacgaagtctctcgttctttatcagcctgtgaaggatcactacttgttatagatactactcaaggagtagaagcccaaactcttgccaatgtatacttagctctagaacataaccatgaggttattcctatccttaataaaattgatcttcctagtgctgatatagaaaaagttaaagctgaaattgaagaaactattggacttgattgctcgaccgctatctctataagcgcaaaaacagggttaggagtagatagtgttcttgaggctattgttcaacaactaccagcaccaaaaggagatccaaacaacccactaaaagctctgatatttgactcatggtatgatgcatatcaaggtgttgttgtactttttcgtataatggatggaacaataaaaaaaaatgatataataaaacttttttcaacagaaaaaagttacgaaattactcgactaggagttttttctccagaagcaatagatatcccacaactttctgctggagaagtaggatttttatgtggtaatatcaaaacactaggtgacgctaaagttggcgatacgattacacttcttcataatccctgtaccaaagcaatcccaggatttaaagaaattcaacctgtggtattctgtgggctttatccatctgaatcaagtgattatgatatacttaaagcagcattagaaaaacttcaacttaatgacgcagcattttcatgggagccagaaacatcacaagctttaggatttggttttcgttgtggatttcttggtttattacacatggaaattattcaagaacgtcttgagagagaatttcaagtagaacttattgctactgctccctcagttatttataaagttgaaacaactgacgggaaaatacaagaaattgataatccatcaaaactccctgaactagggaaaattgttcacttatatgaaccatatgttcatattgatattcatgtcccaagtgaatttgttggaaatgttcttaaattatgtgaagaaaaaagaggtatacaaaaaaatattgcttatcctgctcaacaacgtgtaattattacatatgaactcccgttctctgaaattgtttttgatttttttgaccgtcttaagtcagcaacaaaaggatatgcctctatggactatgaagtcatagactaccgcatatctaatcttgtacgtcttgatattttactaaatggtgaacctgttgatgcgcttgctgttattgttcatcgcgataaagcatatcactatggccgctcattggctatcaaactcaaaaaaactattcctagacaaatgtttgaagtagcaatccaagcagctattggccaaaaagttattgctcgagaatcaatctctgctctacgtaaaaatgtaactgctaaatgctacggaggagatataacacgcaaacgtaaattattagaaaagcaaaaagaaggtaaaaaacgaatgaaacggatggggaatgtagaactaccccaagaagcgtttcttgcagcactacaaatgggagacgattagtactatagactacccaactagcataataatataataatacaagggattgtgataattgaaagtgctgtatttaaaaaaatatcaagagaagcatatcatgtatatacataatatttttcagcaataatataagctataataccttttggcatagctacaattaatactataacacctaccaacttactattcaaacctagtaatgtaaaacaacagtaagttatcaatggttgaatagctaatttaagaatatgtactggtaaatgttgtataaaccagcctgctacaaaaccctctgaagaagacaattgtgctgtcaaaatcatacctatacaaaacaatgcacagagtgctgccgttccaccaagtatagtagccatagttaatagcggagttggtataaaaaaactagtaatattccataatccaacaagaatggaatctaaaaatactggatttctcataaaagaaaaaaacttttgtaaagcaatccattgtgtttctgatttatcttcaaataaccttagctacccatctacaaagagtaaaataaacgaactaaagacagttaataaacctcctatagcaacagcgattgtatctcctgggaacaatagtgctactattggtactcccataagccctgcattataaaaacttgccaatgatatcaaaatgatattttcttcaaatattttttttaagaaaaagaaaaatactatatgctataagataggtgacaactatatctaataaaatccccaaaataaacgttgaaaaaaactcaccaggttctattcttactaatttataaaaaacaatgcatggtaaagctacgttatatgtaaactgattaagacctacggaaagacttgcaggcaaaaatcctgaatagtaagtaagtgctccaaaaagaataataccaaaaataggaataagagttgtaataatatccaattgaatcacttagtataagttatgtactatataaatttttatctttctataacactatatgatgctactatataaaactatttctttaataatagttcaatttcttcacgaataactcgtacagctgcttcagcagcaaatttatcaatctctggctgcaatctatcaaccacttcttttacaagtatatccatctgcaaagaattatctatcttttcatctatagaattaaaacgcatcacatttgaatcttgtaactcctctacttctgactcatgagccataataattaactctaatgcacttactctttgcttaagagcctgagactcattttctaactgttggattctaacattcaactcatctataactgtattagtaacagaaggaagtacactactaacttctaaagttgtatcagaagattgcaccttttttgcagctgtctccattactctagaatcattactactaatttgaatctcttcagaagatactgctgatagtgattgtggcacattactattattatctagtagattcttttcatttgctaaaaatgctggatcttttactgcatcaagaatagcctcaacttctcctttatctttatctgatagtatatgttctacatttgttacatcttcaaccacaacatcaggtaacgtcttatcaatatcttctaactgattaggactctcctcttgttcaactacatccacaatttttttaggtgaaatatcaacagtagagtctaagtcttcttccataagtaaatcatctaggtcatcaaggccatcaagtgccttttctaaaaagtttgttttatcttcattagtcgaaaattctaattgacctaaattcaaacttgcattggatgattctttttgatttttaattggctctttttcttcttcactgaataaattatcaagcagcgcatctaaatcttctgggtcagagtctattttacttaaaacatttgtttcaaccttttcttctccaagattatcaagaagatcttcactatcaatatcaacttgttgagagttattttcttcttttacctcttcagactcttctgcaaaaagttcatctaagtccggaatatcctctaatgaaatgggatcatcattactaagtatatctgaaagctgtgaatcaaagtcaactttttcagaatcctgactttcacttttgtcagaagattgaacaatatctactaagtcaatgatatcatctagtgactcaagagttgcatcttttgccatattggcctctattaataatgtttattaatcatcccttctaacagatatatagaactatagtagttataagattcaaaaataaataacagttatacttatatacttatactatagttttacctatgccatattttttctactttgcaagtaatatccatgcattacccattccagacaaagaaatgctttcttgataagcttgttgaccactaccacaaaatatatctatctttttccccttaacaccaccactatcttgagcaataccaataccacaggtttcttttgtaaactcattagtagaagcattattagataagtcaaaagctataattgcccccaaaggaaatacagaacgatcaacagacatacttatccagggagaaagaatatatccactactaccaattggtccatctttatacagtttaaaaaatacatacctattatttttgtataataattctgacatgcgtaatggattttcttgaatccaatttcttattaactcaatatttttattcccttgcgggataataccttgtgtttcaagataactagctaaactatgatactcttgtccattactgccagcaaacccaatatgtatagaagaaccatcttcaaaaactaataaacctgagccttggatatgtaaaaagtaagaatctaatggatctttcaaccatgcgacctctaatcccttacccttcaatactcccttatcatcaatttcataccgactatagtaaggaataggccctttttctgtttgtcgatatataatatgagatcctaccaactcttttttaaataaccctaggttgagctgatgcaagtctggtggtgttttatataaaggatatctatactccttacttggtttatagcttgccttaaacataggctcataataacctaaaaaatttatatcttctgttaaacctatccactgaaaatcctttgaaagaacttctggatgttcatctaattgatcaagtaatgtttcaagtcgattaactgtattaaaaagttgaccccatgtaattgcaatatcaccatgtgctattgccacttgctctaagtctttcttacttaaatattgatgagttgcctccaaagctggcctaagttctttccatgagcgaagattttgttttcttggagaaaatgtctttgcaatagctgttgcactctgttgttcttttatattataaaaaggtcttaaatttgtatatgataagccattagatgacatagattccatcaaactattgctacaaccaactatgcctaagaaacatattataatagatagatatctccatctaactaaataccttcccataataggaataaaaatatgcaacatacaccttctcatacaatatgttattctcaccgtgtttcttatggtgagacagatgctatgggttacttatatcatgcagaatatttacatatttttgaaataggacgtactgaatttctccgtagccttggtataagttatgcagagattgaaagtagaggcatcagattacctgtatgtcatgcaacatgtcactatcgccatccagcccactatgatgaagtcctaaacgttcatatcaaaattaatgaaataaaaaaagcttctttgacttttagctattctgttataaacaaacattctaataagttacttactaatgggactacaagacttgcctgtaccaacataaatggacaacttataaaaattcctgaatggcttatcaatattttctatggttctttactaatgattcccaacagtcataactgtagttaaaaataactatttattagactagaaataatgacaacttctaatataactatgtattttcttaacttaaccttcactctgctttatttaaagtaaaattattgtacttggtttatctcatcataactaatagaaattcttataaatattatcttagtaagggttagtattaatatttaataaaaaataacaagtaacttatgctaattcaaaaaaaaaacatacgcttatatcaaaaaatatcaacttattcaaaaagttattactttagccttccctttttcaaaaatcctataagcacaatatccaacactcttagtgtaataaaaaagttggttaaatgcaaaaccaattgtatttttacagtgagcgtcagaactaaaacaaattgatacaccttgtgctttagccatttttattatttctaaacaaggatatatttccttacaaaatttacgtagccctgcagacgaaacttcaaggctcataccactatcacgaatagctatcaataactctaaaactattttttgtccttctgcactattaatccaagttctaaatatagatggagtaaaaattttaataagatcaaagtgagcaacaacatgcataagtttactgcacaccatttcttttaaagaagaaaaatagtttttataatgcatataacactgagataatgacaagttacgccagtcttctatagtaaaatcgaaaccccaactccctaaaaaatgtactccaccaataatatagtcaaaattatacatagaaatcactgagtccataaaaagactttcactaggtaaccagtcaatttctacacccaataatactttatgatgctcaaaaccacactttttaatatgagacacattttcaatatactgagggaaattataactcaaatgtttattatattcaataggatatgaatatttatgtggtcttggtgcatgctcagaaaaaccttgaatgtctatgcctttatcttttgctgcataatacatttcttcaactgtatttttgccatgcgaagcacttgtatgcatatgtatatcagctagcaatagtattcctttactttcattatgtagttattaaaaaagaatctacttttatttctaaagtagattctttcataacaaattataactattgttatatttttaaagctgtttgtaaatctttaacagcatctaattgttcccaagtaaattcaggtaattctcttccaaaatgcccataacaagaagtcttactataaattggtcttagtaaatctaaacgctttgtaataaaataaggtcttagatcaaaaacctcaagtacagcttttgttaagacttcatcaggaatatcgcttgtacctaaagaagatactaaaacagaaacaggctttgctacaccaatacaataagcaatttgtacttcacagcgttgtgctaatccagtaccaactacattttttgcaatataacgagccatatatgctcctgaacgatcaacttttgaggcatctttccctgagaaagctccaccgccatgatggcctgaccccccatacgtatcttgaataatttttcttcctgtcaaaccacaatcacccatagggccaccaacaacaaaacgtcctgttgtattaatatatatttcgcattctttctcatcgaacattcctgtaggttcaagtacaggacgaatcactttactcttaacagcttcaataaggtcactttgtgatacagaaggggcatgttgtgtagaaacaacaacgttgttaattcttacaggaaccccattataatactcaaaagatatttgtgttttcccatctggccgaaaaaaggacacttctccatcttttcgtacttttgttaatttttgagaaagctgatgtgcccaataaataggtgctggcattaacgttggagtttctctacaagcaaaaccaaacatcattccctgatctcctgcaccttgctcttcaggttttgcacgatcaattccctgagcaatatctaatgattgcttatcaattgtggaaagaactgcacatgtctgccagtcaaaacccatctcagaactattataaccaatggactgtatggtccttcgaactacacttagcaaatctgcataaccatttgttgtaatttccccagcgataatagccatcccagtagaaactaaagcctcacaagctactctagaatgtggatcttgctctaacaacgtatctaaaacagcatcagaaatttgatcagcaactttatctggatgaccttctgttactgattcagaggtaaaaaagtatctccccttttcaatggtcatatcttctcccctaaaaatacaagcaaaaaactgtatcaaaattataaattcattatataattttcttgtgtttaacgttaactatattaacacaataaatataataagtaacaatagaatattgctatcatgtatgattagactatgtccagaggggctcataaactaaaataaaaaaccaatctaactttaaataaatactattatgataaaaaaacctgtttaccaaggacaaattgacgttttttgtgctgcatatgcagctattaatagtattcgaattgcccaaggaataaatttaattaatgcacgcaaactattacatgaagctttacttaatgttgctaaggatcttgaactattccaaaaagttcttgatcaaaaaacagattatgtattttgggttgataacatattagaacaagagtcaaaacgtggttctattacagtaaaaaaagcattccctcatgcgactgaaaaactggataaccatatcactagcgatgatgtttggtgttctattataaattggctttctaatggagaaaaacgttcatgtctctttcagtttattcgctatttacctacaaaagggttatttctccaacactggacatgtggctataacttactatacaataatacattacttctctttgctgattcctcattagagccagactctctccaatatatatacaaaaaggaacttggcactacttttaaaaatcttcatgatgaagtaataattaaaccatatacgttacgtttagtagaaccaattctaatctcttaaaaaccttgataataaaggtagaaaaatatatgcaagtaatacgagcaaaaacagcagggacatgttggggtgttgatcttgctttacgtaaactttctcagtctattgaaaataaagaaaaagctaatacacgttttgtcatgtatggacttattatccataatcctcaagttatagtagaatataaggctcaaggagttatatgtgttgactctattgaagaagtccgtgctggagatactgttattataagagcacatggaattcctatctatgaagaacaacaactaactgacattgggattaacctcatagatgccacttgtccaaaagtaaaaaaaactcaacttgcaattgcgaatgcaactaacagtgaaacaatattacttctctttggtgaagcaaaccaccctgaagtaaaaggacttatttcctattctcaaggcccattccatgtttttgacacaaaacaatttgttgaagactttgataattctcaaaacaaaacaatagttctcgcctctcaaacaacacaagatgaaataactttcaaagaaatacaagaaatactccatcaaaaaggaatacaacctgtaattcttaataccatatgtgatgccacatataaaagacagagagaacttctttctattacagaacaagtgaatactatggttgtagttggtggatttactagtggtaacactcgtagacttgttgagctatcaaaagcaaaaggaatcaaaacatttcatattgaaacagtagatgccctttatggaaataatgaattagatcaaaatgatattattggactcaccggaggagcatctaccccaaaacagcttattgataaagtggaagatttccttagtaataatctaagttaatcccataaaaaaagtagatagattatacccattctttacttggaagacataagttggaggcaacatgtcacaaacaggtattcttcttgaatctggaacaaatgaactagaaatagtagaattttttcttgatgaggatgatgacaatggagaagtgtatcgaggatattatggtgtgaatgttgctaaggtacttgaaattattagaatgcctaaagtgacagaactacctgatactcaagatgagtcgatacttggagcgtttaatttacgctcacatgttattccccttgttgatctaggtcactggcttgggaaaaaacttgcaaaaacagatgagcccaaaaaagttattgttacagaatttaatgacgtaacaacatcttttatggtctctggagtgaatagaatccatcgtattagttgggatgaagttgagcccccaaatgactatgtctctcaagtttctaaaacaaccattactgggattataactattgaagatcgtattgtttttattcttgatctagaaaaaatagtagctgaacttaaccctgcattaagtctccgacttgatgaggctgtaacatggggaagcgaaattcgttaccgtgctctaattgcagacgattcaaaccttatccgtgaaatgctcaaggatttgatgcaaaaagcaaattttgaagtcgaagctgttaataatggccgtgaagcatgggaacgtttaactgaacttaaaaatagagctactgaggaaaataaaaatattactgactacgtacaagcagttataacagatattgaaatgccaagtatggatggacttaatctttgtaaaagaataaaagaagatcctcaactacgaaaacttcctgttgtacttttttcttcaattattacagataaacttcgtcataaaggaattgatgttggtgcagacgatcaaatttcaaaacctgaggtcactcatcttgctaaacgtgtatatgcccttattgctgaacgacagagctaaccattcaactagatactatcctttaccataccttttcccatactaaaaaaaaaaaaaaatcatttcccatatccaatacaataataggtaaaaccacattgcctcataaaggaaggagagtaaagattacgtccatcaaatattacaggcatgttgagcaatgttttaattttttcaaagtcaggattacgaaactgattccactctgttacaataagtagtgcatctgaattattacatatagtataaggatctgcttcaatactcacaagcatattatcatgaagaacagcttttgctgtgtcataggcaacaggatcaaatgcacggatatacatacctcctgctgtcaaattattaataattgctattgctggtgactcacgaacatcatctgtattagctttaaatgcaagcccccataatgcaagtgtcttacccttaataccactctggccagaaaaatattcctgaatctttacagccattgaatgtttctgacgatcattcacaacttctactgcctctaacaactttgaatctataccaatttggtttgctgtatgaataagtgccttaatatcttttgggaaacatgaaccaccatagccaacaccaggataaataaaatggtacccaatacgatgatctgcaccaatacctttacgcacttcacgaatatcagcacctaatttttcacacaataaagccatttcattaataaatgaaatctttgtagctagcatacagttagctgcatattttgttagttctgcactccgtacactcattacaataagcttctctctattccgtgcaaacggtgcataaagcttatgtagtaaatgtgctgatgattcagagtctgtcccaacaataattctatccggcttcataaagtcagcaatggcatcaccttctttaagaaattctggattagaaacaacatcaaaagacagttctattcctcgagtcttaagagcttctttaactaatattcgaattttatctgctgtaccaacaggaacagttgatttatttacaataataagaggagaactcatacattgacctaatgatgatgcaacatgttctacataagatgtatcacatgtaccttcttctgtagaaggtgtccctacagcaataaaagcaacttctgcatctttaatccctgtactcaaatctgtagtaaaatataatcgcccttcagaagtattccgtttaactaaatcagatagcccaggttcaaaaatatgtatcttgccatgacaaagcccttcaattactgctgggttaatatctacgcaataaacatgattacccatttcagcaaaacaagcagcacttaccagtccaacatatcctgttcctattacacaaatatgcatgaaatactccttcagtaccctttatatccataggtattgcttgtaaacagatgcaaccatatcgtcaacttgatcttgtataatacaataagacaagctatataatctttatgttatattactatagaggtattatatggctatcattggcttaggaatggatttggtagaaattttacgtataaaaaaaaccttttctacatttggtgatgtatttctctataaaatttttactagtattgaatacaataactttttactaaaaccttctatagcatctctagctgcaagatttgctgctaaagaagctgcctcaaaagcgttaggaactggttttagtgacgggatcacattcaaaaatatagaaatttcttctttacccaatggtaagccacagctacattttcaaggcaatgcaaaaaaaaaagctatctcccttggtgttaacaatataatgattacattaacacatagtcataatacagctggtgcggtggttatattagaaacataaaaaatacaacttaaaaaggaaacaagatggaaattcgtggaacaactattcttgctgtaagacataaaggtcatgttgcattagctggagatggacaagtcacattaggtcaatcagttgttatgaaacatacagcaaaaaaagttcgtagaatgtataaaaatcaagtaatagctggatttgcaggtacaacagctgatgctttcactttatttgaacgttttgataactatttggaagaaacaaatggtaatcttgttagagcggctgtagagcttgctaaagaatggcgtaaagataaatacttacgtcgccttgaggcaatgttacttgttgtagataaagatcatacatttgtactaagtggaactggggatgttattgagccagacgatgggattgcagctattggaagtggcggattgtatgctgtggctgcagcaagggctttagtcgctcatagtgagttaagtgctgcagaaattgctcgtgaaagcatgcgtattactgcagaaatatgtgtttttaccaacttaaatcttaccctagaaactttatagtgattaaaacagtataacaaaataatgtaatatacctaaatcaacattattataataatataactaatatccttctatcactaaaaatttagtatataactatatacaaagatagttatatgtttgtattatttatttcattatataataaatcattgaaatgatacttatttcatagaattatcctcaatataatatcagctactattatttatattattatttaatagttcgaaatacatataactattaatatactacaaggatgatatgaaaaaacttcttatagtattattagctattatagtatgttcttatagctatactcatgcaaagatggaacctcttatagaaggtgtcatcaaacgtggtgtgcttcgtgtaggatttgctccttttttaccatggattatacaaaataaagatggtgaatacgtaggatttgatattgatatcgctaaaagacttgctcaagatttaggtgtaaccttacaactagttccaacaagatggacagaaattatcccatctctacttgcaaacaaatttgatataatcattagtggggctacgataactcttgaacgtaatcttcaagtcaatttttctaacccataccatcaaacagatattgaagtcctggctaatgcaaaaaaagttaaagggatgaagtttccacaagactttaataaacctgaagttatagttgctatacgtaatggtagtacagttattactcctgcaaagcaacttcttcctaaagcatcttttagactctttgatgatgaagttgcatctataaaagatgtagaatctggacaatcacatatattattagcttcagcaccattaccagcgattcaagctataaactcaaatggcaaccttattcgtttagatacactccccattactcatcaatctgtaggatttgcaataaagaagggagatccagatagccttaacatattaaataattggattaaattcatagaaaatgaaggttggcttagcgaaagaaaaaactattggtttaattctctaaagtggaaaaatgaagttatatgattactttcttattgttaattctcaaaaaatactatatattaaaactagattattataatattctttaacttgtaacctctattaaagtaaagctttttacaatactaaaaaatagtaacactaccctgacaatcttactaacccaataacaaattatcatgaaatggtttacacataaagctattgctattgcaggggctttagctcttgaagcttcgcctcctggactttttgctacacttgtaggaagtatcttacctgatcttgcagataggacctttgctatggggaacaaacagcaatggagacgtatacacagacagacctcacattggatgggatggtatctactcttaatgattttaggactaatgaattttccattaaaacattttgcattatcaccaatagcaaatcaacttttttcagaaataatgttatgggttgggtttggaggtattacgcatgttcttctagatagcctcacccctatgggtatccccatgtggccatttggtagtaaaaagcgtattgggcttagccttatatcaactggcagtgttggtgagcttgtatttcttattatttcaattagttgtattatatcacagtataattggtcaaaaatgttatccaaataaagtgtagtaatataagtagtaagttaattcaatcaatttttatcattgtcataatgattttattttattgtttagaaaagctatcgttatatattaattatgatttattctcacctttctagtaccagttgtacgattactactggatgtaaagtaaatcttaatctatatattacaggaattcttcctaatggttggcataaaatagactctatttttctaccactatctgaacctcatgatgaacttcatattgaaataactaatcataaccaagggcttcatctttcctgcaatattcttgatattgagttagagaataatattctgacaaaaacttataccctttttactaaggctacacattttaccccttctatttctatatatttaaaaaaagggatcccttatggagctggtcttggtggtggtagctcagatgctgctgcattactaacttggttacaaaaaaatagtccacttcccttatctccatcaaaactactaaaacttgctgctgagattggtgcagatgtcccattttttcttaaaaataaaccttgtcgagctactggcattggagagaagttagaagaaatctctctttctaaccttaatatttcaggcaatacgctttttattatttgtccaaacctaaaaatttcaaccccatatgcatataaaatgtgggatgattataataaaaaacagatagctacctcctcacgttataacaataacttgacaaaaaaatactcttgggatagaagctcaccatccacccatctgtcagactacttgtggatgaaaaatgattttgagccagttatcttttctgaatacacagaattaagtgtattcaaagaacaactccttcagtttggagcgcgagctgctgtactaagtggtagtggatcatcaatatatggcttatttaaagaatataaccagacgtcaattatgactgagttttataagaaaaaaaatattttaacattcagtcagttattgcagtagatattttaagaacaacttagttaaaaagttggggtgtcgccaagttggtaaggcaacgggttttggtcccgtcattcgagggttcgagtccttccgccccagccatttttattaatggctataaagccaaaggccttcagttttatgtatggtgagttaaaaattctttcaggaacagcaaaccttcctcttgcacatgctatttgtaacaacttaggatgtcccctcacaccatcgctctgtgaaacatttagtgatggagaaactcgaattgaaattaatagtagtgtccgtggtggtgatgtatttgtcattcaacctacatgtgatccagtcaactataatttaatgcaattatgtcttatgcttgatgcgcttaaaagagcaagcgcaacccgtatcacagcagtaataccctattatgggtatgccagacaagatagaaaagttaatccacgtgcaccaataagtgcaaagttagtagctgacttcctttctactgcaggtgcaaatcgtattgtgacagtagatcttcatgcaggtcaaattcaaggtttttttaactgccctgtagataacctctttgcatcaaaagcattattagagcctttctttagtatgaaagatgaaattgttgttgtatccccagatgctggaggtgtcgaaagagcacgtgcttttgctaaaaaaatcgaagctccccttgctatcattgataaacgacgagataatccaaatcaagctattgccaccagtgtaattggagatgtaaaaaatcgtattgcaatacttgtagatgatattattgatactgcaggaactataactgctgcggctgaactccttcttcgtgctggagcacgtgaggtaaacgcaacagccacacatggcgttctttcaggacctgcaattgaaaatctaaatcgctctgtatttaccaaagtactagttacagatactatcccaatacaagataaaaacaaagaatgctcaaaaatacatgtaatttcagtagcaggtttattagcaacagctatttataacattcataatagctcttctgttagcgttcttttctaacaatcaactataagataatcaaaggtatgatcaaggagttcctatggataacttaaaaacacttgtagttcaaaaacgtttagatcttgggaagggtccaaatcgccgtctacataaaaaaaacttaatcccagggatattctacacatctagtggtaaaaatattcctatacaactccccgagcttccctttaccaaaatttttagtgaagtaggacgtactacagtttttaatctaaaaattgaaagtgataaagaaaacatcacgcatcctgttattatctgggaactacagtattatccagtaaaaaatcgttttatgcatgtagacctttatggtgtagagcttaataaacctataaaaattgtagttcctcttgaattcactggtactgctaaaggaacaaaagttggaggaaaacttgaaacatatagagaacagcttacccttattgcaaacccacttgatataccctcaaaaattacattagatatttctgatttagatataggtaaaagtatatatgtagcagatttaaaactcccagaaggtgtcaaaacttcttatgacactaactatgctatagtatctgtaataatgccaggtgggaatactgcaacagaacaagaaggatagctatctttcacagtttatatactgatctgatttataaccattatcatattaacacttgtttaatacttactaaacatgagcattaaagggattattgcaggtcttggtaaccctggaggacaatatgaaaagacccgacataatattgggtttatggttattaataaacttattactataacatcagcaagtaaactttctggcaaaaaattttattgtgaattatggaaaacaacaactataatagataattatctattagctaaaccacaaacatatatgaatctatcaggagaagctatccatcccctagtagaatggtataatataaccaaagataaccttttagttatccatgacgaactagacttacctattgggaaaatgaaacttcaacaaggtggaggaactgcaggtcataatggactaaaatctattattcataacttaggaaccaaagatttttatcgcctccgaataggcattggtcgttctcctcttccctctgaaaatacagtaaactgggtccttggccacctttctatgaaagagcttactactcttaacaatctcttccctacaatttttgatgcactctccttctttatcaaagatgagaaagagacagctataagaatgattaacagttttactcttagtgaaacagttaacttaagctaatctattaaaaaatttactattacttcttttattctataaagctacacaaaaatattaactcataagcctagaaatctctattcgaaaaaatttgaaaattttatcttttatttattcagttgctataaaagattactaaattagtaattttttatttactaacattaataataagttgtaatagagtatttactcaatgttaatgttaagttaattttaactagttatatttaatctaatttttattagtttcttatgaagaattcttggccgcttataatatccattagctttattattcttataactggttgtgcaacaaaaaccatatgtatcatagatcaacaagaattttctgtaatgtatcgtcaccttgctccattattatggaataaaaatgttgttgataacaatggctattatcaggaacaaataaataaaaaactatcccctaagataggagaatatttatttcaacatcttccagtaaaccttacctcacctacaactaaaactaatgtattaacatttgcacaatcccaaaatccatatacaaaaattactataactcattatggattttcatttcaagacaacaaacggaaaatacaaattaaacttattgctcaaactgactggttcaacaaaggaaataatgattggataatattataccatgttcactcttctaatatttctacaaattattatcttattctacctcatcctaaggaaagtttacctattgagccacaattaattgctatatgcgatgagctaaataatacttgtacaataataaatgataattcaactaacattcaaaactttggcacctcctattttgaggtagaaccagagatttactctatcatttcaagtccaaaaaaacaaaatatacaagaaaataaagaaacaacggttactataaaccaattacaaaaataattcttggtataacttttgctagtttctctatagagaaataatatcctaataacctagtaaaaatactacaactaagctaattaaagatatattttaaggtataaggtttgcatattctcatcctgtactcaaaaaaaggagtaagcaccatgcaacaagctaaatttagtggcttatttgctgcattaagtgcagaacacaggatgaacttcattgccaataacttggctaatgtaaatactgcaggctataaacaagataaacttgcatttaaagatacaatgatccaatttgctcacgatcaaattagagaaccaatagccactgttcgctcaaaaccactattccctgagccaaataatgctgcaagagttcgtattgctgtttctaatacagactttgcccaaggaagcatgcagtttacaggcaatccattagactttgctattacaggagagaatggatttttccggattcaatcacctcaaggaaactatctcacccgtaatggttcatttgtccttgatgcaacaggacaactagttactaaacaaggatggcctgtattgggagatggtggaccaataactataccagaaggaacaaaaaaaatctctattactcctgacggtagaatttttgctgatgatgcagaagttggaacaattcaatttgtttctttagatgatgtaaaaaaacttgaaaaagttggcgcaaacttatatcgcccaaaagaagggttagaaattattgaaggaaatgctaatgaaacaggtgccattatcaatcaaggatttttagagagctcaaatgttaatgttgttgaagaaatggtcaaaatgattgaagttaatagacaatttgatgcctatcaaaaagttatgcaaacttctgactccctcgatcgtgaagcttattcaaaagtaggtcgtactagccgataaggggaaataatactatgatgcgctctctttggacagctgctacaggcatggtagcacaacaacttaatattgatgttatatcaaataaccttgccaatacaaatacttctggttttaaaaaaagtcgtgctgaatttgaagatcttatgtatcaaactatgaagattgcaggttcagctacagatggagataataggattcctgtaggaattcaggttggtatgggagttcgccctacagctgtccataaattttttacacagggggacttccaaaacacaggtaatcctctagatatggctattgaaggcgaagggtttttccaagtattggttggtgatcaattaatgtatacaagagcaggtgcttttaaacttaatcaggatgggactcttgtaacagccaatggataccccctacaaccagaatttacagttcctcctgatgctaaatctgttgctatttctgaaagaggtcgtattactgctttagacgcaaatggacaagaaatcgctgctggagaaatacctttatatagctttgttaatccagcgggactggatgcaaaaggacgtaatctctatattcccacagaagcatccggtgaagcggtagaaggtgtccctggtgaagaaaacttagggactatagctcaaggattccttgaaatgtctaatgtagaggttgttgatgaaatggtacaaatgattgtaggacaaagagcatatgaaatgaattcaaaagcaatccaaacttcagacaacatgcttcaaactgcagtccaacttaaacgtagttaatcctatgagataaaatacttttaagatgaaatacattcgtcttctattattcacacactgtattgcttttatttttcatataactatagcacataattgtgctgctaactctcttggatcagattggcgtattcatattaaagaagcttctgttgtccatggggatatggtcacccttgctgatatagctaaagtatatgggacccctcctccaggagtttgggaaaaaatttcttccatacccttatgggaatctccagaaaaacctggtgtaccaatgaaaattaacagggttaggctagaaaaagcattaaaagagacccttggagaagcctcttttttttctgttataccttctaatgtagctatacaaaaaggtggagagattctttatgagaaccaacttcaagaccttacccaaaaagctattaaaaacgtatacccaatgttagcttctcatggagaactctcagattaccgtatcccagcatatatttttattcctcaaaaaggtcaatatgtagaagtagtactacctactatttctcctaagagattgtctctacagtttgttttaaaagatattgatggaactgtattacgtcaatatactggcactgtgcttttaagcgtttggcagcctgtcccttcagttgggaaacctctaaatagaggtgattatgtaaatcctgaagatgttacatggattaataaaaacattgcctttttaagagatgatatatgggatggcaaaggaggtccttggcaaattaaaagatctattggtattggacagcccatctatcaatctgaccttgaacctttagctgttgtacgtaaaggagatattataaaacttaattacaataaaggatcaatacgtcttagcgttaatgttgaagcccttgaaaatggaacacatggctcttttatccaagtacgaaacttgcaaagtaaaaaaatagttcatgctactgttgtagattctaatacagtagaaatacgctaacgtattggaaacccattatgaaaaaattactctttacttcaggctgtattcttattttaacaggttgttctgctccaaacaaaactcctgttgttgctcctcctataacacctcctccagcatatgtagaacctgaagactcctatagtaatcctggctctctttactcatctgctgaatctgatggtctttttgctgatactcgtgctcgacgtgtaggtgatattgttatggtaaaaattgtagaaaataatactgctaaaaataaagcagatacaacagctgataaaaaaactgcaaatacatacggaattgatgcgttttttggtagacaatatattggtggaggatcaacaaaaattcctgtaggtagtgttgcttttgatacaacctctgaaagtggaaccactagtacaggagaaacaaaacgtgaaggagctataaatggaacaattgctgctcgtgtattacgagttatgccaggtggattattagaaatagaaggcgtccgtgaaacacgtgtaaataatgaaacacagtatattgttatcacaggacttatacgaccaatggatatagagccagacaactccattatgtcaaatagaatctctgatgcaaaaattgcttattatggtcaaggtgttctttccgagaaacaaaaacctggttggtttacacgctttatggataccctctggcctttctagtagtctaatatactaagtataactcaatatctataaggtaaacgtatgttatcttctattatcagacctactaaaaattgcctactacactttattatacgttcttcctatcttacattattatttattgctgtatttcataatccagcacaatctgttcggattaaagatattgcaacattctctggtgtccgtaacaaccaacttattggatatggtcttgttattggactcgctgggactggagataaaagagactcaccttttacagcaagctcaatgacaaatatgcttgaacgtatgggagttgctgtcgatgctaacaaaattaagcctaaaaatgtagcagctgttatggttactgcaaatatgcctgtatccgcaagacctgggacagagcttgatgttacagtttccagtgtgggtgatgcaaaaagccttcaaggaggtgtattattacaaactccactaaaaggtgttgatggaaaagtctatgctcttgcacaaggttcacttatcattggaggatactctgctgaaggaactgcagctagcgttcaaaaaaactcaacaactgtaggctctatccctggaggaggtattgttgaaaaaggtattccttttgactttaatactcaacaaaatctaacacttaatatgaatagcaacgacttttctactacaatgcaagtagtaaaccgtttaaatgctactatgggagggaattttgcctcagcaatagatgcaggaactgttcgtattgatattccgccagcttataaaggaaatcttgttccattaattgcttctatagaaaatttagaaattaatcctgaatctgtggcaaaagttgtagttgatgaaaaaacagggactattgttcttggacgtgaagtgcgattatcacgtgtagctgtagcacatggtaatctccaagttgttatccaagaaagcgcccaagtttctcaacctggacccttcagccaaggacaaacagttataacacctgaaactaatcttaccttacaagaagaaactaaaaggctcaatttgttagaaggagcctctctacaagaacttgttgatggacttaatgctattggtgctacaccacgtgatatgatttctatcttacgtgcattgaaagccgcaggttctctccatgcacaactggaggttctataaccatatgattaatcctattgatccttctttagctcaaaattcagctgaagaacaaaacttaaaagaaataaaacgtaaagcagataaagaaatacaaaatcttgatccaaatgctgctgcagctaaagaaaaaaaacttcgtgaagctgcagaaggatttgaagctatctttattcaacaaatgtggcaaagtatgcgtgcaagccttcctaaagaaggtataatgcatagtcgtgaagaacaattttggcaagggatgtacgatcaagagttaggcaaaagtatggcttcagctggagggattggacttgctgatatgatgatggctcaactatctaaaaaattagaaaatgctagtgaagttacagcagaaagtatgcatcgaacaccactagatataaaaccagttccacttattgaagaaaaagcacctcaagaactaaaacctactaataaaaaactagaacatatctataatggcgaattaagccaacataactcttctataaaaaataatacaaaaccttctacaactactaacacacttacacctgttgaagaagctctaaatgaattttctaagcaaataaaaacaccttcttcaacacctacagaaaatataacatcttcagactcaaatacaaaacctcctattatatctaatacagttactatcccaaaaaattaattaaccttagacaaataagacctcttatataaaaactactttcctctttttataaagagtagtcctttatctggcataaaagctgatttgtaactccttagacaggagaaatataccaatatttataactactattaaatattatttggtataaaagctgcattatttataactaggcaaaaaagatctttttttgtcggcacaaaatgccttgtattacattgttgaacaaaaacagctttctaatttataggagattacttatgtatatgatcatacatggcagtcttgatcgacaaaaaaaaggacttgctctattacaagagttattaaatgaagaattttctttattaatggatagaaagacagaagaaattatggcattagaattttctatccactctttattacgtcagcttgctggagaaaagatttttatacagaaacggcttaatggaggcaaacttcttgactatgcagaactattatcagaccctgaacaaactaaagccattaagcagttatggcaaaatattgacacacttgaacaagattgttcccgtcaggcctcactaaatgcagaactttcacttgcattgcttgatcaaagtaaaaatttactttctttcttgcataaaaatgttcaacctcaagaaactctatctacatatggacgatcaggaacctataatcaccattcacgtcctgagggcacccttctttctgggagattgtaatgtcgatcaatacacttttcggtattgggaaaagtgcaatagctggaaaccagacagctctaaacgttactggtaataatatagcaaatgttaatacacaaggatattcccgccaaagtgtacgcttcgaagataggtatggacttaatcaaactccaggaatgcttgggcagggtgtccatacagctgaaatataccgcaattttaatagatttgtagaagatgcttaccttaatcgtttttcccaaaatactcgatgggacgaacaaagtgctattatgaactctatagaaagcatttttaacgaatcaaaccgtacaggaattagttcactactaggagaattttttaaaggatggcaaaatctttccttacgtccagaagatgcagctactcgtgaagcagtgctctctacagctaaaaatctcacacaacttattaacgatgcaaaatcaagtctacaaaaaacccaacaagaaatggatctctacatccaacaaagtgttaataaagttaatgagttagtagatgctattaaaaacattaataaacaaatctcagcaacttatattcctggtcaacaaaaccctaatcaattacttgatcaacgagatcaacttgttcgagaattagcaaacctggtagatatagaagtaaaggataaaggtggaggaaattttgatatacaattaaaatctggacaacctctcctggaaggacaaataggttatacacttagcgttgggggacaacgagttgaaaactatttaaaacaagattcaaaatatacaggcactataacctctagtggttcagactcccatgaatattcatttgaaattattaatcctccttctggtggagcacctgggagtatgcgtgtatcacttgatggaggaaaaacttggcttcgtaacgaagatggatctgaacttaacgtacctattcctactacgcctggtgaaactatcaaagtaaaaaatcttgaaatatcttttgatcaagatccttcgcaattagtttcaggagacaggtttgatgttattccaaaaacaggtttatactggaattcacccacaagacctccgatcaatattactccccaaacactaaatgatggtacagaaaatacagggcgtctcactggaggaaaacttactgcatattttagtactcgtgattataatgcaggaagatatattgataaacttgatgcattagcaaactctattgtatgggaagtaaaccgaatccacagtcaaggtgctggagaacaaaaaatgacttactctttagggagtagtcaagtaaatcgtacagatgtaccactgggaacatctcaatctggtcttgcctatggaaaccgtcttacaactgggaacttatcattccaaatctatgatgaaaatggaaaacctttacctgtaggcacacctccaaatggaatcccagaatctttagatcttgatccaggtacgcctggagttcaaaactttgatccttcaattcatagtcttgaagatctagttaatgccattaaccaccctaataactatggtgaatttatgaaagcttctattgttaatggaagtctccaacttaccagtcgtcctggaacatcatttgcagcaaaaacagatacaacaggtttacttgcagcccttggaatcaatacttttttccaaggttcagatgctacagatatggctataaaacctgatgttattcaaaatacaaattttattaatgctggaaaggttaatgctaatggtgaagtttctacaggtgataatagtatagctaaagaacttgctgaccttgctacaaaagaagtaacaatttctactggatgggaaactacacaccaaacattaggtgcttattatggtgcactagttggtcttgtaggatctgatactcgtacagcaaaatttaatgctgattataataaaacactttcaaacgaactagaacaacaagctttatctattacaggcgttaacctagatgaagaaatgactcagcttattaaatttcaacattcatatactgcagcagcaaaactcattacaacagcagatcaaatgctgcaaactttactttctttaaaacagtagggagtaaacatgagggttacccaccaatcaatgtattctggcatgatcagtcagatgaacaaaagtttatctgactatatggagactaatatacaaggcggtacaatgaaaagaataaaccgtccttctgatgatcctgcaggtacagctagaatcctctcttatcgtggaagtattggtggaatagaacaatttaaaacaaatactgatacagctatgggatggttatctcttgcagatgaaacacttaatcaagtttcaacagttgttactaaaattaaagaacttgccgaacaagctgctacagatacatatacccctgaccaacgtgaagctattggtttccaactccgccaacttatgggaactcttataaacctttcaaataatcaatttgaaggcaaacatattttttctgggcaagattataataaatcatcctttctagaaggactcacagtcacaagcggagatcccaatgttaaccctaatccaccaatgcaggttactggaacacttgaaaaaactggacttattcgctttgaaaaagatgaaacaatccctccagcagcagatctaaattatcagtggtcaactgatggtggtaaaacttggcaaactgcaaccatccctgctgggggacgagaaataactataggtggtgcagtcgtaactgttcctgctccagctacaacaaatgtaacagcatttgacccagataaacctcttggagatactaatggttccttactatatgtacgtcctacagctatataccaagggagtgataataactcaaaacctattgtagacagatatggcactgtaccaatgcctccacttaataccaatacagtagggactttttctgataatgtcgttgtaaaattccctaatggtgttgatttatcaactcctggatcatttgatttctcttatagtacagatggaggcaaaacatggacagcaggaaactctgaagtcattgtttctcctggaccaccatcaactagtactgcaagactcattctgcctggtggctatatggatataggttctgctgatactacaagtccaaataatactattcctcctgatggacaacttatccttcgcccccaacgaacagatcttagttttgaaatcatggaaggacaaaatattactgtcacaaatgtaggaaaagatatttttggtggaatatattctacaaatggctcatctaatttggaacctatgtttggacaaaatgatggacgtaatttatttgaaacagttggaaatcttattgcgtacactgaaacaaataatcaagaaggcattgcaaacgcccttaaagatcttgaattagcacaaaaaaatatcctaactcaagctgcacgtattggaggtaaagaaaaccgtcttgaaatcacaaaagaagctcttgatacaaataaatatgatcaaacacaacgcttaagtggtgttgaagatgcagaccttacagaactagtaagccgcttagcacaacaacaaatggcttattctactatattaaaatcttcttctatgattatgcagttaaatttaacaaaatacatttaatctattactaaatagcaatagtatgaaaaaattctataattaattatcagatggtttaatgatagtacctctatgccttttaataattagtaaatggagttgtccatgctcattttaacacggcgtgcaggggaaagcctatacttagatgataacatacgtataactattcttggagtacaaggtaaacaggtaaaaattggtcttgatgtccctcctgaaatgaatatttatagggaagaagtttatcaacgtgtcaaagaagaaaatacattagcaactacaatcaataataatgatttaattgcagctgctcaattaacaaacaaagaagaaataataatagacactagattaggacaacaaactattgaacctgaaaaaattattaatttccctcaaggattaataggttttgaaaataaacaaaaatttatactattacaaattcaaccagcatcaccatttattatcttacaaagtattgataaccctaagcttggtttacttgtagcagatccatatagttttataaaacactacactgttcaacttaatgatacagaaaaaactattctacaatcagaagtacacaacttagctatattagttacaatgactattcctaaagggaaaccagatcttgcaagactcaatcttacagggccaatcctcataaactatgataccaaaataggccttcaagtcccacaaactaatttagaaacaacaagtcatgtttatctatatcaccctggggaagaaccaatcctcaacaaatagcattatctctttactcttactcattttacattatttactctaaattctctttccttcttttttctaattatcaatctatatcatgaacatatctctatctcactatataaactaatcatatactaactaaatacaattctataatagaagttgcaataattatatctaagtttataatacaacaaaaatgttttcactattaattagataagttaagaaattatactatgtttctaccattaccaactccacatgaaatgtctttatgggataaagaatcaatcaatataggtgttccagaaactgttttaatggaaaattcaagtagagaagcattacatgttctaaaaaaaacctttggtagtatagaaaataagtatattcttatactaatgggatctggaaagaatggtggtgatgcagtatgtcttgcacgccatttacatgatgcaaaagcaaatgtacttgtactacatactcgctcattcattcactacaaaggaactacaagacaataccttaaactagcaaaacactgtggaatactgttttctttagcagaaagctggattacaaaatataataaaaccccttggggggaacctgatattatcatagacggactaataggaacaggactctcaagcaacttacaacaattagaactagaattagttaatacagttaataaactttcaaaaaaaagctttatattagcactagatatcccttctgggctatcaggacttacaggtaagccacaacctactgctatcacagcagatataactgttacctttgaagctgcaaaaccaggtcttatcttaccagaagcgtcaaactatgtaggcgtgttacatatttgttctattggaatcccattatgtgtacgtaaaaaaaatccaccttcttatcaaatgattaatcaaaaatctaagcttcccctacctaaacctcaacctatgtggtataaaggaaatgctggtcacttacttattattggtggatcttctaactcagaggggatactcactggtgcaccatgtcttacagcattagctgcactaagaacaggtgctggccttgttacaatagctgctccttacaagctatgcaatgaaattaaagcaaattatccagatataatgatgcttccacttgggacaccagaaacctatgagtgggggcctgatcttatagaacaaatactatctaagctacataaatataattgtattgttattggaccaggaataggaagaactataggtacaacccaattcatagcaaaattgcttagtactcctagtcgtatacctaaagtgatagatgcagatgccattattgcattagctgatgagactactatattaaaaaatcttaaccatacagatattcttactccacaccctggagaagctgctactttattaaaaacaaatacaacattaatccaaaaaaataggtttgatgctatccaccaacttacttccctttcttcatctacatggatacttaaaggtgcaggaactatgatagcctctcctcaaagtcctacaactattttccctcaggctattccaaatcttgctattggaggctctggggatgttctttcaggctgtatagggactctccttattcattatcatgaacaacctcatattgctgcttgtttagccacacaacttcatcttgaagcaggagcaattctttcaaaacagtttctttatagagggaatactgcattagatattgctaatgctatacctaatgcatatataaaccttatgaaaacatattcataaactttatgataatatataaatactattttgtactaaactaatttaaaaattctctatcaagaactctacagttaattgcttcagctaaatgctttactaaaacttgttttacacctgcaaggtctgcaatagttctactaatacgcaaaattcgtgtataagctcgtgcagatagagctaatttttgcatagcctctttcaaaaaattttgtccatccggtccaatttgacaaaattcttcaagaagacgtccagataaatcagcattggttcgacaattagaaaaacttttatacctaactgactgtatctctcgagcacgtaaaatattctctaacaactgagaagaacatctatgagatgttaaacttcttaattcttcataagaaactgtaggaacagtgatatgtaaatcaattctatcaagcaaaggacctgatagccttgcacgataacgttgaatctgtgaagctgtacatatacaactatgatttggatctgtagagtaaccacaagggcaagggttcatagcagcaacaagcatacaatcagcagggaaaacaacagaaaacatagagcgagaaatagtaactttaccttcttcaagtggttgtcgtaatacttcaagcgtacttttagcatattcagggaactcatctaaaaataatacgcctctatgagctaaagaaacttctcctggacgaggagatacacctccaccaataagtgcaatttctgaaattgtatgatgtggtgctctaaatggccttttttgtatcagcccttgctgattaagcaatcctgctacactatatatcttcgtaacctccaaagattcttcaaaatctaacttaggtaatatagtaggaatacgtttagcaagcatagtcttaccacttccaggaggtcctacaaatagaaggttatgtgcgcctgcagcagcaatttctatagcccttttagcatgctcttgtcctttaacatcagcaaagtctaagattgactcaacttcaggtaaatctggttcaactggcttcactataggtaatgatattttccctaacaaaaaatctattacttcactcaacgttcttgcaccaaatgtagataactcagcaacaacactagcttcagctgcgttttctgatgctacaataataccttttgctttttctttcctagctaaaagtgctaaaggaagaattcctggaattggctttaacgtccctgtaagtgaaagctctccacccatgaaccatccacttataacttcaacaggcaagttattagaagccacaagtaaacctatggctaaaggtaaatcatacccactgccacctttacgacggtttgctggagccaaattaactgttatcctggcaggaggtagtgtaaagccacaagaacgcaatgcagcaaaaacacgctctttagcttcacggacagcaccctcagcaaggccaaccattacaaatgacggtaatccttgacgtaaaaaatctacttcaagatccacacgaaaagcatcaacaccttctaaagctccacaagcaagccttactgtcatgcagtatcctcaacaaacttagtagattcttcaactgcactttggagtgtagggaaaatgttttctttacctactgcatggataataccagcacggtcaagagtagatcttgttgcaggatgaatatctgcaagaaatattttacaaccagaccttcttttttcaataaaggactctaatgtatggatagctgtcatatctattgtaggcatattatgcaaatataaaataaataccttaggagtagtttccattgcttctaaaagtttttgtaaacgatctgcaacaccaaaaaagagaggaccatttattgaaaaaatatgcactccttttggcaacttatccttttcaaccggtatatcttggactatctcatgagattgatattcttttgtaactgtttgtaactgtgtaatttcacccatcctccccataaaaaataatgatgccaaaataacacctacatagacagcagtcgtaagatctaaaactacagtcaaaataaatgtaagcaacataagcgcccaatctgctgttggtccatagaacatacgtctgactgtcattaagtcactcatatcataagcaacgacaacaaggacaccagcaaatgcagataatgggatcaactctattgcaggcatcaaataaagaataaaaccaaataaaaatatagcatgaaaaatagaagaaataggtgaatatgctcctgaacgtatattagtcatagttctaccgatagaacctgtcgcaggcatcccattaaataaaacagaaccaatattacctaccccttgagctattaattccatattagaattatgacgtttccctgtcatactatcagcaactacacatgaaagaagggactctattgcaattaataatgccatagtgaaagcatctggtaataagatacgtaacctctcaatactaaaatctaatggtactaaaaaagatgggatatcagatgggagtgttccaaaacgactacctattgtttctacaggtaaatcaaatagccaaacaataaccgttgtaaaaataacacccatcactggtgctggaaaacgaggaatataaaaacgaacgctaataataactaataatgtaaaaaaagaagtaaagagtgttgaaggactaaatgaaagtgcattacgtaagtataaatgccacttatcaaaaaattctggtggagtttcagccataggtaggccaaaaaagtcttttacttgtgaagaaaaaattaataaagcaatccctaaggtaaaacctattgttacaggatatggaatatattttataagaaatccaagccgagtaatgccacaaaaaataaggattgtacctgaaataattgttgtaataattaacccatcatatccatatcgtgaaataatagtaaagataataataactaaagcccctgttggaccacaaatttgaaaattactcccacttaaaaaggccatgattaaacttgcaactatacttgaataaagacctttttctggtgttaacccagacgctattgaaaaagctaaactaagaggaagtgcgataacagcaatattacatcctgcagaaaaatctttaaaaagcattttatagctataaccctgagctagggttttaaatagactagggacaaatggaatcttatctaatgctttttgtttatagatatccataaaaaatcctcataaaaaatccttagttagtattggagctcaagtataaaataaaatcctgtacaaatttgtacaggatataaaaaacgttatatcaaaaacttctttaatattgtttaccagcatattgaagtcttccaggtaaaacaagtcgacgctcaagatactttaatagcgctgaaatacttaatgtcattattaaatagaatattgcgacagtgagccatacttcaaaagcacggaaatttacagaaataatttcttgtccctgccttgttaattctccaacacctataactaccaataatgaggtatccttcaaagaaataatacactgatttgtcaatggagggatcatgcgtctaaaggcttgtggccaaataatatacaacattgcttgggcatgggtcaatccagtagaacgtgcagcttccatttgcccatgagatatagaaataatcgaacctctaacaatttcagcgatatatgcgccagagtttactccaattgctattactcctgcccaattaggaggaatatgtatatcaagagccaaaggaagggcaaaatataaaaacattacaagtactattaaaggagttcctctaataatttctacgtatattactgccaaagtacgtaaaaaaggaaaacgtggggtatttataagtcctacaagtatccctaaggccaaacctaaaaaaagaccaccaattgtaattataagtgttaattcaacaccttctagtaatagtggtgctgtctctaacataacttgtggttgaaaatcaaaactcatttaatcaccaggcatttgaaagtaatattaatactctccccattatatatcacttgtatcatttcaataaatataacaaaacatatattatataactacttatacttattagctttaatgtattattcagggggaagtccaaaccattttttataaagttctgtatagatcccatttctcttaagttcattaagcgcagtatttactttttgaactaactcctctgaattttttcgaaaagcaattccatatggttgtcctttatatttaggaccaactagtttaacttttccttttcctgctgaagaggcaaaatactgtaatactggagcatcaaaaacaacagcatcaacgccaccagtcataagatcaaaaaacattccatcattagtagggaaaagctttaatgacctttgcttaccaaagctcttcataaaatctacagaagaagttcctgtttttacaccaacagttttcccaacaagatcttccaactttgaaattgactcttctcctgcacgaacaagaatcattaatcctgattcatagtaaggctgagaaaataatataactttagctcgttcaggagtaattgtcattcctgagattgcaatgtcaatactaccagtttgtaatccaggaataatgccattaaaatccataggttgaaaagtatagggtatattagcaatctctgcgatatgctcccatagttcaatatcgaatcctacaaaattaccctctttatctttaaactcaaaaggcattaaatttgtatcatgggcaacgactaacccttttgcattagcaaaaaaaccaaaagtattagtaaaaaatagtcctaaaataaaaacaaatattttatatttcatattgcctctataaacattctttcaaatgctttaataatattaaagtaggatctatttagttaaataatcattagatagctaaggtatggtttatagttagcttataattataatagaataattataataaagttgattattaattctaactttattttgataaaatatcaagttagttgttatttaagaaatagttgttagacgtagttctaaaaaataatgttgtatgcatagcaaaataactattactatttaacataaataatataataattatctctgataggagataataaataaaaattaaactaacaaactaaatttactacatatttagtcttgaattttctattttagaactatttaaaaattttaaatataacattacttattattttcatcgatatttaattattaccataaattaaaaatgatatagaataattactatataatcccctatataaatagctaattatatattctcaaaattaaaagagctccattaatggagctcttttaataacgtatattaattcgttaattttctgttggctcctcaagtttcatctttagcagatctccaaggctttgaccagagtcagggcctgttctactatactcccgagatttacgatgctcttcatcttcttttagttgttttattgaaagccctaaacgacgctcttcagcactaacatgaataatttttgcctgaatttcttcaccatctttataaatttcagagggtgattttatttttttagagcttaattcagaaacatgtacaagaccttcaatcccctcctcgacctcaacaaataaaccaaaatcggtaatatttgtaatgatgcctttcacaatacctccaacaggatacacagaaggggcatttgaccatggatcttcagtaagctgcttgatgccaagggtaaacttttcattttcctgatcaacagtgagcacttttgcctgaacagtatctcctactttaaataactcatttggatgacgaacttttttcgtccaactgatatcagaaacatgaattaatccatcaattccatcctcaataccaataaacatcccaaattctgtaatatttttaactacaccctcaagtattgtcccttctggatatttctcacctactaattcccatggattaggcttgacttgcttcatccctagagagatacgctttttatcctgatcaataccaagaataacaacttctacttcatctccttgatgaaccatttgagatggatgacgaagctttcttgtccaagacatttcggaaatatggacaagtccttcaactcctgactcaagttccacaaaaacaccataatcaacaagatttgtaacttttccaacatgatgagaagtttcaggaaagcgttctgtgatgtcttgccatggatctggaacaagttgcttcaaacctaaagaaactttttgattctctttatcaaaagaaagaacttttaactctaactcctgacctaaattaaccatttctcgaggatgacggatacgcttccaagacatatctgtgatatgaaggagaccatcaagcccaccaagatcaacaaatacaccatactcagtaacatttttgactttaccaacaacaacctggccttcggaaattgtttggagtaaatcctgccgctttgaatcacgctcttcctctaaaagaactcgacgagaaacaattacattactccgtctacgattaatttttagtacacgaaattcatactcttgatttactaacatatccatatctggtacaggacgaagatcaacatgagaaccaggtaagaatgcttccactcccctaaggtcaattgtataaccaccctttatacgacgtacaatacgtcctttaataataccatttttctcttgtagatcttcaagttgatcaaaaagctgcattcttttagctttttcaaaagacaaaataatagttccttcttgctcattctttcgaacaacaaaaacatctattttatctccaactttagctgtaatattcccatcagtattttgaaattcaatagtaggaatttgtccttcagacttaaagtttacatcaacaagtacattatcatcatctatacgaacgatctcacctttgacaatggttccttcctcaagatcaccaaaatctgtactgagatagtcttcaagtgcgctttcaaaattaaagtctaggtctgtaccgttattttccatagtttcctcagtttccatataacctccacaaggcccacatacttttttcaacctaaggtaagtcgttttcaataacaactgtcatggattatggcaagggtcgaaaatctctttataatttttatttgtataaaaaaaggttcattaagaacctttttttatacataactaaatataaaatcgtaataatatctgatagtaattattactatactataactaaatttatagattataagtagcaaaaaattgtttaaataaatttacaacataatctataataataactacattcattataaactaggttaaattttataacataattactattacccctcattgataaacccacaatctttgggcaaatttgaacgagaagcttccattcgtgcaagattatcacatcgttcattttcaaaatgaccactatgccctctaacccatgtaaatataacattatggcgctcaagttgacgttgcagtcttttccataggtcttgatttttcactggttttttacttgcagttttccaattatttttctcccaaaacactaaccactgtttctccacagcattacgtaaatattgagaatcagtatataacataactaaacaagattcttttagcttttcaagagcataaatagctgctatcatttccattctgttatttgttgtgtaactaaaaccacccgaaatctcctgttcatagtctccataacgtaaaatagctgcccatccacctgcccctggattaccaagacaagaaccatctgtgaatacttctaccgatttcaagtagttactcctcacctcaaataactatacatactatattgaatagcatagattaactaattgttcatatcatttcagtaaaaaataacataaacttttagggctacttatactagttaccatcttatataacacctttaaatttttacttttaattatacttatatcttaccagcctaagtaaccctcactatacataaacaaaaggacttagtaatatcccaataataaaaaataaaccaaaaagaaaatgaaaacctgctgtccactttacaagattttttatttcaactgttatatcagggtatttaatacgttggaactttctaattaaaagaggaaaaagaactaatggtaataaagcaactgttggtaatattcttagcgcaactaaacatactaacacaacaaaagccattatgcagattaccttataaagtaacaaactgcgcttaaaccctaaccataacgctattgttttaatacctgaagcattatcatattcaatatcacgaagatcatttgcatgcataatagctgtaactaaaaaagctatcggtattgatacaaagaatatattcatatttaatgagtaagtttgtatataatatgcaggaagtaccataaatggccccattaaaaaaaatacaaaaataggtccaagccctttatacttatatggggaccatcctgttgtatatgatgcagctcccaagaaccctataaaaccaaaaacaaagacaggccaaccacataaaaaaattaaaaataagccaatgataatagcagtagtaagcataccaatcccaacatatttcattttatatgctggaagaataccagtgacaatttgaggacatgtaatagctgaatctatagtatctacccctgacatatagtcaccatatgtgttaagaaaattagcaccagcctgtaaaaaaataccacctaataaagctaaaatgaataaaaatagatcgaaatggtatccatcactaattgctagcgatgttcctaaagcaataggagtaaatgcagctgtaaatgtccaaggtctacttgcaataatccattgatataacataacaactcccttaacaacactacatatcttattaatactattattatttattattgagggaatcttcttaagaaactgtttatagcttcacaaaggtatttagattaacttttaacctaaaatagggaaaagaacaaaaaccatgagggtccataaagaatgagaaacaatgcaaggaataaggttgcttgtcctccaaaaaatgagcccccaaaataatcctgcaatagcagcagaaaaaattagcatactattcattgaccatatatgaactcctgcataactgactccagctaatagccaaccacctaagtccccaaaacgtgtcatagcccaacgttgaaaaaatccacgccaaaaaatttcttctgcaggactagtaataaatagcaaaataaaccctataagtactgagttactctgttcacgaatactataaatatctgctacttgtgcttgagcaaaaggaagtaactttgtagcaatcatatctccaagataaaaaatactatacaaaataaatgcagagcctatacctaacaagcatactttccatgaaaatttactataatgaaacggagaacccaataaaaaagaaaaaaaagctaacaccatagaagaacagctcatacctaaccaaaaatttatgtatgttgttccaaagactattgcccaaaaaataacagctaataaaactaaaaataaaacttgaagtccagaaggtgtatgatttttcataatataacttgtataataccccataacaaaactcccacaacataaaagaccccaaaaagaaagtgaaattgagctgtccatccttcaagtactattaattcattatctatttcagaagctcttagccttttaagtttactatttaaatacggagtaagagctaatggaagtatccctgtaataggaacaagaccaaaagcaacaacaaaaatcagtgatacaaatgcacctaaacataatattctatatagtaccaaactacttttaagctctagccaaatagcaactgtactaatattggcaagtttatcatgttgaatatctcgtaaatcatttgcatgcataatagctgtaactaaaaacgaaataggtaatgaagcaaaaaatgagctccaagtaaggacgtctgcttgaacataataggctggtaaaaccatacatggtcccataagaaaaaatacaaatataggtccaagccctttatatttatatggagagctacctgttgtataagtagctgaaccaataagaccgattactccaaaaagtaatataggccaacctgataataaataaaggattaaacctaagataacagaaagaactaataaagctatccccacctgcttcactttctcaggtaaaaggattcctctaacaagctgcggacaggttactgccgagtccaacgtatctactcctgaaataaagtcaccatatgtattaagaagatttgttcctgcttgtaaaagaagcccagataataatataagcaaaaagcaaaaaaaatgaaaaggaacaccaggtgtttttaccgttccagaccaagctaaagctgtacctaaagaaatagggattaaagcagcagtaaaagaccaaggacgtgtagcaataatccatgtatataacataactattctccaactacctaaaaaaaaaaaaaaaaaaaaaaaaaaaaaaaaaaaaagtaagagataccttaatctcttataaataaaactagtttaaattacactatttctcttaaaacactaaccgactgttgaaataaatcttctggggttgtatccgcattaagaatagtaatcctatcaggatttcttcctgcccaatgtaggaaaccatcacgtatacggttatgaaaatccataggttctgattcaaatctaccttctacaatgtttaaccctagtgcttcatttcgaatacatgctctttcaagtgctttctctacgtctatatctaataaaagtgttttttggggccatataccttttatagctacctcattaaattcccacaacttaccaatattcatacctcgaccataaccttggtatacaatagttgaatcagcataacgatcacaaaaaactgttttcccattcattatcgccggctgtatgcactcagatacatgttgagcacgatccgcaagaaataaaaaaagttcactttctgctgtaagccctaactctgaagaaagaacaagagatcttaataaacctcccaactcacaaccaccaggctcacgagtaacaataacatcttcccctctactactaaagtattctgaaagacgatttattaatgtggttttccctgatccttcaataccctctatagtaatgaacactggctaaccttctgtttgatactctgatcttctaacttattactttctagtggggtcttagttgcttgatataattggcgttcaagtgttttttgatatgaagaccaacctgtctctcctgatgaaatatcctgtagtgctgcaatactttgagctattttagcatctagattatctatatagtgaagagcaaatgcttcagctgtttgaggcaaccttggtgaagcaaactcataaagaccatgatgactaagaacaagatgtttaaaatgcatagcaagaccttcttctaagcctgactgtataagataactttgaaacttttcaagacttatattaatatgacctattaaccgaccttcatctgtatagttattatctaatcctcctgaaagttcccatagttttcctatatcatgaaaaatggctccagctagtagcgtttgacgatctaaacaattataatgatcacatattaataaagatacttttactacagaaagaatatgttctaataaccctccaacccatgcatgatgtacaccctttgctgcaggagcaactaatagttttggtttcacctcaggatcatttaatatactaaaaacaaacctatgccatggtttatgtgtaaactctttattacatattgcttctaactcactaaacatatcttgtgagtttcttacacttgcaggtagaaacatgcctatatctatagttagtaactcatcttcatctataatatgtaattctataatattaatttgtagttgctctctataactttcagctcttccttttacataagctataattccagttggaatttttggatattcaaggctcattggactccaaatacgggcctctatagtacctgttacatctttaagttctaatcgccaaaaaggtccatttttagcttgttgttgtgaacttgctgcaattaaaaacaaagatgccacctcttcacttaacgtaacatctttaatccattgatttttattaaaacttttgttggaagattgcattccgtccatgattatcctatattatatcttttttaacaacttataatagtaatttctaatctgttctttaaaaatcttctgttttagatatgatgtcaagtttacattttaatagctactaggaggttgctcatgaacattcttttaacaaatgatgatggtattcatgcttctggactacgagcaatctataatgagttggtgaagttagggcataatgtattcccttttgcaccaaccgttgaaagatcaggagcaagtaactccgtttcacttaatgttccattaactactcaagatgtatatgatggagatttcaaaggtacagctataaatggaactcctgtagactgtgtaaaggttgggcttgcaaagcttcatgaaaatccaccggatcttattatttctgggattaatgctggacataatgtaggaacagatattttatattctggaacagttgctgctgctatggaaggatgtgttgcagggataccatctattgctttttctagaccacgtgaagaagtggatcccacacaaagctatgcagaacatgctgctaacttactaaaaaaaattgacttttcattagttccaaaaggccaaatacttaatattaactatccatctatatctattaaaaaaactttaggaattaaagtatgtgctatgtccacacagggatgggaacataagcttcataaaaaaaaggatgataatggaaaaccatattggtttatttctccttatattccatatagtcatggtatctcacaaactgatgttttttttctccttgaaggatggattacaataactccattaatgtttaatatgactgctcaaactacactatctaatcttgaacaacactcttttacataacctactaaaataagttataataactttatattttcataaatactatttaatttagagatgttatttatgctatttatttcagcgtgatgccttccttttataaaaaaaaatttctataatacactattactatgttagaaaggtatctggttgttcttataaatacacactcatatcacaaagaggttaactatgccacttaccggacctaaagtcatgtttgaaaaggcctacaaagaaggatacgccattggagcttttaatgtaaataatatggaaattatacaaggtatccttatggctgcaacagaagaaagggcaccagtcatcttacaagtttctgcaggagcacgaaattatgctggtaaaaactatattgtaaaacttattgaagcaggagtattagatacagatatccctattgttttacaccttgatcatggtgcagactttgcaatttgtaaaacatgtattgatgatggttttacatctgtaatgattgatggttcccatcttccttttgaagaaaatattgcactcaccaaacaagtagtagactatgcacatgcacatggagtctgggtagaagctgaacttggacgtcttgctggtgttgaagatgatgtatcttcagagcacagcgtatacacagatccagatcaggctgtagaatttgtccaacgctctggatgtgactcattagctattgccattggtacaagtcatggtgcatacaaatttaaaggtaaacctgaactagattttgctcgtcttgaaactattggtaatctactcccagacttcccattagttctacatggtgcatccagtgtttcacaacaatatgttgatatgtgtaacaaatatggaggaaaaattgctggctctgctggagtcccagaagaatttcttcgaaaagctgcctctttagctgtttgtaaaattaatattgacactgatattcgtttagctatgactgcatctatccgtaaattttttgtagaacatccagaagaatttgatcccagaagttaccttaaacttgcaagacaagctgtaaaagatatggtacaacacaaaattaaatatgttttaggatgtgctaatactatttagctagacaaatcactaaattaaccataatgaatggatgaaatatcctatctttttatacgtcttattaactttaacataaatataacattgcataaggacctcttcaattatgtcagttcgtattggacttaacggatttggacgtattgggcgttatcttataagacttatggcaaatcaatcatatatgccagttgttgcaataaatgctcgtgctgacaatgcatctttagctcacttgtttaaatatgactctattcatggaccctttaaaggttctatttcttatgatgatgatggacttattattaatggacaccatatcaatgtctctagaaaaaaagtaggagagtggatatggaaagatatggatgttaacttagtagttgagtctacaggagctatcaaaacaagagatggacttgaagcacacatccaaactggagcagcaaaagttattatatctacagctagcaaagatactgatgcccttattataatgggagttaatgattcagactaccttcccaaagatcaccatatcctttctgctggctcttgcacaacaaactgcttagcgcctgtagtaaaagtacttaatgatgtatttggtattgaacatggtgttatgaccacaattcattcatataccatgagtcaaagaatacttgatggctctcaaaaagatttacgtagagcacgagctgccacgctttctcttattcctacaacaacaggagcagcaaaagctattgggcttgttattcctgaacttgaagggaaaattgatggaatggctatccgtgtcccaacaccaaatgtttctttagtagacttcacttgcgaactaaaacaaccagttactgttgatgatataaataatacattaaaaaatgctgctgaggggaaactcaaaaatattcttggatattgtgatgaaccactagtatctattgattatacaggagatatccatggtggggttgtagatgcgctttcaacatctgttattagctctaaacttgctaaaatccttgtttggtatgacaatgaggcaggttttacaaaccaactccttagacttatcaatcttgtagaaaaatctatgtaaaaataatttatttgtaaccaaatactattggataatcttttcagattgagcaacaatattagtatattcagagggtggaatccacttctttaaaggagtagtttctgacttttcttcattagaaaagtgaagagaaggaataaatttttttaatacctttcttaatctactcacatttatcaatgtatctatacaggggccattaggacattcattaagaaaaccataaacagggaaaaaagaaggaatatcatgtataccttccactaaatcccgttcacaagctataccaacaatcatcttaggccttacttcttttataatacgtctagccattgtcccacctgtggcagataaaacttttactcctgactcatcacgtaactctaataatgagccaataggacactttccacaccgagcgcagttatcattattgtatgtcaaacgaagtttacaacggcttgcttgtgaacaatgtggtgctaacacaagaacatcatgtggttcatatgataactttgcctttaataacaacaagttatttattgcaataaacgagcggcgaactggctcaattggaccttttatgactctaacaaaaagctctaccataggtagtgcaaacctaataactatacttctaagtttgagaggactcattactgtccaccccatataaaaatgaagaagtaattcaactgatatccaactaattggagaaactagtaaaaaacaaaaaagaataacaaacaaagaaactgtagcaggttgattattagaaccaatagtaaaaactaaccataaagaaaataacataatacaaataagcaatgcacttatcccaacaaaaaatccaacaaaaatttttaactctgcttcatcagttgcaatatattgagataatacatctctattaatcatttatatctccctaagttacacattactcaacctaaccatttatttatgatcaatcactaaagatatccattccaaaagtctttagcagtcattgtttttcttccttcaggacgtaatgtataaattaaataaggaacatccttacaagcaatagcaatagcattaccttttagacctaaaatacttcctggtaaaggagaatcaccctcattatacttaaaaagttcattactacctatttctcctggttgaaataatatatttatagggttacggttaaccaacttaaagcttgtttgagctccaggccatggagttacaccacgaacaacagcatgaacattttctgcaggcatatcccaataaatacacccatcagacttggtcaacttaggtgcataagttgcctgtatatcatcctgtggggtaggatcagataaggtcccctgaataatctgctcaaaaatatttattaataactttcctccaagttgagcaagcttttcatgcattgttgcagcagtatcttccatattgataggaatctcttcatgggtaaacatagctcctgtgtctaaccctttttccatacgtataattgtaactcctgtcttcttgtcattattcataagtgcacgttgaataggtgctgcaccacgataacagggtaaaagggatgcatgaacatttaaaggggaaattgcggggatatcaagcactgactgaggcaaaataagtccataagctgctacaacaagaagatctggtttaagagcatatagtttttctatttcatactcactcttaaagttaactggttggtatactggtattcttaatgaattagaaagaatttttacagctgaaaattgaactttatgccctcgacctacgggtctatcaggctgacaataactagctataatatctactttcccagatgcaacaattttttgtaaaattattgctgcaaactcaggtgtacccataaaaacaatacgtagaggtttattctgtagtatcatatagcattttttaataatcttttcttcaatcgaccatcataaagtttacgtttcaaataactcactctatcaataaatagtttcccatctaaatgatctatttcatgttgtaaacaaactgataacaacccttctgcttcaaaggatacaggattactatcaagatcaatagcatcaagcaacactttagcatgccttttaacttttgacctatagtctgggacagaaagacaaccttcttcgccctcaataaatccagaatctataacaggtgtaattttaggattaataagaaccagtaagctacttttttgctctggaccactcacatcaacaacaataagacgtaaaagataaccaacttgtggagcagctagccctatcccatttgcatcatacatagtttgtaccatctgtttagcaagattatgtatatcttgtgttatatcttgaacttcaaggcttattttttgtaaacttatatctggatactgcaatatttttaaagacatacttactccatataaataaaagtaccatttattatagactaaaaatactatctatatgtattattaggtatgttaaccgttgctaattacaatataataattatcatattgttgaagtaatgcacagtattatatctgtccagatcaaaagaatgtattatgttatataatcaacctcttcccttttctcctgaaacaccttggcttgcacccattgctggatggtctgatctcccatttcgtttgctctgtcgagaacatggagctgctgtatgttatacagaaatgattagtgctaaaggactcatttacaataatccagggacagaaagtcttttaaaaactatccctgaagataatcctcttattgtacaactttgtggatctgaagcctcatgtatgaaagatgctcttactatactcctagaaaaagggtataaatggtttgattgtaatatggggtgctctgtaccaaaaataacacgtacaggtagtggtgctagtatgatgaaaaatattgataactctattaagatagcagaggctatgatccataccgtaaacaaaaaatctataggatttaagttacgcttaggttgggatgaaaagcatgagacatggcccattttagcaaaattactagaagaagctggtgctggctggattactttacatcctcgaactgctcaacaaggttttacaggaactgcaaactgggaaaaacttttagaactaaaacagcaagtaaaaataccagtaattgcaagtggtgacttactcacagcatcacatggagttgattgcataaaaaaaacacatgtagatactgtaatgtatgcacgaggagctttaaaagatccaaatatcttcactaaacataatcaaattcttaaaggaaaacagattactacaaccaactcgaacagtttattttctatgataatgcgtcatagttacttagcatgtaaatatagctcttatgatactgcattattaaaaatgagaactattgttcctagatatattcgtcatttaaaaggtgcaaaacaacttcgtttaaatattattagttgccgtacatggagctcatttgaagatatattacaacaatttttaaaaaaagaacaagtagcctcctgtaatgaaaattagtaacgttttaatatccttactctatccatatgagacttccttgtcggccacacttgctatcacgtcgataagaaaaaaaaagctcaggtaaaagatacgtacaaagatccaaactaaaaatattcttagaaagaatccctacagatttaagctgaaaacatgttaactcccataaatccattgtttctgtttctatagaaaaccaaggatcaaaatcttcatcccattcttccttaaaacttgtgaacttagcatatgctggtgaaaggcttggacctcttacaactaaaacttctgatggttctactttataataactacaaaaattttttactgctgtttgaggaaactcaatacgatttccacgccaacccacatgaatagcagctatataatggccacttttatgcgctaataaaataggttggcaatctgctgttctaattaataaccctacacctttttttgttgtactgatcccatctgcttgttgagtgaccccagaggcattccctttataaaacgttggttctgattcaaacaataaaacatccccatgaacttgctcaacttcaataagttggctaatattagcctgcttcataattcgacgacgaccaaaagttttcttctctatatcagcagggaaatggttacccaagtcattgggataggtcccctcttttgttttatctaaacatggagtttgaaataaacaacggacccctgagactcctggaaatataaatggaataccaactaaatccatatgaaacctaactctgttatatatccatgcataggtacatcagatatactgggattaaattctacaatttgactttgataaatcaaagctacccttactatccgatcccatccagacttagaaagaagtttatcataataccctttaccataacctaaccgagctccaaaacttgtcaatccaactgctgggactataattaactcaggaagattcttgccagaaacagcaatacaccttttataatctggctctaagatcccaaaaggaccaacaacaagctcttcccaacctcgacaaagggcaaattccaactcaggttcaccacttaaaatacatctaggtaataatacttgttttccttcctgccaggcttgccttaaaagtgactctgtagaaacctcattttttatagaagaatacaaagctacagagcgagctctcctccagacatcatcattaaataactttgctgcaattatacgagaagcactatgaacctcttcagatgaaagtgcctgacggcgaataatacaagagtttcgaacaaaatccttatctagcatatacataagccttaaatatcttttgcaaatatccctttgtcaattatcaatcactctgttacaattaattttatatattataaactactttttatctaagagaaaatggtgtactaactaagtttttacaatattgttttactagttctgtgcaaatcaataatttagatataaataataatctataagaattactattaattaagataaagttgctagttctgaattagaataacaaaaaataaattttataacgctcaatatgttattagcattttcagcctaatgttattcaaaatagtgataaataaaaaatgcaaaatcaatatatggacacacctaatggaatatttataccaaagattataatataacaattttaagctgcacatgaagattttacatcatcctaacactaatataacataatgcctctaaatataggtgacaagttctatctagcttactaagctaaagcaaagctaaaaaacacctaaaaaaatagacaagtatacttatgtcataatatatcaaacagttcaatgataactaaaagataacaaactgactaaaagttattagttatgaagtatcgaaaaattagagtatatattgttttgcttaacatttgtgactaaattatatttaatgagataattaattattcctttttataattgagtataaaacgttataaaaaacaactttttgacgatattgctgttatatgccactatagcttctggtatttataactctttaaatttgatgtacatggattagccttaattaaataatatatagtaactaacacgttataacctacaaaaaaatatgcaaaaagttcaacaaaataaaagtatttctagaaatttatcatactattctctcactattattacagttaattactctaatattatactaaaaaatttacctaaaaagttatgtctagccttgaatgttctattataaaacaaaccattacaaatgataaaagaataatgtcagaaaaacatgaatattttcaaacagaaaagtctatttctagtaatagacacaatagcaataataaacctcacgcacaatatattcaacttaccctaaaaaaagatacaatgacacagttagaagaaactatccctgtaatggcagagcactctaatcaaaaaactgcttcaccaacaactcataaccatagcataattaatgaaatagaaactcaagatactcaacagacacttgaaagtcagcctatagtgactcatagcctaactttacaacaaacttcccaagcaacaccagaacattcagagcaaacaagtactaactcatggagtgaaaataatatatctaaaaaaatacctcataatgtataccaagctagtacaaaaaaactaaaaactcgttcacgttcaaaaaataaaaatagaacaacaaaaaattcaacactacctgtgcctacaacaaatcacttacctgcacttatatccaaaaactctggattagaacaaaattcccctgaaataaataaaaaaatgcttattagtgttatccctggtgaacaggtagaagtcgctatctctagtgatggtcaactttttgaatattttattgaaatgaaccatcatgcaaaaattagaggtaatatttataaaggtgttattaataatattgatgcaaatcttcaggcagcatttattaactatggcaatacaaaaaacggattcctacaaatagatgaagttcacccagaatactaccttcaacctcatgagccaacaaaactaaaaaaatatccacctattcaaaaagtacttaaagctggtcaagaaatacttgtacaagttgtaaaagagcctactggtaataaaggagctttccttaccacatggctttctcttgctggacgatttcttgtacttacaccaggacaagaacaaataggtatttccagaaaagtagaggatgaagaagaacgtacccgactacgtgaacttattaaagggcttgatccagggagcggtcttggagcaattgttcgaactgttagtattggtacaagtaaaacaacacttcaaaaagaccttagttttcttaagcgtgtttggagagaaattcgtaaaaaagctacaacagaaaaatccccatgtctaatctatgaagaacctggtctagctactagagccgttcgagattatcttgctgatgatataactgaaatttgggtagatgatcctgaaaccaaacaagctatacaagaagtaactacactgctctttcccagaaaaacaaaacttgtacatttataccaaaataacaatgaacctctttgggaacactttaaacttaacaaacaaattatacaggtacattctagagaagttataatgccttccggaggcagacttgtttttgatcaaacagaagcattaatggctatagatatcaactcagggagaattgcaggaaaaacaaactttgaatctatggcctatcgtacaaatatggaggctgctgcaactatagctcaacaacttcgcttacgtgatatcgggggacaaattgttattgattttatagaaatgaaagaacctgcccactgtagagatgtagaaaaagagcttcaactggctatgaaagcagatagagctcggcatgacgtagggaaaatgagttcttttggcttgttacaagttgtccgtcaacgtattgggtcatctgctatctctattagccaggaaacctgtccatactgccaaggaacaggtcaaagacgaaatattgaatggcaggctattcaaactttaagagaaattcataaaaaaatgcaacaaactgttaccgctggtaaacatgaatatattcatactctagatcaagaacttggtctttatcttcttaataataaacgtaatcgtttaattgctcttgaacaagaatttggcattcatcttgacattcgtatttcactcctacaaaaaatagaaaatagtgatttataagatatgaaaaaagtgcttatccatttatgctgtggcccatgtagtattattcctatacaaatactacaagataaaggctataaagttagcggatactttgctaatcctaacatacatccactatcagaatatttacgccgaagagaaagtactgaagaagttgcaaacaaaatgggtattactatgttttggcaagatgacatctataatgtttctaactggttagaaactgtctatcagaaaggaattgcagataacaaaggtggtcttcgctgcctttattgctatgatagccgattaaaacttacccaaaaaacagctcaagctcatggatttgatgcattcacaacaagtcttttttactcaagacatcaaagacatgaacttattttaaaagcaggagaaaaaattgaacaagaatctcctaatgttcaattcctctatcaagactttagatctggatggcaaaaaggcattgatactgcaaaagaatggggactttatcgacaaaattattgtgcttgtatttttagcgaaacagaacgcttccaaaagaagcttaataaattatcaaatgttactaccccttcttattaatattcttttatagaaaaaatttaatactaaaattatacctgtgctctaaatagctctatagattgagaaataccaaaagatgtcccaaaaagaaaaactgtatctccagctaataactcttcatcgggaccaggagaagctattatattctcctttctacgaatacctacaatagttacaccatgtttgcgacgtaaatctgtatgtaacaatttcttattttccatatcagatccagcttctactttacatgctgtaacttcaagcccagaaagaagctcttctgtcaatgaaggtaagtttgccccatgaaagtttaaatccctcaccatctcatagttttcgcttcgaatactatgaacaaatttttcaatagtttgtctaggaataaggtagtatccaagaactcgagtaaaaatttctatagacgtttcaaaatcttcagggatgacatcatttgcaccaagctcatgtaaatatgggacctcacctaaaaatcttgtacgtacaataaggtgtaaagatgggttcaactttcttgctgcagcagtgatacctctagttgctgcagaatcagaaataacaacaacaagtattcttgctttttcaaccccaaaatgcttaagtactaatggatgtgaagcatccccatggtaaataggctcttgatctctaagccttcggactgtatcaggattcatttcaagaataacataaggaatccctgtttctctagctgttcgtgcaagatacttccctcctaaaccaaaaccaactataataaggtgatcttgtaattctccttgatgagttagaagaggtttttcttgggaattatcatgattaaaaaacttcccaataaaccttgctgtctttggggctatacttatgagtcctggagttaaaaccatagttaggatactagcagcaagaaaattttgatatccaatagcatcaagaaatccatggtctacaccagacttagcaagaacaaaagaaaactctccaatttgtcccaaactcattgccgccattatagcaactcttaatggataaccaagaaaagtcattgcaggaattgctagcaaaactttgatggtgatcaatattactgccaatgcaatgacacttccaatatgatctataaaaaagtgtacatctagcaacatccctacagcaataaaaaaaagactagtaaaaacatctttaaatggcaatataccctcaactacactcatactatattcagattctgctagtagaagtcctgctaaaaatgctcctaaagcaagagataatcctaaataagctgtaccaacagcaacagctaaacaaaaccctaagctggtcataagaaacaattcacgacttcgagtacgcattacttgtctcataagaactggaactacacgatatgcaagaaaccagccaccacctaaaattaaaaccaaccgtcctgcagataacaaaaatgaaataggatcagcctctccctgccctgctaataatggaatagagagcatcatagggacaatagctaaatcctgaaaaattaatacagataaagcaagcctaccatgtggagcttctgattcacctctctgttgaaggatacttaaaacaattgctgtcgaagaaagagtagcaagataaccaattaaaatactctgagggaatgtccttccaaaaagcatagcaataccacacataacacctgtggttaaaacaacctgtatagtacctccaacaaatacaggttttttaagacgtgcaagttcttcacctgataactccatgccaatagtaaaaagaagtaaaacaacacctatctcagaaagaagttcaacagcatggacattttctacaagccctaaagcagatggaccacaaagtacacctgttaataaaaaaccaacaatcgcaggaactttcaacctgagacagataagcaaaacaccaattgaaagacaaaaaatataaactaggtctttaagaaaaggaatctccatgtatgcctcttttattacagctattttacatattttttaatacaatgaaatataaccgtacaataagtatattacaactagcaattacattaaaaataatctttttgataaacttatcaataagtacacttactataaatactaccttaaataaaaaataagaaaaaatatctcttaataaaaaaaaaagaaaaaaatacaagtgccttcttaaaaaaaagctgatagactataatatattctagttatgttgtgaggcatacccataatgcttttctcaccaattcgtcataaaattgaaaatttaaaaattattattgttggtgctggtgaagtaggctttcatattgctcaacgtctttctgaagaacataagcaagttattgttattgacacaagccaagaagcattacgaagagtccaagaaaacttagatgttcaaactattcatggttctggatcaagtccttccacattaaaaactgcaggcattgaaacaacaaatatttttcttgctgttacagatagtgatgaaataaatattacagctacactttttgcatatgctttatcaccccatattattaatttagcacgaattcgtaatgaagaatatgcctcttatcctgaacttattgaaaaaggtccattaaatataagtatgcttgttaacccagaagaagaagttgttagaactattgaacgacttcttatgcttcctggtgcagtagaatatggagagtttgatggtggacgaattaggttagttggtatacgtgtaatagatggtcccttaatagatcaacagctctatcactttcgagatattgttaataatgacggtataatggtagctgccatctcaagacaaaaaaaacttattatacctagtggaatagataccattcaaaaggatgatattgtatattttatatataaatccaaaaatcaaaaagaacttctaagagttttaaataaaagccatggaataattaatgtagcatgtattataggtgggggtaatattggtgtccgacttgcaaaagcttttgagcaaagagatattaaagtaaagctgattgataataatgaagctcggtgtaaaaaacttgctgatagattaaattctactcttgttttgtatggagatggcactgataaatctcttttagaggaagaacatattgatcaagctgatgcatttatagctgtaacaagtaatgaagaagtaaatatacttgcttgtcttttagcaaaatcgcttggcgtcaaagaagttgtagcaagagttaataaacatgcgtacttaccattaattgaagctacaggtattaaccacattgtaagcccaaggttatctgcagtaaatagtatccttcattatatacgacaaggtggtgtactctcaactttaacagttggaggagaagccgcagaaattattgaagtattagttcctgaaacatctaaccttcttaaaaaacctattagtaaactcaatttcccacatggagccttactcttaactatattaagagaaaataaaagctttattcctagtggacaaacgattattgagcctggagatcgtattgttattatctgtcttagagaaattatgaaccgtgttgaacaactacttacagaaccacccctagaagaaagtacctctgtcacgttataattaactacttaataggtatgacaaatgctatctaaatataagggtacttgggacatagaatagataagcctgtattccataaggtgttacatgcaattacgctctgttttttttattattggtgttctcttaatatgtattggaacatctattattttccctttacttacctctatttattataatgatggagtagcaaaagacttagcattgtctttatcagtagttattataagtggatttttattagcctttatttgccatcaaaataaccccataattctcagtaaccaagaaggatttgctgtagtaggcctatgttggattattgctagcattgctggttcactaccttatgtatatattggtatcccctttacagatgctgtatttgagactgcatctggttttacaacaactggagcaactattttaacagatattgaagccatacctaaaagtatactcctatggcgaagcttaacacactggcttggaggaatgggaatcattttactctcacttgctgtactcccattacttggagttggagggatgcaactatataaagcagaagttcctggtccatcaccagataagttaacacctcatatgcaagatactgcaatgcttttatggaaagtttatggtattatgactcttttccaaattatacttctctatcttgcaggaatggatctttttgatgctattaatcaaacattttcaacagtatctacaggtggattttctacaaaaaataattccattgctgccttcccaactccagtaattcaatggataattattctatttatgtttgcatcaggtataaactttactcttcactataaattactattaggactactaccacactacacccatgatacagaatttaatctatatacactactccttattataggagctatcactattggtgtgttacttattttttatcatatctatccttctaataccttatctcaaatagaacaaatagttagagctagtgtctttcaacttgtttccatctgtacaacaacaggattcatcacagaagactactctaaatggcctcaactagctcaaggtattctacttttttttatgttcatgggggcatgtgctggttctactgctggtggcctaaaaactatgcggattatagttattgcaaaagttgcctatcaagaaatatttagactattacatcctcactctatacgttttgccaaacttggcgataaaactattcaaaaagatgttctctctggtattataggatttctaattctttacctttttattttactcataaatacgcttgcacttatggcactaaactatgatcttattacctctttttctgctacacttacctgcctttccaatgtaggaccaggacttggtagcgttggaccagtagataacttccatcaccttgataacatagctaaatggtttcttattttttgtatgttattaggaagattagaaatttatgctatccttattttattcattcctgaattttggaaagcattaaaataatattcagttatacctaagcattgtaaaaaagctacttaggacttgcataggaactacttttaagtcaaaattatataaaagaattctaaaaatgaagggtatattaatgggtaaaacaaacttaggtattgatcaagaaggattcccctatattgctatttttgctttttcatcactcatttttgctatattaggctggtggcttttggctgttctttgtttaatagggacaatattttgtggccactttttccgtgatccagaaagaattataccaacagaagcaaatattgccgttagtcctgcagacggtaaaattattcgtattgaacctcgacaagatcctattagtggagaaagtcatacttgtattagtatttttatgaatatatgtaatgtacatgtaaaccgctcaccaataaaaggacaaattgaagcaattcaatatgtacaaggtcactttcttaatgcatccttagataaggcagctaaagaaaatgaacattgttcttacctccttagggatcaagatggtaagcaatgggtagttgttcaaattgcaggccttattgctcgacgtattgtttgtcgtaccaaagaaggagatattttaaatcgaggggaacgatttgggatcatccgatttggctcacgtgttgatttatacttaccagaagaatatactcctacagttaatcttggaaataaagttatagctggagaaactatcttagcaaaaaaaaatcaagaatagtataaaaatacttttaagttaattaaaaaataatcttcattaaaataatactgttatccttatgcaagaaaaaaaaatcactcctaaaggggtatatatcctaccaaatatttttactctagctagtttattcttagcctttattggtatgatacaagttatagggaataaatttcatatatgtgcacttattattcttggtagtgctgttttagatgggttagacgggaaaatagctaggcttacaaatacatctagtgaatttggtgtacaactagattctcttgtagaccttgtagcatttggtgtcacacctgcatttttagcatggaaatttggcttagaacaatttggtaaacttgggatttgtatctcatttctttttattgcttgtacagcactaagattagcacgttttaatatttctacatcaattctatgtaaaaaattttttgttgggctaccttgcccaacaggaggatgttctctagcattgtttatcctatttacaccataccttcctaatttttttaataaaatacttccacacatactacttacacttacttttattctttctttacttatggttagtcgaataagatacttttcttttaaagaatatggatttttaaaaacacatacttttagctctatggttactgctttacttctttttgtattacttttatcagagccagcagttatgggttttatcctatgcataatatatttattatctggcccaatctatacatatattttcctacctaaacgtagttatcctttagggaaaattgatcttctttaaaagaataccttttgtttttaatagataacaaagcttccttataacaataatagttagctattttataccattatgtggacaaaatgtattcatttcacaaagagtacatagtggattttttgctttacatacatgcctaccaaaccaaaccattctatgatttatagcaccccattcactttgggggaacaaattcattaaatctttctcaaccaaagatggatctttatttgctgttaaacctaaacgataggaaatacgctttacatgtgtatcaacagcaataccaacattaataccaaatccaccccaaagaacaacattagcagttttacgtgctactcctggaagagtgataagttcatccatagtctgtggtactactccattataattatacataatacgtttagctgtttctataatatgctttgctttacttttataaaaacctgttgttcttattacttgttcaacctcctctaacattgctaaagctaaagcagaagggtcaggccaacgtgtgaataaaataggagtaacttgattaacacgtgcatctgtacactgtgctgataaaattgttgctattagtaactcccaaggattgcttgctactaaatgtgtttcaaaggtaggatatcttttttttaatagtgataatacacaagctgcacgctgcttttttattgtattttcttttatcattaatataacctaactaattatatatttatcacaattctataataaaaagaattattgaataaaaaagggaaaatagctatatgtaacatattaatcttgatactataattggaagagttttggttatacttgtttacatcacagcaccaaatgaaaatgaggcagagtatcttgcgactatgttagtaaaacaaaaagttgctgcctgtgtaaacattatccctaaagtacagtctgtttatctatggggaaatagcattcataaagataatgaagttattttattagtgaaaactattgaatcccactttaacaagataaaagaaattgtatgtagcatccacagttatgataccccttgtattattgcactgcctattatcttaggagagaataagtttcttgcctgggtagaagatacagtcaaagaggagcattaaatgatctatattgctggttcattagcttatgacaagataatgaatttcccagggaaatttgaagagcatattttagcagataaactccatgttcttaatgtatgtttcttaataaatggacttatagaaaaacgtgggggaacagctggaaatattgcatataccctttctcttatgaatgaaaagtcttatatcctttcttcagtaggaactgactttgaaaattatgaaaaatttttatcatccttaaaattacctcttgatgggatcagaaaaattccagatacactaacagctgtagcctacatcacaacagatcaaagtaataaccaaataacaggattttatcctgcagctatgaacttcccatgcctatatgacttacctcagcttaacaaaatgcatgattgggctattatttctccaacaaatatagaagacatgcaaaaactaccaactatcttctatgaaaaacaaataaaatatatttttgatcctggtcaacaacttccagtcctttctaaggatgatcttttaaatgcaatcacaggatcatctattcttgtaactaatgactatgaatttgaaatgatttgtaaaaaaacagataaaacaagagctgaattacgctctctaacaggagcaattattactacacttggtgatcaaggggcattaatacatacagataaagaaatatctattggaattgcagttcctaataaaattatggaccctactggtgctggagatgcctttcgtgctggacttctaaagggcttaatacataatttggatatagtagagtctgcatatcttggttcgactgcagccagcttttgtatagaaaatagtggaacacaagaacatacatttacttatactacattttcagagagatacaaaaaagcgtttaatgaatatcccacactatcttggtagaagataaacaaaaaattaaccacagttatttcatttagttaatctctaaaaataagagttcaaacttgttggaaatcactaacttcttgagagtaaaaaagtcatagtaactatcaagatatattgtctatcttttttatattaattattatggcctatttttaatataatacttatatattcaactagctaatctaaataaatttaataaaaaacttttattacctttcatataatttacaaagttagattttattttcattctttatatacaaaggcactcatagtgataaaaaaagacattttataccaagacattacattagatagaaataataataataataaagaaaaaaaaatagctataacaaatagccaccaaatatacaataaaaacaatgtattaacaaacctactttcacttgataaagaaattattaccctacttgctaagcgagcacatttactttcaaaacttccaaaaacaggtttatcagcccatgagaaacaactacgtatttcatgggaaaaaagtgttacaatgctcagtaaagatccacagtttactcgtcaactgtttaccttaattcaaggaattgaagtcataccagaagctatagaacagatttctgctttctgcctttcaccaaaaaataaacctgtgaatattgtattaccaataccatcatgttttcgaacaacacagttaaacattgcaatggctgtctgttctaattctgaagggacattacaacatgtattactaaatgaccctatcatagaatgcataaaagcatttaaccaattaggtgcatctctccactgggaagaatctggctgtattatttgtagtaacccaaactttacaagaaaacattataaaaagtctatacaaatagatacagttatacatataggtaatgataccttatccttatacctccttattttttttatagctacttgtccagcacgagttaagtttatagggaaaaactctcttaaacttgcagacttttcacctttacgtaaatttcttcctatgattggttctagacttataaatattattcctgggcaagatgggcttcctataagaattgaatcttcagcaatacttccatctgaaattataatccctacagatttacctgttgatgctgttattgctttgtttattgctgcaacacggtgggataaagagctacttattgatattaaagaacatcctaatgtaacatatattttagataagataattccactatttgaacagtggcaaataccttttcaaaaaattatattcaataaacaagttacagcaatatctattactccaaataaaataacttttcctgaaaatccaatgataggaacatacgtccctgggacagcaacattactggccctacctgcatttgttggaggaacagttactttaaaacgccagtaccaacaacataccgatatttgtttattaatagaagtattaactcaatttggtcttaatattacagaaacagcagatacaatttgctgtacaggaagacaaataggtctcacttcctcttctttgaatataaagacacttcctaaagaactatttccacttatactcacattactatgcattccattactcaaaagtgaaacaaaccttcttccagagcttcctgactatgttgatgaatcaatcctagacagttatttagcacaacttggacttgtcagaatgggttcaaaagtaaaacttatttcaccaacacaaacaccttggactagtccttcagacacatggggattagctatctctttagcagcctttttacgcccacaaattaaacttagtaatcctggatgtgtagaagctatttatcctaactactggaaaatatataacaaactaccaacaggagattatacaatgcaatcttctaaaaaatattccccaacacctgttgaactatctgaaacaaaaaaagttaatcgacgtagaattattactgaataacaaaaaggttataaaatttatgggaaaaagttcaccatcaaatccaccatgcatactcactattgcaggttctgattcaggtggaggtgctggcattcaggcagatcttaaaactattgctattcttggtggatttggtttaagtgttattaccgctcttaccgcacaaaatggacttggagttacaggtattcatacaccagatccaagctttatagaactccaacttaatactatttacaaaggtttttttgtaaatgtgttaaaaacaggaatgctcttttctgttcctattattgaaatagttaaaaatatcataaaaaaacaacagactctagcagtaattgatcctgtatgtgtaagtcaaagtggataccaactactagaacatactgctatagatgcattaagaactcatattctgcctctagcaatgttggttactccaaataaacctgaagcagaacttcttacagaaatgcaaatagaatctgaaaaagacatctatattgctggtaaaagactcattgatatgggagcaaaagctgttcttattaaaggtggccatttttataaaaataacttagtaactaattatgttgattggtatattgaaaaaaatagtactaatccaatacctctttctcaaccagctataaaaacaaaaaataatcatggaacaggctgtaccctttctgcagcaatagctacctatattggccttgggttagaactaaaaaaagcaattctacaagcacaaacctatttaaactattgcctcaagtttagttatactccagggaaaggtatagggccacctaatcatacagcatggctcaatagaaaactataatatctactactactactactaataataataataataataatatgttttgctagctttttatataaaaagtaaacagggaaagaaatatattcttctttccctgtagtatattaatcctagaatgaatatattaattacatttcactaacggtaatagcgctaaactcgcatacttctacgcaagattcacaaccaatacattcttcttcattaacaggaacagatttttcatccatcatttcgaaaacttctactgggcaaacatctatacattcaccacaagaagtacatttatcaggatcaacaataacactccaagccattatggtcctccagttttcatacacctaacaagctctattttatatgttaactgcctttagcttcttgtcatagaactgtcaataggcgacaatgacttaacaatagttttaatgacaatatatatatatattaatgcttattctttgcttgtaataattgtaatctctgatcaacaaccattgcattaggataatattcccttatagatttaaatagttctattgctttttgaatattaccttgttgttctttaatatctgcaaggataaatcctgccttaccttttaattcaattgaagcttcgtctgactctaaaacaagtaaagcataagatgcaccttcatcaaaaagccccattgaagaagcaacatctgctctatctaataagcattctagtcggttagttgaagatagtggtaattctaaacaatttttaagataattatttgctatatcaaaacgatgtattttaacactactacttgccaacttacgaagaatgtttgcctgctgttcaacagataatcctggctgaataaaaagtttctcccaatattccatagatttattataatttctaatacgatcatatgctaatgctaaacgccataatacagactttatttgttcaggctggtcttcaaattcactatacatttcttctaagcaactaatcatccaactatcattatatgtaaggtaaccgccaacttctaaaagtttgttccatgcctcaaaacgtaaatctaatctttcttcctcatgcaagtataattcaagatacctttctgctgcactccactcttttttttctatatactgataagcttctgtaagattattaagggaagtattagattcgcagccacaacaactaaaaattataaaagaaaatatacctagaaaaaagtggtcaaaaatatttccccaataagttaatatcatattttgaaagaaccttatctaaaaatttagctttaactcttaaaatcttatcactaagtattgattgtggcatcatcacaactatcatctactgtgccatctactgtatcaaaaccaacaacatatgctccatcatctaatttcactagtctcacccccatagtagctctaccggcagaacgaacttcatcaacactcatacggattattttatttgtagaggtaagtaaaacaagagcattatcatcagaaactggtttagctcctataacaagaccagttttttgtgtcaccttaaaattaatgattcctttgccgccacgagtttgaactctataaagatcaatactggtacgtttaccataaccaagattagatacagtcataattgctggtgtatcttgtttttcttgaagaataaggcaagcaacaaccgaatctccagggcgtaaagcaataccctttactccagctgctcctcgacccatattacgaacatcctcacaactaaaacgaatagcaaaaccttctgctgttgcaagaacaataaagtcattattagtaacctctttaaccataatcagttcatcatcttcgcgtagtccaacagcaagtaaacctgttctacgagacctagcataataagaagcacttgatcgttttaccatccctttacgtgtggcaaaaagaaaaaacttattgtctgaaaattctcttacagtcaggattgttgtcacccattcttctttttctaatgggactatatttgctatatgtgtcccttttgctgtacgactaccctctggaacttgatgaacctttaattgatgcattcttcctttattagtaaaaagcaataaaaattgatgatttgttgttgttataaactcttgtacaaaatcatcttcacttgtatgaagtcctgcaacaccttttcctcctctacgttgttgttgataaattgcaagatttgttcgtttaatatatcctcttctagaaagtgtaattacaacatcatcatcaggaataagatcttcaatttctatatttgtaagggtttcacgtattacttctgtacgacgaggggttgtatacatttctttgattccagtaacttcgtcacggataacaccccaaagaatttttgtatctccaaggattgattcataccaagcaatttttgtttgtaactcatgcatctcttcttctaatttttctctttctaaacctgttaaccgttgtaaacgcatatctaagatagattgtgcttgaatttcagaaagagaaaaacgttctataagtcgtatttttgcttctgcaggagtagaagaacttcgtattaagtttacaacttcatctatatgatcaagagcatgaataagaccaattaaaatatgtaatcttgcttctgctttgttaagttcaaaacgagtacgacgtactattacttcacgtctatgatcaagaaagtatgttaatgcactttttatagttaaaagttgaggacggttatctacaacagctagcatattaataccaaaagaagtttctagtggtgtaaatttatataatgcattaataataatctcaggaataacacctttcttaagttcaataactacacggattcctttacgatcagactcatctcgtaagtctgcaatcccatcaatttttcgctcattaactaatattgctattttttctaccagactagatttattcaaaccaaaaggaatttctctaataacaatagattgagctcctttttttctctcttcaatttctactttcccacgaactttaactgttccacgaccttttgtataagcatcataaagaccttgccccacatatataaaaccacctgttgggaaatcaggaccatgtataatgtttaaaagattatcaataggaacatctggatcatcaataatttttaagagagcattacaaagctccccaagattatgcggtggaatattcgtagccataccaacagcaattccagaagaaccatttagtaacaaattaggaacttttgttggtaatacaataggctcctctaatgagttgtcatagttagggcgaaaatcaacagtttctttatcaatatctgataggaactcacttgctaatcgtgacatgcggacttctgtatatcgcatagccgctggtgcatcaccatcaatagagccaaaattgccctgaccttcttcaagagggtctctcatagaaaaatcttgtgccatacgtacaagtgcatcataaacagcactatcaccatgaggatgatatttaccaatgacatcaccaacaatacgagcacactttttaggtggacgtgtataactatttcccagttcttgttgtgcaaacaaaatacgtcgatgtacaggtttaagtccatcacgaacatcaggaatagcacgcccaatgataacactgagtgaatactccaaataagattttctcatttcctgttctatagatatatggtgttctgtttgcgacatgtttataatctcacttttacacaaccctaattagtgggtaattggtaaagatatatatttagtatacattgattgacaagctagtaatactaggaaaacattttatctagctatttatttaaatatctaggtctcttacatttaatgcattacgttcaataaattcacggcgaggctctacacgttcacccataagttgttcaaatgtctcatttgcctcttctgcatcatttattgttacttgaagaagtgtacgattttgaggatccattgttgtcacccaaagctgttcagggttcatctctccaagacctttataccgctgtatatttatccctttacgtgcctcatcaagtgtaaattgataaagtttaaaaagatcattaattgtatgagatgttccactatgaaaaacaataaaatttattccaccacacattgttagaagtgaatccatcacgtcccaagtactggaataaattttagaagcaaaaaaatctgcaggtatacgtgttttatgtccatttttattttcaaaaatagtaaataatctatctccatcctcatgactttcattttctacagtaatgttgtaacctgatgtatttaaatataattgaatttcttctaatgaagataaaacgtcagaagtaagttttttaggactagtaattaataacataaaaagattttcagaaattcctgctaattcagcatctttagttcgttgtgatatagattctatctgcttcatagttgtaataatatcagaaccttttaaaagttttccactctctgtttgaatttctagttcactacttacacgatgaaggagaaaatcattaagagaaggatcatcttttataaatttttctgatttactgttatgaacacggtatagtgggggttgtgctatgtataaatgcccacgttcaataagtccaacatagttacgaaaaaagaatgtaagtaataatgttcgaatatgagccccatcaacatctgcatctgtcatgataacaattttataataacgaagcttttgatagtcagtatcttcttctccaatgccagctcccatagctgtaattaatgctttaatctctttatttgctagcatcttatcaaaacgtgtacgttctatatttaaaatttttcctctaagaggtaatattgcttgaatattaggatttcttccttgcttagcagaaccacctgcagaatctccctcaacaataaaaagttcagattcagcagggtttttactttgacaatcagcaagtttaccagggagtgcattatcaaacaacgctccctttcttctaacaagttcttttgctcgtcgagcagcttcacgtgctctagctgcatcaatagctttatctattatacatcgaatatcttttgggttttcttgaaaatatgtgtctaaacttgtatatacagctccaccaactattcctgctatttcgctattccctagttttgtttttgtttgtccttcaaactgtgggtttggtaattttacacttaaaactgctgttaaaccttcacgaacgtcatctccagaaagagtttgtcctttcaacttcttagataaatctggctgaccttttatatatccatttatagctctagttaatgctgttttaaatccagcaagatgggttccaccttcctttgttcgaatgttatttgcaaacgtaagtgtattttctttataaccagcattatattgtagtgcaaaatcaatcattacaccttcaacaatggattctcttgaaataattgaatgtaatatgctttcacctgtatttatatcttttacaaactgatgaattccaccctcagctttaaaaaggtgtgtttcacttgttctttcatctgtacaatgaatttcaagccctttatttaaataagcaagttcttcaaatcgtctttttaatgtttcatatgaatattctgttgtttcaaaaatttcttcatctgctttaaaacgtattgttgttccatgattatcagattcacctatacgttgtaagttttctagtggaacacctcgactatatttttgtttccaacgataaccaccacgtaaaattgttacttcaagttgttcagaaagagcatttacacaagaaaggccaacaccatgtaatccaccagaaactttataagtgtcattatcaaattttcctccagcatggagttttgtcataacaacttggacagcaggaacaccttctttaggatgtatatctacagggataccacgaccattgtctctaacagttatactattatcaagatgaagaacaacatcaatccgagtacaaaaaccagccatagcctcatctattgagttatctataacttcataaacaaggtgatgaagtccacgtgtatcagtacttccaatatacatagctggacgcatacgtacagcttgaaggccttcaagaatagtaatagaatctgctgtataatcttttggtattatttcgctatttgatgccattaggttatccactagtatcttgtaatagttttttatacttcttctgtataataattttgttcaacaattttcataggcataataattacagtataatctttatcttcatcacctgttattccacatggcccttcaacacttgacattgctaaagtgatagtaggtgattcaaagtgattaaatatttccataagacttttagtcggaaatgctattttatttatattacctgtataagtaacatctaggtattcattggcagatcctgtgtcttgcccttgtgcagatagaatgagttcattttcctttatatcaaaataggtacatctatcaccttcagtattaaaaatagatattcgatcaagtgactcaagacaatcttttctttgaagtttaagaaaagacatattgtctcctgttagtcgagtgagaaaagctgtataatcaggataggtaaatatcgcccttgggacacttattgtttctttactatctattgttcgtgcaaaaaatcgtttttctgttatagctatttctatttctgtttctcctaaccatttacgaagttctgttatatattttttaggaataagtattccttcactaggaattttttcacttaactcattatttataaaccgtgttaaagcaaattgatgtccatttaaaccacatacatttatatagttatcattagaaggttgaatataaagacatgaaatagcatcagaaccttcatcatcactaatacaaaatgatactcgatcaatgacttcttgaaaaaagtcagctgaccatactacactttcttctgaagggaataaagttaaaggttgaaaccaaatagggtcattaataggcattttatatgtacgacgttcttgttcaagaataagtgttcctgatgttgaatcaaaacgtagacaaagttcttttgcaggtaatctacgaataagatcaattaaatttcttccatttactcctacaagtccagtttcttttatatcagcttcataattccctataaattcaatatttgcatctgtagccattattgtcagcgttgaatgttctgctttcatccaaagtgtacgtaaatatgcagcacctgagcgtgcaggaataatatttgcaactttttgaagaccatcaataatgtgttctttatttatatataacaacataattctttaaatccttattataaatattagggcgttacttgtttatatgtattatatcatgttaatattattaataaaattttatacatttatgtgatattaatagaaacaatatgaacattatctttcatcattttttacatttttacacttttgtataagttcatgtatcatggtgtgtataactcggtcattatcttgtaataatgcaattttttttactgaatgaagtacagttgtgtgatctcttccaccaaaaagtcgaccaatagcagggtaggaatatcctagaagttcacgacagagatacattgctacttgacgagctaatactagttgttgctgtcggctttcactaataatatcattagctgaaaaaccataacattctcctacaagcataatgataagttgtggagaaatagatgttatttctcctgtctgcttaataagtgtaataagttctttttctgaaagttctctattcaataatgttttatgagcaattgttctatgtagaattccagagagacaacgtagactatgacaatgttgtgaaataataagtagttgttcttttggaaggatatatttcttttctttagaaagttgctgtgcatatctaaatcgaatatcaagatcaggttctgggagttcaccccagagtccaacttcaagacgtgaatatatttctttagatacattccatgttaaaggatgatctgttccagagattataagaatttttttattatctttataataatcaagtaaaatagttagttctaattgaagttcagggtatgatgatactctttggaagtcatcaatgagaataatatgatgactttgtatatgttctctaaataaaaaaagaggttctttatttaaagaaaaagctaactcatcagtagtggtatatttaaaagaacaggatggtatttttgagagttcattggctattgcccgtaataagtgtgtttttcctgttgtttgtttcccaaatagaacaaggagttgtgtaatttcttcagatgtatttttaagtatattttcagaaactgagcaaagtatattttctataatagaaataatccaactatgttttccattaataataaaattatcaaaatgttgtgatatgttagtaggttgtgtagatttgttttgttttattggataatataaaggttcttttgttgtaacttcatcataataaaaattaactccataaccccaaagttcatatgaggtttcttcaaatattttttgaaaggtattagcaaaccaggatccaaaaaaacgatgtggaaaagtaacatatatggatggaggattctcactatgtttgattgttagaggatcaaaccaactttgaagttcttcattagaacaaaaatttttttgagaggctaaaagagatcgacgtaattgttctttcatctcagtattctttgagtatccttaagaatagcagtaataagttacttcataaatagaatagaattatatattaatataattaattatcagaaagtaatatatgaaacaagcctatctaatcatcataaaagataaagcaaaatattattataaatttagttattaggtgttatagttttttctagactttatatgtttacttagataattttttatttattagaaattgaacacatatttgagagtttttcttgcaaaaatattatgtaaaaacatactctactggtgcaatctttttcatttttttcttactattaattggtggatatttcttttttttgaagcataaagaaatattctattcccacgggaaaactaatgaaaaaatttttttagaagaaagaagtactagttattcttttttgaacagtaaagataataatacaataataaagaaaaaacaggatgctcaacaggtacacattgtttctggagttgtaaagaaaggtcaaaatagttttgagataataggaacacatgtttcccctgaaaatttttataaaatagtcaaagcatcggaacaagcacattctcttaaaaaacttagagttggacaaccatatactctttttaaatcgtcttctaatggaagtttaattcgttttgaatatgagataaatcaaactaaaaagttggttattgaaagtaataattcagaatttaaagcatatcttcagcctatagcatacgactgtcaactctcatgtatttctggtgtgattcattctaatttatttgattcaattattgctacaggtgaatcacctcttttagccctatcaatggtagatatattaagttttgaaattaattttattagagatttaagggtaggtgattcttttaccatactggttgaaaaactttttaaggataatgtatttaaagggtatggtaagattttaggtgtaactttttataataatggttcttgttatgagggctatagatttatagatgataatggggttgagcagtattataatgctgaaggaaagagcttaaagcgagtttttcttaaagtcccattagattttaaacgtatttcttcaaagtatagtttaaacagggttcatccaatttattgtgatgttcgtccacacttggggatagactatgctgctccatttggcactccagtaaagtctattggtaatggggttattatgaaggctggttgggggaatggttttggaaagatggttattgtaaaacataaaaataatattgaatctatgtattcacacttatctggtttctcttctaatttaaaagtaggaacaaaagttaagcaagggcaagttattggatatgtaggtagtacaggtctttctacaggcccacatcttgacttcagaattagggaaaaaggacaatatataaatcctgaaaaaattttcaatcctcgtatgggacctgtttcacctcatcaacttgaaaaatataaagatttcattgttgagataaaatcttatatggatggtaatcgtaatcctgaagaatatactcctgacagttttttatagatatatacagttaaattaagggattaaatatagtgtcttctattacagaaagtgattttttattatcttcttatatgttctctttacctaaaactcagattgcacaatatccctacgagagagggaaatcacgccttcttgttttaactaaaaaaaatagtactattattcacacagatttttcaaaaattgaacactatcttcctaacaattctttacttatagctaataattcccgtgtgttccctgctcgtattttttgctcttatgacaaaagaaatatagaagtttttttattaaccccaatatcttttttagaaattcaagctaaaagttctgatgaacactatggagcatggagtaccgccataggagagtgccttataagaccagctaaaagggtaaatataggatcaaagctttatttacagcaagagttagaaattgaagttttgaaaaaagaagactttgggcgtcatattgttaaattatgctggaaaggttctttatcaaatatttttttttcctatggggatatcccgcacccaccttatatacatcaaagtaataaggttcaggataaggaaagatatcaaacagtatactctagattagataagctgggttctgtagcagctcctacagctggattacacttttctgaaacgattcgtaataaattacaaaaaaatggtattagttgggcagaaattacactacacgtgggatatggaacatttagtcctgtacgctgcaatgacataagaaaacatattatgcattctgagtttgtagaagttcctgaaactacagttcaagctataaaaaaagcacggtttgaagggagacctatttttgcaatagggactactgttgtaagagcattggagggtgtaagtactatttgcggttcccttcaaccttatacaggttttataaatattttcatttctcctggatataagtttagttatgttgatggattagtcactaattttcatctacctggttcaaccttactaatgcttgtttctgcatttacaaagagaagcataatgattaatacttataataaggctattgaacttggataccgttttttttcttatggagatgcaatgttaattatataagtttgcttaatagtatttagatatattttagatatggcaatagtaaaatttttttgtaactgtttataaattaataacaaaataaattaacatttagttaaaaattttttattcatatatagcgataggttactgcagatttactttctaaagtataataagtatctttctagatatttattatactacagtttacaagccgatatgtgtaactatttgtagtctaagtatttttttttttttttttttttaccttcctctaaatttttttcttttttgttaattattgcaaagagatatctgcacacccttccctaatttttctaaaaactttttttagatatttttttaattaatttatattataagaaaatatttaaaaataattaataactttagtctgttagtatatattttttgttttgaataaagtttagtttttattgttatagataactatttgatattgttaaaaaaatatttttaacaatatttttctgtttatttttttaacaaattatgtctataaaatatcttgttttcatatagaatcttttttgtattctagctaaaaaattagttcttatataagaattgttaaaataaagaaaagttattgtgatgtaactttataaggataaaagtaaaaatattacttgtgctgcttaacataagcagtataaaattgttatttgttatatatatatatagttgtttccatcagtaagagagaattgtagttatgtcacatattgaaattattgaagaacgttgtaaagggtgtttattatgtacagatgcatgccctaaacagttgattcgtcaatctacaaaacttaataaacaaggatataaagtttcagagtttatagaaggtggagagttaacttgtataggctgtacagcttgtgctgttatgtgtcctgatgccgcaatacgagtttttcgaactcggaaggtaaaaagtaagtagtatggagcaaaaacgtattcttataaaaggtaatgaggctgtagcttatgctgcagttgcagctggatgtcaatgttactttggatatcccattacacctcaaagtgaaatcccagaaatgctttcccacttacttccagagagtgggggagattttgtacaagcagaaagtgagatagcagcagtaaatatgttgcttggtgcaggtgcttgtggtgttcgtgcaatgacatcttcttcaagcccaggtatatctctaatgcaagaatgtatttcatatatggtggggagtgaaatcccaggtgtgattattaatatgacacgtggtggtcctggccttggaagtatagatgcttctcaggcagattattttcagtcaactaaaggtggagcacatggtggtgcaaggacatttgtcttagctccatcaacttgtcaggaatgttatgatatgactataaaagctttttctcttgcttttatatatcgaaatccagttttaatattgggtgatgctatggttgctcaggtcaaagaacctgtggtatgttggaagccagaaaaaaagttagaagataatgctgattcttggagattaaatggaaataaaggaagaagttctcgtttattacgttcactaaacttaaaagaaggtggacttgcagaacataataataatttattaagaaaatatctatcaatgcaacaagatattgaagcagaagagtactttattgaagatgcaaaacttgttgttgtagcatttggatctattggacgtatagtaagaagtgctattaataccttgagagaacagggatataaggtaggactatttcgtccattaacattattcccatatccttcatctatgcttgagtcattggctaaacaagggaaaaacttttttgttattgagcaaaatggtggccaaatggttgaagatgtaaggcttgcaatacgtcactacacagatgccaatgtacatcttgttcctgtaggtgtttctataggcgcagaagatcttttacagccaatatctgaattttttaggagaatataatgtctgtagtacctatagaaatagaagaacctagttatattataacagaagaaaatgcattccctatttcaccactacttaaagaagaaataacacactactgtgcaggttgccatcatgggatagcacaccgtttaattacagaagttcttagtgaaatggccttagcaggagaaacgataggtatagcttctattggatgctcttcttttatctatgactatatagatattgattgggttgaagctccgcatgggagagcctcagctgttgctacaggagtgaagcgtgcccttccagataaaatagtttttacctatcaaggtgatggtgacttgggtgctattggactttgtgagtcaattcatgcagctaatagaggtgagcatatttctgttttatttatcaataatacagtatatggtatgacaggtggtcaaatgggaccaacaacacttgtaggtcaaaagacaactacttctccaaaagggaggaatgcctcaaaagagggggctccattaagggttgcagaaattatggctggtcttgatggtgttgctttttctgctcgttgttctttacactccatgaagcatgttttagctgctaagaaagctatacgtaaggcctttgatattcaatataaaggtataggctatagttttgtagaaatgttagctggttgtccaacaaactggagaatagatccaagagcagcaaataaatatattgcagatgcaatgattcctgtatttccattaggaacatttaaagatattgtagaagataataaacgaggatagaatggtatcctatcataatgttgttatagcaggctttggtgggcaaggggttatgcttattggtaaccttttagcgcaagcaggtatggaggctggaaggaatgttacatatttccctgtatatggagcagaaatgcgtggagggacagctaactgtactgtagttatttctgaagaattagttggttctcctgtagttatttctcctctttctacaattattatgaaccaaccatcgttagataaattccaacatcgtatctgtgcagacggagtgcaaattgttaatacatcaatgatagaaaaagaagctattgacccatctaaaaaaacagtatgtgttcctgctaatgaactcgcagataaaataggtaatattaaaggtgctaatatggtggccttaggagcttttttaaaagctacaggctgtttatctcttgatgttgttataagtgcattagaaagagtcatttcttcacattatcatcatcttattcctagtaatatagctgctcttgaagcagggtatactttttatgcataagtcttgactacaatagtcattagaatataatttagcacattatatattatactatttttgtctcactatattaatttaagtctttttaacactattagtaagttagatataatttaaaaggcaatgaactgattataatttttagcaactaggtataaatgcttttattatgtgcgagagtggcggaattggtagacgcactggacttagaatccagcggttatgccgtgagagttcaagtctctcctctcgcaccactgattatatctataaattagtagcttgtttatagacaagataattctcctacgataaactcatttctttatagaacaataaagaatgcctatttgtgagtcctctttttatttagtattatactattggtaacaataaagtagttatgtatgaaataataagcgttgtattacaagaggttaagtaatacacatttttttattttattcatctgttactagttaatcccatattagaacatggcaagtatatgttgcttttgttactataactcaatcaaggagttttgttatggagtttgttcttgagtctatttctcctacaaaaaagaaacttactatctctttaacccctgatgaggtgaatacagctttagatagtgttattgctcaatataaaaaagatctttctttaccaggttttcgtaaggggaaagttcctaatagtgttgtctttaaaaaattttcagaagaaattactaataaagcaacagaagagacactaaaaatttatataaaagaaatttttcaaaaagagcatatcaagccactatgtaatttactgacagaagatacagattttattcgtaatgagagtttttcctctacattgacctttgaagttttacctgaaattacatttcctaactatgaaggacttgaagttcaccaagatgttgtaaaagtaacagatgaagaagttgcagagcttcttaagaatattcagctagctatggcagagttagtagatgttaaagaagatcgttcccctcaaaatggagatgttgttgatgttgattataaaggatttgaaaatggttctccagtaactgatgttagtggtgaacattttgttttaactttaggtcaaagacaggcattagaagattttgagcagttagttaaaacagctaaggttggtgaagaaaaagttggtattgtgaatttccctagagattatgctcataagggtttagcaggtaaaagtattgattttcatattaagcttaacagtattaaaacatctattcttccagagctagatgctgactttgctaaaaaagctggatatgaagatatagataaactcagagaggctgcaaaagtacagcttgagattaagaaaaagcaaaatgctaaatcaaatgcaatgaagaagcttataaatggtctattagaacaagttacatttgatgttcctgaaacaatgctagaaacaagaattgaacgaatattaggagatcataatattcgttcacaacaaacggtgcaggttcaaactggtgaggaacggtcagaatcagaagaagagttatataataatgcaaaagtggaagcattagctgttcttcgtcctcaaatttttcttatggctttggcggaaaaagagaaacttgttgttatggagcaagaggtagaaagagctttgtataatatggctattcgtgctagacaagactataataaatttcgtgacgcatattaccgtagtggtttagtttatgagttacaagatcatctccttgcagaaaaggcaatggaacttatatataataaagcaaatgtagtagaagtagagcagtagaaatttttgaggattttatcccatgtctttactagaagataactagttaaacaagataaagtcatttaactgacagagttatatactttattagttaattcttatgatatctattatttattaactaatttattatcctaagtatggagatccttaatggatgatatttttaatatgacagtccctattgttgttgaaaataacggaagaaatgaaagagcttatgatatttactcaagactactaaaagatcgtattgttcttcttggtacagaagtaaatgatcaagtagcatcccttatttgtgcacaacttttatttttagagtcacaggatccagaaaaagaaatttatttatatattaatagccctggaggttcagtaactgcaggtctcgcaatatatgatactatgaactatattacaccaaatgtagcaacggtttgtatggggcgtgccgcaagtatgggtgctttgttattagctgctggtgaaaaaaatatgcgttatgccttacctaatagccaggtaatgattcatcagccattaggcggttaccaaggacaagctacagatattgatatccatgccagagaaattttacgtatgcgtcaacggttaaatgaaattttgatggagcagacaggacagtcacttgaaaaggttgcacaagatactgagcgtgactattttatgacggcagaagatgctaaagcttatggacttattgataaagtcttggtttcccgaaaagatttagatatagagcatgaaaaaacagaataagttatatagtttcctttttgttttagaatgttatggaaagtactaatataagttatggctaattcaattaaggtgcataggatttttgaaggtttagtaataattatatctaactattcatccacccttgttttttattagtccttttattaagtatgatttttgcactaactaatgctaactatagcctataaaacccatctgatagattaactaacatatcctcttaagaaagattattgttttgtttaattttgatatggtaaggaataagcatgagtagaaatgatgaaaaaaatcctcaattattgtgttccttttgtgggaaaggggagtatgaagtaaagcagttgatagcaggagatggcgttcatatttgtgatgcttgtattgcttcatgtaacgaaattcttgttcgtcaggagttagaaacagtagaagagcaactactcacaccccaagaaataaaggaaaggcttgatgagtatgttataggacaggaagaggctaaaaaaattttagcagtagctgttcataatcactataaacgtgttttctatgcagaaaaaatatcttcagagcatggagatgttgaattagaaaagagtaatgttcttttagttggaccatcaggaagtgggaaaacacttttagcaaagacactagctaaaattctacgtgtaccttttgcaatagctgatgcaacaacattaacagaggctggatatgtcggggaggatgtggaaaatattcttgtccaacttcttcagaatgcagactatgatcttgatactgcaagtaaagggatcatttatattgatgaaatagataaaatttctcgtagaagtgatggtccttctataacaagagatgtttctggagagggtgtgcaacaggctctccttaagattattgaaggtacagaagcaaatatcccacctaaaggtggacgtaaacatccacaacaagaatttattcgtatgaatacatcaaatattttatttattgtgggtggagcatttattgggcttgataaaattgtagagcaaagaattcgtggtggttccatggggtttggggctaaagtttctggtaaaaaagagcgtcctcttggacaactacttgaacaggtacatccaaatgatcttgttcagtttggacttatcccagagtttgtaggtcgtatccctgtattaacgcatgttgatgatttaagcgaagaagatcttgttagagtgttagttgaacctaaaaatgctttgacacgtcaatatcagaaattgtttgagttagacaatgtaacattaaggtttacatcagatgccttaaaagctattgcgcataaagcaattgaacgtaaaacaggtgctcgtggattacgtaatgttatggagtcaattatgcttgatattatgtataaacttccttctatggttggggtgaaagagtgtgttattaatgatgttgtgataaatactaatggtgagccattgtatatttatgattcagaagtacaagtagctctataattggaagaaaagattaaggtaaataaaattagttagttataaataggtatagctagagaaagtttatgtctgtaaaaggagcttttcatgcatacattaggagatgagcataaacaaactttagatgatgagtatgttgaactgccccttatgccattgcgtgaagtggttatgtttccccactctattattccattgtttgttggtcgagaggcatctataaaagcaatagagcatgctgtaactaattatgatagaaaaatttgtttggtagtacagcgtgaaccagaagtagagaagccttctcttgaaagtttatatcctattggagttgtaagtagaattttacagtttttacgtcttcctgatggcacaataaaagttctttttgaaggtttatatcgagtacattgggaacacttagactctgagaaaagtattgaaagttttcataaagttatggtgaaagctgtcaaagaatctacagcttcttttctagaaagtgaagcacttgttcgtgccacccatgaagccttagaggaatacacaaaaaataataaaaagattactcaagaagcattagctgccatttcaggtttacgtgatcctggaagacttgctgatgctataatgcctcatttaaaagtagactacattgagaaacagtctgttttagaacaattagatcctgttgctcgtcttgaaaaagtatatgagctattgagtggagaaattacagttagtacaattgaacggagaattaaaagccgtgtgaaaactcaaatggagagaaatcatagagaatactatttgagtgaacaaataaaggcaattcaaaaagagatggggcgagatgatgatcctcaagctgaattagctgatttagaaaaaaaactttttgaaaaaaatatgcctgaatatgcaagagaaaaaggtttaagtgagttaaaaaaacttaaacatatgtccccttctgcagcagagtatgcagttgtccgtaattatgtagattgggtttatgagcttccatggaatgaagtgaaagaaacagagattgatatttcaaatgctagacaaatacttgatagggatcactatggtctagaaaaaccaaaacaacgtattttagaataccttgctgtacaaaaacttacaggttcttgtaaagggactattttgtgtcttgttggtcccccaggagtaggaaaaacatctttagcacgctctgtagctaaggctacagagcgtgagtatgtcaggttgtcccttggaggtgttcgtgatgaggctgagatccgtgggcatcgtcgtacctatgttggtgctatgccaggtaaacttatcactgctctaaagagggttaagtataataatccattattttgtcttgatgaaatagataaaatgagtgcagactttagaggagatcctgcttctgctttattagaagtgcttgatcctgaacaaaatagtacatttaatgatcactatcttgatttagactatgatctttctcagattttttttattactactgcaaattcacttcaagggattcctgctccactaaaagatcgtatggaaattatagaactttctagttaccttgaagtagaaaagaaacatattgttaaagattttcttttgcctcgacaggttataaaacatggattaaaacctgaaaatatacgtatttctgaaaatgcattaacagaggttattcgttcttatacaagagaggctggagtacgtaatctagaacgtgaaattgctgctctttgtcgtaaggttgctataaaacttgttgaaaagaatgatatggataagactatttctattacacgacaaaacttaggttcacttcttggtgtgaaaaaatatcgtataaatgagagtgaaaaaacgcctaaaattggtgttgttaatggattagcttatacaagtgtaggtggtgtattacttaatgttgaatcagtaattatgccaggtaaaggaaatgtctctacaacaggaaagttgggagaagtaatgatagagtctgcacgtgcagcactttcatatgtacgttcccgttctgatatgtttggattaagaccagatttccatagtgaagtagatattcatatccacttcccagaaggagctactcctaaggatggtccttctgctgggatagctatcacaacttctcttgtatctgcattattagggattcctgttcggcatgatgttgcaatgacaggagaagtgactttacggggacgtgttttacctattggaggattgcgagaaaagttgttagctgctagtcgtgcagaggttactactgtaattgttcctcgtgaaaatgaaaaagatttaaaagaagttccagaagaaattctcaaagctttacatattcagtttgtagaacatatagatgaagtcctacccttggctttaatttctgaatcagaagatattttttcagaaatacatactgatgagccatttactacttctttacgacgacatactgtagaaataactacagcacaataataactataataaaatatagctatcttaacttgttgcccagtatcctatactaataagtttcccatcttgaggggtccattcaccacaagattcaaaatatttcataacctgttgacactcaatagggatataagagtcagggaatgatgtatagtattgtttgaaaaagtaggcaagatcttcaaataattcgagccaatgcccttcatcacatagaggtaaattatttaatgtatggaagaaatgttgtttaaaaggacaattttttgggatagttttatccattggctctgctaattttatgagttgttgtataccagagcaaacaagttttcctaatgatgtattatcatcaaggaccctaagtacattaagagcctggctcattgtagtgattttttctttaaacatataataccttataaaaaatatttgatatttgatataggttatatgaataccttttaacttctgtcaacctgctaatttgatagtctatctatttttattaacttactattatttttttactaatttattataataggtttattgtgatccatgctaaattcaagtcaatgtctgactataaaaaataaagtttattaaagaagatgagcaataaaaaataaatatactaaaaagatagcagtgttattataattttttttattgttgggaggaaagtttctatttttctagaattggaatatatacatatagtcttagaagctaaatgattttatttatgcagctaatatttaaatacattatactttacccaataataaaaaaaggctatttagttttgtagagtcataaaaattttttgatagaggtgcaccatgggagaaaataaaacacatggtatccttatcttaccatttattttaagtatattaggtatccttttctgtttttggaacttattagctccatctactgtaccatgtatatcttctggctgtaatctataccaaggtggtgaatttggtggattaacattttggtggtttggtattttgggatttggacttcttgctatattagcagtaattgggagggctaaattaggattatttattgctggagttggattatgtattgatattatcttatttataactatggtaatgacacttccttgtatggcatgtatgtttgttgggttattacttgctttaacattttatttttttaggaaaagagtttttttagctgagtcagattcagaagatgtagaaaataatcgttctttaatattaatatgttggtggtttttctttttattaaatataattctagtgattaagggtgcagtccccccatgggctttacctgttggagataccagttcttcatcatctgttgcgatatatttttcaccttcatgtacggcatgtcaaaagcttataatgaatttagcagagtctgaagttcaaaaaagttcatggtatcctgtggcagaaaagtccagtgatattgcagtgattgctaaacttgaacagcttcttaaaagtaaaaaatttacactagcagaagctttttctttatctatctcaactcagccactcactacattagaaaagttatctcccaaccatgtattgttacagttaaagttgtggattaatagatctcatgttttaaaagatggagatgggcgtatgcctttattagagtttaggggtacaccagctatgttgctttctagcattaagacaaatcatttgcctgtagtaggtaaagatgatgatatgctttctttggagtttgataaagtaggaatatgtggtgagggtgatgcacctaattctcaatcatgtactgaataattattactatcggataccaatccacttatgtgattgtaatcctagtttccaataggggtgtttcatacagtactcaatacatatttgtatattattacttaagtttttgtcatctttaggttgtaaaatgaaattatcaaactcaagggttaaatatttttcagggtcacagttttgttgaggccaaacaagtttaagttcattccctacagtggttactaactcattcccctctttaggactgactgtaatccaatcaatgtgttttggtaaaggaattgttccatttgtttctatagctatttcaatatggtatttatgtagtaggtttataataacttgatttagctgtaatgatggttctccaccagtaaaaacaacatatggtttatagctaggatgggtatagttgttttgaggaaatgtttgaagaatattagctactaattgttcttcagaatctaagataccaaaatcagcgtttaaaaagtctgtatcacagaattgacattttgctattgctctatctttttcttttccagaccataaattacatccagaaaaacgacaaaatacagcaggtcgacctgtttgtactccctcaccttgaatggtataaaaaagttctttgatataaaatgacatttattatttttgcctattcaagtaattagttatgtagtgagattaatattaattagctctttttttcattaaaaatgtttcccatccattttttcgaagtttgcaagctggacatgtaccacatccatatccccactcatgagatgtagtatgatcattaagatagcatgagtgcgtctcattacgtataagatctacaaatttagagccacctaaatgtagggcaagttcccatgtttgtgcttttgtaagccacattaaaggggtatgtattgttatatcttcccctagtcctagacttaaagccagttgggttgcttttatactgttatcttggcagtctgggtaaccagaaaagtcagtttcacaggtacctattatgagatggcgtatactatttctccatgcaaatgctgctgctattgtgaggaagaaaatatttcttcctggtacaaaagtatttggaaggccttgtttgtcaaaaacaatttccaactctgatgttatagctgtctcacctagttgagaaaaaatatcaagagaaaaaatatagtcttcacccagtcgttgttcccagatttttgacagttttgatattttattccgtatattagtgcgacattgcatttcaacactatgtcgctgtccataactaaaaccaatagtaatgatatggctaaagttagaaagcgcccatccaagacaagttccagaatcttgtcctccagaaaaaagaagtaacgctttttgatttagatgatacatattaattatagtatgagcttatattgataattagttttgttaagattgtttttttaagagcataattatatataattattataatgatgtgaagagatgttatttttcttttttaactataaggttattaaaatagcaagattaaaataagaggttttttatggatcaggatgcttgtactcatagtgctgctcttatcttagctgcaggtaaaggaacccgtatgtgttctaataaaccaaaagttcttcatacactattaggagaaccactattattccatgttatttcagcactaagaccactatttggaagtaatatttgggtagtcattggccatggttcatctcttatacagtctatatgtagtgacctatcgttaaattttatttatcaagaaaaacagcttggtacggctaatgctgtgtcaatagctctaccggtattacaacagtcaagaattaaacgacttatggtaataaatggagatatgccacttattacatcagatttacttgaatgtatcataaaaaaatctgataagacagactttgtgtttgcaaccttaaaacttcctttacctaatgattatggtcgaattctaagaagagaagggaaaatttattccattattgaggcaaaagatattgagccttcattacaacatgatactactgtagaagttaatgcaggactctattatttttctttagaagttgtagataaatgtttacctatgattaaaaatgaaaataaaagtcaagaatattactttacagacataatagaactggcagtagaaaatggttatctagttgattctatttattttgaggaagattggcattttttaggagttaatactccaaaagatttgtcgtatgtggagtcaattcagcaagcttttattatagaaaagctattacaatctggtgttattattcattctcctgaaagtgtccgtattagtccttttgcaactattgaacctggtgtagaaatttatggtccctgtgaaatttacggtgcttcatatatagcctctggatccattatttattcacatagttggataaaaaatactacaatatcacatgatgtatgtatttactctttttgtcacttagatacagttattataaaagataagtgttctataggtccttatgcgagattaaggccaggttgtcatttagaggagcaagtttgtataggaaattttgttgaaatcaaaaaaacacaattaggaaagcatgtaaaaataaatcacttaagctatattggggatgctattgttggtgatgaaagtaatattggtgctgggacaataacatgtaattatgatggagaaaacaaacatcatacgtttataggtaaaaaagcttttataggaagtaatacagctcttgttgcacctttgactattggagaaaaatcattaattggtgctggatctgtgattattagagacgttcctgaaaatatggtttctatagctagaggaaaacagaaaaatttttctaagcggaagtagttttatttggtaatatgatgagatagataatgtatttgtataagtatctcatagaatatagtattgctatcttttaggaaaggacatagaataattttatggaactttttgatcttttagaacagcgagtgatggatttatataaggaaattcttcttctccgagaggaaaataacatgttaaaggtaacctctgttggtcttgctgagatgagagaagagaatcgtgtacttaaagaagcattagaaagagagcagagtattcatgagcagatccataagcgtattgataacttgcttgcaacaatacatgaaactaacataccatcctagtggtagtgtaaaccataatgcataattttcaattcaatgtccttggtgtggacatctcttttaaagctcaagcagatcctgagcgaattgagcaagcaagagcttttatagaagagcagtatgaaaggttaaaaaattgtggaggacagcttagcagagataaactgctagtgcttttggttttaggtgtagtagatgacttattgcaatcacagcaacagttagatgagcttgaaagccgtttttcatcattgctgaaatgtatagaagagataggttagtttaaagcttaaatattatgttgataagatataatatgtgttgataagcctaagaaattacctggggcgtttgtggacttgtatgatgctaacctcacaagtaaaaaaatggaattactattatgttaacaggtgtgtttactccatgtgagtatacctaaacgttagctaatagttcccacctggttttattcaggttctgaatctgcatgtatacggcgtccttgggtactatttatataagataaattaacctgttattaggtttaataagttatacataactccttaccataagtccttttattatttgctttggcttagagcttatttgtttcgacattattgggggaggagttatgtcgtttatacttgttctctgtacagtaagttctctttttgttggaggaggtacagggatttttctttataaaaaagtgagtaaaaaatatattggggatgcaaaagaattagctatacgtatagttgaagaggccagaaaagaagggcaagcacaaaaaaaagaaattttgctccagggacaaaatgaaatttttaatcaaaaaaaagaatttgagtttgattttaaacaaagggagaaggagcttagtataaaagacaaaaagcttcaggtccaaagcgaaagattagaagaacgtcttgaaagagctgcagaaaaagagcatgaaattttaaaagtagaaaaagagctttctattaaagaacgtaatcttttaactcttgaagagcagctaaaaagtcgtatagatgaacaagaaaaacagcttcaaaaaatttccggattaactgtagaagaggcaaaacaatctctatttgaagaggtaaaaaaccgttctcgccatgagtcagcaaaaatgatgcgacttattgaagcagaagctgttgaaactgctaatcgtaaagcaaaagaaattattgcaaatgctatacagcgctatgctggtgattatgtttctgaacatacagtaactgcagttacactccccagtgaagatatgaaaggccgcattattggtcgtgaggggagaaatattcgtgcattagagtctgcaactggtgttgactttattattgatgatactccagaaactgttgttttatctgcttatagtcctatgcgtcgtcaagtagctaaaatggcacttgaacgtcttattcaagatggacgtattcacccagcacgtattgaagaaattgttcggaaatgtgaggaagatcttgcaattcaagttcgggaaataggcgagcaagctacatttgatattggtgtttatggtattcatcctgagcttatacgtattttaggccagttgaactatcgtactagttatacgcaaaatgtgttacgtcattctatagaagttgcatcattatgtggtatgatggctgcagaacttggtgttgatatcaaaaaggcaaagagagcaggtttactccatgatataggaaaagctgttgatcatgaagtagaaggttctcatgctattattggtgctgagttagcaaaaaaattcaatgaaactgaagagattgttcatgcaattgaagcacaccatgaagagaaagggaaaccagaaactgcccttgctattcttgttcaagcttcagactgtctttctggtgcaaggcctggcgcacgactagagcttcttgaaagctatgttaaacgtttagagcatcttgaaaatattgcaggtgaatttgaaggggtatctaaagcgtatgctattcaagcaggacgagaggtccgtgtaatggttgatgcagattccataggtgatgatcaaacataccttttgtgtaaagatattgctggaagaattgaagaaagtttaacatacccaggtcaaattagagttacggtaattcgagaacatcgtgctgttgggtatgcaaaataactgagatatatagtttgttaatatttatagagagcgttattacaaactaggtagttaattagatgtaacttatcttgttaaaatgagatgtagaacattaatgcgtattgctactattattttacactatgggaatccaaagcttacagaaaaagtatatagagcactttgtgaaaaaacttcacaaagtgatattgtagaatcttctatctttgtttttgataatgcatctcaagtaccatatcctaatgcatggaagcgtagtagttcaaatttgtattgggctggtgctctatcttattgttttcttcttgtaaaagaaatggggtttacacatttatggtttcttaataatgatattacatttatagggaatggctcatatttagcaaaagcgtatgcttctattcaacgtatagagagagcaacaggaaagttagttggtatatggagtccatctttaatgtataatagctatcatccacaaatgtgcaataggaaagatttttcttatagtcaagtgaagctgatagatggtgtagctgcactatacaaccttacatgtcttgattctataggtggcatagatgcgttggataacttatatggatatggcgtagatttatggatatctatacgttctgatagaaaagggtggcttcttgtagtagatcactctatggttatacgtcatattcaacatggctccgccaaaaatattaagggctttatagagactgctgctttttctgaagaagttttttttagaaagaggttaggaatagagtggaaacagcaaattgaaagtatgaaagaacaatattcatcatttactttttgataataaatattttttagtttactttaaagattattgattaatataggaataagtatagttattcactaactagttgtaatatctttagtcctagtgaataataatgtatttcattgtgagcattcccatggctgcattcattatgctaataagaaataataccttatagtgtgaaggttctatcccggctactgcaagaatacgtcccatatattggagctgtccacccattagaaatatcccaggaataagtatactaatatgggtgctattaaggataccttcagtgcagagactagccgctacgccaacacctcccacagctgaaagccatgaagtaagcaagactgtcatagcttcaccaggtaaactaaatattgacataataggggcaaatagttctccaataatttttagtaaccctattatatttaatgcttgtataagtacaaaagccataatgacgtttggcaggagattcatggttcccatttgccagcctttacgtaatccagctataaagacatcattaatattttgtttaaccatgggtttgctctatagtaacatttttttgtgtaactagtataaggtaaagacgtatgacgttcattcccaccactttatagaaaagtataacacacaggggaataataatttttacagaaagaaatgggaataaggctaaacctgtagtaagataatttgtgactgctgctcctgcagaaaattgaaaagcaccaaatattgttctttcattattagaaataaagcctttatcatacagctctcgagtcattacactagcagaatcagagctgtgtagactgctaataagtgcaagccctgaaatcccaggtaatccaaacaaaggtttcattaatggcgttaataagtgttgtgcagcatatagtgcaccaaggtgttcagcaagttctacaatcccaagtgctaacataatcccagggataagagaaagactgaataaaaatccctgacaagctccagaaccacctagtcctacaaatgtagtaggtgttgagtctcctattgttccaaacttaccaatgaatctactgaagtccatgataccaagccagttttgaaattttgagaaatatccagaaaaaaagaggataacaagtataagtataatatatgaacttatttttatttttttactttggtcaatttggggtatatgggtattcttttccattgttatttttgccccttattataagtttggttgtattatcaaaatataatatttttatttactattaaattgttgtgaaaaaattttatatgctagttctttagctttagctctatttactttatctgtatcggtttttggtaatttttgaacctgaatgacatgtttagggcaccagtataaaggtaggttggctttacaaatagctaagtaatcacatacttttttttctacaaggataacaacaagttctccgaatttatgatcaggaatagaggttattataaaaggttgtaatataaatttttttagtagattttctactagttcaatttgtatttttattcctccactattgattatattatcttttcgtccaattattcggaaattaccacattcatttacttcagcaatatcatttgtaacaagtggttttttacatatgtttggagcagttataacaagtgttccttctggtgataatgagacttttatactcttaaagggtgtataccactcagaagcatttactccattgagtttcctaagggcaatatgtgaaagtgtttctgtcatcccatacgttgaccaaacagcatgagggaaatctgctaatttttttgatagtgatgtatcaatagatcctccaccaataataagatgtttgatattttttagatatgttgtgtcttttttatattcaagtgttgtacagacttgcataggggtcatagcagcgaaagtaggtgaactttttatttgtttaagaggtctacttgatggtgtaacatagagtaagttaagtccagcaagtaaggagcgaactacaaccatttttgcaccaatatactttagaggcatgcatagtaaagcagtatcgttaggctttaatcctaaaaatgaacatgttaaataagcactttgtagcatacaagttttttttacatggagagtttttggcttccctgtagagccagatgtagatacttgaattgtgattgactgattaaaccattccttaagaaattgaaaaagttcactttgaattttttcattcttgttgttttttaatatatttgttttagaaaatttttccccattgataaggatagattgtctttctatattaaattcaaacatatgtttatctttaatttgagaaatatcttactaagatcgtgtaaaggtattattactagctagtggggattaatttaataatattttgtgtggttatattaaggtaatttggggtattgcttaaagttaggtttacgtttttctaagaaagcattactaccttcttgtgcttcatctgttagatagtaaagcatagtcgcatcaccagcaagttcttgaattccaatttgtccatcaagctcagcatttagaccagctttaatcattcttaatgctaatgggctatgttgcattattatttctgaccatgctacggtttctttttcaagatcttttagtggtacaaccttatttacaagacccatcgtaagagcttcctgtgcagtatattgacggcataaaaaccaaatttctcgtacttttttttgtcctacaatacgtgctagatatgatgagccaagtccagcatcaaagctccccacacgaggtcctgtttgaccaaatattgcattttcagatgcaattgttagatcacatacaatatgtaatacatgcccccctcctattgcataaccattaaccatagcaataactggtttaggtagaaagcgaatttgtttctgtacatctaatatgttaaggcgtgggacaccattttcatcaatatatccaccacgacctttaacattcatatctcctccgctacagaaggctttatcacctgaacctgttattataacaacagcaatatcttggcattctcggcaatataataatgcattactgatttcaaatgttgttgtaggagtgaatgcattacgataacgctctctatttatagttatttttgctattcctttgtaatattggaataaaatttctttatatgttgtaatggattcccatgcataatttgacatataattatactaacctttatttgagttactttttataatatggtttacaacacgtgctgttgaaactatctcttcttcctcatttacaatatctatatgccatagatgtgtggtatttcctttatgtataatttgtcctttccctttaacaagtttaccaataggaacatttttaatatggttcccactaacttgaattccacatgggaattcattttcaagacataataaatatgagccatgacctgcaatactttctgctaatgcaagggatgcacctccacttaagtaaccaaatggttgagatgtatgatttgtcacaggcatagaggcaatcactgtacctagtttactctcatggaataggataccaagatgtccaataagagaatttttgtatttagtattgtatgttattatgttatgttgttgagagtttttcataggtatattgggagaggataaaatattttaataagttagctaataatagagctgggctatatagagttattataatatactgttaatattattaggtctagtttttcaataactgaaaaattttttatttggaaataagttttaatatagtaaaaagcctctacagttaaaactgtaaaggcttaagattttctggagccagcatggagagttgaactccagacctgctgattacgaatcagctgctctaccaactgagctatgctggcaagtatatataatgccctaaggctacatatcttgccactaactgcaagtcaagcaataggaaattagtattatgtactattttatattattttttcattacttttttcatattatctatagtcatatctttatctgtaaggtattgtccatcaggaagaagtgtaacatcccctgccttatctaatggtaacccaatccaactagattcattcccatttttatctgttacagtaatatcccatgcttcagcattttctgttctactgatttcaaccattgctttatcaccatttttaagggtctcttcttgtaaaagattttcttcccattgattagcatttgttggggaaacttttaatgtataaatgtccatttgggagccattcatgatatcaagctttttattaagagcgaaaactgattctgcagcagataaaacacatacaatagaaagtactataactaaacgtttcataattcctttctccttttgtgtttaggggaaataacttctccttaatactaatggcttttaacataatacaagtgtattactagtaactctgctagacttttactataagcatttgaaaagaagaggctatagctgttataataaatataacagtaaatttggattataattatttataagttatgttatagttgttataaatcatattagatctatgtattgctttgactaaataaagtgattatattatttatacctagtcttaatttatatctatagagatacaaatgaactgactcagtatagttgagtgggtgcatttttggaggttaaaatggagattcttcgtgatggtaccaaaggagttgcatcctctgttacttctatatttatgagatatgtttattggtggatgaccataggcttgttagtgacagcaggatcagctttttatgttgcaaactcaccagctttacttcaaacattattcagtaatacgttaagccttgttattcttgctatagctgttattgctcttcctcttgttttaagtactatgatctcacgtttatcttctactgcagcaacattgttatttattttatatagcttgttaatgggggcttttttatcctctgttttagttgtttatacaggaacatctgttgtacaagcttttgttacaactgcaggaacttttgctgcaatgagtatttatggtacagtaactaagcgtgacttaacaagtatgggaagttttttgactatggggttaattggtttaattatagctatggttgttaatatatttttaaaaagtccaatgatggaatttattattagtgccattggtgtattgatttttacaggtcttacagcctatgatacacaaaaaattcgtacatttggtgagaatgcccctttaaatgattctttagctatacgacgtggggctcttttaggagctttaacactttatcttgattttattaatttatttttaatgatgttaagacttatgggcgatcgtcgctaatatttttataatttttatttatgtaaggcttttattaagaataataaaagccttatttttagttagataaacctataaaagagaaaaagtaaaaaaaagcaatacctataatcgctgatgcagggattgtaatcatccatgctttcacaagagttattgctacaaaccaccgaaccgcagaaagtcttttagtagaaccaacaccaaagatacaagctgtaatagtatgggtagtacttataggagcacctaatattgatgcaattgtaatcaccgctgatgcagatgtttctgcagcaaacccatgtactggttctaatttaaagatgctattacccatagtttttattattttccatccaccaacagctgtaccagcagccattgctatagcacagactacttttacccagaatggtactgtaatagattcaattttattaaaaataaagagggcaagagtaataacacccatagttttttgagcatcatttaaagcatggcttgtagccataaaggcagcagaaagaatttgtagatgtgtaaattttttagtgagttttttcctatgagttttggcaaataggaaactaagaagagtcataaagctaaatccagtaaaaaaacctaagagaggtgcaaggaataagggtaaaataatcttttgtaagatggataagatattaagactagtaaagccagcagatatgatagaagatccaataagtccaccaataagtgcatgagaagaagatgatggaataccatagtaccatgtaataaaattccaagttattgcaccagatagtgctgcaagaactagtatttgatttccagatacaacttctgtgttaacaattccttttcctaatgttgaggcaacctctgtgcctaaaaatgctccaagaaggtttaaaacagctgccattaatacagctgtctgtggtgtaagagcttttgtagatataacagttgcaatggcattagcacaatcatgtgcaccattggtaaaatcaaaaattaatgctattattataataaggataagaaggaggggaatttcaaacatatttaatcatcgttttttctaatatatcagcgagattcaatgtttgttccatagctagagctaatttatcataatattttgataaaataaaaagttctttagtagtactaatgtcagtaaagttaaaatcttgtattttttttaaccccattactagaaggattgctccattttcttttttttctctaatttctcgaagattggaactaatatctgtttttttaggaagttcttttatcatacttagaatatcatctatcatattttgctcgttagcaattagtaattctagagaagatggaatagaattaggtattctgcaataaaaaaatagtgttcctaattcataacaggtacaagataaatatagttgtcctaagttaatagcatgaatatcttctttatctattggtgtgataaatgttcgagagaggtgttctgtaatagtattatagagttgacttatttcttcttttgtattttgaagtgtttgtatttctatggggtgattgttttttgcttgttcattaattattataagttggtgaatttgcttttgtagaatagtgccttgtttagcaagtaattcaaaaaatggaactgattggggcataaatcgtgccaacattaaaagctcctttgatttaaaaaagcactaataagagagtagagatatattgtaaatgctattctgttatattctttaaatggtctaaatagaagattcattagttattttttgaaatagatactattttaattgttatttttttattgtattaagaattaataaataaagagtaattacatttggttcttgattctactttgcttttttataaataattaaaagatagtataggtacatgacttattacctataattcagaagaagcaatttatatttataaaatgctagtagtattataaattaactataataattttgatccattaacttactatttattataccctatcattatattctatcaatagtaacaagtataaaattcccctaggtagttaaaagcagtatgataaaaataaactgtaattgctttacgcactccttcactataaatttaataaggaaattttagtaaacttaattaaacttctattataaagaatttgtatatcagtatgttatttttttgtcgagtatagagcctatatttttttgattaaaacattaatatatctatttatagttatatgaatagttttattaataactatagaaagtttttagagtaattagtattactaatttcttatagatagatgttagtgatgacgaataatagggtgattagacttttttgataaacgtagtattatggcagcaactataataatagcaaaaacaatgatgacttcccacattttttatcccctttgcaacatagttgtgttaggttttattattactgtgctaaatcattatttgttctttttatgaactcattgttttaagttactaaataattgttccaagtcatttatttaggtttgaatattgtgtagatatgttaacatatttgctctgtccattatgggatatccatctgcaataagtgatccttgtttgttttttctatatgaaatagaattattattattattattatttatgatataagatattatttatatagtgaacgttaacagcagcaacagaatatcttttagcagataagtagtataattattgataataatgaataatttttatggagtttagaaggaagaatttttagataagaagttttacataaccttgtttaaaaacttacttgaatagtcgttatatagttagctatttccatgagttaaaaatagaaattttgacataaatttttgacaggttgttttagtaaatagaagatttattaattggcatattagtgtaagttcatctttttttattaaaatttttattgatttattagtagctaattttgaacgatagtcgttatattattactttttgagttaaatgagtaagtaatagtgggagcaaacaatttcttttttatagtttcagaggtaaccttagttcgtttagatcaatttttatataataatttatgtacacatggagtttctcgtgaaagattaaaaaaagttattgtatcaggaggttgtaagattgatgataaggtatgcttttctccaagtacacgattaaaagtaggaatgcatatttttattcagctacctgaagttgtttcagcattgctcccggaggaaggatttttagagattcttttttctgatgaacatcttgctataataaataaacctcccggattaacagtgcatcctgcaccaagctgtcaagagtcaacgttggttcatagattgttaaagtatttcccaaagcttatagagcaaggtggcctacgtccagggattgtacatagaattgataaagacacaagtggacttctttgtattgctttaacggaagacacacgtttaaagctctcaaaaatttttttagatagaaagattaataaagaatacttagcgttagtccatggtgttccttctatggagggatatatagcagtaccacttggaagagatccaaaaacaaaagtaaaggttgctgttaacccaaaagggaaaccagctcatacagaatggcgtgttttgcatagaggtaaaaatgatgtttattcaatattagcattgacaattcaaacgggaagaacacaccaaattcgtgtacatatgaagcatattggtcatcctttagttggagataaactttatgctggaggacatgttaataagacttttcaatgtaacagacagatgttgcatgcttggaaattgagttttgagcaccccattacaggcaaaaaaatgaattttttatgtcctcccccaaaagattttttagatacagtatcacttttagaacaagaacctatacggattgttattactggagtcgccgggtctggaaaaacaacagtattaaaatattttgaacaacatagtgatattattatatggagtgctgataaagctgtagaaaaactttattctccaggaggagaggtttggagtattcttcaagaaagatatggagatagatttgtcccagataaaaatcgttctgtggataaattaaggttgttatctgccctaaatggagaaacagaaccgcttttagatataagagatttaaactatatagtacatcccattatgttagaacagttgtcaaaattttggggggaagcgttttataaaaaatataaatatgctatagcagaggttccactatggtttgaagtcgatcatatcattagtcaattagtaaaagaaaatagagtttcatccaatattagacccaattttgttataggtgtttcttgtcctgagaatattagagaaaaacgtttaaaggaggctcgttgctggtcaactgcacataaaactactattgataattggcaatttcatcaagatatgaagcttaaactatgtgactatattgttgataattcaggttctgaagttcagttaaaaaataacatacaggatattatgatgctaatagaagcaaaggttacatcttttcaagatgactttcttcagtttttacagaaaattattacataattacacatacacacacacacacactctctctctctctctctctctctctctctctgtttcatgtgaaacatttttatttttactaacatatttttttttttttttttttttttttttttttttagttgtttgacatggtttactctgttgtttatgtataaattttatatagacaactattgtcctttgagaaatgaaagaaggttattatggctagggttattgctattgcaaatcaaaagggtggtgtggggaaaacaacaacagctattaatttagcagcatcacttgctattatggaaaaacgtgttttacttgtagactgtgatcctcaggcaaatacaacaagtggtttgggtttttctgttaatatgttgtcacatagtttatattctgtccttttccaaacaaaacctgttgagtgtgctattatgtctactgtttcttcatttctttttcttcttccctcagggacggagcttgttgcagcagagctggaattggtggataaaataggtcgagaatattatctttcagaattattagctccgctggagaaaaagtttgaatatataattcttgattgtccaccttctctaggacttattacgttaaatgctctttgtgcggcaaaagaaatccttgttcctctacagtgtgaattttttgcacttgaaggaattgtaaaactacttcagacacatgatcaggtgaaaaaaagattgaatcctaaactatcattattaggaattgttttaactatgtatgatggacgtaataaagtaacacgtcaggttcaacaagaagttatacgttgtttcccaaaccatatttgtgaaactgtaattcctagaaacattaggttatctgaagcccctagtcatgggaaatctattttacattacgatataaagtctaaaggggcagaagcataccttgaacttgcccgtgaaatagtaatgagaaaagtaaaaactgacgtactatcaatataaattttttcttttgtagtaagaagttttattgtattttgaagttcttttagtatattttaaccagttattaggaacgattatggcaactcaagaacgtggacttggtcgagggttagatatcctttttggtaatacttcacctgaagttgagcaagatcatataaaaaagcatagtaaagatggattagtgctaccttcaattacaaaacttcctatagctattttgcgtcctagttcaagtcaacctaggaaaagttttgataaaaatgccttggaagaacttgtattatcaatcaaaaaccaaggtgttgtccaacctattttagtaagaccgtatagagagcaatcatctattcgttatgaaattgttgcaggagaaaggcgttggcgtgctgccaagttagctgggcttgttgatgttcctgtttatattaaggagcttaatgatgaagatgtattaactatagccttaattgagaaccttcaaagagaggatcttaaccctattgaagaagcattggctatagagtcattaagaaaaaaattatctcttagtcaagatgagcttgcacataggcttgggagaagcagatctgctattgcaaataccttaaggttacttcatcttacacctgaagttcaagagggactttgtaatcataccatttcttctgggcatgctagagcactattagcattatctgatatggagttacagcaagtgctttataaagctatttgttgtaatcaactatctgtacgtgatgttgaaacatctgtcacatactggaaaaaaaatggagtactgccaccttctatcagtggtatcacaaaggatacagtaaaagttaagcaaaaagaaagatcagaacgtcttaaaaatgttgttaatacgttacgttttaacttacatcctaaagtaactatctcaggttcagagtgtatgggtagaattacaatcccttatgattcacaagagcagtttacaactattcttttaaagcttggaataaatgcttctgatacaattgacacataattactagttagatagttagacatcaattaatttataatctttttatttgtaacaagacaaccaatgttctttcttgttataactaatattaacaagctgataaaaggtataaagtatggttgatagccattctgcagtgatggtcaaatctgattttgtacgattattaaatgataagcctgttcttgtcgttggtgatataatgttagataattatcttattggtgtttcagatcgtatttctcctgaggcacctgtccctattgtaaaaatagagaatgaaaagcaatctcttgggggtgcagggaatgtagcaaggagtattgctgctctgggtggaaaggtaacgattattggggctgtaggacaagaccaaagtggagaaaaaattcaagatcttttaagtacaaggggaattttatcttcaattataacatttgcaaatcgtcaaacaacagtaaaaacacgtgtgatggctcacagacaacagatgatacgacttgatcatgaggaaagtacatcatataattctaaagaattagctatggtattaagtaattttgaaaaatatgtatctcaacatgagattattattttatcagattacaataagggtcttgtatcaaaagagtttatgcttggttttcaggatatactgttagctaagaatcctaatgcaaaagtattaatagatcctagaccatgtaacataatgtattatgcattatgtaaaaatatatttgctcttacacctaatacaaaagaaactggagaatgtgcaggtggtatggctacttctagtcagccagaattgttagctgcaggtcatactataatgaaacttctttctacaaagcatttgttaacaactcttggtgatagtggtatggcattgtttctttctcctaaaaagatatggcatattcctacagtaggccgtgatgtctttgatgttactggtgcaggagatacagtaattgctacatttggccttgcattaagtgcaggacttgatccacttatctctgcgatattagctaactatgctgctggcgttgttgttagtcaagtaggaactgcaacagtatctcctgatgagttagaagaagctattacatctttacctcaaccaaaattagctttttggaattaactattattcatatactgttagcaactttagatttttttgtatttagtattaattgatacataacaaaaaattcttttattatactattagaaactaattgtcctaatggtgtaagttttagataattactatctatttttataagttgttctttttctaatttgaaaattagatttttatagctatctataaagttattttttgctatagtattatattcattaatattaagtccttttgttgttcttaggcgtaacataaaaagttctagtacttgagttttattatcaatatattctttggggggttcctttttcttttctactaataaactccaaagagaaaggtctgctggatttgtccaacgatagtggtttagtgttgaagttgcagatggtccaacaccaagataatctttcccttcccaatatccattgttatgtttacattgatagccaggctgagcaaagtttgatatttcatattgtagtagtcctttttcttctaagtatgtttttgtttgaaaaaacattgttatttgttcttcttctgatgggagagtaagttttttattaacatattgtttattaaaaatagtccctggttctagagttaaattatagctagaaatatgatttggtttaagttcagcaacatattttattgtggttaaccatttttgtacagtttgattaggtagtccccatatgaggtcaatattaatatttgtacataatgcatctctaagcatattatatgattgtatagcatcaattatattatgtgtccttcctaaatgatgaagttgtttattgttaatagcttgaaaacctaaagaaactcgattaattccagccattaaatattctttaattaaagataaagtggttagggactcagggttagcttcaagagtgatttctatttttgatgttagtctgtagtattgagagatatgttctaatattttgtaaatatattggggtgagagtagacttggtgtccctccaccaaaaaaaatagtctctatcgttggtttttgaagtttattcccccagtatgaaagttcattttttaacgtaacaaaatatgtttgaagtttttgttgcccatctatacttgatgtgtctagaggtttagaaaaaaatgaacaataataacaacgagttttacagaaagggatatgtatataaagcagcatataattaattaaaagaataaattataggtataaagtggattagttaatttttataagataaaaaagttatgaatttttagtgataaaaatctttacattcaataatataagtattatttattattaatgtattatattatatattatcttgtactttccatatatcgtcaataataatttatatttttttgataaatagttttttattgtattatattctataaataaaaaaagaaatgtattacatataccttaatatagttttatccccttccctttaggggtatttttttttttagcctttatcgattttatatcgtttatactaggcatcctatgcaagaaaaaaatgtatttaattggctacataaagacttactggatattgatcagctttctcagacagatatctttaatatattaaatacagcaagtagcttagatgaaacaaatagtagagtaataaaaaaattaccaacattgcgtggtaaaaatattatactattttttgctgagccaagtaccagaacaaaagtttcttttgaaatcgcagggaaaagactctctgcagatactataggggttaatgcttcttcttcaagtattcaaaagggtgaaagtttaaaagatacagctttaaccttacaagcaatgtccccagatgttattgtattgcgtcattcaagtagtggtgctgcattgtttcttgcagatcttttagagtgtagtgtaataaatgctggggatggttggcatgcacatcctacccaagcacttcttgatgtattttcactatggaaagtttggggaaatcattttcatggtaaagaagttcttatagttggagatacagcacatagtagagtttgtcgttcaaacgttacattacttaatttaatgggggtaaaggttaggctatgttctcctagaacattacttccctcaggagtagaacattggcctgtagaaatatatacagatttgcatcaagctatttgtggtgtagatgctgtaatatgtctaagagtccaattagaaagacataaaaagagttttttccctagcatagaagagtatgcaaaacgtttttgtttaactccaaaacacttaatgtctgcaaaaactgaagcaaaagtgttacatcctggtccatttttacgaggtgttgatcttgcatcttctcttattgaaacccctcagtcattaatttttgatcaggtttctgctggtattgctatacgcatggctatattatttctttttttaacttgtaatgacttataaagagttaacttatgtcctccttgtttctatataatgcttattatgatggaaagcttgtatcattagaagttagagatggaaagattattacattaaaggagggagaacaaaatagtacttctagtccaatagatttacatcctgtagatgcaaaacagaaacatcttttccctagctttattgatgttcatactcatcttagggagccagggtatgaatggaaagaaactatagctacaggactagctgcagctgctcatggtggatttggaagtgtattatgtatggctaatacaaatcctgttaatgattcagctacagtaacatgtaaaatccttgaaagtgggaaatatgcatttcctaatggaccttatgtttatcctataggtgctgcaactatagggcttaaaggtgaacagctttctcctatgcatgaattagcagaagcaggttgtatagctatttcaaatgatggtcttcctataaagaatactgagctgtttcgaaggatattagagtatgcttcagatttaggacttattgtgattgatcattgtgaggatccttatttagcttgtgatacacatatgaatgaaggtttcattagtggtaagctcgggctaagtggacagccagatattgctgaaacattacaggctattagaagtattttgttagcagaatacctcaatgttcctgtgcatatagcacatgtttcagcaaagcggactgttgaagccataagttgggggaaatctcgaggggttaaagttacagctgaaacatgtccacattatttgttattagatgagagggctgtaatagggtataatacaaatgctaaggtcaatccaccgctgagaacacaagaagatattatggctttgagagaggctattaaaactggaataattgatatgttagctacagatcatgctcctcatgctgcttatgaaaaagaagttccttttgataaagctccaaatggttttacaggctttgatgtagctatccctgttatgtactctcttgttagagaaggcgtcctttctgagtctgatttgataagattgtggtctaacaatcctgctggtgtatttaatctacctataaataactttaagccaggagatcctgctaacttttttttatttgatccagagttagaatggactgtttctaaagaaaatctttattctaaaagttggaatacaccatggttaggtgaaacactaaagggtagagtcgttatgcattggattaatggggtaaaagttgtttagttagaaaaaattttataactaattagtgataggtagatatagtcaataatagttttatttatacatataactaattagaagtgaataaatctattgttattttattactgaacaattgtctccatgggtaaatattcttctatagggttaatcaatattcctacgttttcgatgcttgtttgaactatatccccatcactaataagtaatgaacctttaggtgttcctgttaagataaggtctccagggtttagtgtcataatgttggaaagaaaactaataagttccaatggtgggaatatcatatcagcagtagtgcttacctgccctagttcactattaatgctatttctaatttgaagattttctatattggggacatctgtttcaatccatggccctacagggcaaaatgtattatatgctttggcatgacttgtagtatattcttgctgttgaatgtcttttgctgttatatcattagcacatgtatatccaaaaatataattagatgctgcttcaggagtaactttatagcaagtttgtcctataactatacaaagttctgcctcagaaacaacgcggcctatatttgttggtaacaaaataggttgtccattaccaacaatactactaggtggcttgaaaaaaaacgtaggattagttggaattggttgttgtagctcttgagctttttcatgataattaatatcaatacaaataatttttgtgggagaaacaagaggtaacacttttatttttgatagtggaattggttcattaagtccaaggggactatgtaaacattgaatagtattttcagcgccaagagctgcatagaatgagaactcattatattgaacacggataattcgcataaaacatctcctagattggagcaacagctcatatacttacttgttgatatgtcaaattatttttttataagtgtggtataaaaaccttttttgtcaactctaagtatagcgcttgttagtaggttgaagtagtaattatttttattttatagcttttttgattgattatcagtcgttatattatagtatagtaatatttttatatttacttcttattaaagaaaaataactatgttgttaatgataatatctgggaagtaagtattaaaagtaacaatgaggttagaatgttacagcgtaattttcatataattacatttggttgtcaaatgaatacaaatgattctttttggcttagttgtagtcttcagaaaaaaggatttcaagaagtttcattagaggatgcttctattataattattaatacatgctctgttagggaaaaaccagaacaaaaggtctatagtatacttggtaaaattcgacatgccacaaaaaataatcctgactcatttgtagttatagcaggttgtgtagcccaacagttgggggcaacattttttgaaaaatttccacaagtacgacttgttagtgggagtgatggcattgctatggctcctgatgctattgaacgtctttatgctgagccagatctaaaattaaatcttacagatttttcagaatactatcctgaaagagaatatgcattttcaaagttaactctttcaaataacaacacgctagcattaatggcttatgtaaatattatgcaaggctgtgataattattgtacatattgtattgtaccctatactcgtggcaagcaaaagtcacgttcagtacaagctattgtagaagaatgtcaacagttaattgatagtggtgttaaagaaattgtgcttcttggacaaaatgtaaatgcttatggacttgataaggataagaattctcctgcaaatggagtaaactttgcaatgctagtccatactatagcaagtttacctgggcttgagagattacgtttttttagtgctcatcctaaagagttttcttctgaacttattgatctttttggagaattttcaactttatgtccaaggttacatctccctttgcaatcaggttcagataaaatacttagacgtatgggacgaaaatattctatggacgaatacatatctattattacaaagttaaaaaaagtacgtcctgatatagcgttatctactgattttattgtaggtttccccggggagacagaggaagattttttacaaacattacagtcaataaatactattaaatttatgtctagtttttctttttgttattctgatagacctgggacacgttcttctactttttctaataaagttgaccatgaggtaaaaattaagcgactagagcaacttcaagcaacccagctagaacattcaacaagttggctaaaaagtagagtaggggtagaaactacagtacttttagaaaaagttagtcgtaaaaaagcagaggataataatagttggcaaggtcgagatccatggggaaatgttgtaaatgttattttacctcaatctactaatataagtaatactcttcttcctgttcgtatcatagcatcaaaaaaacattcattggtagcagaacctttaattatttaatatggaaattagtctttaataagaccatatattattatgatatgttttttgcagttaggttataaagtaggaatagggtactaatatatttttatgtaactattcagtataagtagtatagctaatgtatttccactaattatagataaaacttatgattgattttcatattgaagtttcttgtctaggaaaagggttattaccatcagaagcattagcttttgcttctttttctggatttaattcagtaggtcttgttattaaatctgatgctattagttataagtatgagctaccattattaattaacacaatacaacagagtttattatatacagagttaaatgtatttcctggagtagtttttgctcatgtccctccagaattacttaaagacgttgtatgtagcgctcgagaactaggagcacagcttatattagcacaaggagagggtagttttttgggttattcattatcgactgcaataggaactaactttgcaataattaactctggaattgatatattgacatgtcctggattgatttcaagtgaagatgcagcatttgctacagagaaaggaatatctatagagttaacaggaggctatccctgtaatttgtttaatggacatatagtatctatgttttctttatttaattttaatctaacaatttcttgtggaattacaaaaaaaagttgtttttcttctccagagattacaagaaactttttccaaggaattgcctttggtgctggacttgataaaaaaagttttgattatattcattgtgagtcaagaaaaactgttcaaaggttattattaagcactaaataggacataactattttttgtaaaaggagtttaaacgttggatatactacttccctttgaaaaaagacgtgaacagttacataaggttatgtctgaaagaaaactggatggacttttagtatatcatgctgctaatagatactatttatcaggttttgaattacataatcctcaatgtaatgaaagtgcaggctgtttaattatattagctaatggtaaagactggttatgtacagactcaaggtacactgaggcagcaaaacgtctatgggatgaggatttcatatatagttatggacacaacattccagaacaacttggattacttataaataaaatattaccaaaaggtagctgtattggttttgagtcaaaagtactttcagtaaatttttttgaagcttttgttgaacaattacaagatattacacctgtaagtgctgatggtatagttgaagatttaagagtaataaaagacgaacaagaagttcgattaatggaacaatcgtgtttattaaaccatcaacttttaacctgggttccatcaatattgcgtcctggagagagtgaagcttctgtttcttgggaaatagaattattttttagaaaacatggtgcaaatgaattagctttcccaagtattgttgcatctggaggtaatgcagcattacctcatgctattccaagttcagatacacaaattgagagtgaagagttagtacttgtggatgttggtgctaggctatatgattattgttcggatcaaacacggacattttgggttggagataatccctctaaacgttttcagcaaacattagcattagtacaggaggcacagcatagagctattaaagctattcagcctggagtgttagcaaaagatgtgtataacacagtttatacattttttatagaatatggggtagaaaaagcttttaagcataatcttggacatggagttggtcttgaagtgcatgaagcaccctcattagggccacgtagtgaaacaatccttaaacctgggatggttattactgttgagccaggcttatattatcctgagtggggaggagtccgttgggagcatatggtgcttgttacagaagatggtgcaaaagtattttaaagtttgttttgagggaattataaatgcgtattgcgtttatcaacgctacaaagcgttggggtggtgtaaaaacatggatgttagaatttgctaaaattttttctaaaaaaggtcatcatgtttatatttatggtcgtcaagaagcgtttattacaagtgcacaaaaagaagttggccacggccaactagtttcatttggtttagatttaaatcctaaatctattttgtatttttggagagagtttcgattacatcaaattgatattgttattgttaatatagaaaaagatctgtccacagcaggcattgctgcaaagctttctggtattcctgtaatacaacggattggtttaccacatgatatcccttatcgtttaaaaacacgtcttatccatacatttattaacccttcatttttatgtccatgtgaatatattgcttctggatttaaaaaatcactttcttatatacctccacagcaggtaaaagttataatgaatggtagaaaggctacaagtgaatttttaaaagtacatagtcctcttaagtttatttgtacacaacagttagaacctaataagtgtcattctgttttattagaagcttttgcaagagttaaaggaagttttgaatttcatatatggggcacaggctctgaagagaaaacacttaagcagatggcttctgagctaggattaactggccaagtttttttccatggattttcagataatattattaataagctagaaaaaggagatatttttttgttagcttctgttagtgagggattgccaaatactcttattgaagccatgtctgttggattattacctattgtaagattggtaggtggcgtagatgaagttcttacaccagaacttcgtgattgggttttaccttatgaagcaagttcagaagattttcaaaaggttatttctatggctcttagtctttctgtagatgaattaacaggccttcgagagagtgcacgtgaagcatgtagacgtttttttgatatagatatacaagcaactaaacttgaagagtggttttatgaagttgtgaatagagaggtatagtcttttttgaaggtcatagttatttatcatgaaaatatttttctgtaattggcggggattagaatctaattcatctagacttcggtcagtactctttattttttttagtttgtcaattttattatttcctcttggacaagcattaagagttattctacctattctttgtttacctataattattttactttacatacaggattggaataactctacactccgtatattaccctttcgctggctatttattatttttatagcaagttttataatacaactagttacatctgagtggttagctgcaagttgggcttcagtaaaaccaaatttgttaagagggattgttttagcttttgtgggaatggaagttgtccgttcagagaaagatttgcgatggcttattattatttttgcggtaacatttttttatgaagggttagatggtgtatggcaggtcttaacaggatttgactatataaagcatacagctattatgtcaggaaggttaacaggttctttagggacatatcgagtaggtaattatatggcaataatagctctacctgcctttgggatctggactcttcttcctatgaaaaataatagattacgtatagttgctgtagcagtattgttatctccaggtttatttctttggttaggttcatttacccgtataggatatttagcccttttaggggctttatatattttgtggatttgtatttggacaaaattctcattattaaaagttattgttcctccaatgttattgctagtagtattaagtatgtttggaattgcaagattaagctgggaaacaatgcttaatgatccacgaatagagttatggataagagctatagaggtaggaaaagagcatttatggcttggaactggtagtagtacttttatattagctctacagaaacagggtataattttacagtctgtcccctctatggatcttggtcatcctcataatatctatattcaattttttattgatgggggacttattggatttactagctatattttattttttgttattataactctttggacattgtttcatattcgaaggggtgtccaaaaagaaatacaaggtttattccctggatgttattggcagttactttcatttatttgggctggttgggttgcatatttaattacaggattttgtggacatgatttttatcgaacatggtggctatctactgctgccacattgttaggaattcttatcggaggatgtcagtggggcaaaaaagatagtaaaaaagagttggatagtgtttccttagtttgatattgtgaattttattatgagcctttgtggatagaaggtttggtcacatggccagagcggatacaacgtgtacatatagtaatagtttttattcttccatcaggaaattgattacgcatatgttgaagattgggattgaaaactcttttagttttaatatttgagtggcttacataattaccaacaaggggttttttcccacatatttcacactgttttgccattaacttctccgtaactataaaggatatttttaagggctttcttataactttaacataaaaaaatagcaagtttattatggaatattttttaatagtaatagtaagttctcttacctatagtaacatatcgctattgtttgtttattagttttttatgttgaactattattgagttgttatgaaaataaagctacttcaaaaaatttgtatcatattattccttattaactatagtctaatatcaggatgttcttcaactaaaatagtagtcccagaaggtaatagttctgatttgttagaaaaaacacaggatataaaaagtatagaggatcaggataggaacatttctgctcaggcagaagaagcttggaagaataacaatatgcttgaggcgcaaagactttacaggattgttgtgacacagtctaacttaacagcttttgaacgtaactccgcatgggaaaggttaatcaagtcatcaattgctaataatcatttccatatagcactagaatttttaactcaatggaagcttagtgatccaacagctaatatgcaaccagtttggcaagattcatggggaatagctgtactaaaatcttcacgtgtacaagcaatatctcatgcacaacaggtctgggaagatgcttctttacctattccattacggggaatagctggaggagtattgatgattttaagcccaaaagaaaataaaacattgatagcaagtaaactatcagagctttataagcactcagatcatgcaaattgtatgatgctagaacaaagattatttacgttgcttagtaatagttctagtgaggaattgttagcacttgaatttcttacagggcctgagagagattttatgtatccttggtcaattattattcttgatgtattacgtcgagagtggcctagtaaaactaatcgtactgcagagttgctggggaaaattaattacccaggcgtattttcagactcttcgttgcttgcttcagctattcatgtagctgagcctaaatcgttgttagttgatcatactaatatattattttcaccaggttgttatgcgttagtacttccaatgagtggaccatatagttctattggttggaatattgctaaaggagctaatgctgcccaagaggaacttataagcgcaggggttgatgttgaagttgttattataaattctgaagcagtaggttggttagaaaaactagaacagttaccacagaagtgtattattgttggtggtccattacaggcagagatatatgcagccataagagaaaagaatatcctttcaaataagatattttttacatttttgccttcaattggagaaggtgatgaaggtataactgcttggcgttttttttcaagcccagaagatcaaattttagctcttcttcgttttagtcatgaacttgatattaccatgtgtggagtattatatcccgaagatggatatggtagaaaaatgacagaattatttgttaaattagctgagcaaagtggaatatctgttatgacaactggatacaatccacatgacacatctagttggtcaaaattattagcaaacgttacaaaaacaagaatgatagggaaagttcctgtaccatctactccttttcaagctgtttttcttccagatagctggaaaaatattgaagtattattgccatatctttttttccaaggggaagataggcttgttttaatggggacaaacttgtgggagcaaggtctttctcatggagaaaaaaattttataaggaatatggatcttgctgtattcccaggaagttggaataagtctacacctaatgccacagctgccatgctaatagaacgatttacaatggataatcaagaggaacctgacttttgggttgggctagggtatgactttatacgtttttcttcagcattaaatatacatgaagttaattggcaagcatctcaggtaaataaaagcatagagaaagctcaacaaatggattggagcatagctcctatttattgggaaaatgggaaagctcaacagaagttatttcttttttatccaacatcttcagggggtaagttattaaatactaatttatttaaaaagcgtcttgatgcaattaaaaaacggcacttaaaacgtgtttcggctgctgaaagggaggtgtctaaataagattattgtttcttaaactatactaaggaatatctgtccatataggttgagtttcgtcaaggctttcatttcttaactgtctacataaaagtttttgtacggcttcatgaggagatataactccttcaagaacattatatacagcttttgttataggcatatcaacgttcagcttactggcaagagtattaacagcataagttgttttgataccttcagcaatcatattcattgagtttgttatattttttaaaagttctcctttcccaagacgtaatccaacttgcctatttctagacagctcccctgagcaagttagaaataaatctccaagccctgataatcctgaaaatgtaagtggtgaagctccaagagctttccccaggcgagttgtctctgcaagaccacgagtcattaaggctactctagtattaataccaaaacctagaccatcagagactcctgctgctattgcaattacgtttttagttgccccaccaagttctacacctgtaacatctgtacttgaatatgttctaaaccatggagtagagaaaatttctcgtagatgttcacccagttgttcattgcgacatgcaaggacgacagctgtaggtttttcacacataacttcttctgcaaaagaaggtcctgaaagtacagcatagtgagaaacacgatgagccatttcatctaatatcatttgttcaactgtttttaatgtttctacttcaatcccttttgctgtattcacaagtatacaattttttgtcaaaagtggttcaagttcttgtaatacaggccgtaaagattgacaggggacagaaagaattacaattgttgcttttgctaacacatgagcgggttctttagtaagaaagctaattttccctgttacagcgtggattgcagggtgaatagagaatccaggaaggtatatattattctcatggtgcatattgatatagtcagctaacttttgactacgtaatactaaatgtactttatgtcctcctgtggctaatagatgagctacagctgtaccccagcttcctcctccaagaacgacaatagattgtgggttagacataaagatccccttggatatttactaacataaaataggtaaaagggttataaaatggataataagtagaatatataattatggacaaataaatagacttcatttttattaatagttatttttatagtataatatataaattttttgtttttttttttcaaggaaagtatatttaccttataacctaaagaacaattttttatttattatatatttagataagataacataaaaaaataactaacaatttaaaattagttattttaaatatagtagtatattttttggatatcagtaatctgatggaagtcaataaactttatgaaaaaagaacgacaagaaactaaaaatgcataattttcattttgttagtgaatatatttgttctactatttgtatttctaataactttagaatcccttgaccctttatgaggtgtgaggtacacacttgttataaggataagaccaataaaagatatatattatatacgtaagtagtagaaacaattttttattttttactatagaattttaccttttttttatttataatgagttttattttactaatcacagggagactcggaaagaatgaccgggaaaggttgtatcattgaactaaaaaacgtcagcaaaatatttgaagatacctgtgcccttgataatattaatctacagattgcaaatggtgaatttttaactttacttggtccttctgggtgtggaaagactactatcttacgtattatttctgggtttgaaaccccagatgttggagaaatattaattgcaggggttaatgtaagtggcttccctccggaacgaagacaagtgaatacagtctttcagcattatgcattatttcctcatatgactgttcgtgataatgtagcatttggtttgcgtatgcaaaaatgtcctcgtgaaaaagtgaatgagttggtttttgaagcattacgaatggtccatcttgaaaattttgctgatagacgcccttctcaactttctggaggacaacaacaacgagtagctattgcaagagctgtagtaaataaaccattacttcttttactagatgaaccttttagtgctcttgatcataagttacgacagattatgcagcttgaaattaaacatttgcaacgtaaactgggcattacttttgtttttgtaacacatgatcaagaagaagcatttgctatgtcagatagggtagttgttatgaatcaaggtaggatagagcaaattggtactccacaatgtatttatgaagagccagttaatttgtttgtagctcggtttgtgggagagattaataatttggcgggaactattctttcttgtaatgatgagggaatatatgaagctgcaattgcaaatgaagtttttccattaagaacaccacatcgtttttctccaggagaagctgtgaatgtattgttacgcccagaagatatacggatatacttattagatgaagaagttttgaaagtccctcaccttagaggtcgtattgaagaaacagtatataaaggcgcaacagtagatattattattgcattagacgttggtgggactttacgtgttgctgaattttttaatgaagatgatgcagaaattagctataatgaaggagaaagagtagctgtaacttgggttgatggttgggaagtggtattgccacatgaaatggcttaaaggttttcaacttgttgtgatagcaccaactgtgatctggcttggtttatttgctttattacctaatgttggtcttttagttgttacttttttaacaagaggtgaccaagaatttgttattccagtattaaccttttctaattatgctagactgtttgaaccttcttttttaaaaattttatgggattctatttggttagctcttatgagcacacttttttgtttattggtaggatacccatttgcatatcgaaatgctcgttcaaaagcaaaaattaaaccatggttgcttcttctcattattatcccattttggactaactcattaatccgtacttatgcacttgttttgattcttaaagcaaatggactattaagtactgtacttatatggttaggtattattaatgaacctatatcatttatgtatagtgactttgctgtttttataggtattacttatacgtttttaccatttatggttcttcctttatatacgactattgaaaaacttgatccacgtttgttagatgcagcaaaagatttgggagcagggggatttcgtgctttttggcatataacgttacctcttaccttaccaggtattgtggctggatcaatgtttgtttttttaccttctttaggcgcattttatattcctgaaattttaggtggctcaaaagatatcttagtaggaacgtttattaaaaatcaattttttgtaaatcgtgattggccactaggtgcagcctctagtactattctaacaattttgctatttattttacttatacttcaccatattacaacacagtctttctctataaaaaatagagctgaaaatgatccacgatttaggaggcctgtctaatgaaaagattaggtcttatatggttatggattgtttatatctttttatatttgccaataatagttgttattggctactcatttaatattgctaagtatacatctgactggaagggatttacattacaatggtatagccaacttatgaataatactccgttgatagatgcagggattaactctttaagtgtagcagcattgtcagctagtttttcgacttttttaggtgttcttacagcattagctataagaaggtataggtttcctggtcggaaaattttgtatggttctatttatgttcttacagtatcaccagatatcgttatgggtatatctttattaatcttttttatattttttcatatcccattaggttttcttagcctttttattgctcatactactttaagcttaccgtttgttgttcttactgttttaactagattaatggagtttgatgaacagcttgttgaggcagctcgagatcttggtgcaaatgagtctcaagcctttcgctatgtgatattacctcttataatgccagctattgttgcagggtggttattagcgtttactttatctatggatgatgtcttaattagtttttttgtcactggaccaacttttgaaattttacctttaaaaatttattctatggtacgcctaggagtaaagccagaaatcaatgcactttcagctattatgttttgtattacagtcgtttttgtttttattgcatggctgttgcttcctaagactcgtcatacaggaaactaatattattataagggtattggctttattaatctagagtgggatagctattgtatgataatggagaaatacactatgaaaaaatacgttagcttagctctaattttagtaatatcttgttgtcctctttttgctaatgataaggacacacttaatgtgtttacatggtctgaatatattccttcagatgtactggctgattttacaaaagaaactggtattaaagtggttgtgtctacatttgagtctaatgaagcaatgtatgcaaagctaaaattattaggtggtaaagggtatgatattgttatgccttcaagttactttatagaaagattatataaagataacttattagcacgtcttgataaatcaaaaattatagggcttaataaccttgctcctgaatcccttggacattcatttgacccccataatgactattccatcccttatatgtggggtgctttaggtttattgtttaacaaaaaagttgttgatcctacagttataactagcttcaatgatttaaatcgtcctgagtttaagggaagagttttgctatctgacgatatgcgggatacatttggtgtagcacttaaagtaagagggtattctgttaatacgacaaatcctgatgaaatcaaagcaggctatgaatggttacaacagttaaaaccagaaattcgtgtgtttgatattacagcaacaaaacaggcatttattggagaagaggtattagctggtataagttggaatggtgatgcatttatagctatgaaagagaatcctaacttacagtttatttttccaaaggaagggtttattctttggattgataatttttcaattcttaatcaatctgaaaataaagaaaatgcatatgcatttattaattttttacttcgtccagaaatagccaagcgatgtgtagaagagtttttttatacaactcctaatatagctggtcgaaaacttcttgatcctatttatcaagaaaatcctattatctttccaaatgatggtgtaatgtcaaaaggagaattaattagtaatattggtaatgcaattaatatttatacttcatattgggaaaagttaaaaatgagccattgataatctatttattataaattctttaacctaaaaaagatgacttctctaagagaagtcatcttttttaggttaaagagtgtttgcagctagaagtaatagttatattattagtagatgttatcttttaactcaataggttaaataaatatatcactatttattattaattatgtttttatcttatatggcttcctaaaatatcatctttagataaagcttttggtatttttaatttatcatgtgcccactgagcggaaatatccataattggtgaaagttttggaagtgcatctgcataaatacctacttctacagctgcacgtgtatcaaatctaaatgatggtagtagagttgtatcttctactttgcagtttagagcagccattggcataattaattgttttgagatagttgaagaaatttgtaatgcatctgtaaccattaagtctcttctgacttcattatgaactttcccaagggcatttgtacttgtttgtccatcagcctgagttgttaatgttcctccaaggatagctttactcattcctagttcacaacgtgtgacaagttgcccaggaagatcatgggatgtatttgtaggggattggaaaatgatttccatgccagaaggtataatcccagcagcatctttcccaagtgtttgaagtgcccttagaagagctcttttgtctgaactactacttccaatatggtatttcccaattctaaatggtaatccatgtatttgaacatagttgatactggcttcaagagcataagagcgtactaaatatgcccatgctactacgcgaaagagtccagctcttggtagccatccagatctagatcgatgagtacgaataacccagcccagtggccaaagaggatctccttcaggatctttatttcttaaccgtaagacatttttattttgtggtaacatttggaaccaggattgaggtcgatgatgaaatgcttttgggatgtggatatgaccgtcatattcccattcaatttctattgcactgaaaccatgacctatagcatctgccatatctagtagtaaatcttctatggagtaaatactattaaactgttctcttatagcatctgctatttttatagcagtaggattatcttttcttgcaggaactatttcccaatctaatgttagtatagctcgttttcttttggatatttcagcagcaaggtgttcacagcgatcttccatgtcagaaaagagttgatgctgttcagtgatatttccttcatctgcagcttgaaggatagatctaaggcggccaggggtcagaccaaaagaaatatttccccactgttctaaggttaataaagattgtgcagtgtctgatgttgttgtttgaagcatacctgatacagtttcaggtttattttttttatttttaatgaattggaataacttcatgtcactatctacctttattttaacaatttttaaaagctgctggaatagtataagatttttttaaaatacgccaaatatgtctatctgaaagcttatatcttcttgcaagatcagatactaattgcctttcagaaatacctttggcagcaagtttatctctatcttgaattatttttgcatgttgttttgctgtaaggagttttttacagttaggtatgtatatacatgttccgccaaatgtttgaacaatattatgtacttcttgcttcccaattttttgtgcaagcaggtcaatttttgtccttcctactatagtatctcctctagggatgcgtaatgtgctaccgccataatgctgaataagtgaaaatgtaccatcttctccaataaggttgataagaaattgtactgcttctgggaaggcttttaaatctagttcagtatctgaaagtaattttttcatagttgtttctctcttctttaggagccaattatgacaaacggagattataatgaggacatttctagtgaaatatttttaagttttccatcaggcatccgttcatatatacggatgtatgatttcgtttctactaagtggatactatcaactatagcttgcattgcttgttcccagcgaggatctttaatatttagtcttcgtagtgcaaggatagcattagtatttattttcccctccttatctattttaaatgcatgttctattactgcacgtaattctccagggctagattggctccatatcctaatacactcatcaataattgctttagctacttgtagtccttcatcaaatgagatgcgttccaccatttgtttttttatttggtaattaccatcaaatgacataagtgtgatatttccttttactccacccatatctactttgtattgtttggctgtttgttgaataaaggtattaagatctgttgtaagttctttttttaattctttgagttgtttctgtattttttttactttgttaacacattgcataacaaaattatttctttcaatatcaataggcttaatgtgttctttaagtatgaaatgcccttgagtatttttcatgtatctatcttttggtaatgacattgtttttactgttgatttgtccagtagctgtggcataatatcctctttttagtgcatatggtaaaacgttgaagaataattttcacattgaccaccaaataaatatttgttaattttattgtgttgatagttcattgttgtgtacgaaatattgtaattacacaatttagtgtaatagtcaaacatttttttgtaactattgcatatatattacaaaaaataaaaatttttattaaaaatttttactataaagagtgcgtaggtaccatgcatggatatacaaaaaataggtgaaaaactaaaagcactacgtggtcaagaaagtagagactctttttctgcacattttggtatacatagaaatacactagctgcttgggaatctggtgaacgtttaccgtctcttgaatttctttctttacttgcacagcaaaaaaaactttctgtagcagaaattttaggagaggctggagtagtgagtacaaaagggctatcttcacctcaaaaagtacaacaagaggcagatactacagttaatagtgaatataaattagagagggagagggcatgttctcagttttcatggaaagggaatgattttacattgattcctcttgtaaaagcagttctttcagctggtggtggatcttttgaaactacagataaaatagaaggacattatgcctttagaaatgattttttatattatcgaggaaatccaaaaacaatgaagcttttccgggtagatggtgacagtatggaacctagggttagtgatggtgatatagctcttattgatcaaggccaagttgctcctagggctgggaaaatatatgcagtaagacttgaagatgtaatttatcttaaagtccttaatacacagccaggaaagctgatactttcaagctataatactgactatacacctattgagtttgatacacgaggtgatatggcggattgtttttccattatagggagggctgtttggattggacgagaacttgattaatacctatatagtaaaaggttagatataaaaagggggaggaggattaactcccttttttaatagtaataagtatagaaagaaatatatatatatataatagtaacaactataagttaataatgtgataagccttattacactgtatgtttttaatactaaatcatttatttaaatgttatagaaatattattaatagtaatatagtgtattaagcaaagtataataacattctaccttgtactctttagtataactagctttaaactatttactaattaaaaagaagtaggtttgatagtatggcactactttctgagctaatccagcgtttacctttagtaaaaaatactcatatgagttcacagggcttttctctatggatatgctgggatggtgaattagataatgctgttccacaagcactgcaagattatggcggaatgagtgttgttatagacaggtcacaagctctttggttttttttctcttcagacgtatttctagcccttgcaaaacttactgtatggtctaaatttcatcctttgcctataagtgtccaggttttccctagtaaacttcttctaagtgttcgacgtgagatatcactctccattgatccttcattagctactcaagaagtgttagttcctcaatcactagaaatttgggtacatcctaaagcaaaagagattgcaggcattattcctggaataacttatacactaagtaaagagttgcaggggatggcgtctgttaagtgggaaaatcttgaagcagacccacggttaccttatatgtcttctcagggctggtatgtccttattcatcctgttgggaatcctttagataagctttttcagtcaggttggaaaacaatgtatgaggcaatagaaaaaattattcaggctaataaatttaagtataatctccataataactatcttatgttgtctattgataatttaagacaacttagaatttgggttcgagacatcctaaagtgtatatcagatgctaaagtgcaaggaacttattggccttgtgtctgtatctctattgataaaaagggattaaattttacaaatgatcttccaacaaaagtgggtattaagtgggataaccttattcctgacgtcccatatattacatatcgcaatgcatttttattaggagaagggttcaaaattacggatttaaatttttctagttcacatgtttcaatggatagttggtgtgcagttgaacttaccgaagatagttcttttgttagtgaagttattccaattcttatgcctgaaaaacttgtttcaggtgagaatacagggtgtttttactgtggttctaaaaatcatgataattctcaatgtgttacaagaggtatgtcactttctacacaaaatatttggaatgatttagcagaaatgagcgtagaggtgatgagtgaaggatttcaacttattgaacaggaactgaatggagatgatgttattgttggatatgaaaatatcctttttaaggataatacattagaacaaaggttattaaaagcaatttttgaaactaacttacctttacaagtaagaagtattaggaacatttggttagctacaggaagagagttcccaaaaagtggagatgtattttctagtaaaaataatgtaaaagatgatagtcttgcttgggggttacttgaacgattcaaaaagatacaagcttcagagctgctatcctttgaaaaagatgtgttatctgctagtaggaatgctccaagggactttcgacttcgtacactacttggatttattgcagttgaaaaaggtgatctatcccgagcacaacttttatggaaagaggcagaatcccttgcaagcacagggctacatcaagtatggcatatgtttttgcaagcaagacttcttgaaatacaaggacgtttttcagaagctatagagatatatcagaatgtacttcgtctatatccttcttggttagatgcagaatatcgtcaaattgtctgtcatgtaaaaatgggttttgctgaacaagtacagactaaaatttttcaacttattgagcaagactcctcattttttaatagattttttattgatccagaacttgacagagggtatttaagtatccttagtgaacttcttgtagctttagaagagaaaagaagattagctagtgatgaaaaaataaaagcagaaaagctacttatagagttagatgaatggtttccaaaggaccatgctattgctaatacatttcgtcaaaaacttaaactagttattaataacttatctttgaatacgtatgttgcatttctttctataattcagatgcgtcctattatagaaaatgatattacaaaacaaattaaatatgaaattaaaaaccttaaacaaatttttaaaatttatttgaagcagttagaaaaaatacgtgatgaagcagcatggttccctttccctaatatccttattgagtttaataaaaatttcaatgaatgtgcaaatatttttaattgggcatttacttcaaattttaatgatgcagaagtttttaagaaagcaagggggtatgcaccacttcttcaagaatatttagaaggattaacacaaaggttaaaatttttacggatagtacgtgacgtaacattgtttattcttatcttaggaaagacatttttttggatagaggttataggattattgctttgtgcaactagtgtccctttgattgctgtttttggaagtaaagttggacttggttggttaagtacattgataaaagaagagcaatggggattacagcgagttttattacttattattagcagtgtggcaataggtatttctgcaatacatacaacattagtttttgaacgtaagagggatcaattgattgcagaggcacgtggacagcgtgagaaaatacaacacataaggcttaaacatattaatgaagctaaaaaagaaaaacaaaaatctattgaaaaaatatagtatttttttttactacacttgtagtattattcttaagccctattcgttagtacgttgaatagatgctccaacagcattaagttttttttcaataaattcataacctcgatctaaatgataagttctttgtattgttgtgattccttttgcagcaagacctgcaagaactaaagatgcacttgcacgtaaatctgaggccataacaggtgctccttttaactctttaacacctgtaacaatagctgtgtgtccgtttaggcggatattagctcccattcgagcaagttcttgtacatgcatgaacctattttcaaagatagtttcattaactgtactagttccataagcaatagacataagggccataatttgtgcttgcatgtcagttgggaatcctggaaatggccttgttgttacatcagtagctttgagtgtttttataggggcaacatagataccacattctcttttttcaatgtgtatacccatttgcataaatttattaataatagcttccaattctttatagggacaacctgatataagcagttctccctttgtaatagcagcagcagtaagaaaagtcccagcttcaatacgatctggcatgatactatatgtacaaccattaagagaagggactccttggatatgaatgacatttgtaccgtgtcctttaattattgcaccacaggcaataagaaatcgtgcaagatcttcaatttcaggttcttgagcagcattttcaagaatagtttctccttcagcaattgaggctgctataagaagattttctgtcccaccaaccgttgggaaatccaagtaaatatgtgtacctttaagtttagtacagtcccctataaggtatccatcttttagggtaaacttagcacccattttttcaagtgctttgatgtgaagatctataggacgagcaccaatagcacatcctcctggcatagctaccttagctttaccaagcttggcgagtagtggtcccagaacaagaattgatgctctcattgtacagacaagttcataaggcgcctcatgttgtaatgttcctggtgttagttctatacattgctctgtttgctgaatagtgcatccaaggatttctagaagttttattgttgtcctaatatctcgtaactgcggaacattatgtaacgtaacttttttatttgctaaaatacttgctattagaataggtagtgcagcattttttgaaccacttacagttactgtgcctttaagtgggtaaccaccttcaataataagtttatccatgtattttttgccccatgatttgtcctaatagcatattagatccttctatctttttattttattagttatataaagttattccatccattgttgatggatattttttatctgatttttttgtttaaagaaatgggaatcaaagagacttggcttgaccttattatttgtttaagatacacaccatcgtgcatatggcggatgtagctcagtaggtagagcacctggttgtggcccaggtggccgtgggttcaagtcccatcattcgccccattcttattaatgttatatttccaacgttagtcctacagggcaatgatcagagccttgaatatccatttcaatccaagcatcacgaattgtaggcataagttctatagaaacaaaaaaatagtctattcgccatccaacattacgctctcgagcacgctgttgatatgaccaccatgaataattgtttggtatatccccatgaacatagcgaaatgtatcaatataacctgcagcaataaaacgatccatccaggttctttctattggcaaaaacccagaggtttcctcatttgcttttgggcgagcaaggtctataggtctatgggcagtattaaagtctccacatacgacaataggttttgtctttctagcttcttctgcataattaagaaaactatcataatagccaagcttatagcttagacggtggtctccttgagttccgttaggaaaataaatattcataaagtgaaaagatggatattctaaatggagtaaacggccttcaccttgaaaggtaggattaggtagttcagctgtaacagcaagtggtttaggcttactaaatacagccactcctgaatatccttttttctttatagaggctgaccagtaagatagccaaccttctggcttttggaggttatcttggagttgtgaaggatctacctttgtttcttgtaaagcaataatatcggattgattctcatgaaaccaattccaatgtggtttttttatgattgccctgaatccattgatattccatgatgtaagtcgtaacaaggaaggcatagtagtcatccatttaatagtctattgctatggtaagtcagcatcataagtatattgcttctataaaaaaatttagtagaagaatatagattatctaaaaaacaatattacatgttaaagttatagcttttttaatattaattaatcttattaatagagaagcctaaaagtataagaattatctctttgctgtaagaatcatatagtttagtgggatagtagtaaatatcttttctttttttaaagtactaactgcatccttttgtttcaaaatttgttaaaaatttttgttatcttttaatatgttttgttaatcgttttaaattaatgatggctttatagatgtgataggctcaagaatagatggttttctagtgagagttgtaggttcttttttagttgagtttatagatgcttgattagaatactctttaggtgtttctggttgtccgttaagtttaagctgagcttctttttgtatactaatatctttagataattcttgtttttttattgaatttgaaggcttaattctagcttcctttatagcagcttcttttttattagagatttttttatctttagatataaatggattagagttttttgggctataggaggaaaaagtttgcttgtgtgatacataggacttccatagtttatcagatagaagagtcctactttcttcgtgctgttctagtccagtataggttgaagtactccccaaaaatgagagactcatttctccaaaggcatacggtgtatatatcaaaagggagaggcttagaatagataaaaataggcgagtcatgttgagatcctccaactaatttatgtttgttacagactagtatcggttgaaagtagagaatgtttagggacagtttttatataaaatcaccattgatgatgaaatgaagatatttatctgatcttataatatcgaaaaaattatccttgattaacaaggagttactaggagcctattaattataggtatagctcaatgagtactttgtcagttcattgatgaattttctgttggtgcagaaatattaagaaataggtgtagtcccattagccatacctatttatatgggacttacgacaatagagatgttagtagttataggtggaggtggtttattatacaacatctaaaaagttaactataacttcactccttcaggtatctattcttatagttattatgtttttttttttgcagaacatattcggaaacttttggaagaaacagaaattgctgcacacaaagttttttcaggggtaaagaattttttaagaattaataactaagtccaataggatcctagtagtcaaaaataaggatcttattggacttaaaatgcttaaattacaatttgaagttagaatgttaaacgtgcacttaatataatttgatgcataaatatttcttttgtttttaaactagcattagcagttgcagtaacaggtcctaatggtaggaggtcaactatttgacttttattccagcttttagtttcacctttaccaaatccagcaaaacgatatcctaaatcaagagcaaaagtttctgaaatttcatatgaagtacctactgtagccatccaggcaaagttcttttttgttttatcatcaagttttactttgatatcgtagcctaagctatctatgatagcattagactttgtttttacaccagcaatgccaagtccaacacctatatatggtgtaaatggagaatcagtttttatatcaaaatatccgtttactagaagagctccaagggtaatatccgtcttttgcccattgtgttttatatccatttttttaaaaaaactaaattcaagctctgtacgtataggagtttgaaacatatgattaaaatcatatccaacagctaatgctcccccaggaagtgattctgtttttttatggctaacagagtctgagatagtttgtacgtttactataccaattgttcctgttgttttgatatcaacaggtgcaaatccccaaatgaacttaggagcaatatataatcctgtttgttcagctgaagcaattgtaggtgatatagataataaacatgctgaaagtaaaatccataattttctcattgaataatttctcctttatgttagggcttaaattttttaatatactaaactataaaaaaagtaaataggataatttgtgaacttattttatttgttacaataggataaattaccttaataaggtaaaagaattatattgacataacattgttacaatgtgtagaagcatcattaattggggctgtagctcaattgggagagcgcttgaatggcattcaagaggtagtcggttcaatcccgaccagctccaccatattttttataatatataatagcttaatagtttaggtagctttattatattagatttctcttcttttttaagatactttttattgtataatttacagtagtatcattgtaatttttattttagttagatagtaatagtaagaatcatcttacattactatctaactgtaattagttctgtcatcttaacttcttatctactagctaaaaattaatcagtctaaaagacattattataataatattacctagtaatagttattataatattcattaccagtggatataaagtttaatttagaagggtattatggctaacaagtataaactcaaaacgaataatatgcttaagtgtgctgcatgtggaaacaatgagtttgaagaacatcataaagagaaagaaggaaaagaaaagtggatctatgtttgctcaaagtgtggattgatgatgaaatttattaatcagttgaacgttgaaagttaatagccaggaaggaggggagtgagctcccctttatttatgcctgtaatattgtaccagagtatattaatttggaattaaactaaggatgagctatgtaacttcatttaactttgagtattggaggtcctatgggtaataacaataatgataatggaatatcagttaattctctaccatttagagatgggaagtcagcagaaccacactattctaatactatcccccaaagtaaatataaaatttctcaaagaccaacaccacctggagttgagcctatgacttcaggttcatttaaaactccagataatactacagaaaagattaaggctatggactcagttcgtgtcaatggtcatgatatggctattacaactaatcttggcgtaaaaatagctaataatcaaaatacacttagggcaggagtacgtggtccatcgttactagaagattttcatcttcatgagaagttagcacacttccatcgtgaaagaattcctgagcgagttgtacatgcaagggggtcaggagcttatggatattttcaagtatataaatcaatgaggcaatatacaaaagctgcttttcttcaggatccaggagtcaaaacgccagtttttgttcgtttttctactgtacaaggttttaggggttctcctgatactgcaagagatttacgaggctgggcaacaaagttttatactcaagaaggtaactttgacttagtaggtaataatacagctgtattttttatacaagatgctatcaaattcccagattttgtgcatgctgtaaaacctgaaccacataatgaggttcctcaaggacagtctgcacatgataatttttgggattatgtatcattacaacctgaaacattgcataatgttatgtgggctatgtctgatcgtggtattccaaggagctatcgcatgatggaagggtttggcatacatacatttagacttattaatgagcaggataaaagttgttttgttcgttttcattggaagccagtgtatggtactagttctcttctttgggatgaagcacaaattcttacaggacgtgatcctgattttcatcgtaaggatctttggcaagcaattgaagctggggattatcctgagtatgagttaggactacaaattattccagaagaagatgagcataaatttgactttgatattttagacgctacaaagttaatcccagaagcattagtccctatagaacttgtagggaaaatggtattaaaccgtaatccagataatttttttgcagagactgaacaagctgcattctgtcctgctaatattgtacctgggattgatttttcagatgatccactcttacaaggccgtattttttcttattttgatactcaattgcatagattaggtgggccaaattttaatgaaatacctataaataggcctatttgtcctgttactaatcaacagcgtgatggaaatcatcgtatgcaaattgattctactgttgctaattatgagccaaatactgtaagtggaaattggcctcgtgaagtacaaccatcagagcatggtggagggtttactacatataaaagtaaagttgaagggactaaagtacgtgagcgtagtccatctttttttgactattactcacaaccacgcttattttggttaagtcaaacagccccagaacaaaagcatataattgatgcatttagttttgagcttagcaaggtaatgcgaccatatatacgggagcgtatagtagatttacttagttatatagatcgtgatcttgctaaaggtgttgctactaatcttggtttaactttaagtcaagaacaattgtcatacgatcttcctaagccagtaaatggattaactagtgatccatcgcttagtttatacgctaaaaataaacaaaatataaaatcaagacgagtagcactacttgttgcagatggtgtaagtaaggagtcaatagaaactattagcaatatgttacataaagaaggagtatatccacagttttttgcgccacatatgggaagtattaagacggaagagggtaatgaaataacagttgatggtactattgaagggaatccttcagttgttgtagatgctgttattgttcctcaagggaaacaaagtctaaatacattattaaatgatggcaatgcaaaatattatttatgtcaagcatataaacaccttaagcctatagggcttcctggaaatacaaaagaaatgcttagctatatagggttatcagaaaatgatattgatgaaggattagtattggctcctgatagtccaaaaatgataggaaaatttatagatgctatgaaacaacataggatatggtctagagaatctaagataacaagcttctctgcatgagtatgtaattatttataagtaactgctaaagagctctctttttataagggagttcttgtatatttttttatttttatactaacctagtgtttaacttcattatttaattttgttatataaattttaatatatatatattatctataagacgaaaataaattagatagttatacctaaatatactatattaaattttgttaattactagttatttaataagttttacctattaaataaactatacaaaattagtaaaaatttttactaatgattaaatattatagtttattatattacttatgttatttaaagaatatattaattagtatgtataaaataagatttctatttctaacaatattagaattaatatattttattataaattactaaaaacaaaagggaaaaatatttttaataatagaataatagataaatacttttatatttagatgaactaagttgatatattgaaatttatcatagtattgatacattttaaattatgttaatttagtacataaaataatttttaaaatgttacaaaaagttttatttttacaattattatatcagtaaattgtaagtctcataatatttgaactataaaaatattgtgagacttcttaatatgttagaagaaacataagctttttatattaatttaataacatattttattatatgcttaactagacatattcaaccatgtagctatattcaaatactataataaattttaataatttttacttattatatatacattatataaaataattttgtatggttaattttattaaaattaatataattatatatgcttaaaattatagtaaattcttatttataatatcaaatataacctattactatttttagaataaagattaacttagttacagtgaagtgtaatgtttatatatagatacaatatatttttccaccatattaaaaaaagttatattatataactaaatttgattattattgatgatgcatggccttcaagcaattgtgattttactttgtgtagaattaatatggaggattccaatatgcgctggaaagatatttctatttttaaaaagttattaataggcttttctatagttattcttgcaggggttattgggcttgcaaatgattattttgaagtgactaggattcgaaatattacagatcaagtcttattagctgttaattatagaaaagctattttgaatgctgaagttgcacaccttacatgggtaaataaagttgctaactatcttattgaaagggggaaaaatgaattacatgttgagttaaatgatcatctatgtacatttggtaagttactttatggggagcaacggaaagaaatagaagaacgtataccagaaactaagtctttatttctttttatagagggaccacacaaccgtcttcatcaatctgttattggcatcacagctgctatgggagaaggtaaaataaatgaagcatcacaaatttttcagaatgttactttaaaagaacttgatcttattcgaacaactcttaataagcttgttgtcgtttttgatgctaggtctacagttcttgaagattcacttataaatacaatccattttgcattagtcgttatattattatgtgtagctgtgatgctaattggtggtttacttttatctttattccttggaagaagtattgttagaccaatatggaagctagtagcttatgctcatgaagtaagtgaaggaaatttaaaagatccaacattaaatcaaaaagatgaagttggtcagcttgcaggaacattaggaataatggttaataaacttaagaaaactattgaagaagcaaatatgaaggcagatgaggcctatagaaaggaagaagaagcaaatgcagcacgtgtaaatacagagtctgctatccaggaagtaaaaaagaaacagcaagagctacaagatgttacagttcaattaaaaggtgttgtagatgttcttagtagtgcatcaaaagaaatgtctacacaaattgaaacatctgaaaggggagcaattttacaagcaaaacgtattaatgaaactgcaacagctatgtcagaaatgagttcatctgttttagaagttgctcgaaatgcaaatgtagcagcagaactttctgcagaagcacgtactcgagctgaagaaggatctggcattatgaataatgcagtagaaagtatttatgaagtccaaaagcattctttgatgcttaaagaagatatgcagattttaacacaacatgcacagaatattgatcaaattatgagtgttatttcagacattgctgatcagacaaatttattggcacttaatgctgcaatagaggcggctagagcaggagaagctgggcgaggatttgctgttgtagctgatgaagttcgtaagttagctgaaaaaacaattacttctactgcagatgtaggtaaagctattggtgctattcagcatagtgttgagaaaaacatgggacaggttgataaaaccgttcagtctattgagtcaactacagatttatcaactaaggcaggagagttattgagaaatattcaagagatggtagaatccacagcaagtcaggtacgttcaattgctacagcttctgaaaaacagtctgctacaagtgaagagattagttcttctattgaagaagtaaatcaagttgcaaaagaaactgcttctgcaatggtttctttaaataaagctatggtagatcttgctgctcaaagtcggggattacaagaactcattagaaagttggaacaagagacaataggataatgatatacaaaagtttatcctagtattagatagagatgtttttacttctttatctaagactagggacttttatttttagtaactaatagaacttaataattaattattctagataattacttttcactccaaaaaactctaccattttttactttaagccttccaagtggaagttctttccaaaatagtgggacttctttacctttaaaatctgtcattatgctttgtccttgtgtaattttttcaagttgttgaacgttatcaatatgtaaacaataagctaggtctgttgttgattgtaatagacgtagccgtggtgaaggtaagatatttgtctttgatgttttaccaataatagggccttgccaatatagagtatagggtaaataagttaaggcagcatgaggaataaaatggagattagagttgaagtcaacaagatttccttgtggtaatttagttatatcaatgccaaaaggtccaagggtatctaatgaatagtgaggatatgaagatatatctattttttcattagtagtatcaattttggttgtatttttaccaggcttttgaagacaagcaataaaaaatccttgagagtcatgggtattaggtaaacggattaccccttcataagagggtgatataggttttataacagagaatcctaaagggagttcaagcgggattaattttaatccaaggttagttatagcaaattgtatttgtgcttcattttcatctatattagttgtacatgtggagtaaacaattttccccccggggattaatagacgtgttgcctctgtaagaagttttttttgtaaaataataagtggattaattcgttctccctgccaaatttttgtaacttgaggatttttttttatagttccccatccagaacatggaggatcaagcaaaattttcccccaggtagcatctggcataggtagtttttcagctggccatgaacatgtaactgtattaaaacaattaagtctaccaagattattacgtaatgttagtagacgacttttggtaggatcatttcctacaataagtccagtgttacctacaagttgtgatagtaaagttgttttactaccagggcttgcacacatatctaatataatatctccaacattagcttgtaaagctaatactggcaacatagacgatcgatcttgaatataaattaaaccaaaaaatgcagctaaactttttccaagggggaatggctcatatataatttttcttgctaaatataagaaaggatcaggttcaaagataaatccttgttcagaaagtaagttttctactaaagaaatttcattaggataacatataatcctaaaggatcgatggctagatttgtttatagacataagattagtaagtaattatggttattttttgagtgatactaaaatgtttcatagtcttatttggaatttggacaaaaatagataaaggcccttatggggtatgttaaagaagctttggtaatagtttctaaggagttatttaatgcatcaaaaaagttgtttagttgctttatgtattatgtttattattatggtgcaagttcttcaggcaaatgcagctagctatgtggttttgccatttaaagtaaatgctcctccaagctatacttatttggaaaaagctatcccatctatgttaacttctagactttattgggaagaacgttttcaacctatcccggatgctaatgctattaaagcaggaaaggtagaagatataaaggaaatggataaggcaaggatagctacaggtgcagactatcttatatggggacaggtaaatattgtaggtgatgaagctacgcttgatgtacaagtttgtgatatagaaggatcaatttggaggaaaagtaaaaatacaaaagttgataatttaattactgcccttcaagatacagcagatgcaattaatagtgagttgtttgggcgtgcaactacaaaaccatcatcaaaagctactattgtagctcaaatgaactctggattgattaagggaaaaggaaatgaaaatcagtcatatcttaatccagaatttcgttatcaaggaagcaatctttcccgtggccgaagtcaagctcttccctttgcttcagttggtatagttgttggtgactttataggagataataaaaatgaagttgccatattaagtgagtataaagtccatatttatcgatgggaagaagaaaggttagctcttcttggagaatataaattccctcgctcactacagtctttacatattcgtgcttttgatgtggatcatgatggtgtacaggaaatcattgtttcttgctttgatccttcatatgcaaagccatattcgtttattcttagttttaaaaatagagtgtttaaagagttagccacaaacttaccattttatttaaatgtggttaaacttccaccagatttttctcctatgttaattggtcaaaagagtgacaattcaaggattttttctccctctggggtttatgaaatagaaaaacatggacgtaactatataatgggaaatcgtcttagtcttccaaaggaagctaatatttttaatttttcttggttaccatcagattcattaaaagatgaagaagctaagttagtacttgtaaccaataatgaaagattagttgtatataatacaaaaggtacaagactttttatgactgaagaagtgtattatggttcttctgttggtatagacgagcccagtaatatgcctggtcttggaaagtcaaaagagcttatcccttctaaatattttatcccaggacggatgattcctattaatcttgattcaatggggaaatgggagttgcttgtaagcaagccaatttctgttgcagcaaaattttttgaaaattatagatcttttgctgaaggcgaaattcaggctttaacatgggacggcttaggattaggtcttgtatggaatacacgtcgtattaagggaactattacagattttgccttagctgatatgaataatgatgggaagttagacttagttgtttccgttaatagccatacagggattcttggactagaaaaacgaaagacaattatagtattttatcctttagaggtagataaacaaggtatccctaaggctgttgaagataactaattttttcctattaattatttttttattctgatagttaacactactatagttatattatttactatctgttttaatttggtacaggttgatataataaaactattagatttataagtagatttcaattttataaaaggaaagtaagtagattcatcataaataaacgcttaagtaaggtataaggatggcttctattgcccttatgttaccacggtttggactatatggcggtgttgagcagtttgcttatcgtttagcagaagcgcttgcagaagagcatagtgtagattttatttgtgctagggcagaagcttctcctccattgggtgttcgagttattattgtaggtagattgggttggtttaaatggttaaaaatagcttggtttgctatttgtgctgagcaagttcgtaaaaaaggttcatatgatcttgttattggtcttgggaaaacatggaatcaggatatagtccgtataggtggtggtccacaatctaagttttggtctctttctgagcaagcatggtctccaggctttcatcgttatagtaaaaagtttcgtagatatgttaatcctgcaagttggctaaattttattatagaaaaacatcaaatttatagtcagagtactttaatttgtgtttctgaaactgttcggcaatgggtacttgaagcataccctagtattcaatctccagaggttatttataacttaccagattttagtcgatttacacctactacttatgagcaaagagtagtggcaagagctaagtttgatctagacatgggacacattgctattgctacagcaacaagtaattttatgttgaagggaactagaagtttaatcaaagcaatgaagcttcttcccttaaattttaagttatttattgcagggggtagggatatatcctcttataaaaagcttgttcatttattaaaagttcaggatagagttgtatttatggggaaagtagaagatatgctttcattgtatagagcaatagatttatttgctcttcccacttattatgatgcttgttcaaatgctgtattagaagcaagggcatgtggattaaaagttcttagtagtaaatatgatggttctagctcatttttaccccaacattggttaattaataaccctagtaattctcaagaaatagcaaataaacttttgtctatgagccaagaaccacctcctagtcctatgtatataccaagtactataaaagcaggtcttagttcttgggtgaattttattgaatttatgcttcaaaagaagtctttaatgaagatgtaatataggagtttaattgtgctaaatttgatatagctagctaagaatcaaatagtatgataaaaaataatgctgtatttattataagttattgactacatcatattacttttttaaaataagtaacacatagtaatactataattttttgaggtaaggaaaagcaaatgaaattaaaaatattttttgtagtaactattctcttaacttcattttatacagctacagcacatgaattccttataaagtctgataaagataatgtagtaaaagaagagaaaataacaattgatgttgttgaaactcatgtttttataaaacctgaagagcttcctgtacttaaggatgttttactttcttttatacaaggtaaaaaatcatcagaaacaataaagcttgaatcaatttcaaaagagaatttattgcgtggcattattgatcctactactagtgaagatattgttgtttttgctaaaagattacctcaatattggagtgaaactacagaaggtatattagaaggtgatagagaaattttagaagcacaggggaaaaaagttttaagtgttggaagttatgaaaagtatgcccttctttttatccctggggaagattcaaaaactatttcaaactatgttgttccaggtgaacatccaccattatttcttgctccaatgtttaatccttatgctgtgaaagtgggacaaaaaattaaatttatggtgacaagcgaaggaaagcctgttgcaaatgcttctatttcagctacctatgatggattcagtgataaagaaaatgtttatgctataactacaaaaacctgtaaaaaaggtttagtccagattagtccagattctcctgggttatggttaattacaacagaagtaaaagataaacttgttgactctattgctgatgaaaagagcattcgttcaacaacactattttgggtaacaccctaacaaagtatatagtaatttaattgaagaaagacattaatattcactaatgtctttcttttttactatctgatttacattatatgtattaattcattatttaaccagtgataaaaatctattcttgccctttgtgcataccattctttacgctctttctttttaattttttctgtgggttctggaacaaggccaaaatgaatgttagatggttgaaattgttttgatggacatgatatatgttcaagtaatcctccaagggcacatgttttgggaggtcttagaatttttttatctttagaaagtgcaagcaaaagtatacttacccagagaccacaggcaatagattctacatagccttcaacacctgttatttggcctgcaagatgtatacatggaaaattacggagtgctaattgatctgtaagtattttgggtgaattgatatatgtattgcgatgcatacttccaaatctaacaaactcaacatttgaaaggccgggtacaagtctaaatatggtatcttgtgctggatatgtaagttttgtttggcaaccaacaagatttaacatacttttattaagattttcagggcgtaactgtaggacagcgtaggggcgtaaccctgtatgaggattaataagaccgacaggtttaaatggaccaaaaagaagtgttttttccccacgttcagcaagggcttctataggcatacaaccttcaaagtgtatttctttttccacctttgagttggttactttttctccttttaatagtgaagaataaaatatttgatattcttcataagacataggacagttaagataatccccttctccttgttcttcatagcgtgatccccagaaagcaatggacatatctattgaatctgcagtaacaataggggctatagcatcataaaaataaagatatttatccccaataagggttgatagtgagttagaaatgtttggactagctaatggaccagttgcaactataatacgatcatatttttcaaggaatgatgtactcaaagaagaaacttcttctctgataaggtgaattttggggtgagattcaataagttgtgtaacttgtttagaaaaaagttcgcgatcaactgcaagagcttttcctgcagggacacggcatgtatctgctatggccataagaggactattaagttctctaagttcttgtttgagtaaaccaatacctgtagtaagctcattagatcttaatgaattagaacaaactaattctgcaagtagaggtgtattatgggctggagagaatagctgaggtttttgttcaaatagtgtgactgagaaaccgaatttagctagggttagagcacattcacatccagaaagtcctccaccaataatagcaatgttatgtatattcatatcttattattaattattgttagggataggggagagcaggataatatttataaggtagtaaaaagaagtttataaaaatagattaagttattatagagagagatagtaatatattatgccacattattagttcgttattgttattattattattattattaggttttattataaaagtagttatttactttttgtgactatcatctttttttaactctctggtttcccaccaacgtttatttttttgtttataccaccagtcagtatgatcagatataagaataacatgataaagttcttttgctagactactttttaatcgactaaaaaggttttctaaccagtttttagcataaggatttcctaaattttgttcaactttgagattaagggcaagatcaagttggtctgcatcatgagcaaagatagcctctagtgtttgacagttagaatattcatcccataatgaaagaatactttctccaatatttatacctgaaatagaatcttttaaagcttttctggtattagctttgacatatatatgatttatgtagttaagatcccctatacgtacttctggaaaatcatgaaataagcagagtaagcttgtatgttcagggtttgcaccacattcttttgcaaggatatagcctataattgctgttcgataagaatgttctgctacattttcttttcctgtcccaagaaaaggataaccacttcgagggatatatcgaagcattcctgcttcaaagaaaaattggactatgtttttgatagtgtcactatttaatgaagtataattataattattcatagtaactatatttatttttaaataattctaatagtatttaatattaataggttaacgttgaattgttttcccaacaacatagccgcttgcccaagcccaatgtagattatatcctcccaaaaggcctgtaatgtcaagaatttctccagaaaaataaaggcctggtattatattgctttcaagggtatgagggttaacttcataggtattaacaccaccagccatagcttcagctttttttataccctctgtttcaagagggctctcaacataagcatgaagtttgttactaagccatatacggttttttttacttatttcagcgactttttgtgactggagattaataggaataaaattatcaataaatcgagtaggaaaaaagttttttaataagctttttactgtttgctttgtattactaaaggaatgcatataatcaataagagaaatatgaggtaagaaatttatagtaatagtttgtcctttttcccaaaaacatgaagcctgcaaagcagcaggaccactaatacctttatgtgtaaaaagaagtggataatgaaatgtgcgttttttattatctgctcctatagtgatactaacattaaggctaattcctgctaaatcttgtaatggagagtttttttgaagaataaatggaacaagaattggccgagttggaataatagtatgacagcattgttttgctatatgtattcctaagtctgttgctcctgtggcaggccacgcttgacttcctaaggctagcactaaattagaggtttttagaagttgagtagaagtttttattacaaatgattttgggttagcagatactttttgtatactattttttaataaaaattggacattattttttttacattcatctataagacattttacaaagtgagcaacttttactttacagaagacttgatcatgggatcgtatttcccaagggatattatatttttttaggagatcgatgatatcatggggtgaatattgtaataagacatctttacagaatataggattttctcctacataccattttgggcttaaatttaagttagttatattaccttttcctccacctgctaggcatagtttacgcgctatagtaggtgaatgatctattattatacaagataaacctttttgagctactgtgagcccacacatgagtccagatgcacctgctccaagaatgacgacatcataatcatgttcataatcatattttggagataagttgtttgtcataaataatactatcttttttatataaccttagttttatgttttataaaataatttgttttgagtatagattaactagttttttgtagtatattgatatacttatttactctataaattttgttttattatattatttaacaatagtgagcaacaatatagcggaggggaaaaagttatgaatcctactagtgaagcattaatggcagcatgggagtttcgttatgcttgtaaagagtttgatcctgtaaagaaaattagtgaagaagactttcatataattcttgaaggtggtcgtctttctccaagttcttttggttttgaaccatgggagtttcttgttgtacaaaatgttgagttgagatctgtaattcgtgctttttcttggggtggacaaacacaaattcctacagctagtcatttggtaatcatcctagcacggaagccagaaactatggggccaaactcttcatatgttcgaaaaacaattatggaagatacttaacatttacctgaaaatgttgctaatgctagagcagagaaatatggaatttttttgaaacatgattttaatttactaggtaatgaaagagcttgttttgaatgggtagcaagacaatgttatattccattagctaatatgatgacggcagcagcatttttaggaatagattcttgtgcaatagaaggctttataaaagcagatttagaaaaattactatcagataaaggatacatagatccaaatgagtttggggcagcatgtatagtcacttttggttatcgtaaagagtcatctccaccttttttaaaaacacgccgtccagaaaaagaggttgttcattggataaattaaatttacgaccaatgaaataaaatcaaaagttctaatgctggatgaagactatggcaaaggggacagtctttagcaatagtttcaagagctattttatctttctctgtaatgtttattgtagatatatttaatatgatttctattgttttgattcttttaggctcatgggtaactattgttttcgtctctgcttctaatttaatgagcttaatattatgtagtaatgcatgaatatgcattgctgttataatacaggttgtaatagatgtaacaaacaagtccattgaagaaaaggaagaactttggccataattatttaatggaggatctgttatgatttttgttccactacttacatgaagacattctacttgaaaattaccaatatattttgctagaattacagacacacttcttcatcctattttttgttaaaggttatatacaattactatgaagaaaaatatattgtttcatctaaacaaaaaaaatttagttattaaaattttttttgttagagtattataatacattttttattatattgtgtaatatttttttattaatatataataaaactatctaaaatttttaaaaaagatagactgtataaaatacagtctatcttttttaattaatatatagaaaatacagaaattttagagttgatattgtaagtaacaagaaaaatatattctttcttttacttaaagttatatagatgtctaaatcctgtaaagtcaaatttctatatttctattagttttgttttatatagaaactcagttttagttgtaatatatttgtttagaattatggtttgttataaaacaactgaagataataaaaaaggaatatataatgaagaggttacatattcgttttttttttttttttactctattaacattaaattgataaaataggagatcataatgaattagaagtctgtttaggtagatcatatagtccatatcatgagttgatttatgaatacaactaatattgttatacaacagtgattatactacactctaaacctattctaaggtaaatactaaaaactaaacaacagataaacctgctggctctatatctgcaggagactaaagaaggtattcagcagggcttaaaatcagctgtaaccaatttctgcactacatccaccagtactatagtagcctacttctgattgactacaacatgaagttttacagttattagagtgattgggagtaggagatattgcaagaggttggttaggaaaatatactaataatactacgataatataatatagttattattttttgaataatctgaagataagaaattatatagttaataagaaatttttaattattactacaagtaaaaagcgaaaatgttgtatatagatatataatagtgcttccaatgtatttaatatattacagtataatatcataattaaataaaattatgtaccgtattttaatataagtttattatatattagtgaaccaaatttttatttagttattaaaagctagtagtagctatataaggtataaaaagatatataaactttttaataataagttatagttaaatttttttatgaaaaagatctaactataatagatagatgtagagaataagaaagagaactagttgatttagataaaattaattaataaattattgggaataatggtgtgcccggcaagaatcgaacttgcggcctacagcttaggaggctgtcgctctatcctactgagctacgagcacatgtttgatagtagatttaggtatacttcactatatctgtcaagtttatttgtttaattatcttgaagttagttactacagtttattttataacacattagttttattataactattttcttttgttggttgatgaagtatttccctttgctaatcctatattgcaatgatttttatagatatgtaggaaaactttttgcctagctttgtgtttacgatgttgtgttttatatttttctattttttttataagtaattctgagagaccaatcgatattatacatgctactattcgtcctgttgtgataacaagccttttacatttagaccaatagtcatcccaagggtcaaatattttttttgtttgcctatggttatcattagttaataattgttgtttacccttgtagtaattttcatagctttctccttatgaaagcactacgaggactacctatgagcaagatcatgtaataaacgaaaggaatcttctaatgtagaacgatcactaatattttgttttagaaatgattctataggaccatgcattgttatagctttatctatttcttcattagagccttgaatatatgctccaatattaatcatatcttcagctttacgaaatgttgccatatatctccccacaatacgcccatcttgaacctgttctggagtgcaaatatcagatcgtaaacggctaatagagcgtaatacatcaatagctgggaaatgatcttgatctgccaggtcacgtgtaagaacaatatgtccatcaagtatagagcgaacagcatcagcaataggttcattaaaatcatctccatctacaagaacagtatatattcctgtgattgtaccagtattactacgacctgttctttcaagaagtttaggtagttgtgcaaaaactgtgggtgtatatccttttgtagtaggaggttcaccaacagcaagtccaatttcacgcgctgccatagcaaatcgggttactgaatccatcataagcagaacatctttcccttgatctcgaaaatattctgctactgctgttgcagcataagcggcacgcatacgtacaagaggagattgatcagatgtagctataataagaacagatcgtgtcattccttctggaccaagctctttttccataaactcaacaacttctcgaccacgttctcctatcaaccctattacattaacatctgcagaagtgtaccgagccatcattcccataagagttgactttccaacaccagatcctgccataatacctactcgttgtcctttaccaagggtaatcatggagttaatagcacgtacccctacatcaagaggatctttaatacgtggtcgttcaagtggtgatggaggatttgaataaagagggattaatttttctggtataattggatttccgccactaagaggttctccaaaagcattgaatgcatgtccaagaatctctttacctacggggaacacaggaggtaaactagtatttctaataagacttccaggttggatacctctcatttctccataaggcataaataacagattcccttcacggaaacctaccacttctgcagcaatagcctctccatgttcatcattcccagagagcatatgacatacagcacctagaggcgactttaaccctgttccttcagcaaccaacccaactactttatttactttaccataaacacgtaatggattgctttcttttagcagtttttggcattcttttggtgtaagtcccataaccgtactatacctttattttatttattcactgggggtaaaatttgttaaggttacttgagatggagtattatccatatttaattcatgattactaccttgctctaccatagcagaagagaattcttccatttgcaaattttttggtagttcagaaaatatatcccgttctatattgtcatttatatcagtatgatgagatgttagtatggagttgttatcagtagatatatcagaagtaaaagaatcagtgagtgatgttgaaagagaaggattagttatagtagattcatcagtggaagatagaccagaagaaagttctttattaatttcatattgtggaatatcaggaggcaattctattccttcaagttcaggaaatgtgaattctacctcttctgatggtgggtttattaagtctatttcagctggagagataggttttttatcattgggagataatgtttccttactggaaggagttttttcagaagagtcattttgtacaggagtatgttgcagtattgctgcctcttttgataatgctgtaattcctgttatatctgcaatatctgctatagattgagctgcaacaatgtcaatttcactttcaggtataattaattgttggagtatggctctaacttcttcttttcgaagttggctgttactatctaccatccctgaacgactttctacaattacatcattttcgcccattgttacatctatttttatttcccagttttttaattctggaaattgatttttgatgttagtaatgaggtcgataatagtatttttattatttggattaacacggatagtaacacgttgtcgttcttcaagctgttgaacagccttgttaagaacgctatctagtatcgccgtgtgttctttggataatatccaatcagttgcaacttctgtagctgtatgtaatagttttactaaatctgaacgccagttatcaaaaatgacagtgtattgtctttcaatagtcttcagtatagaagcagcagtcatgtggatagattttatttgttcttttatctcttcttgagcttgctcaatgcctaatcggtatccttcttcatgagctaattctctaatatgatcagcttcttcacgaatacgttcagcttctttcaatgcttgttgagcttgcttatgaagcttatcgctttctttcttggttttttctgcccattgtttagctgtttttctaattgtttctgcattggcacgtgctttatcaagcattgcttgtacatgtattgttgcacgctctctcacacgtgtcatgtattctgaaacagtccgacggttccatacttcttgttcatgtgtacctatgacttgttttaatgaagattctttatcaggagaaggtcccataaaaactgtcccagtattcagtttatttttgggatggtttttttcatctgtagagaactttttattattcataagttttgttacctgatactacattgatagtatcttatatatactattataaaaagacatctccactaccatggttaatagtaactttgccttctccttcaagtcgtcgtacaattttaacaatattttgttgggcttgctcaacatcagatagctttgttggtcccatgaactcaagttcttcacgtaccatatttgctccacgttcagacatatttctgaaaatgtattctttaagctcatctgaagctccacgtaaggccaatgttagttcttcattagaagtttctttaagaacttctctaattgatcgatcgtcaagtccttttatatcttcaaatacaaacatgagattacgaatatcttcagccatctgtgcagaatcctcttcaatctcagcaagaacttcttcttctgtagcacggtcaactgcgttaaggatttcagctacagattgaacaccaccaacttttttcccttctttactacccattgcaatgagttggctttgtaaaaccctatcgacttctactaacatatcttctggaactgattctagtttagcaagtctaataagtacttcagctcgaactccagcaggaagcataataagtaagcttgctgcttgttctgggctaaggtgtccaaggattagcgcaagagtttgaggatgttcattacgtaacatttgggaaagaagttttgggcttactttttcaagttctttaaaaggagcaggtccggactcaacgttaagtgaatccataatatatttagctgtttcaccatcaaggtttttcataagcatacgttttagactatcttgaccaccaataatgagatcttttcctgtaactaaatcttggtgaaatgtacgtaatacatcttctacagtatctttagaaactgtatctaagtctataacagctttagatatagcagcaatttctctgcgttccatacgtttgaacacttcagcagtgaatttatcacccaacacaagtaataaaactgctgctttttgtgttccagttaattccatatagttgactccttgacataggtatatggtatttatttaactaggatatatggtttttatgtggatagatggcatactatcttttataaatgcaatctgcatgcctataaagtttttgctaggagttaaaattatagattaggagaacaacaacttaatttatactatatctaatgtatcaatatggataaaaaatagtataggtactaaaaatgttaattaagattcattcatccatctacgaagaatacgaattgtagaatccatttgactttcagcaagattaagaacatgctttttaagctcttctacacgctttcttttttttgaacgagattcttgcatactatgtttttcactaggctgaacatcaggtgctatgttttggttaagagaaccaactgtattaagaggagattgctgtttttgtatcatctttcatccatcctcgaagaactaaaatagattgttctatattattttctgcaagttgtaatgtataattttttatatcttctaagtgcttaagagattcaaattcttcttcttcctcagaggctattcgtacagcctccattgcggctgctttagcagcttcttcttgtgtttcatataatgctaattgttcttctgcagaaggtaacccttcaaggccttctacaatggcttctgattctacttttggacgtataagagcaaggataacaggtcgtacaactaacatgagaaatagaaatgctaatagggcattcaaaagtggtttcccaagtcgttcagcatacttagcaatgacttctgctgcaggtggttctataggtaagtctgcttcatcaaaaggaatagaacttacttctattgtatctcctcttgcacgatcaaagcctatagcatgtgagacaagaagacgtatacgattaagttcttcttgggaacgtggtacaaatttatattcaccatttggttctttaacataagtcccatctacaacaacagcaacagtcattcgatttatttgtccaacttctccaacaatattttgttcttcacggttaatttcgtaatttgtggtacgggtttctcttgttccttcttgtgtactcatagctccatttggaccatctcctcgaaagtttacgtcgggtgagccagattcaagatttgattgtcctcggtttgtttcttcacttctttgttcagaacgtataacagaactattaggatcataaatttcacgacggatagttttttggttaaaatctaagtctacattgactttagcaataacttttccctgccccataagtgggataagtagttcatcaatacgacgttcaagcccttgttctacttttaatttatattcacgttgggtgacactaagccctgctaaattatcttcatttgggaaataaagaggtttcccaagactatctgttatagagacatgctctttatctaatccttctacagccataacaagcatattaaccatcccttgaacttctttttggtccatttttcgagatgggtttttaagttttaatacaacagaagctgatggtttttgttgttcttcaatgaacaggctgcgttgagggataacaagatgtactcgtgcactttctacatttgggaattcactaatggtgcgagaaagttcgccttgtaatgctcgttggtagttgattctttgtacaaaatctgtttgtccaacattaacagcatcaaaaatttcgaatccaataccagagcctaccatcccaccttcgccagcaatttttattcgtaagtcatatacactggaagcaggaacaaggattgtttttccattatctgctaattggtaacttactttgtctgcttgtaatgttttgataatatgatttgcatcttcaggaccaaggttagaatataatactttataatcagtacgattaatccaaaacatgagtcctataaatatgagggtaacaaatactgctgagccaccaataaaaagtttttgtgtgaggttactattattccaaaattcagtaattcgggcgataatttgactaataaagttttgcatgcatcatttcctagtggaattatgtcaaaaatatatctaacactaattaacagatatctaattctagatatctaatttttcttttatagagataagtgtcagaaaaattacactagaattgtaatctactaagttccttatatgcttctagtaccttattccgaacagccgatgtcatgtttatagctaacccagctttttgtaatgtaatcataagttcatgaacgttttgtgtctccccagaagcaaatgattgaatcatttgactttttgttgtttgcatttcgttaacatttgaaagagaatctttaaaagtatcagcaaaacttttttcaacaggtttactttggggtatagctgcagacttttctttaaaagtatcttgtacctttttaaagtcactcattacatttgtgtaagctttaagccctgttgactggatactcatagttttccccataatatatatatatattagttagattacattaaaatattcaattattctttatcctctacctatatcaagtgccctcatatacatatttttgacggtatctatagttgttgaatttgcttcataattacgactagctgtcatcagatttgccatttcttcaacaacattaatatcagggtaagagaccattccattttcgtcagcatcaggatggcctggttcatatatttgtttaggtggtctattatctggtaatacatttaaaatacgtacaccttttagttcacgatcaagagcagattgcatttgtttactgaatggttcatctacatctgttgctgcacggatgaccgttttacgtctataaggaccaccttctggtgtacgtgttgttttagcatttgcaaggttcattgcagtaacgttaatggtcgttctgtcagcgcttagtgctgaggcaccaatatcaaaagctgtcatgaagtccataattatacctttgatccttccataataatattttttaccccatcaaggttacctttaatcacttgtgttaatgcattatattgtaaagagtttttggccatatttgccatttctttatcaagatttactctatcttcaccatggactacggttggttttattgctttatcccactcagcattgaatccttcaggattaaatacagctggcaaatgattttcttcagtacgtgacatacggccacgcatgtctagacccaaagctttttggagttgatcttcaaattctattgttctgggtctatatcgtggcgtattaacgttagcaatgttactcatgataacattctgacgttgtagctgcatgtccataaccttagcaacaaggtttacatgtggttcatacaagcttttcatgcatacgcctccttactttcaaagctcaatgctgggtgataaaagtaataagcaaaacatatgccataggtgagttatctaagcttctgatataggaggattattatatattgttatttgtcaaaaaatgaacgtcataactagtccttttagtttagttacctaacttaggtttatatgttatttttatctttttaaagttaacatattttaatagttatctttttactagttatttgttcacctttaactatgtatagttgaataattttttgtaatgataataagctaagtcagagacatgcaggattgtaatgataatggtaactcaagatcatattttttgagtagttgttcgttagatagaagttctgctgatggtccatcagctttaatttctcctttactaagaattaacactcgatttgcaaaatgaagggccatatcaagatcatgagttgcaattaagattgcagtatcaatttgttgtaataaatggataaaatttttccttgatttaggatctagtgctgcagtaggttcatcaagcagaagtaattgaggatggctaataagtaatacagctaacgcaacacgttgtttttctcctaatgatagtcgttgtggggggaagtctaataaatgaaaacagtcatattgtttagctattgcttcaataagcatttctttatttttttggtagatagaagattgggttagtgcaaaaagaaattcttctcgtacagaaggaaaaagcagttgtacatcagggtgctgaaaaaggaggcttgtatattttcctgcctttttaggactccctgtaatatcattattcataatttgaacggttcctgctagaggttttaggcagccagcaatagttagaagtaatgtagatttaccagaaccattagctccaattaatgctactttttcattgttatctaatgaaaatgaaatatagtttagtgtgttataactagtaggtaatataaaagaattatgtaagttatatttaaagagaatattttctactttaagcaacattactcccctcaagtattaaaataatatgttacagtgactgtcataagcagtataagaatacagactgaaatatctttatatgttgtttttggataagagttagaattatacataattggggaatttttttgcaatagtaccattcggatattatttgcacggtctatattatgcactaaaagtgttcctacaaggtaagcatatgcttttagttttggaataccttttagttttggtgcccgtagtgaaagactttgtaaagcagagataatatctttatgtaataagcaaatatgttgatagaataaaataaaaagaacaataagtttattggaaatttttagtgactgtagcgttttaccaaactcatgtgggttattggttacaaagcttatcaaaaaaagtgcagtagcatttgtttttagtgtgagaataaaagctagtttaataccaactaaagaaatagagaaatgtgggaatattgtgataggggtaggatcatatatcgttaaggggaaagtaatccatacaatgattataaaaatattgataggtaaaagtattgataatacttttttaatacttttactccatagagcaataattacagccatggaaaaaagtattcctatgctaattaatgaatggttaagaatagttcctattataagaatgattgcacaaaataagccagctcttggagttaagatatctaaaagtggatgatttggtttaccatataaatcaaacttcattacaataattattggtagtacaattagtagaagacaagagctctggtgcaactttctgtaaaaatacaatagctagtatagtaataattccttctaatatagcaagtgggacatttgctgtaagtaaagttaatgcaacatatttaaattgttgattacttaaaataagtgcaaggtacaataagcatgttgctagaaaaatagctccaaagcctgctataaaagaaaaaagttttattttattaggagattggcagtgtagtttttgtctaaatattagtgcaataagaagagcaggtagccccataacaatacaatttacacctaatgcaacaatccctccaaactggaataatattgcttgtaacattagtgaaatacaaatagctgggaaagtcccccaacctaaaataagaccaagaagacctagtaaagcaaaatgtgctgaggtaggtccaataggtactcttattagagaggtaaggaaaaatatacttgaaaatacagccatagttggtaagcatgaataagtaatacggcgtaatgatattactagtaatataatagtacaggtccaaccacctgctagtacaggtacggataatactccctcacttatgtgcatgacaggatttcctatatttaaagataataaataatccgataaatatgttaaataagagacttacgcctaaaagagctcttaaccataaaggcattgccataataggacatacttgtgttgtggaatttaaggatgacactgtagtagatgtttgggtaaggatatcatcttctgtaagtgtgattggtaactctgcacgatgaccaacattatcactcatgataatagtccaagtcccttgagtattgggtataaaagcaaatcgaccaaatttatctgttctagcgttttgatattcaatatttttattttcagggctgtagacttctatttttgcataaggaacaggttcacctgtagaatatagaaactcaacaccaataggctgttgtgttgtaataatttgtcctgaaacgccatgtgctaatgcttcatggacaaaagaacatagtagtaggaatataataagaaaaaaatatttcatagttgatatacagccttagaagtaattaagttagttaactagtgtaacaagatttaattcaatatcattaagtaatacatttttaaaaaaaatgatacgctaatgtcaatctctttattttatctagtccagtatcttatttatatttcattagttagaaagaagtataaaataattatgaggaggaactatgttaattgggtaactaattttttgaaatagttttgtataatattggatattggtgggaaaaaatagaatgcaagtatgaaataaaaaatactaaatgttattgtattaatagcaattgtgagaagatataaaatgaagggtgaaaaagatgttaaaaaagaagaagttaaagttgtaattatccaagctgataatcctgatggaatgactataaagcaagatctcatgagaattgtttttagcccagtaaatgctgtaataccaaaagttttgtaccatttataactaatgaggaacgtatatgtaataatagatatggcggtaagagaagctatccctatactaccccatgatttaacagcaatagagaaaaatggtataaaaattactgtagaaaaagttcctattaatgctggggttaaagtattttgtcgagcataaaaggctcttccaattacttgttggactacccaaaatggtactgagaagagcataatttgtagtaatggtgcagtaagcactgtttgtatatgactgaatcgacccccttcaaaaataattcctaatgttggtagggcaataccaatcatccatccggttataggtagtgcaattattaaactaccttttagagctttattaagtgtttcattgaattttgtattattatttttagcagctagtgtagctaaaaaggggaatgaggctacactaatagattgagctacgactcctactgggacaagcataatgcgtcgtgcatagtttaagaggctaacagcaccttctcctgcaagagaaccaaatatacgtattaattgttcgtcaagtataataatggattgtccaagcataagaggtagtgctagccaaagaaaatgtttcatgagtggatgtcgtagcgaaaagtagaagtggataccatttattaatcctactccaaatggtaggaggaaagcacctaatgcagctcctataaggaccccccaacaaaatccttccattccattagaagaagaaattagtccacctaaaataatacagctgttataaataattggcataagcgctggaacaagaaattgttttcgaatataaagtaaagcagagatacatgctccagaaataaaaaatatttgaccaggaagtataatgcgtaggaagaatccaagacgttcctgattagaggctgtaaatcctggtgcagttattttagcaaggtcataagcaaaaaaccatgctatgaatgttgtaacactgatagctattgttgcccaataaaagactgtggaaaagaatttccaaccattttgctcgtcttcttggaatgacttggaaagaagaggaattaatgtgatggaaatatacccaccagcaaggaggtaattaataaagtctgggataacaaatgctgcaaaataaatatctgcttcagacgtagctccaaactcccatgatattactttatcgcgaataagccccatgaccctagaaagtataacacttcctgccataataagagctgccattcccattttataagatgttgttagccacatgtggatagtctcttttatccttttttatttggttatgctaaaaatagtatagtaggttcagagtgataaaaagattgctataaatttaatgtaacttatcaagatcccactcaaaggtaagttcaccttcttctgctgttgttcttaatggtatatcgtattgtaataatgcattatgaactttagtagaaggaaagtcattagtgtttaaagttcctgtactggcaacagcaacagtaggatggatttttttatataattcaggaagaaaacttgatttagagccatggtgaggcaatacaaggacttctgattgaacttcaaggtttgttttgagtagttctttgaggtcgttatgttctgcatctccaggaagaaaagcaagaccatggtttttagcaactaaacgcaagataagtcctgtgtttccttttggaattacaccttttggtggtgataagacttctaagtagatatcgttacttaatggaatttgttctccacgaataagagcttttcttggtatacgtttatttttaagtattgtatcaagttgtagcaaaagaggtgaggcattccctttgggagaatcaattgctggtaagatagcagagtagacctgatcaacattaaatacatttgcaagaaaaagaaagcccttaatatgatctctatgaggatggcttatagcaaaaaagtctaaatggagagaatgagttgtagataatataggtgccaaaatatctcttcctgtatctaagcgattagaataaaatccaccagcatcaatgagtgctcttttatttttcccccactctataagaatagcttgtccttgtcctacatccataatacgtaatctaattttattagaattatcttttgataagataaaaaagagtggggtaacaactagtatcataccagcaattaatatacgttttgctggtgtagtaaaacctgttctacctagctttatcccaatgcttaacaagataagataacaaccaaggagcatagtccaagatggtctaggtagccaaataggacttattatttctgtattttttaagctaagtaataaacggataagaatttcacaaggtatttgtgctagattaatacataatatcccaatagatgtacattgaagagaacaaaaaagtagactaacaaaggcaaggggtaagacaaatatccccaatataggtagccaaataatgtttaatggaaaccaaataggaatatagccaaagacatataggcatagaggaagggtgcatatctgtacaataagtgttgtacctatagtaaaaataataatttttatacttgttgttatagttgaataaagtatctctgaggttatagttgtagatatccttttgtggattgctttccaacatttttgtaacaatgggttaaaaaatgaaatacttaatacggctaaaaaagaaagctgaatccctatatggtatatcccttgaggatcaaataagataaggcagattagagctataattgcaatatctaaaaagcatattggtttattttgtataagataaatagaccatataaataacataattgttgcacgaagtaatgaaggtggtgcacctccaatccatagatatagaagtgcaaagggcaaactaaataatgggatagccttgtatcgtggtaacgaaaggaaaaaacaaggtaaaatttttataagaattatgataatagttatagatgctatacttattacagctaggtgttgtccagataaagctaagctatgtgccagtcctgtgtagcatgtaactgcattaagtgtatgtgaaagaaaaaatcgatctccaaataataaggctgggataaaacttttttctggtggtatatgaagagttgtagacttttgtgtagtaatagattgttgattgatattgcttgtttgctgaatacattggataaactgatgataaagtttcccacgtaaccatgaactaaaataaggtgtcccagaaataataggatggactgctgcatcttttgaccatgcttggaaataaacgttttgtctataccagtagttagctatattataaccacctttattacggaagccttttatcggtcgaactataactcctatagtaactttttggcctggaaggatcatatctctatttattgtggggttttcccaggtccaaagaagttgacttggtaagcttacaatttttgaaatattatttatttcattttgttgagaaaatgaagcaggataaacattttttaaaataaattgtaagcgattacctggaatgccttgaactttttctattgtccctgtgatctgaataggcttatgcttttctaaacatcgagctaaccagattggcgtatattgtggttcttttggtttggatagtatcccaataattgaaccaaccgtaatacatataataaaaaggctgaacgtgttccatttccaatatcggctatcaatccaaagaaatatgagagatgcaacaaaagcatataatgggaattcaatagcaatgatcccaatgagagatactaaaacaagtgattgccaaaaaagaagtggctgtattaccggataataataactatttgttttagttggccttaaaaatatatttcttactaataaagatggtaagatagttgagcatggataaaagtataaaacacaattgtctcatataaaaaatatagaagataattttaatgtatattaatagagcagtgaagttttttgtataaaaataaaaaaggtttaaagtaaactaggttatattagatacatattaatacttatttataacttaatataaataagttactttttaaaagtgttatattgtttaagctaacttagctataaattttatataacttaatgaatagaatgattatctactaagaatagttagagtaatattctttggtttcagatagagacagtagcatattaataaattcatattaaaaaatgaaagattcttcacagagaaatagtttaaaaatacattctatgaggcataaaattttatcttgttatctaatataatatagtgttatttaggtaaggagttataatttgaaactagtgatacatttatattgttagagaatacttttaaatttatatagttatgataaatagttgggttgtacattagtcatatgtaagtcaacaacttctattttatcttcttgtatggatgtatttaagaataaacttcctatcctagcaaatcgaactttatcgtcagttgtaagaaaaatagtagaaccaattaggtttgtgtttggatttaccatattatgttgaatgatacatgcttgaacaagttttgctgttgctactgtggagtctacaatagttatgtcatttccaataattttttgtatagtttctgataatagaggatagtgtgtgcaccctaagacaagacagtcgggttggtctttaattgagcgattaaaaaataaagaggaaagatagtgtataatgattgattcaacaatagggccactaaaccaaccctcttccacaataggaacaaataatggacatgctttactctctacaagaatctctggtcgatatcgaaggatagtttcttcataacatttcccttgaatagtagactctgtcgcaataacagctacatgtccttttagtgaagttttacaagcaatttgggcgcttggctcaataacaccgattattggaataaatggaaaagtttcttgaagtaaaggtaaagctgctgctgtagctgtattacatgcaataattaagagttttatttgtcgttctataagagtagaggctgattgtatggcataatgcaatactgtttttggactttttgttccatagggtaaacgtgctgtatcacctaaataaagatagttctcgtttggcataagattctgtaaagcctgtagtactgttagccctcctacaccagaatcaaataaaccaataggagaagatttattcattatttcccccagtaaattatatctatgattatagagatagatgtaatatatagaatttcaaatgtatcttcaataattatcctgcattatggagaataacatataggtatatctataaagctatatagcaataaaataaaatagaggattatccactgtaatagtgcagctcttattatagataaaagttttttattatagtaataatataaattaatttgactatactcataagacgtaattacttgcaagtaaaggttattcacttagttatataaggtaacttagattaattgtacatttttttttaataacttaatttcgtcatttttaagaggtcgtacttcacctggttgaagattagatagattaatatttccttgtttaactctaataagtttaagaatagtaaggcctaactctttacacatacgacgaatttgacgattaattccttgctgtaaggttatttcaagccatgttgtattagtttcagttatgctagatagaacacgaactttagcgggtggaagctttgttccatcagaaagcgttatccctttggatatattttttaatgttgtatttaaaatacgttcacgaataagaacatggtaaactttagatatatgataacgaggatgtgttaaccgttgtgtgagttcaccatcatttgttataagtaagaggccctcagaaaaaaagtctagtctaccaacaggataaaggcgatagtttttccatgggaatggaataaagtctaagacagtaagacgattttgaggatctttgactgaagaaataactttaatgggtttatacattgatagatagtaatattttttattttttagttgaatatctactcgacgtccatggagtgctataatatctttatctggatgaatgtatattcctggttgtgtgacagatttcccattaatagttacctctccatttaggatatatttatcaacattacggcgtgagcagactccagcattagctaatgctttatttatacggatgctagttgtggtagaagattgtgtatggtttcttagaagttgtggtatctgtttttgttttgtttgcatatactaatagttgtgtaagggttctcttttataagagatgttgtcgtggtcttcttttattataatacataactagttattagtcataaaaagaaatgagtctatatttaggacttagagttatttttattatagttttattaatttcttagatgtgtcaaggaagaatgaatgataaaaaaattattccctttttttttcttaaagaatcaaaatcaagaaaaacaaactattataagggttcttcaatatttttatccatataagtgggctgttataacagcttttattgcttcaggtattgtttctttgtcaacagcaggtattgcttggcttatcaaaccagctcttgatgatatttttattcgtaaggatgttgaggctattgtatatatccctattatttttattattttgactcttctaaagggtattggtcggtatgtgcaaaactggtgtatgagctatagctcttttggggttcttgaaaaactacgtcaggaattatttcataagattataaggttacctttatctttttatgaaacatcacagactggttctcttatgtcctatgttattaacgatgtaggaatgattcgtcagagtttaccagcaattatccaagctgtaagacagtttttaacaataggtggactactatatgttgtttttacacaaaattttagtttagcttgttgggcattaattgttttacctattgcagctttcccctttgttatgtttagtgtagcattaagacgatatggtcgtcgaagtgctgaaattatagcaaagacttctagtttactccaggaattattaagtggcattagaactatcaaagcttttgctactgaaaaagaagagatagagcgttttgatatagaaaatagctatatttctaaacttagtttacgccaatcaaccatttctgagttatcctctccggttatggaacttattggttctattggtgtagctatagctatttggtatggtggaactgaagttcttgaagataaaatgacaccaggaacttttttttcttttgtagctgcattaattatgctttatgagccagtaaaggcgctaagcaatgccaatatgtctttacaaaatgctttagcaggagcagagcgtatttttagtatactagatgattcaaagctgcatatagaaactggagggagtgtattatgtggaaaagagttttatgaattaacgtttgaccatgtaacattacgttatgacagtgttagtgaacctgcattaaatgacgtaagtcttactgtaaggactggagaaaaaattgctctagttggtccttcaggagcaggtaaaagtacttttgtaagtttgataccaagattttataatccacaggctggttctattttttttaacggaagattgttaacagaatatgatcttgtctcattacgtcaagctatggctatagtttcacaagaaccatttttatttaatatgagtataagagataacattgcttatggtcaacctttggaagttagagataatattataaaaattcaggctgcagcagtagcagcatttgctgatgaatttattgatttactacctgatggttacaatactaaggttggtgaaaggggtgtgaaactttcaggaggtcaaaaacaacgtattacgattgcaagagcattgcttaaggatccttctttgttgattcttgatgaagctacaagttctcttgattcagagtctgaaaggatggtccaaggtgcattggaaaatcttatgagaaatagaacaagtttaattatagcacatcggctttctactattttagaatctgaccgtattattgtatttgaagatggaaaaattgtatcttctggaaaacataaagagttgttaggaagttgtgagttatatactcgtttatatatgatgcaatttagaactggtgagtttcaggatgcgcctatcgaaaaaggttgttaaaccactatgtaaaatattagagtggcctctttatggattatattgtctatggtgtgggacacttcaatataatgcgattaataggcaaagcgttgactctagaacagatgctggacttccggttatattatgtttatggcatgatgagttatttcctctcatttattttagggggaaattaaaaatcattactgttgtgagtaaaagtaaggatggagatatactagctaatgttattcaacggatagggttagaaacagctcgtggttctagttctcgaggtggctcagaagcattgcgtaatgtaattaaacggatgaaggatgggttttgtgcttgtatcactgtagatggccctaaaggaccacggcataaagttaaaaaaggtgtaatttttttggcacaacagacaaatgcacctatagtacctattcgaatatttatggaaaagtctaaaaagataagtagttgggatagatttcagctacctataccttttagcaaaattcacgttatatgtggggatgcatattatgtatctccttccttaacaactcaagaagaacttactgatcaatgtaggttattagaagaacgtcttaataacctgaggttataatgcatgggggatatttctacacttacttctttaacatataaatatttccctctgctatttcataaattaggtttgtctaagttacgtcttattgctagtatactaagtacattatcatggtggtgcctaccttttaggagagggttagctttaagagcaatagaaaaacacttagatgtttctttaccaacagcaaagcggttagcaaaagagagttttactgaaaattttttatcatttcttgagagtatgctaattccttcttttggttttgaatgttcttcattaataatggctcaaggagatcttttaaaaaaaatacaaatgttgcaaagacctattgtggcaactacagcacatttgggagcctgggagcttttagcaggtctccttggggacttttcaacagtaacccctagtgctgttgttgtaagaaattataaaaatacatttatacatgagataacaacaaaactgcgttcaagtcgtggagctatagttttaggacatcgtcaagctacacgttctattttacgtatactgcataaaaatggtacagtagctttcttagttgatcataataccagtcaaaaggaagcaatttttttacctttcttaggagagctagcagctataaacataggtccagcattacttgctataaggtcaaaagcccttgtcctccctttgtttcttgtaagagaaaataataagtatattttttgggttgatgatcctttagatacctgtcttcttaaagggaataatactgaaaaagtagaaacagtagccagtttttatacagaagctgtggaaaaagccattcttcgtactcctaatcaatggttttggatgcataatcgttggaaaacacgtccatctatctagtgttatatattttggaaaaattaaacagttaagtctatcactttagtggtatgcttaacaactaatattatatttctaacaactaacagaaaacttaattagatatagttataagttacaactcttcactggttagtattaatatataattagttagagtagttaaaagtgaataactaattaaaataattagatgtataacattaaagttaataacaagctaatagaacagtagagtctaataactaactgttaataaaagatatagggatatttatagttgtagagtaacatttttagatctctcaaggctttttgctatattttataaagctacttttttaagtttataggtagcttttttattttaattttagaaagttataataattaagaacaaattagttacagagttactaacaaaataagaacatattttgtgctcaataagcttaaaaaacttaataaattaaagtaattaaatatattatgtacaatgctagataaatattattctaatttttcgtagttaagaacaatttaggaacaataattattcttttttaagaaaaaatagtatatctattctagttaagaacaattttagtaacaatagaagtaatgatatgaaagattgatgagatactatatgcaactcatctattgttttgttggatgactaatatggttctaaaaaaggacaaaaagtgaactataataattagaataaataagatattttttaactagttatggttttagttatataactttgttgataaagaaattaagtatattattagtttctcaagctagagaggggtgctggtatacatcctccatgtttaataaaggttgttgcattacctttagggacaggagtaatagtagcctcgccaagtaatccaccaaaaaaagctttttcaccaacttttttccctgggacaggaattatacgaacagctgttgtttttttattgattactccaatagccatttcatcagcaataattcctgaaatagttgatgcaggtgtatctccagggatggcaatcatatcaagtcctacagaacagacacttgtcatagcttccagtttttctagggataatatatttgattggactgcagcagcaatgctagcatcttctgaaacaggaataaaggcagaagataatcctccaagttgtgaagaggcaaaagcaccacctttttttatagcatcatttaacatagcaagagcagctgtggatcctggagcaccaatagaggataatcccatactttgaaagatttctccaactgaatctccaatagaaggagttggtgctaatgatagatctacaataccaaaagggatttttaatctggaagcaacctctttcccaacgatttctccaactcgagttattttatatgctgtttgtttaataatatcatataattcagtaaaagtacatgtatcacaagtagacaaagctctatcaatagctttttttattactccaggcccagaaacaccaacattaataacaacatcaggttctcctattcctaagtatgcaccagccataaaaggtatatcttgaggaatgtttgaaaaaacaacaagttttgcacaaccaataccattagctgtacttgtagctgatgcaacatcaagaattttttgtcccataagagcaactgcatccatattgatgcctgcaagagaggaagcaacatttatagaagaacatactcgattagttactgcaagtgcttcaggtagtgattcaataaggtttttctctccaggagtcattcctttttctataagagcactataacctccaataaaatcaacacctacactttctgctgtttcatcaatgagttgacaggttttgataaattgctctgtagaaaaagatgccccaagtactccaataggactaacactaatacgtttatttataatgggaataccaaaatgttcttctacctgtttacaaataggtacaagttcagttgcataacgaataattttagagctaactcgataagcaaaaatatcaaaatcatgactagcacagtcgaaaaggtttataccaattgttatagtacgaatatcaaggttttcattttgtatcatattcagggtactaataatttcatgtcctgttatcataatatctccagttaagctaattttcttattgctatttaattaatatagataataaagaatagaacattttagttttatttttttgtctatgatataatggtactataaatagtgaaagtttttctcttagaaaagaattatagtattggtatacgatgcatagcttcaaaaatttgagaatgttggatagttatattactactatgtggttgtaattgaagtttgaggtcattatataaagcgtctttatttattaaagatgataatgtaatttcacaactaacaaaagaagtttgagacctatcatctgtatcaacaacaagtttttcaatattaatcttatattgtgttattacttttgataatatggtaataagattgatagagtctttacccttaacagtcactataaatttcgaattatttgtactaagatgtaaaggtataggatcatgaaatggatgaattgttatgtgaaggtccatatttttttgtaaaaaggtgttagataattgttgatgaataatatgattatctaatctgtcaggctttattataataaaaatagctgcaaattgatttttaataactgtttgactgacggtatcaaacatacagttaagttttaacaatgtatcagagacggtataaataactccaggagagtccattccaataatagaaataacacttttattcataggttccttaactcataataattttttattttattatatcatattctcttttttctttaggtacaattaaagacatttccagttttctcatgagaaaagtaaaaagttagtatttgattctatagtaaagtgtacaagaatatcataagatatttttatataaaaaatactaactaagcatcatttttttttgaggagggttttatgtcattaagcccattgaattatgctgattgggaaatagcccaggcagcagaaaaacatatgaaaacagtatatgatcttggtaaagatcttggattggaccataaggaaatatttccttatggtcattatatggggaaagtagactataagtctgtactttcaaggttggagcaatcatctgatggaaaatatattgatgtaacagctattaccccaactcctttaggagagggaaaatccactactacaattggattagtccaaggccttgcaaaacgtgggaagcgatcttctgcagctatacgacagccatcaggaggaccaaccatgggggttaaaggttctgctgctggaggcggtctttcacaatgtattccacttacacaatattctcttggttttactggtgatattaatgctgttatgaatgctcataatttatcaatggtggcgttaacttcacgtatgcaacatgaacgtaattatagtgatgaaaaattgtatgctttatctaatatgaaacgattagatattgatcctacaaatatacctatgggatgggtaatggatttttgttgtcaatcattacgtaatattattataggaatagatggggtgagcgggaaatcagacggatatatgatgcgttcgcattttgatattgctgtttcgtcagaggtaatggcgattcttgctattgctaaagatttaaaagattttagacaacgaattagtaaaattattgttgcatatgataagcaaggaaaagctattacaacagcagatcttgaagtggatggggctatgactgcttggatggttgaagctattaatcccaatttgatccaatctatagaaggacaaccaatttttgttcatgcaggcccttttgctaatattgctattggacaaagctcagttattgctgatcgtttaggtttaaaattaagtgaataccatgttactgagtcaggctttggtgttgatattggttatgaaaaattttggaatttgaagtgtcattatagtggccttactccagatgctgcagttattgttacaacggttagggcattaaaaagtcatggaggcgcaccaattcctattccaggacgtcctctcccaaaagaatatacagaagaaaacgtagggtatgtggaagttggctctgcaaatttaatacaccatattaacacagtaaaaaaatctggtgtaccaccagtagtatgtattaatgcatttacaactgatactccatctgaaattgctaaaattagacagttatgtgaattggttggagcaagagttgctgtttctaagcattgggaatatggaggagacggtgctttagaattagcggatgctgtgatagatgcttgtaatgaagaaaagaattttttgccattatatgattggtctcttccattgaaagagcgtattgagaaaattgcatttgaagtatatggggctgaaggagtggagttttctgaagaagcaatctataaactaaataaattacaagcagataacaatagttccgacttgggtgtatgtatggtaaaaacacacctttctttgtctgatgatcctaaacaaaagggtgtccctgatcattggaagttacatgtaagagatatcatgttctttggtggtgcaggatttgttgtacctattgcaggttcaattacacttatgccaggaacaggttctaatccatcttttcgtcgtattgatgtggatacagatacagggaaagtaaaaggaatattttaaaaaattttttagagaaaaagtataaaactaggagtattatggctgcagatattattaatgggatggaaattagagaatctattcttgaggagttacgtggagaggtagctaatcttaaaagggattataatgttgtcccaggacttgttacaatcttagttgggaatcatccagcatcattaagttatgtcactcttaaaataaaaacagctattgagttaggttttcatgaaattcaagataaccagtctgagacaattacagaggaagaactcattggtattattaaaaagtataatgaagatcctcttattcatgggattttagttcaacttcctttacctagtcacattaatgaggggaaagtattacatgcgattgatccaaataaggatgtagatggatttcatcctatgaatcttggaaggttagttataggtggtaatgctattacttttttaccatgtactcctgcaggaatccaagaacttcttatacgttcttctgtagaaacgttaggagcagaagttgttgtcattggtagatcaaatattgttggtagaccaatatcaattatgcttactcaaaaaggagtaggtggcgatgcaactgtaacattggttcatacaaagtcaaaaaatattgttagacattgtcaacaggcagatattgtgattgctgcagtaggtgttcctaattttgtaaaagctgaatggattaaacctggagctactgttattgacgtaggtgtaaatcgtattggttttaatgaagatacagggaaaccaatactttcaggagatgtggattttgttaatgtaagtcaggtggcaggaaaaattacacctgtaccgggaggggttggtcctatgactattgctatgcttatgaggaatactgtacgttcagcatttttccatctttctttatgaatagctatgccctattttttctgtatgattgctccaaacataatatctgttccaaaacgatcaggtattccttcccattgtttttttagagaagcttgtggatagtcttttagaaattgtatgacttgctgttcattttcggatggatttactgtacatgttatataaataagttccccctgtggtggaagaaactcccaagcagtattaagtatttttttttgtagttggataagtttatcaacatcttttggtgtacgaaatttttttatatcagggtgacgagaaagtgttcctaggccactacatggtacatctaataagatagttttaagttgagagcagaggacattttttagtgcaggctgggtagaagaactacagaagatagatggagttaaaagtttaagacgtttagtctcagctattaacccttgtaatttactaagagaaatatcacttgctgcaaaaattggtataccccattctaataataatgatgttttcccacctctacctgcacaggcgtcccatataggtatcttccatgtttggatatcaagggcatccataacaatctggctacctgctccttggatagagatgtatccttgttcaagataatattgtagctcctttggttttctatttggtttgaaatatattcctgaacgacctatagggattccaccattttgacaaagattttcatatagttccctccagttgtcatatattgggtttactcgaatgcaaaaatatggtctttgtaaagaggatgctgcaagttttaatgttttttgtgttccataattagaaatccatagtttaataatccaaagtgggatgctataccaaatagaaagataatggatatcttctggtagtctttgtttataaaaggtattatatttaggtccatcattatgtttactttttctaaatattgtttgaaggctagcattagctactcctgcaaggattttaccaaatttagatttaatagttgaaacagctgtatgtatagtagcataaggaggaattttatcgagaaatagtaactcataggtagcaagacctatgataagttttacttcataaggaagatgttcagatttttttaaaaattgctctagaatccatactatacgtatttctaatcgtaagtatccataaacaagctcagtaactaaagcaatatcttgtttggataatggatatgtcaaaagtatattattcaataatacttggataggttggccttctttaattttttgcagtgctattgttgctatttcacgagctgtttttgttttttttctattagtatattttttttctggtgatttaatcatttatatatttaaagaagatagtaatagtgatagtggataaaaaaagtagttatgaatgttaatgtccagtaatattatatttttttagtttatattgtagtaagctttttgataatcctaataattctgctgctttgacttgtgtaaagtttgtcctagcaagggctcggcgaataagtgttgcttcaattttttcaagtgtagctgctaaatcaatttctacagggagtaaatctacagcacttttaaattgagcttcttcatctttaatttcagatgggagatcatcaatagaaattatgtcattaggaacaaggactaggcatcgttctataacattttgtaattgtcggatatttcctggccattcatatccagtaagatagttgagagcttcatctgtaaaatttttagatttaatatcattttctgatgcaattttttcaataaaatgtgcaactaataaagggatatcttctcgtcgttctcgtagagggggtaggggaatatggacaacattaagtcgataatagagatcttcacgaaaagtcccattttgtaccatagactgtaagttttgattagttgcggttacaatacgtatgtctatatctaactcttctgttccacctactcgttcaaattttctttcttgtaatacacgaagtaacttgacttgtaattcaggtgtaagctcccctacttcatctaaaaagagtgttcctttatttgcttgttcaaagcggcctcgacgcatagcaacagcaccagtaaatgaacctttttcatggccaaatagttcactttcaagtagtgtagggcttaatgccatacagttaacagaaataaaaggttgttgacttcgtggggaagaaaaatgaatagctcttgcaacaagttctttccctgtcccagattcacctgtaataagtactgttgctctgcttggagctgctcttgttacaagtttcatcatatcttttattgcattactgcgtccaataatttgatgctttccaaaacgttcttcaagactttcatgaagtatacgatattgtctgtgaatttttgcaagttctgcagcattttttatggaaagaagaagctcatcattagcaaatggtttagtgatataattaaaggctccatacctcattgtcgctaccgcattctcaatagagccaaaagcggtcattataagaattgggatatgtggccaacgttgttttacatattctagtacttcttggccacttatttttggcattttcatgtctgtaacaataatatctacttctgactcctcaagaaatgctaatgctgtttcaggatcattgagggctgtaacttggtacccttcatcttttaagagggtttccaaaactaataagtaatttttttcatcatcaataagtaaaatatgttcaggcattgtgagtccaatagctacttttaaaatactggtaagaatgattagtcatagtttctatattatgattattttgaagtaggaagtaaaatttgtattagtgcaccaccattggaatcattttttagtataagcttcccatgatggctttgaataatactatttgcaataggtagccctaaacctgtgccattatctttagttgtataaaatgggctagtaacatgttggatttgatcctgagggaagcctgccccactgtctttgaaagtaagttcaataaagccatctttatttttttctccattaatatgtatgaaaccatctttattaatagactgaaaagcattaatgagtatattatataatgctctatagagtaaagatgtatctccataaagttggagttctgatgaaatatcttttgaaattgtgatatgtctttttgttgcttctccttgtaagaatcctagtacttgttcaaggactgaattaagattaagaagttcttgtttaggtattttagggcgtgcataatctagaaagtcattaacagtttgacttagacggcaggattcatcatatattgcagttaatatttgtttattatcaggatttatatccacagcacgacgtaataatagttctgcactagagcgaataatcccaaggggattacggatttcatgtgcaatactagcagtgattcttcccatacttgcaagtttttcattttgatgtagttccatttcaagacgatgattttttgtcatacgttctgagaggatccgttctgctttaacaataaaaaattgtagaaggataaagagtataattgaagaacttaggcaagtagcaagtataagccattggaatcgaatgatataaccataatcatctgtgatatcttgtgttatttcaagaagtcctgttacaatggattcagaaggttgtgtttcttcatttccagtaaaaggaattgtaagagggaaaatagtacgtaatataaagctattaggtggtagttttaaggtaaacattgcagatagtagacttaacgtagaaagaatttcaaaagagggtgaaattgtttctatagcaggttctgctgttggaggaatatgaccatcttgtccaagttcatctttatttatagaataagtaacaattttatccattccataaatacgtaagctatttatatgaagtccatgaatagtagataaaataacttcatcaagttgtttatattgaataggttgccgtaatgctattctaccaaatgttaagaaggttggtagagtaaatcgacgataaatttgatgatttaaatttccaacgataagtaacgcatactgttgctgtcttaataataaagtatgtcgagcagagttaccaataaataatgcaagtacaatacttgagataagaataaggactaaagatatccatgagagaaatcgtgtaaggccaaaagggagttttgtttttatagcaggtttttgggacactttaggtgggatcctccagagaggtagtattaagaaatgactgaaggatagctgcctctttaggataatggttatctcctaatttgactcgagcaagacgtttaccaagttcaacggcaggttgatcaagaggattaatatgtaataaccagccggtaaagagtgttgtggtcattaaaagtcccatcagttcccccgcagcataacagtttgtgttgtcaaattgaagttgtaataatggtacatcatgtgtaacaagagcagctgcggttcctattttttctgcttcaataagttcattaagttgtctatgttttaaccaagaccagttttcagggatagttggtggaaagacaggtccaggtatatagttttttgttgataataagatacaacctttatcctttgggccatcaagaaacatttgttgggtagaatgttggtctgtaactcctattgcagagagaggcatacttccttgtccagacttaccaagactttccgcccaaagttggataaaccattgtccaaacattgaccatgtagcaatataattaaagaaaataagttgagtatatccattttttaaaagagtataacaccattttgctattgtccaggcaggatgtttttggagactttggattgttacatgacgtaatgggagcattatttgattggctccattaagaagctcttcccattctatacctaaaaatgcagaaggaatgagaccaaccgcagatagtacagagtatcgtcctcctaagtttttaggaactggtaatgtttgaatgttttctttttgagcttcttgtcttaagaatccagaatccggatcagtaataaataagcaatgtttttgccaagaatcctttaaagtagtttgtaaccatgtttttataaggaaatattgtgccatggtttcaatagtttctcctgatttactgatagtaactactaatgtttttttagggtttaaagatgtaagtagtgcattcatgctttcactatcaatattatccataatccaaagccagttaccactatgattaggtctatcttgttcaggtgcaaaagctttttgtagtgctttagctcctaatgcagaacctccaatccctaaaacaaccatatatttaaatttatgtaataatggggtaatatgattaatttgttgtttaagtttttcttgataactcatagaaataaaaggaagaatgtcatcagatagatcttggtttagccgagttatgtattcttcaattggaagtggtgattgtaaagattgggttagacggccttcccatgcgtgattccaattaatgtaatacataatatttccttagttattattttgttactatttatttactactttactgttctaaggctaactatttttctatttactatagattactacatagcacatattggtaacttattggataataatctgattatatatttgatgaaataatgtatatatgttattttagaatattaatttcttttattttagtacattagtatcttatagttagttatgttgaagttaactactatactccaattctataaaaagatttaagaatcgtagtaggttatgggaacttcatatgatgtgttataattctgaatgaattagttttctactaaaagctatatagttctaataagcaatcttaatgttattctagtagaatataaatagatatagacagttatgaatggtatagatattattactaatagactgatattgaataaagagatattaatttgaataggaatagttaatggaaaaaacaattatttatttcccgaaaggttgtgttattgggaggtttgttaaaagatataaacgtttttttgttaatgtccttgtggacggtgaagaagtagtagcacatacaaataatactggttcaatgttaggattacttaattctgggactccagtattattatctcctgcattaaatccaacacgtaagcttcaatggacattagaacttgtttggacaggagggacatatcctgatgaaaacaaacttccttcatttccaaataaagaaggaggggtaactccattccattctggtttaggtttttgggttggagtcaatacattaatccctcataaattttttaaattagcttttgaagcaggtttatttccttggactaaaggttattctatctgtaatactgaaactaagataggtatgagtcgtttagatatttgtttacatggaaatggagttccacgattatgggttgaatgtaaaaatgttacattagttgaaaacaatgttgctttatttccagatgctgtttcactaagaggtcttaaacatcttcaagagttgaaaaagattatagatagtggtgaacgagcagcaactttttattgtgtgcaacgtaaagatggtaagttttttggtcctgccgcttctattgatcctcaatatacagaaatgttttggaaagtaaaaaagagaggggttgaaatatacccttatcatatagatattacaactaaaggtcttagtcttggccctatattgccattattatccgaataaagaataatacgttagttagcagaatgtatttttaaaagaaaattttttatgggggtaataaaaaagagtttccatatagtaacactcattattactaggtttgcaatccaagcacctataataggcgatataatacctttattcccaagagatattcctattgtatttaatgcattatatataaaagtataaagaagagaaaaagctatagcaatataaatattatttttccatgctacaatagttgtagctaataatgccattactacaagggagaatgaatatgaaagcttggtgtgccaactagtttttaatagttctacattagatcctgaacgttctaatttatgaatagtttctcttaattcccaaaaagaaagttgttgaggtgcattattattttggatgaattttaacgtttctgatgattggttaaaagtaagtgttaactcttgcaacatttcttgtgaatataaagctggttctgagactgcaactttttttaatatccattcattattgtgaatagaaaaagataatgcccagatgattttttctattgtaagaccatttttatctaaaagatatgcgctaaatccactacctgtatcatcaggcttgagtgtatttatggatactatccaatttttatctgtaaaccagatatcttttagaatagtttttgatttatgttggttatggacatattcttgccatatttgaagtgattttcgaccacaagctgttcctatatattctgaaaaaataaactgtattgtcccccaaaataaacttgctataattataatagaggctattcgagtgaaagatatgcctccagcttgaagtgctattaattcttttttttttgccataatgcataattgaattaccgtagaaattaaaaatataaatggtaatatttgtgcaatagcaaaaggtgttttatatataaaatatgttagaataattttagttgaagtatgagcttctataaaattatctaaacgttcaaaaagatctgttaaaatatatacaccaataccgatagttagagtcaatagtaaaatttttgtattattttttattagataacgaaatagaagactcatcttataccttttattttccttagtatatttgggataaggtatacaatatttgcagttttttcacgtgatgtaagatagataccatagagtccaagtaagaagaagagtatatttggaagccataagccaatggcaggagggatagtaccagattcgcctgtgctaaatccaaaagacattaatccataataaataaaaaacatgataagcgccagaataagtccaaactgtctatgtatcccttcaaacatgattgctaaaggtagtgcaaaaattgtaagagcaatacatgctgctgggtaagcccaacgtttatgaagttcaacagaaattttgttttggtattgcatagtatttgttatattatactcttttataagcctttcccaagacatttctttagggcgtaactcgttgaagtttatatttttaagaagagtagtaagtgggattcgaacaagatattgatcaaaagaaagaaatgatgttttatttagactcattgtgtagatattaccatttgttaggttaaagattaattctccttttgtaggatttgtttcaattgttcctgttggagcaaggataacaagatggcgatctttttgagagcgatcttctagtaagatttgatgtagttctcctgaaagagggtctacctgtcgagcaaaaagaacaaaacctgggaagttgttattaaaaactccaggttgtatggaaatttttacttttgttctagctatatctaaaagtgttgtcttaaattgttccattccccatgctatccaaaagagtgatatccataatgtaagtaatgtacaaaaaaaactaaatgctagaggtgcaggaagcatttgatatatacttataccagaagcttttaatgcaataagctctttatctaaattcattctaagaaaggttagaaatacacctaacatacaagcaataggtataactaatataagaaataatggtaccatgtagctaaaaagaattagaacatctaaaatttctaatttaagacctataaaaaggtctctcatttgtatagcacgatttataataataagtgttaataaggctcctactactaggaagaatatgtatgtgctttcacggaatatttgacgttgaaggagggggatcataataaaagtatgttatattttttgggtagtattgttgttttgtattagttgaggagaaaaaatttttgtaagatgcattgcatctagtggggtaagattaaaacgcatactagcttcgtctattagttctactattgatattgatggacgacttttgtgtgcttctatcagaaagtttagagcattttgaataagctgattatgttttataatagacataatttagagctcttttgatgtatttggctccatagcaatatacttacattcaggggccattgccttaagataatttttaaaccgttcaggagtttgttcaaggactggaaacgttccccagtgcatggggataaccattttacatttaagcatttttgcagcatatgccgcttgataagaatccattgtaaagaatcctccaataggcaaaagtgataaatgaaggttatatagtttcccgaacgttttcatagtttggaaaattcctgtgtctcctgggtggtatagtgtaaaattgttaggcatagtgataatatatcctgcaggagaaccagactcagatgtatgaaaagattgtgtcatagtgatacgtacaccttttctctctattgttccaccaatgttgaagccaatttcaccaataatgaggtgttgtggcataccttgttgtataagtttatctgcagtaccaacaatacaaccacaaagtgcacctgtagatttacagattgcaatggcatcaccaagatggtccgaatgatcatgtgttataagaacaatatcaggtttttgaatttcattccaattttttgtacatcttggattgtttgtaaaaaagggatcaataagaacagatattccattagcattaatttgaaagttagagtgtccatgccaaataatagttgtattcattggttaaaccctccactaatgatcattaagttaatagacagagcttataccttgacacagtatgttacaagggctagtttccccatctatgcgctcgtagctcagctggatagagcgttagcctccggagctaaaggtcacaagttcgaatcttgtcgggcgcaccagttagttttttgtagccctctgtgttaaaagaaaaaatatacttaatgtataacttgtaaaactacaatctggctatgattgtttttctgcttaggttgataggattattaatgagttcgtattttttgtagtaaagttataaggttaaactaaggattcctgagttgtcttttatcacctattctaatggttaatttttctttatcaaaatactctagtaatggaatactatactttctgggaagtcctccagataactctttaaatgttgcaatatcaagttctttatgggaattaaaccaattctgaagtatagattttagtttttttattgcttgtgtagagtaatacatatcttctgttatatgagtaagagcttttctttctaaaagtaatgtaataataggagtggcttgtttgatagtactatttaatgtcgtaagaatattgctcaattttggaggggtataaccagcttctatatataattttaatatgttgtcgtagagatgttgttgttcaaaagaaagagaaatagtatgtgaaggtaaatagatataattcccttcagaggttaaatttcctttttgaattagttggttgataataaaaccaataagtttatgaggaagaattttaccccatattttataatttgtaaaaaaggttccttgttctattccttgcttaattgggttttttttatgaaaatttgttatagcaactaaacattgttcaactaatgttttcattgtgttaacagacagatatccatagttttctttatcaaaacatataattatacctctttctataaaagaagttaatatagatagaagacgattatgttcaatattggttactatagataatgttgttaaatatattcctgtggcatctaaaaattctatttgttttttgacaagttcttcttctgttgcagatggaagagaaagaagagtatctatagtgtgatcagtaatagtatggcgtgagataggtgacgctatagggttaactatactcccaccagcaacagtttgtaatggtgaaaaggttcgaataacaacatggtcaccaaatattccaactaatggtttttttaatctgatttcacataggatagtttccccaggggcaagagagtttttattaaaaaaatatagctgtgctagaatttcctgtgttccatgatgtaagtggacttctgaacaatgttttagtggacgaggtgaagatggtaggcaggttagggatatcagccaacgtgttgaaagcactaaagtgtcaggatgagcaagtatatcaccacgtttgacttctgaagtatttattccatgtaaattaatagcagtacgttggccagcatatgctgtttctactatattaccatgatattggatttgtttaacttttgtttttttgtttgaaggaagaatagtaatagcttctcctgtagctatagaaccagatgcaatagtccctgtgacaacagtcccatgtcctttaatagtaaagactctatcaataggtagacgaaaaatatctgttttttgtttggagtgaggtatagaaagataatgattaagatgagttttaaggtttttgattccttctcctgtagtagaagatacttgtaatattggtgtattatgaagaaaagtgtttttaaggaatagtttaatatcttcctttataacttctaaccattctttatcaactatatcagttttggtaaggacaatgaacccatgttttatccctaacaatgaacaaatttctatatgttcttttgtttgtggcataactccttcgtctgctgcaataacaagcataacaacgtcaattcctgaggcaccagctaccatatttttgataaatttttcatgaccagggacatctataatgcttagtttttcccctgtaggagaaacatagtatgcaaatccaaggtcaattgtaatgcctcgccgtttttcttcagatagtttatcgcaattgatacctgtaagtatttggacaagggatgtcttaccatggtcaatatgtcctgctgttccaattactatagacatttgtgctactttataacgcctttgaaagaattaacacataattacaatgtaatttttattactaatcaaaaataataagctattatattatatactagttagaaataactaaaggttaggttgtgaagttggccctaagtatttatgtagtatattcccaatagataaaagagtagattcgtcaaaggcttgccctattagttgtatccctacagggagtccttttacaagtcctgcaggaatgctcaggccaggtaatccagcaaggtttaaagaaacagtaaaaatatctttatgatatattgtaataggtttttttatagtagaacctatttcccaagctgttattggagaaacaggtgttaataatatatcacactttttaaatactgataaaaaatcttggaggatgaggtagcgtacttgagcagctttatgataataattttcataatagtcagttgaaagaacatgtgttccaagtaagatacgtcgtttaacttcttctccaaacccttttgttcgagagtttatatataattcttctaatgtatgactattttttgcacgatatccatatcgtacaccatcaaaacgtgcaagatttgatgaagcttctgctgtggcaataatataataagtggcaatcgcatgatctgtggcatgaggaagtgaaagatcaatagtttttgcaccaagttcttttgcttgttctatagcctgttggtagatatcaagtataggggggtcaatatgttcagaaataaattcttttgggataccaatggttatacctgttaagtcttgtttttttaggttaatataatagttatctgttgctttaaaggatgatgtagtatcttgaggatcatgtttagccaagacagaaagcattatagctgcatcttctactgtgcgagttattggtccagcttggtctaaagaagaagcataagcaataataccatatctagaaactcttccataggttggctttaaacctatacatccacatagtgctgccggttgtctaatagatccacctgtatctgtcccaatagccgaaaagcattgaaaagctgctacgctagctgcagagcctccacttgatcccccagggacacattttgtattccaagggttatatgttggaccaaaaaaagaggtttctgtagaagaacccattgcaaactcatccaggtttgtttttcctataataatagcaccagcatttttgagttgctgtataataaaagcatcatactgaggtataaagtgtttcaacatgcaagaagctgctgtagtagggatattctttgtaagaatattatctttaaccgcaataggtataccccaaaggggttttttaggatcaggagtagactgatctagtttttttgcttcacttagtgcttcttctgcacagattgttataaaagcattgatagtaggctctgtagcaataatacgatcaagacaagcttgtgtaacttcttcaacacttttttctcttgagataagtaaattatgaatttgtgcaagagaaaggtgtatatcacttgtcataatttcccttatagttagattttattatacaattcgtggaacaacaaaaaatttttcgtttgcctctggtgaatttgtaaggaattcccttgggttaggggttggtataggaatatcatttcttttattatcttgcataattgttgatgggttataaagggcaggtatatttgttgtttctacttgaactaatttttctatatcatgtaatatatctttatattcatcattaaattttttaagtgtttcactggatgtgttaagttttgccagttgtgcaagataagttaaatgttctattgttaacataaaatttttatttgaaatttaaggaatcttagagagcaatatatacactaattatgtcatgagtggtaaatagaatcaagtgttattagtgactgatgacaatttttgaaagatgtaagtcagttttattggacatcaataaaattgcctggaactgatttcccaggcaattcaatatgtgtaggataagccataaggatagaatgtttattggaggcgtttttttattatagcatataatcaccacggttaattttagctttttctacgacagccatgatacttagctcattaaccatagattctaaatcagaattaggaggttgtatgtttgcaagatttccttgtaaatttttagtatgattttctatagtggtaagtttttcccaagctccacgtgttgttattccttcttctagtgctgagctatattcatcccatgaatttaagagtatacttgcttgttctgtaatagaagttaatgtagcatctttaacaaattttgctgcttttggcttagcaagtcccattagaagcatttgctcaacattgctacttttcccactaaggaccttagagggatttatagtacttgttgctgttagttcttctgaaaggagattttcaaaagaactcccttggataggcttagatatttttttagtttcttcttgtcgttgtaattcattagcataattaatacggatactcatatcgcctccaaagcaatcttatatctaaaaatttaagcaaaaagcttgccaagagtaaagttaaaataacctagtgaaatataaattaataatgattaaaaagatacaggcaaaaaattccaacttatgatttttaatctgttaaaactagctttatacttgtttctttgctagaaagagactattttttaatgaagttagaagtaagtggaattttaatttttagcttagaggaattgatggataaataaggagaaaagagatgcctgtattaaataaaattgtttgtgcgattgatttatcggagcaaagtagaactattgctgactatgctgtaatgcttgctaaaatgtctaatgcttctattatagttgtatatgtagctccaacacttactcaatatacaggatttcatatcccgccaaatactattgatagttttgttggtgaaattgtttctggtgctgaacaagctataaaaagttttgtggatacacattttcaaggagttaatgcacaaggaacagttgttgttggttatgcagctgaagaaatattatctttggctgagattgaaaaagcagatatgatagttatgggtacaagaggaagaaaagggcttgatcgtattttatttggatctgttgctgaaaaggttgtaaaaagttcaacatgtccagtacttacagtacatcctgtagaggaaagtgtatagaagtactaagctagtatgtatctacagtttaactatttatctattacctttttttattaaaagaatatatttttttatgttgaagagtccatattgcaaatctatatttaattaaaaactttatatagtaggtttaatatatattttcattaaaattttctatagatatgataataaaaagcattttttatgtactatgagttatacttactgttatgaagttttactgtaatataagtatgataattatatattttatataataaatagatttattaaagatgtatgtattttcctataaaataataaaaataaaagtgtataattatcaataaaaagatgtacaaaatttagttaaagtttttaatttagtaatacataatgatataaagtataaagtcaatataaaaaataatattgtatataaacaatatatatatatattcatttttgaataaattttactgttgattcatatatatatatataataagtaataagctttttattaaatctattacttaataaaagttctttttaattagttgttgaccttatagtgatatgataccacatagttctgctgctttttctttgactttattacttttaataataccttcacggagtatacttattgtattatttggatgtaactcaatgagtgttgatggtaatccgccagtagggataggaggtatatctataattccttctatatagggataaagtcttatatcaagttgagtaatttttgtaacaggaggatttttatttatatttgcactggtagctataataggttctccaacaagatctgcaatttcctttgcaataggatgtgaagaaagacgaacagcaactttttgtgtactagctgtaatatatggtgaaatattttttttagcattaagtacgatagaaagtgccccaggccagaagtgttgcagtaaaggatagataatttgaggaacttctgctgttatagtaagttgttcccagttacctataataagtggaagaggcatattaatagcacgttgtttagctataaaaatttgttgtattgtatcctcattattaaaaattttgcatccaagtccaaagaatgtttctgtaggaaaaataataagtttcccttgattgatgaaatttacagcttcttttaaagaaattatttttaacatattaagaataagttgtaatttttttgactaacctttttttgataagcattaacgacatttttttattaaaagaatatttttttatgttgaagagtccatattacttgaatgtgctataatataaaagcgatattacaatacttaagtaattaaggtagttacttgagtaaagtttataaaagtttccattataaaagttattaactgcaaaaagagatgtacataagtgtattgtagtaaatgtgatgggggtacagctaaaaatatataaggtagaaagtgaatgtggctgtattatgtattatgtatttagtaagagaggtgtattcctaggaatacacctctcttactttttatagaatgagttaaaaaattaattaatagtaatagttgaaatgaaaggaaatatgttgtttcttttcaattttttttcttttttcaaaagaaagtatcccatctatatcaagagttaatgttggtgagagttgtacttcatatgataagccaccttctgcctttgtatattttttcttataactaggagccgaaatagtatatttaaatagaggcgttatcattgagtttgaactcaaactatttgtttgttttaaaccagagcttccaactatccatgtttgtagttgagaatattctgtcaattcccatttagttttcagaccaatacttttttctaaaaggttttccctattctcactaattttacaaacaacaggagattgttcttcagtgtatggactccatctaacattggagacaaggcatccaatatatggtgtaagtattaaagtttttattgcaggtatgttatagccaagatggattaatccaccagttaaggttatgtcagggctgccttttgtaacaatatgcttctctccatgggtaacccgacgagaatttgtaactttcccccaactatagaaacctatcatagtacctgtaatcccttttttttcagggtttaaagtaaaaatagcagctaaaccatcagttgttgatttagacttcacagaaccattactagaattaagttgtgttcctgaatattctttgtattcttttttgttaaagttataagctaagccaatattagttgtaggagagaagttaagcataatacctgcttgtgctgaacggagtttgttttctaagttagtggtatacttatttatagaagtaaatacagtgtaagatttagtaggctgtagtgcctctataatattagtattttcaatagtagatttattgagggagccagaagtttttctattatttaagcaaagttgtaattttttatgtgtagtagtggagagatgtttactagagaagtgggcctttagagcaagagactttaaggtttctgagataaactcagaggtgtcagatagagcaaattgtaaactttgtaaagaactaaattgtccttcaggtaagagttctgcgattaaggagttagtggagggatgtttttttgtaagcagttgtgtttgcctagtttgttgtcttctagctcttcttccattccctgggagtggagtaggctgtgcaggagtttgtgcaacaattggatgttgaggagtattttgtcctaatgggcttgtccctgtattatttgtacattgaggttgttgttgttgttgagcttgagattgttcactttctcttacagctacttggatttcttcattttcaccaacatttttttgggggtcttcgttatcttcttccccttctcctagggggctattatagatatcaagagtttctaatgtttcagttgtaatactagtaacatctcctataatattaggaagataggtatgtggttttttaggtctaggactctccagatctaaattattaccacagaaaactcctgggatatacattggtccagaatcttctttagtattatcatcatctgagaattcatctggtggacttaatggacagttttttaatgcttcttttttgtctttatggtcttgattgataaagccagaaggtggttgtataggtgtggtgtcagatgtactagttgttcttccttcagaaagcagagaatctccaacaagtgtaccgagtccaggtttcttttttttctttggttttttctttggagtatctggaatttttagttcttcaaattcaggtctatttagggttggatagggaatggtagaatcttcattactagtagaagttttttcttcttcacaacaagttgggatggaacttgaggggtttttaggtgtatgtttcagatgctttttcttttctttttttttccttgggatatctggagtgcattcattttctatagcctcttttgttttaagaggcatagcattagattgctgagaggttgattctatagatggcgagggactatttgcatgtatagaaagtagtgattggttgctagatagcgttgaagtctgtgtttgtttctttttctgtttatgatgagagctagaagaaggttgttgtttgtcccctgtagcaacaagagttttagcttctaatggcatttgtactgttgtttgttcagagcttatagaggttgtagttataacttcttctgatggaatgtttgctgaaaatgtatgtgttttaacaggacttgtttttttctcttttttcttttttttagtgctattagagctagaagaagattgttgctcagatgaatgtggtggttcgatatctgtctctaaaagtgaagaagacttgtctaatgtagctattagattctttttttttgttttttcctttgtatttgtggtttgaattccttgttggtttattctaactgttgttttagatgtttcacttcttctatcatcttttttttctaatatgataaattgtatattgttgccatcttcacttttgggggagggaggaattttttctttcagaagttgagttattgcttttacctcttgtaatctatatgcaagtccactggttggtggtaattgagacagtttttcttctgagaaatttttagtagccattagtacatctgtttgcagagtaactaggtattgatatttttgttgtaatgttggatcaacttgttttccttctttaatttgttgtcttatttggtcttccagcgtgcgtcttttgctttctacaggttcaaaaatattttttaatgtagttaaatcaagttgacttagttgatcaacaggtaagcttagtagatcaaaatttatttgttcgggtgtagaggtagagcaggatatatttttctttagcatttctaataagtcttgaacgttttcatgtcttttcattacttgtttgatttgttgttgttcttcttcttcttctttttctttaataaactttgcaagttctacttgttgttcaagcatgctacgatatttttctgttaattctttatcagcctgcccttctctatgtaaatctttaatggtttgtagtagtatatgtagggtactttgtccttcctcatagattgctttaattttttgtaatccaagattttctagtaattgcagattaagagagaatacagatcttttagaagctgtcactagagtttggggtttatctaagggagctttgtttttcccctgtttagttgatggaattttaggtcgtacaacaggttcttctaggtttgaagttgttattatagagcttgaagctgattgagtagactgtggtatactactagtttctatagagcttgaggttctagtggtaagcgtttcagttgatgacactggagcgtattttctcttagagcctaatggtgaagttaactgtgcagccgtttgtaatttattactgctttctgcacctgatagtcctagttgtgccagttgtctaattgttatcggttgttgaactagtgtttttaataattcaagctcactttgatttacctgagtatagctaccaaatattaatggttctctgagttgtggatgtattatagtgcagttaataataattgatttttgacttggatttttagttttttgactttcttttatagctgtaacgttaatatcaagctctgtctgttcatcatcaaggtagcagtgaagtttttttggtactaatcccttgagaaagtttgaaatatttggagtagaagcctccttatcattcatatcactatttttatccatagcaaaagttatagttactttaatacacactatagaaaaaagtagtatcagaatacatggtatactttttatattaatttttgttaaatatttagagttattatttatattattaatatattttactaatctatatctatttaaaaattttattatatataatagtttaatataatttattagacttagtacacatgtattattcattataaaattcctgtaaatataaatagtagaaggttgtttgttttatataaaaacaataatttttctcttaatagagaatattttattataaaacttcattttagaatgaagttttataatatttaactatataataaaaaattatataactaaatattcataagttacagtaattatgcaaagctattgcaatagtatttgtaaatagtatgactatataatagtcaaaaaagcagtataatatttagccaagatttttaactacggtgatatataaggggaaaatataaaaagtcaaggtaagaaaagaagattagacgtaggttgaatatagctatttgtgaatattacatttttataaataaaatttttatagaatttttaacagccagtagttgtaacttatttctaatcttattcttattatatttttttaataaaagagattaagttataaatttttatgtttatagcgttttttatgtatgaagtaacgttttacattaaactaagtagtaaatatgaagtttttgtgtattttattactagctgtaatagtctttctatataagacttgcagttttttacaggttgtgaaaagaagcctagtaacttatatattagttataatatataaagtgagaagtttttacttagcattaattatggtagtagtgcattataccagaagtaatacaataaaagatagacaatctaagagatttctgtttgtataggcagcttttttagtcctaagaaagataaaaaatataagtaactactagtaaaaaaattgtggtattatattcttgttgttaaaggtgttatatccaatactaaagtatattgttgtaaaggtaatataagttttgtgagctataaagtatgtagtttcttttaaagaaattgtatttaatcttgctaaatgagagtaatctcctatttgttagtttcttgtgctgagtataattatgtcttcaaaatcattacgattaattgttgtaggtcggttacgtatacctttttggagagcagctgcagaacattattataaacgtatttcttgttggagagcaatttatgaaactatcattaaagatggaaactcttcattatctgtttctcaacgcaaagcaatggaaggaaaaaatatacttgcagcccttgaacctatagatatacctatttgtttagatgaaaaaggtaaatctatctcttcacaagagtttgcaaattttcttagaaattattttgaaaatacaacaaagcgaccatgttttattattggtggtgcctttggtcttgatagtagtgtatgtaacattgctaatgactgtttatcgttagggaatataacattcccacatgaactagcaagagttatatttcttgaacaggtttatcgtgcagagactttattacgtaatataccttatcatcattagtactagagaatgtataggtatcttttttgaattgaagaggggaataaaattgtttgttactaataattagttttaatatagtattgttatgaagatacatagtagtgcatggatcattattggagctttaggcctatggtttggtgtagaaaatcctatatgttatatcccaggtcttatttttttctatcctttatctttaattatattaggacataatgcaccaggaaaagttgatgcattaagagctggctggattctaggattactaggatcatctttaagtctttattggctagctgttcccatacatactataggtggtttaccatggttgcttgcttgcccttgtgttgtccttgttggtggttctttaggatttttttctggtttgttttcattctttgttttttgttttcatcatatacaattttggcagaaaagcttaatgctaggattggtatggtatttaattgagtggataaaaagttggttttttacagggttcccttggcttccttttacaatgggatttgcacgatatcctgttatgttacaatgtgcatctattattggttcatatgctttgagtggactatatgtagctattctttgtttagttttctatagtattctctattctcagtccaaagatattcataagtgtagtattaagtggcccttaataagggctctatctgtagcctgtattctttttataagtattgtactttttggatacataactttaaagacaaatcccattgatatgaatatacaagatggagttactatagctattatacaggggaatgatgatcagattgttaaatggaatcctcaaacaaaatatcgatctgctcaaaaatatgttagggctagtgaggagttgttaaaaaatatttttcgacttcatgaaggtgggaatacatattatcctgacgtttttttgtggcctgaaacagtcattttatttgattttaaagctgaagttgaaaaaggcatacataatcctttaacatattttgtaaataaatatcagattcctgttatttttggagcacctggaatagaaacagcagggaaagacataactatttttaatagattatattattatagtccaggtaactatagattagattgcagtgaatcaaataaaataaataaatctcttcagtggtatgataaagagcatttagtcccatttggagaatatacacctctttttttcaattttccttttttaagtcaactattgcaggaggtaggtacatatactccaggtgaaaaggtggctccacttctttttgaaataaaagaaacagtaaagaaaggaagtatagcatgctatagaactatttcaatgggtatacttatttgttatgaggtaattttccctgagttagcaagaaagcgtgtagctgagggggcacaagtatttattactgtaagcaatgattcatggtttggccatactattgcaccagttcagcatttacaaattgcccagatgcgatcaatagagtttggacggtggatggctcgagctgctgtaacagggatatctgcttttatagatccttatggccgtattatagattcaacaaaaatttttatccctacataccttgttggaactataagacctattatagataatacggtcttcttttggatagagccatggcttccaacttttgctatcttagtattatgtattatgttgtggaaaaataacttaataacccattcttgtggacataaaagtagagggtgttcatgattcagtttcctgagttaaaggcatgtatcctatctttatcagagcagtttgaaattttttggaggcgtctttgaccaaccatcttataaaaatcgtctttctgaaatagagaaaattctttcagcaccagatgcatggagtaacccagaagcattaacgcctatacttaaagagaagagtcaacttgaagcagataatcttcgatttgaaaaattacatctttgtcatacagaaatgatagactggtttgagcttgttcaagaatttttaacaactaatgagtccagtactgaatttttagaagcattaactgcactagaattacaggtaaaaaaatttcaagatgctatggaagaagcagagatgtatcttcttcttggagcagaagaagataaaatggatgctatattagaaattcatcctggagctggaggtacagaagctcaggattgggcagaaatgttagagcgtatgtatttacgctgggcagatttacatggtttttctaaagaagagatggattacctccctggtgatgaggctggtattaaatcagtaacattgagaatttctggtgagaatgcttatgggttgcttaaaggagaaagaggaatacataggcttattcgcatttctccatttgactcgtctggaaggcgtcatacgtcttttgcatctgttgacgttattcctgacgcaggtgaagaagttgttatagatataaaagattctgatttacgtattgatgtttttcgctcaagtggtcctggaggacagagcgtaaatacaacaagttctgctgttcgtataacacatatccccacaggaattgttgctcaatgtcaaaatgaaaagtcacaacaccataataaagagtctgcaatgcgtattcttagagctaggctttatgagcaagaaattaaattacgtgatgctgcaaaacaagctcaatatatggggaaagaagcaattagctttggaagccaaatacgtacatatacaatgcagccttataggctagtcaaagatcatagaacaaactgtgagtctagtgatgttgaggctgttttaggtggacagattgataaatttattaactcttatttattatcaacatatagaaataatagcttataagaaatattagtagttatgataacttttataaatgaatagataagtataatctttgaaatatgatgaactaaattttaataaataatatgttattaagatagaaagtgttgaagtattttttaaaactgtaaataagtgtaaatattatttatagttagttacataacaaatgtatattcattctatttatagaatagtattctttatttaaaagtagatatactaaaactaaaaatagtatatagttattttaaaagtagaattaaattatgtcatgattttttgataatataatagaaataatagagtaaattatggtgataatgtgatacaataaattcttatgatagataatatgataatttgatatcttgatttatggtggagtatagattatattgctgtttctcttacacatgtaaagattccttatggagttgccatgaacaaaagtgaacttgtgaagtctttatctgaacaggcaaatatttctttagatgaagctacattggttgttaatacgtttgtagatagcatgaaagaatctcttctcaaaggtggtcgagttgaggttcgtggatttggtagttttaaagtaaaagagtatgaaggatatgctggccgtaatcctcgtacaggcgaaaaggttgttgtacaaccaaaacgtcttccattttttcgtgcaggtaaagagctgaaggaatatcttaatagctagatttacctctttgttagtaaatataatttttctttattatagtataattcttttctagagggagtaaaaatttttaataaagatatttattaaactattattaaataactggctatagaattatattatattctatacttaattaagactacttaaaagagaactatcttttagtagtcttttttattagttattgattatgccaaattgattaactatgctataattgtatgctatctaactattttttacttttatttatataataaccttacattataattaatgattgtaactaagagcaataattaatattggaaaattactatgtttagcagagaagatatacctagtatagaattttttaaacttcatggttgtggaaatgattttgtttttattgacaatagatctctttttattcctaaagaaaaaatgtctagttgggcagaggtaatttgtagacgtaagagaggcgttggagctgacggtattgcattttttgagctatctacaatagctggtgctgattatatgtggcatttttttaactctgatggttcaagagctgaaatgtgtgggaatgctagtcgttgtatgggggtattagctgttaagataggtcttgctaatatgcagcatacattaagtacggatgctgggttaataagtattactgttggtgatgagttacaggatgcaactgtaactatgacagatccaacaaatattttgttgaatgtatctctagaagtagaaaaagaaacacaacaagtacattttgttaacacaggggtaccacatcttgttgtatttcatgataatcttattgattatgatattatacctaaaggaaagttattacgaggacactctcatttttctcctgagggagtaaatgtaaattttgttaagattgaaagtccaaattctatgtttgtaagaacttatgagcgtggtgtggaagatgaaactctagcttgtggtacaggtgtatgtgcatctgttattattgcaaatcaacttgggttagttggaactaacgtcaaagtcatgacggcaagtaaagagataatagagcttaatttgaataatggaaaagtattaatgaaaggacctgttgttcatgtttacacaggacaactgcaattgtcagagctaggtcttttttgacaataaaaaataaaaaaattattattttggtaggttatatcttttaatggagtatgttatggggcaaatacaatttcaaggagcaatcacagcactagtcacaccttttaaaaaaggagagatagatcttgagtgttatcgagaaatcattgaatggcagattgagcaaggtattaatggattagtttcttgtggtactacaggagaaagtgcaacattaacatatgaggaatataagttattaattaaagcatgtgttgaacaaacaaaaagccgcgtccctgtaattgcaggtgctggttcgaatgatacagctaaagcaattcagcttacaaaaattgcaaaagagttaggggcggatggagtattacatgttactccatattataataaaccaactcaagagggtttattccaacattttaagacaatagcaagtcaggaatctattcctatcttattatacaatgtcccagggcgtactggttgtaacttactgcctgaaacagttgcacgtattgtccaagatataccagaagttgttggcataaaagatgctacaggaaatttagaacaattttctgaaattattgaattttgtcctattgggttccaagtattaactggtgatgattttactatattaccatctatgatcctaggaggatgtggcgttatttctgtaatatctaatattgttccagctatggttgttgagctatgttcattaattgaaaaaaataaattagaggaagcacgtcaaatccattataatttagcgccactatgtaggttaatgtttgttgaaacaaatcctatccctgtaaaaacggctctttctttaatggagaagttagagcttgaatttaggttacctttaacagagcttagccctataaattttactaagctagagtctacactaaaaaatatagggattataagtaaatagtaatctttctttgtagataagtatagttaaagtaaaataaatagattagatttggatgttagttgagttcttagtataagaaactaactatatctaatagcaaattataataatgtactattagtaactaatgttgttttatgagattattaatctatactatttattataataaatgatactttattaactaacttatttatgttatatattaaaaaaagtcttatagcattatcttttggtacccttggactgggtattgcagaatttataataataggcatattaccttatattgctactgattttggtataactatacctactgcaggacatctcatttcagcatatgcttctggtgtatttattggtgctccttttttaatatttgttcgtcgttatcccctaaaaaatattctattggctttaatagttattattatgttaggcaacctgatagcatccattgcttttaactatgagacaatgatgttagctcgttttatttctggacttcctcatggatcctattttggagttggttctattattgctgagaagttatcagataagggaaaatctacagaagctatttctataatgatatctgggatgacggttgctaacttatttggtgtcccattaggaacattcttaggtgttacgctctcttggagaataggttttttgattgttgttggctggggactagtcacatttttttatgtatggcgatgggttcctcagatagagaatgtaccagatacaggccttaaaggacaattttattttcttaaaagacttgcaccttggttactaattattgctactatattaggtaatggagctgttttttgttggtatagttatattataccattattaacaaatgtatcaggtttttctcctcatagcgcaacattgcttattgtttttgcaggtgtggggatggtaataggtaatttttttggtggagtattgtctgatcgtttgatgccaattcgtatagcaatttttatacaagggttgctcagtattgtccttatttgtatcttttttttctcttatatcccatgggtttccatcttattgatgatattaggtactgcttgtttatttgctttaagtagtccacaacagttattattaattaagttttccaaaggcggagaattgttaggaacatcaagtgcacaaatggcttttaacttggggaatgctattggggcatattgtggtgggttacctattcaaatggggttaggatatcagtattcagcattagttggtgttccattttcagtaataggttgttttatattatatttcttttaccaaaaatttggtatgataaaagtaaattgagtaatgagtattctgagttattaatagtatcttcttattaattattactatattagtagtattgggacattaataagaaagataggataagtagagctataattataattaaaaatgtatttttgtaattctatatatgtctaaaaaatctgtaattagacctaatcctgaagatttaaagttgcccttaattggtgcagattctcatgcacatttagtgtttcctgagttatttactagactctctgaagttattaagagagcagcctctgcaggtgttgcttttttagggaacgtttttttaagtattcaagagtatcaagagtataatgaagttttaaaaactattcctggaatattttttcttttaggcattcacccttgtgatgctatgaagtttaataaaaatatccttaaaattatgtatgatctctttcgttgtgatgaacaattaaaagcagttggtgagatagggttagatttttatcataaagattgtactgctactctccaagaagaagtttttagagctcagcttaactttgcaagagagatgagaaaacccatagtaatacattcacgtgatgctgcaagggatacgattaggattcttgagtctgaaggatgtatagcttaccctgtactttggcattgctttagtggtgatgcagtatcttttctagatagaattttaagtaatggttggaatatttctgttgcagggcctgttacatatcctgggaacaaagaactacaagaagtaatccctatgattccagaagacaagttattaattgaaacagattgtccatacctttctccagttccatggagaggaaagtgcaatgaaccagctttggttgtttttactgcagcatatatagcttctttaaagaagatagatattatagaactttggacacaatgcggagaaaatactaaaaaattttttatgttatcataacttaagcgtatcattactctattgttacttatacatgtttattaattccactgaaaaaagaagtttgtcctcccgagaaatccataatagaactaatgccccctcctccagagcctgaataccatgccatcatagattcaacttgaacacgttgtctaatagcattaacatcaattcgttgttgttttcgtgattcttcaacattgttaagagcttgtattttttcaaattgtttaacaagatcagggttgtcttcaaaaaatttttctactttttctttctctggtgagtctgcaataacttttattcctccttcatctcctgaaacaagttgaaatttaacattttcatctaatcctgcttcttttaatccttcttttactttagtatcaaattcattttggagttgatctctgtaagaaataatagttgaaaaagatattttatcagtaggcccaagtcccataccatccatggtggcacttacagcttgttgtaaccaacttataggattacttgaaagatagttgttgtttttttgtgttctttgagaattattttttactgcttctgtattttttgtctcagtatttgaatgtaggttttcagtagatgattttttttcataattagttgaaacgtaactatttttgagtggtgtaatagacatatttaattccttattgtaaataaatattttttgtatttataatgcaatattcatactattaatgtataatgcttttgtttatgattatgttagtgataaagaatagtttaagaaattagtaatattgtagagatagttaaatttttattgtgtgttatttaaataacgatataataaagtttaatattcaacatagtagtagaataagaaatatgaagaattttaaatagtaagaagaaaggattaaaaaattaatatggctgtaattttgttaggtaatgaacatatatggaagttacctttttgtcgtttagaatttgttgctattcttgagaaaatgttatcttttgcaaagttacaaacaatagaagtttatttagtatcagatacaacaattgcgttttttaatcttcattatatgaattgtttagggataacaaacgtcctttcttttcccatggatgacgaagatcttgctggaagtattattttatctgttgatgctgtttgtcgagaatcattattatatcgtcagcctattttagattattgtttatcattattatctcatggaattgcacatattgctggatatactcatggagtagagatggataaattttgtagtaacttattattaccttttaagttagcttaggtatgctagcagaaatgtaacgtaagttattatacctcctcattttctcttgctatttttttgtatatgtagtattaattattgtatagtgagtgatgttttttattttttgataataacttgttatatttttttatataatttaattgttaaatatatccataatagtatcattttactaggatataagggttgtccaaggaggacatgcagatggctgaagttatatacaaaggaaaaaacttcgaagtcgatgaagatggttttttattaaattttgaaaattggggcccagagtgggttgattatgtaaaagaatctgagggtattagtgaagtaacagatgctcatagaaagattatagaatttttgcaagattattataaaaaaaatggaattgcacctatggtgagaattatttctaaaaatactggttataaacttaaagaaatttatgaatttttcccatcaggtcctgggaagggcgcttgtagaatggctggattaccaaagccaacaggctgtgtttaactaattttattcatatattataaataatgttaaatctattatgattttttatttttatgcattaactatattgtaataattttactaataattagattatttttatttttttcaaaaaatatacttttcaaaatacaacattttaggttagttatcttatcagcataaaataatgtactatgaaaataatacaattagaataaataatgattattaattttataataaaaaatacttaatgaacttctttaccttatttgttatggaccggtatactagaggccaggactaaaacaaaatagtctttgttagggaagggattgtacctgagaaagggaggcgtacatgaaaattatccattctgcaatttttgctgttacattattaacagcatggtcaacagtttgctttgctgcagaagttacagctagttgtactaaacgtgttgaaagctataattatcttgtggattattcaggctctatgatgatgaaacatgttgctgttagagagcctaaaatagaattagcaaaagaagctatattaaaaattaatgcggcaatgcctaaaatgtcatatcaaggtggattatatacttttgcaccttattctgtaattattccccaaggttcttggaattcatgtgttgccgaatgtgcggttaatacaattaagtctgatttagaaatttttggtcgtcttactcctatgggagacggcataaaaatgcatgaaacagtcattaatcaaatgccccctcaggcagccgttattcttctcactgatggtcataataatttagggatgaatcctgttgaggaagtaaaatctatatatcaaacaaatcctaatgtttgttttcatgtagtttcatttgcagatgatgctgaaggcaaagcaataattgatcaaattgttgcacttaatagtggaagtgttcttgttgatggtttacagcttctacaaaatcctgctgtttgccaagaatttgttaatagtgttttttgtcaagagcaaattcttgttacagaagaagttgttgtacttcgtggtgtaaactttgcttttgattcttttgcattagatgatactgctaaagctattttagaagaaacagttcgtcttatcagagcaaatccagattttaatgttcgtttgcttgggtggacagatagtactggtcctgatgcatataacttgcgtttatcacaagaacgtgctgatgcagttaaaaacttcttggttaaaatgggtataccttcaaatcgtttatttgctaaaggaatgggtaaatcctatcagtataataatgctacaaaagaaggacgatatatgaatcgtcgtacagaacttgtcttttttgattagtatataaaaattaattactaaataagaagggcttggattcaagccctttttttgtgaaggggttttatatgaaaaaattttttttctttttagttatgcttataccttttttaagtataattcctcaggtagaagtgttagctaaagttaatatacaatcagaacaagaggtaaaagaaaaattagaacattttgcaaaagaatatctatgtcaagctaataaaaatttaaaatgtaatagagatgcaaaatttattactaaagttggggatgaatttatagctaaattccatgaagttgacatagatagcctttcaatagagttatatcctagttcttcttcaaaaagtatattgtatgttggctatgtgatatatatagagaaatgttatgagtgtagggcaaaaacaaaagttgaagctgaacaagggaactttaaagttacagcaggaagaagagttcgtgagttagcaagatttacaaatgggaaatggataatatagttttgctatttatatgaaatgaatatttagatatatctaatataaagcaaaagaaggtatgcaaggcataccttcttttgctttatattagatatatctaaaactaagaatctatctctattaaaacaggacgttcttcaagttcttcaagaaatttgtttggacgttctttttgttcaggaacaacaatatctaactccatatattccctataacctgtccctgcaggaataagtcgaccaacaataacgttttcttttagtcctctcaggtaatccatttttccttttagagaagcttctgtaagaacttttgtcgtttcttggaatgaagctgctgaaataaatgatgaagttgttagtgaggcttgagtaattcctaataccaatggttctgctgtagcgggttctaatccttcttccacaattttttggttttcttctttaaagtcacctttatctacttgttctccaacaaggaacgttgttcctccaggatttgttacagtgattttacgtaacatttgtcgaacaatgacttcaatatgtttatcgtcaattcctacaccttgaaagcggtaaacttcttgaatttcatcaacaagatatgcagcaagatacttttcacctcttgttttaaggatatcatgaagttcaggatgtccttctgttaagagatctcctgcttcaacaaagtcaccatcagaaacgttaatgtgtttaccttttggaataagatattctttaggatcacctatttcaggagtaacaataagtttacgttttcctttggattcacctgcataagtaactatacctgcaatttcggaaacaacagccatatcttttggtttacggacttcaaacaattcagcaactcgaggaagcccgccaacaatatcacgtgtttttgaagtttcacgaggtttacgagctataatgtccccagcttgtacttcttgaccatctttgaccattataatagctcctgcagggagactatatattgcaggtgttgtacttgtgatacgttgttttgtttggccttctgcatcacatattgatattgaaggacggaagctagtagttctgtattcaattattgtcatggatgattgatgagtagcttcatcaagtttttcttggtatgttttcccatcaataagatcggtaaatttgataaatccatttacttcagagacaaaaggttcgttaaaaggatcccattctgcaagaaaagtaccttttgtgacttcttgtccttcttttacataaagtctagctccattaggtaaagaatatctttctctttctcgtccttgttcatctacgatagaaagttgaccacttttacctattacaagatggacgccatcacgattttcaactgacttaacacgagtaagaacaattcttccagaatgaagagcttcaaaattagagcgttcaatttcgcgtgaggcagttccaccaatatggaaagtacgcatggtaagttgtgtcccaggttcaccaatagattgagctgcaattataccaacagtttcacctatgttgacaagatggccacgagcaagatcacgtccataacataatgcacataccccacgttcagactgacaagttaatgcagatctaatagtgacagaagcaataccaatttcttcaagttttttaacaacatattcgtctataagagtattttcagggaagatgatttcattagtaacaggatgatagataggatagagaagaactcggcctagaattctttcactaaggttttgtttgatttctccaccatcttgaacttgtttaacttcaataccatctacagtcccacagtcatttttataaacaataacatcttggacaacatctacaagacgacgagtaagatatccagagttagcagtttttagagcagtgtctgcaagaccttttcgggcaccatgtgtagatgtaaaatattggagtaccgttaatccttcacggaagttagaagtgattggtgtttcaataatttcacctgaaggtttagccattaacccacgcattcctgctaactgtcgcatttgatcctggtttcctcgagcaccagagttggacatcataaaaataggattaaagctttggttgacttctgttctttctgtctttggatctttaacaacttctgtagaaatttctttggtcatttctgaagaaatatcttgtgtagctttagtccaaacgtcaacaactttattatatttttctgtacgggtgataataccatcacggtattgacgttcaatatcgtcaacttcagaagtagctgtatcaatgattgtttttttggtagcaggaataatgagatctttcacaccaattgtgatgcctgctcttgtagcatattcatatccaatgtcttttaggcggtcacagagaataacagttgctttgattccagcatcacgataagcatttccaacaagagtagcaatattttttttagtaagaacacaattaacgtattcgaatttaagccctttgggcagaccttcccaaacaagaatacgtcctgctgtagtattatatatattcccatcttccatgcggactttaatttttgcatggatgttgacttggttattatcaatagctgaaataacttcccatggggcacagaaaaccattccttcacctttttcaaaagagcgttctacagtcatataataaagacctagaacaatatcttgtgatggtacaataacaggtgagccatttgcaggagagagaatattgtttgtactcatcataagcacacgacactctacctgtgcttctactgataaaggtatatgtacagccatttggtcgccatcaaagtctgcattatatgctgcacaaacaagaggatggagttgaattgcttttccttcaacaaggagaggttcaaaggcttgaattcctagcctgtgaagggtaggggcacgattaagtagtattgggtattcacgaacaacatcagaaaggatatcccatacaacaagttcttcacgttcaacaatttttttggcacttttgatagtagatgcatgccctcttttttcaagttcagagtaaataaaaggtttaaacagttctagtgccatttttttaggtaatccacattgatgtagttttaacttgggacctacaacaatgactgaacgtccagaataatctactcgtttaccaagtaagttttgacggaatcgaccttgttttcctttaatcatgtcagagagtgattttaaaggtcgaccatttgtgcctgcaatagcacgtccacgacgtccgttatcaaaaagagcgtcaacggcttcttgaagcattcgtttttcattacgaataataatttctggagcaccaagctccataagtcgttttaaacgattatttctattaataactctacgatatagatcgtttaagtcagatgttgcaaaacgtcctccatcaagaggaacaaggggacgtaattctggtggaataacaggtataacctccataatcatccattcaggtcggtttccggactcaataaaggcttctacaactttaagacgtttggtaagttttttcttttttgtttgtgatttagttgactgagattcttcacgtagggagttacgcagtgtttcaagatttaattcttctaaaagtccacgtatagcttcagcacccattcctacaacaaaagattcttcattaatatgctctatgacttgtaagtattgatcttcagaaataacttgcatttttgttaagttagtagagcctggatcaagtacaatatatgagtcaaaatataaaactttttcaagatctgccatagccatatcaagaagggtaccaattttagatggtagagttttgagaaaccatatatgtgcaactggagctgcaagttctatgtgacccattcgctcacgccttactttagaagcaataacttcaacaccgcatttttcacagacaataccacggtgtttcattcttttatatttaccacagttgcattcgtaatctttaacaggtccaaaaattttagcacaaaataaaccatcgcgttctggtttaaatgtacgataattaatagtctctggttttttaacttcaccatatgaccattctctaatattctcaggagaagcaatagaaatttgaatagctttaagattacgaatttgtgtagcatttgcagttgctgtactacgaacagtaaaaagttcatcaaggctcatgtatatgtcccccccccccttcctgaattaggccaatgggttatcttaaatagttattaataattattgattatcttattctttatctattaatccagttctcttgggttttttcttaccctcttcttgatggagagttacattaagtccaagggacataagctctttaactaaaacattaaatgattcaggtaagccagcttcaaggaaattatcacctttgacaattttttcatacatttttacacgacctgaaacatcatcagatttaactgtaagaaattcttgcaataaataagaagcaccataagcttctaatgcccatacctccatttctcctagtcgttgaccgccgaattgcgctttccctccaagaggttgttgcgttactagggagtatggccctgttgagcgagcatgaattttttcatcaacaagatggtgaagtttaagtatgtacattactccagttgtaactctatttttaaatgcttcacctgtacgaccatcatataagatggcttttccgtcactaggaagtcctgcttttgctaaccagtcccatacttcgctttctccagcaccatcaaaaactggagtcattgtgataatgccttttttgagtttttgtacagaagtacgaaatgtatcatcatccattgcatctatttctgcagagatttctggtgattcaaagacacttttaacttgttcacgaagtgattgtattgcaacaccttgttcaaccatattatttaactgctgtccaagctctttagcggcccagcctaaatgtgtttccataatttgcccaatattcattcgtgatggaacgccaagagggtttagtacaatgtctacaggtgaaccatcagcaaaaaatggcatatcttcttcaggtaaaatacaagaaacaacacccttgttaccatggcgtccagccattttgtctccaacagcaagcttacgtttcaccgcaatatgtactttaaccatacgaatgactccaggaggtaaatcgtcaccctctgtaactttccctcttttagaatcataaattgtttttatatagttgatttgcttttcatattgtgaaagcatttctgtgatagtttcattaagttctttgcttttaaatgcaccctccagtttttttaagggtagtgaatctaacagttctggagttatggcactattttcttctgcaagtacttctcctttccctttaccaagtatagttgttcctagttgttttccatttataaggggaaggattttttccttcatgcgttgggtaatggatttaatatagttttgctctttgctatccataagacttatttcatagtcttctataaggcgggtacggtcatctttttctcctgaacgacgattaaatacttttacatcaataaccgttccttctattcctggaggtacttttaaagatgtattttttacatcacgtgctttatcaccaaagattgctcgcaataacttttcttcaggagtaagttgtgtctcacctttaggtgtaattttcccaactagaatgtcttctggcttaacagctgcaccaatacggataataccgttttcatcaagatttgaaagcatttcctccccaacattggggatatctcttgtgatttcttcaggaccaagctttgtgtctcttgccacaatttcaaattcttcaatatgtacagatgtatatgtatcttctttaacgactcgttctgaaataagaatagagtcttcaaagttatatccacaccaaggcataaaagctacaacaagattttttcctaaagcaagacctccgtcacggatagctgggccatcagcaagtacttctccttttttgacgatttgtcctgggatacaggatggtcgttgtccaaaacagaagttttgatttgacttgtggtatttcagtaaatcatatgcacggacaccgccgaattcaggataaaggttgggatcgtcataagaaacaataattctgttagcatcagcataacgaataataccatcaccttcagctaaaatacatgagccagagtcatgagcaacatctacttccattcctgttcctaccaaagggcgttcagaacgtaataatggtacagcctgacgttgcatgtttgaacccattaatgcacgatttgcatcatcatgttcaaggaatgggataagcgctgcagaaatagaaaccatttggctaggagaaatgtccataagggtaacttcttcccttgcagacatcaaaacatcacctcgtgcacgagtagttacatagtcatctataagacgtccttcactatcgatggatgcatttgcttgagcaataacttcactaaactcacaagaagcatctagatgtatgatttcatcagtaacataaccgttacggactaccctatatggagtttcaatgaatccataatcgtttacttttgcatatgttgttagtgagacaataagcccaatattaggtccttcaggtgtttcaataggacaaattcttccatagtgagatacatggacgtcacggacttcaaaaccagcacgctcacgtgttaatcccccaggacctaaagcagagagacgacgtttatgggttacttcagataaagagtttgtttgatccataaattgcgataactgtgatgtcccaaagaattctttaaggagagctgctactggtttaggattaataagatcatgtggcatgagtgtggcaacctcttggatactcatgcgttcttttatggcacgttccatacgaacaaggcctatacgatattgattttctacaagttctcctactaagcggacacgtcgatttcctaagtggtcaatatcatcagctgggccatggctatcttttagatgtgtaagtaacttaatcgcctcaagaatatcgttatcagaaagcgtacgaagagttgcattttcatagttatctaatctctgattaagcttataacgtcctacaggagagagatcataataactattatttctaaagagattatcaaagaaagaagcagcaatttcaggcgtaggaggtgaacttggtctcaagcgacgataaatttcttcttgagctttttctgttgtaggtattttgtcttggactaatgtatcacggatagatgacgaggtatcattacctcttgtgtgtaatacagtaaaggtagtaatcccagcatcacgaaatgtttgtatgagaccttctgtaatttcttcagcagattcagcaaggatttcacctgttgaagtatcaataatgtcttcagcaaggaattgtcctataactgttgagggatctacttcaaaggcttcaagtccagatgcctccatttgtctccatactcgttttgtaatagtttttcctgctgctacaaggaggttattgtcattatcaagtatatcagtataagcaatatcttttcggaacaagctaggatcaaacttccattttatacgtccatcattatctaaaatatatgtttcttttttataaaaaaagttaagaatatcttgttttcccatgcccatagctttaagtaaaatagtggcaggcattttgcgacgacggtcaatacgaacataaaggatgtctttatgatcaaagtcaaagtcaagccaagagccacgcataggaataattcggcatgaataaaggacctttcgactggcatgggttttaccactatcatgttcaaaaataattccaggagagcgttgtaactgatttacaataactctctctgttccattaataatgaatgttcctttttcagtcatgagaggcaaagtgccaaagtaaatatcttgttctttaatgtcatgaacagttctactttcagtatcactatctacatcgtatataattagtcgcactttaattcttattggtgcttcataagtaaggcctttggctatacattctgcttggtcatactttggttcaccaattttgtagttaacaaactcaagacttgatgtgcgattaaagtcttcaataggaaagacagaacggaaaacactttctaatccttcttctgggagaggctctaagagtccttcttgtaggaattttttatatgaatctacttggagattaagaaggtgcggaattggcacttcaactttaatttttccaaactgttttgtaagttgaaccattgtttcacctctaaataaggttggccgaatagctatgaataaaattcaagaagcccataatagtacttatccaaaagtacaacaaaactaaataacttatccaaaattttggaaaagctattataaacaatagtgtctaagtatattagggaatacttgagtataactacctcgttgatgcaatgcttgaatagatagatattaaaaaaaagacaaaaaagtagcaagtatttttgtaatgtcaaggttaaaattatttttattttagttaaataaaagtatcattcatttttttaatggttgtgtatgacataacaaaaagctagacttatctaaattaattaacatcagttatattaaacattatttttttggctgcaataagagctttttcaaattctttttctttatgtgcaaaagataccatatttgtttcaaatggtgaaggaacaagaaaaatattatttttttgcattgaacgaaaaagaatactatataattgtgtattagttgtttttacgtcatcaaaactttttaattcattatttgtaaaaaaaactgtaaacatagatgcaaaatttgatacttgtacagggacacctttgtctttgaggattacttcaagctcgttagcaaaagtagcaacctgtttttcaagtattgtataatttatatctttaagaagttgtaatgtttcaaatcctgcagtcatgacaagaggatttcctgataatgttcctgcttggtagatttctcctaatggtgcaatatgctccatatattttgcttttcctccgtatgcacctataggtagtcccccaccaataatttttcctaatgttgtgagatctggagttatatcaaaacgagtttgtgctcctccatatgcaacacgaaaacctgtaattacttcatccataatgaggagtgttccatgagcatcacataatgcacgaaggccttttagaaaaccttctttgggaggtataagccccatatttgcagctataggttctacaaatacagcagcaagatctttaccatacataacaaataagtcttttactgtacttaagtcattatatggagctaagagagtgtctcgaacagtgacttcaggaactcctggagtcccagggatagatagtgtcgcaactccagagcctgcgctagctaaaaaaggatctgcatgaccatggtaacaaccaataaattttaataccttattacgtcctgtaacacctctcgcaagacgtagagcactcatagtagcttctgtcccagagcttaccatacgaatcatatccattccagggaatgcatcaataatttctttagctaatagtacttcagctttacatggtgcaccaaaggttgttccatttgaagctgctttttttatagcatttgttacagtagaattagtatgaccaagaataattgctccccaagaaagaacaaagtctaataattcttgaccatctactgtagtgagatatgctcctttagcggactctataaagacaggttcacatcctacatttcggcaagctcttacaggactatttactcctccaggtataagttttacagctttggaataaagttcttttgaagattcttcttgcactatatgttcctctcattaactaattgaaaatatttcatagatgttttttttaattctttaatactttcaaggatagcatagtctttaagtactgttttgttttttaactgctcaataactttttcacaatcccctttattgcgtccatgaatcatcgtatataatgtatatggccaatcttcggcagttgagggcctgtggtaacaatgggaaatagaaggatgttgagctgcttgttctcctgcttcatctattaatgtatcatctattttccaagctaccatagcattgtgttcccatccagtttgttggtgttttatgcttgcaccaaatcggcgaattacactatcatctttcatctgttgtaatagttcaagtacaaaatgttcttctgtaccaacagcattagcaatatctgcataaggtgtcatagagtcagggatgttgttttgaaccattctaaggatagcacattctatttctgagaaagagtagctcatgtataagatatcctgtgtttcagaataatatatttattaacttaatatgttagtataactaaataatttttatctatactctaaaaatagatgactacagtttttttattcatagaattaatacactataatagcatagctcatttacttcttatatggaagtctttattttagtagtcattataggaggagtaactagtttaaatagtaaatatattgtttttatttaagtaaaaagataagattttttatgataatgtttataaatttatagcttttttgaagaagaggtaggattaaattagtaaaaaaataagtatgatatattaagatagttaaaagttaagttatagtttttatatagcggcatgatatattatcttagtaaaattataataaaaattttttatagtaacttgttaagatgaagtagagttagcataatagtgactatcattataattacagttggtaatatagtgaaatattataacgactattagaaaatgttcattacttttaatttaaatatgttaactacttcttttatgaagacaagttaatatatttttaaaggtagaaaaggtatgttagctacacaaaagctgagtgatccagttctatgtaaggttttacttaataaattaaataaccttttagatcgtcctttaagatttatggaggtttgtggaacacacacagtatctatttttaaaagtggtataacaacccttctcccaaaagggatagatcatctttcgggacctggatgtcctgtatgtgtaacacatgatagtgaaattgaactttttttaaggtttgcagctaaaccaaatgtaattattgctacttttggtgatcttatgcgagtacctggtcctaataggaaatcacttaagcatgcacaagcagagggtgcaaggatttctattatctattctcctatggatattttaaaaattgctattgataatccaaaagatatagtaattttaccagggattggttttgaaacaacagctcctactatagcagcaacaatccttatggcagaaaaagaaggtattaataatattgctgttattccatgccataaactagttccaccagcacttgaaatgttactagcagatccagattgccaaattgatgggtttcttttgcctggtcatgtatctatggtattaggtttagagccatatgcatttgttgttgagaagtgggggaagcctgctatagttgctggttttgaaccagcggatattttagatgcgttatgccgtatggcaaaacaactacaaacaggaaagtacaaagtagaaaatgcctatccacgggctgtttatcaagatggtaatccacaagcacgtaatattttatataaggtgtttcaagtaggagactctcaatggagaggattagagtttctcccaatgagtggccttacttttagagatcattataaaaaatttgatgcgttagaacgatttgatataacaggagtcaatgtacatcctaacactggttgtatttgcggagaaattcttaaaggtaaagttacaccttctgcatgtttattatttgggaaagagtgtactccagaagaaccgataggtccctgtatggtatcaacagaaggaagttgtgcagcatactttaaatatcatatgataagataagcatactttttataagcaagattttagtaatagataacttagagtgcaatatagattaagttattactatcttagtgctatgtatttatgagaggtaaagaataccacttttaaatgaaataaaaattgttaggccagtatacctttttaaggtattaattagaggaataagcgtatattatgactctaatttattaattattctgctttttaattagaaatatatctctatatgttaataagtaacaatatagattatgttttttagcataatattactatctagatgaaataacataaaaagttttgatattaggtcaaattttgtatattgattaaactttttgtatagtaatgtatcatttttataattattgattaaattatccatagacataaaaatttatgttggatataagctagaaatacaaaattattatttcatgcggtagataatacgaccacgtgttaagtcataaggagatagttctactttaactcgatctccaggaagaatgcggatgtaaaatttacgcattttccctgagatatgcgcaaggacagggtgtccattatcaagctcaacacgaaacattgcgttaggaagagcttcttgtacaacaccgtctacttcaatggcatcttcttttgccatggagcctcctaaaaaataaatgggccttaagtatcccctaaaaaaagaggtatgtcaatagttataagataatctgtttaaatatagtataactaaatacagtaagggagattttatgaataaaacgttaagtatgagtttgtctgtgtcttgtaataagccagaagccaataataattaatggtacacataataattgtcccattgtaagccaaccaaaggcaagataaccaatatgtgcatcaggttgtcgaataaattctattccaaaacgaaataatccataacataacataaatagtccagatggattaccttcaggtcgaggtttagaggtataactccacatgattataaaaagaataataccttcaaaaaatgcttcatagagttgagagggatgtcgtggatatggacctccacttggaaaaactattccccaggacttatctgtaatagctccccaaagttcaccattaatgaaatttccaatacgtccaaaaaaaagtcctggtgatattaatggtgatagaaagtctaatacagctaagcagtgaagttgtcttttatatccccaaatacaggcagcaacagtagcacctagaaatccaccgtgaaatgacattccaccattccaaattttgaaaacctctagtgggtctgtatataatatattaaagtcataaaaaagaatataaccaaaacgaccaccaactatgacaccaatcataccccaagtcagtagatctccaacatcattagtagttagaatagaatatgatttttttgctctatatcttccaagtatccaggcacaaaggaatccaattaaatacataatgccataccaatgaacatcaaatgagccaaaagaaaaagcaatgggatcaattaaaacatatttcatatttgttagctttctttttgttgttacaggttagtagataataacaacaatagagtgagtaagtgacactaaaaaaattattatatattaggttaaactagctaattacatttacagtaaaaatatgttatataaggataacttattattataataataaaagagtaatggatatgtagtctctttgcaagatgtaatcttttattgtgacagatgtggtatagtaatatagttaagcattatttttagtatactatcaatatccattattgagctatcaatgagtatagcatcttttgcgggttctaatggcgcaattgttctatttttatcaagtttatctctataattaatagaatgaagaatatcattatagtcttgaaatattccttctttttttagttgattaaagcgtcgttgcgcacgaattattgggtttgcatctataaaaaatttaaattgtgctttaggaaaaacttctgtacctaaatcacgaccttcagcaataattgacatagtatttcctatttgttgttcaatatttttaagatattctcttattatggttcgttctcctagttgtgcagctagtattccagctgtttcactacgaatttcatgtcctatagattccccgttacacatgagtaaagaatttttaccaaccccttggagttgaaaggtaacctttttacattgttcttgcagtatagagtctggcagtgtttctgctttgtttcctaattggagggcaagcttacggaacatagcccctgtatctagatatggtaaatttagtattgttccaagtttttttgcaagagtagatttaccaacaccagctggtccatcaattgtgatgatggtatgttgttccatcataaaaatagcctcaaaatagaatgtgtttatattttaaactaatatcataaaatagtttaaattaaaataataggctggatgataatacaatagagttagtttgattactttagattatatatgctatgcgtaagggttaacatacggctatgttagatttaacttgtaaaaattatagtaaggattagaggttagtaagatcaatggagactaaatagaagctatgttattgaaaataatctagtgtatattttacagcaacactaaagataactagaatcatgaagagttttaaccaaatcccagggataaatttttgacagtatgcgcctaaatacataccaatgatacctccaattccaaataataatgctaatagtaagtctggagcaactgatatattaggatatagtaatgctaaaaaagagtaaaataaaacacttattacagatatgactccactacccatgagagcagcgcctgcaattgtatgaattggtaatccaaatatagaagtaaggaatggtactatgatagcactaccaccaataccataaatacctccaataattccaacaagaaggcttaataagaaagttttaattacagaaaatgtatagctattattagcataggtataacttatttggcgtaatgatttttgtataactttagtagaagaagatttaatatttataagtggatggatactttttttagggaaaaaggaactaagtaaactttgggttaattttgccccaataattaaaagaactgtagctacaaatattttaaagctttgactatcagaaagataggtaatacgaataagcgcacctaccataacacctggtatacccccaaaaataataatccaagcaagaggccaaatcatacgatgttctcttgcatattggagtgctcctacggggttagaaatgacattataaagttgtgtagtagagcttaccgatgggtttgtataaccaagaaaagaaatttggaatggtataagaagaaatgctccagaaagaccaagcattgacataaaaaatgatacaataaatgaagctaacggagggataaaaaaagaggtttctactcctgcggtagggaaatacatagtataatccttatttattaagctatattttaacttcaagtaaaatatgcattattatactgtaatctttatggcaagcatacacttcatatatgaaatgaaaatgtattttttcatattattttcttcaaagcttagatatatacagaaatagagcgcattgaagaagtatttttagagaattctaatgaaaatataggggttaaaaaaaaaaaattgtcttttacccctagacgacttcacagcatgctttatttttcacatcagagtttgaagttaagcatccttattctaacatagggagaaataattacattttaacttaatcaatacatgttacttgtatttgtaatctctaggtattagattaaggtttgcgaggaggtactatacatgggtaaaattataggtattgaccttggcacaacaaattcttgtgtctatgtcatggaaggtaaagaaccaaaatgtattacaaatcctaacggtggaagaacaacaccttctgtggttgcttttactgataaagataggcttgtaggtgatgcagcaaaacgtcaagcaattacaaattctgctcgaacaatttttgctgtaaaacgtcttatgggtcgtagggcagactctccagaggttgtacactggaaagaacatgctccatataagattgtagctgcttctaatggagatgctgctgtagaaattgatggaagagaatatagtccacaagaaatttcagcaattattttaagcaaactcaaagcagatgcagaagcatatcttggagaatctgttagtgaagccgttattactgttcctgcatattttaatgatgctcaacgtcaagcaacaaaagatgctggtcgtattgcaggattagatgttaaacgtattattaatgagccaacagcagcttcattagcatatggttttgacaaaaaagcaaatgagaaaattgcagtttttgaccttggtggtggaacctttgatgtttccatacttgaagttggggatagcgttgttgaagtactagctaccaatggagatacatttcttggtggtgaagattttgatcaacgtattattaattatcttgtggaagagtttaagaaagaacaagggatagatctttcaaaagataatatggcattacagcgtttgaaagattctgctgaaaatgcaaaaaaagagctttcaacagcaatggaaacggaaattaaccttccattcattacagctgatcagtcaggacctaagcatctattaattaaactcactcgtgctaagcttgaacagcttgttatggatcttgtaggaagaacaatagagccttgtagtaaagctttagaagatgcggggttacagacatctaacattgatgaggtcattcttgtcggtgggatgactcgtatgcctttagtgcagaagaaggtagcagagttttttggtaaagagccaaatcgttctgtaaatcctgatgaagttgttgctatgggtgctgctatccagggtgggattttagcaggagatgtaaaagatgtcttattgctagatgtaacacctctttcccttgggattgaaactatgggaggcgtttttaccaaacttattgatcgtaatacgactatccctactagaaaaagtcaaacgtttacaacagctgcagataatcagccttcggtgtctattcatgtcttgcaaggtgaacgcccaatggcaagtgataatatgacccttgcacgttttgatctgacagggattcctccagcacctcgtggagttcctcagattgaagttgcttttaacattgatgcaaatgggattgtaaatgtttctgctaaagatttaggtacagggaaagagcagtctattcaaattacagcatcttccggactttctgaagcagatattgaaaagcttattcgtgaagctgaatctcatgcttctgaagataaaaagaagcaagaaattattgaagttcgtaaccatgcagatggattaatttatagtactgaaaaatctattaaagatttggaaggtaaaattgatgctgagttacaagcagatattacatctaaaattgaagcattgaaaaaagttatggaaggcgaagatagtgcagctatcaaaaaagcaactgatgagttagcctctgcttctcataagcttgctgagcagttatataaacaaacacaagaaacttctggagcatcgggtgacccaacagacactagtgcaagctccagtaagagtggagacgatgtagtggatgcagactttacagaagtaaaataacctgtagatttccactacccccacttatccaacaaaagggctgcaaggcccttttgttgttttttatctatcaaatagtaaaaaataatttttacaataagacaggtatgttttactataaattacttaaagttacatgactttcattttgaaaggaatagggtgtatcatattttctggctttaacatttcatctaattcattttgcgtaatatgaccttgctctaatagaatagttcttacagattttccagtttcaaatgcttgttttgctattgttgagcatacttcatagccaagaaaaggcacaagtactgtaataataccaatagagttatcaacaaattctcggcatttttcaatatttgctataataccgttgaaacatttatctgcaagtgtatagcatccgttagaaatgatatttattgattggaacaaactatatgcaattattggttccattacgtttaattcaagttgaccagcctctgctgccattgtgactgttatatcattcccaatcactttaaaagctatttgatttacaacttctggaataaccgggttaattttgccaggcataattgaggaaccaggtgcccttggaggtaaattgatttctcccaatccacagcgaggaccacttgagagtagtcgtaagtcattacagattttagaaagtttaactgtaactcttttaagaacaccagaaagctgaacataagcacccgtatcttgtgtagcttctattaaatctggagaactagtgagggttaattctgtaatttctgtaagatatgttgtagcaagttctttatactgggggactgtattaatacctgtaccaatagctgtagccccaaggttaatttcttgcataagttttgatgtttcttttattcgttcaatatcttctctcatcattattgaccaagcacgaaattcttgacctaatgtcatgggaacagcatcttgtagttgtgttctacctatttttataatgtttttgaattcatcggcttttttatctattgtatcacaaagatatgaaatactagtaataagactttttaattctttaataagtgcaatacgtaaagctgtaggatagacgtcatttgttgattgggacatatttatatcattattaggatgaaggtattggtattctcctttctcatgtcccataagctcaagagcacgattacaaattacttcattagcattcatatttgtacttgtccctgcacctccttgaatacaatccacaacaaattgatcaaggagttctccatttatgatttcattacatgcagcagagatagcatctttttttttatcagaaagaagaccaagtttattgtttgcaagtgctgcagcttgtttaacttgagctaatgaagtaattaatgagggatatttcccaataacttcacctgtaatttgaaagttttcaacagcacggagtgtttgacagccataataagcttctataggaacaagcacttctcctaagctatcatgttctttacggaattcatgcatgacacttccttgtttttatttttaagtttaattaaatttttaaggtagtatataacagtgagttttgtttttgataaattagtgagggcgatatatactttttctataatgtagtaaaggactttagttattttgttataggttataatatgataaagttatcaactttgcctttaaagttaataagatatatcatgatgagtgaactttgacatgccatggttcaaaacgtacaccgagaaaattatctttaggataacgtaacgaaagataaccactaactgaaagttgtttatatacagatgttgtggtaaaatcagctgtgaaattacggtaaccaaaaccacgttggcctacatcaaaatcaccaattccatgaaatgaatacccaggaggagctagtgatctagaggctagtgataaattcccattatgcttttgtgcttttgcaagaaaaagataaaactgttttataataccacggactccactagtaagaacaacatccttaccaataattttttgtatttctgcccattttttttgagctaaccccttatatataaaattccccattccaggaactttataaacattatgttggggaatagttgctgtgaaggagtttaaaggttttttatccataaaaccataattagatgcatcaacatagaataactcctctagaaaaagaatttctttttttgaaaaattttctatagaagaacgttttgctacattaattgcttcgtctacactgagtaagtaaaaccttccatgtcctactatatcctgaattgcagttagcttagccatgctactatcaagtaatgctttttctttcgcttgaagaatgatatctgtggggaatggcttatcaaagttacgcatttttagaaaatagtctctaatttcttcttctgtaagagttgtaatattttcttgacgttgtgaagattttagtttgccatgtcgattgtttttttgaaatggagcacgagaaagtgattcttttttctttagttttcgtggtgctgcataaatattatgtatccatgtaaaacacgcaatgacagccattagtcctatagaaagaaatttgcgtctggttaacacaagttactccaatggtgtaaaggatgacattgtcaaagccatgtttaacactaaactaattatataagatacaatagataccacaaagtcctttttatgagaaactaaaggtagtttcaaggatatttttaaaaattctgctaaaatacaagctaactaaaggagtatatcagagcaagtttaaacaatatagttattttatacaataaaatatgatggttacatgttatatgtgtttattcttatttaaagcttcttgaccgaaaatttcatttcacttagcgttatattttgtgatataatagaataaattttggtggggtgtttggatggttcaaaaaacagagtatatttggtttgatggggaatttattccttgggatcaggcaaaaattcatgtactttcacatgcgttacactatggtacaggagcctttgaagggattcgtgcataccgttgtatagatggcacatctgctatttttcgtctttcagaccatgttaaacgattattccactccataaaaattcttggattacgtattcctcacttagaagaagatatctcctcagctattattgatacactaaaaatcaataaacttacagagggatatattagaccattatcttttgttggtgaaggtattatgggtgtacatcctggagataatcctattaagactattattgctgtatggccatggggagcataccttggagaagaaggtcttaaaaatggaataaatgtaaaaacaagttcttttgttcgtcatcatgttaatgcaatgatgacaaaagctaagctttcaggaaattatgttaattctgtccttgcaaagatggaagctaagtctagtggatatgatgaagcgcttatgttggattcagcaggctttgtttctgaagcttcaggagagaatatttttattatacgtgatggggttattaagacaacacccttaacctctattttaggtggaattacacgtaattcagttataagcattgcaagtgacctaggttatacagttattgagcagcagtttactagagatgaactttatatatctgatgaagctttttttactggaacagctgcggaagttacaccaattcaatcagtagataatcgtatcattggtgaaggtaaaataggtagtataacacatgctattcaaaaaaaatattttagtattgttaaaggagaagatcctttttataaaaattggttaaccttttttaccatttagttatttttgttggagtaaatagttacttatatgaagcaggtatcattggctatcagatataggccacagtcttttaaggaggttgtggggcaagaaattgttaaaaaaattttatctcgtgctgctgctgaaagtaaagttgttcctgcgtatttgttgagtggtacaagaggggtagggaaaacaactattgctagaatttttgcaaaagccttaaattgtcaacaggcgcctacagctgaaccttgtaatacttgtgagcagtgtaaacgtattactaaaggtatacatgtagatgtagtggaaatagatggagcttctaatcgaggtgtagatgatgctcgtcgattacgggaatctattgcttatgctccaatggaagggcgctataaagtttttattattgatgaagcacatatgcttacacgagagtcatttaatgcattattaaagacattagaagaaccacctcctttttctacttttgtttttgctacgacagaacctcataaattccctgtaactattataagccgatgtcaacattttgttttaaaaccacttactaaagaagagcttatttataaccttattcatgtacttaaacaggaaaatatttgttatgaagataatgctattcagttaatagctcgaagagcatctgggagtatacgtgatagtatgtcattacttggacaaacattaatgtttagtaatggcatattaactgaaaatgttgttcgaaatgtattagggttagcagagcaagaattctatgaaaagcttcttagagcattcaaagatcaaaattacgaagaggtagtaaaacttaaccaaatattattagagaaaggagttgatttagggttttttcttagagaatttgctacgttgtggagaaatctatttttattgagaaaagtttctaagttagatgctaatatgctgggtatgcttcctgatgaaataccacgtttaacttcattagcgaatttatttgagcctatataccttcatgctgcttggcagatggttcttgaaaatcaacgccaaatacttatgagtcttgaacctccagtagctttagaacttttatttcttaaccttacattattacctcatcttgtatctcttgagcaaatttctaatgggttagctgcattatcttcaacatctttagaaacagagatatctaataaacttagagataactctatgaagaaagatgtcatctctgctagtacagaaagtgaatctatttctaatacaaaatttcaaaatgagtaccaagaagttgttgagggagatttgcaatttatcagtgttaaagatgtaaaaagtaagagagatactatttcctcttctatgaatgaaggggagattattgaagaaccaacatgggagggctttttacaatactgtagcaaaaatggttcaactataaatacatattttttaaataaacttacaggtatatttcaacaaaataccttagttataacagtagattcacaatttttatatgaaaaacttatatctgataaacttgaaaaattatatgagcttgtccataactatgctggggaaaaatatactgttcaacttatagagcctaaaaatacctttaaattagaaacagaaattaaaaaagatattgtttctcatcctgttattcaaattttacaacaaacttttgatgcagaactattacggtgtactccaactacaaatttacatattaaacctaataaatgaaagtaaaggaatacagttatgcaaaatatgaatgaattagtacgtcaagctggtcttatgcagaataaaattgccaatttacaaagagaaatgggtgatcgtactatagaagctacaagtggtggggggatggtaaaagttattgcaaactgtaaacaggacattaaatcaatagagattgatcctaaagttatagagtcaggagatattgaaatgatacaagatcttattcttactgctgtaaatgaggctatacgtattagtcggaatacaatggaaaaagaaattagtgctataactggtggtatgcaacttcctggtatattataatacttttttatctaaagttagacaaaatttaaataataatacataaaaactagtaggatgtgttgtggatcagcatataccagaaatattaaggactgttataggtcaattaactaaacttcctggattagggccaaaatctgctatgcgtattgctatgacgtttttaaagtggcctgaaagcgaaactcgtagtcttgggaaatctatttatgaattacgagataaactaggactatgttcttcttgtggtgcactgtcagatagtaacctttgttttgtatgtgcagatagtgaaagattagataatcttctttgtattgtttctgagtgggatagtatggtgacattagaagaagttggtttttttcaagggcgttatatgattttaggaggattactagcacctcttgataatatgggcttagacaaattagagattgatcggttaatagatcgtttaaacaagggagaggtaaaagaagtaattcttgcattaggctcaacaattgaggcagaaaccacagctacaatgatttatagtttaattagtaaacgtttcccttatattcgagttacaagattagctcagggtatccctcttggagcagaagttaaatttatggatagagaaacactgaggcagtcattacaatataggcaagagttatcttaatttttttgttttctaacttcattaaaagccaatagattggtattacctaagtatattagaatatattcaagtcatttatataaataaaattttttgagagctatataaaaagactaatatgtttagcatgataaatgggtaagtattttttacaaatatcttaccaatcaacaggaattcttatgcattggttatcattatttataaattgaacatattgatttgaatgcccaaaaagaaataatttattagtgatagaaacatcatttttgcaatattcaataatattttctagattgccttctttccaccactgtaatgcttgtaatccatttgctgttttttttatatttaatgtagcttgtgctagattatctagtgatattctgtgggataggcttttttttatttctttgagtaaatcaagtgaaggaaggttctgtaaattatagggggcaaacggctgtaatacagcataatcaaatgttgtatggttaaaccctataatcaaatcagctttttttaaacgttgaaataagggaaaaatagtttcttgtgtatagctagtaaaagtatctgtagtagagtcgtaagtaacagcaatactaatttccattttttctgcaaattgccaaccaccgacttcttccgcagaataacgactttctatgtctaatactaagtagtgattagggattgttttattagaaaatgtactgttggaagatgagatagtttgaacttgttccatattgttttctaattaattatagtagtatgtagtttaattataggtttatgctatatatatatatttagcattttatagtaaacattaccctagagttagtttaactctattagtattaataatataattaatatatattaactagttattgataatagttgaggttaatcaagaatataacgtaatgggtctacattcataccatttactttaacttcatagtgaaggtgaggtcctgaactccgtcctgtactcccaacgtatccaataatttgacctcgacggacattttgtcctactttgacatctactgtgctcatatgtgcatatcgagatgttagccctgagccatgttgtaatacaacacagtttccatatgcaccatcacagccagcaaggataacacgtccattcccagaagcttgtataggagtcccaattgctgcactaatatctaaacctttatgatattcaattcggccagtaaagggagatggtctatttccaaagtgagaagtaataaaaccagaaataggccaaatagatgggatagaagctaaagcttctttcttgtcacgtaaagtttggagaagctcttgttgacgaacttcttcaagtcttacttcttctgatagttgtttaaggaaattattgagctttcgaaccattaattcttgtctatgtaagggaagataggttcgagaaaattcttctgttctggaaccaccaatggatgtagcttcaatatctttttcaatattgacaataactctaagttttgagtcaagacgttgtactcttgaaaggtcttcttggagtgaactaatttttcctactaaacccattagttgagtattttgtgtttcaattgtacgttcagattcagaaagttgtctttggagtatattagtattttggtattgttgccataataagatattactaataatcactactccaagaaaaatacaaagtgaactaccaagccagcctttaatataaaggtttttactagtaccgtttttttctttaagtagtataatatgatagttaccaaaaaacatgtataactcatcaaatactaggtatgaggtttttaatataactaatactactaccaaatattaagcattgtagtatagtcatagcctattaacttttttaactaaaactctactatccaaacttgttgctaaaattttattagatgtacaatagtcgtttcccctagcatttgtcaatcgttgtttatgggctagttataggcagtaacaagattttttataaatttataatcatattttagtaggttttttttgtttattatttaactacagctggttataaactgtagtgacgtaatttagttagtaaaaattttttatttttttaaatttatatttaattttactgtactagatattttaaaataatatttatatctactatatagatatactaattatatttagtaatacgataatatatcaataataaatattatagattaattattaatatatagatacatacttaattttaaccttatattatttattactaaatagactaaataaaatattcgttttaaatttactttaactatcaataaatatataggtaactatttgatataatttactataataaataagctacaatatagcttatgaagaattatactatttctctgtttaagtaatttattactatctcttacatttattttcatacttatatatgctgtttattttttatgaatcttattcatattttttatttttcagttttatttattttagttgtttttttatttataagcagctacttcatctagaaatatctttaaagtaatatggagggatagtttttttattatgagagtattagtaataggttctggaggacgtgagcatgcactgacatggaagctaaaaaaaagtgaaaaggtttcagaaatttttgtggctcctggtaatggggggacagcaaaatgtgctactaatattcctataaaggaagataatattcaagaactagtaaagtttgtaaaagaatattgtatagatttagtgatccctgggcctgaattaccattaacactaggtatttctgatgcaatgaaagctataggagtagcctgttttggtccttcacggtggtgttctcaacttgaaggaagtaaggcttttgcaaagcaacttatggttcaacttggtatacctacggctaattatggtatttttcatcatattgacgacgctagagattttataaaaaatactggtacacctgttgttataaaagttgatgggctagcttcaggaaagggtgtttttgtcagccatacagaagaagatgctctaaaagctttagaatatatcatggataaaaaagtatttggagagtcaggtgctactattgtaattgaagaatttcttgaaggagaagaagtatcattattagctttttgttctggtgatgtagtattacctcttccttctgtgcaagatcataaagctgcttttgatggagatgttggtcctaatacagggggaatgggggtatacagtcctgctccttgtttgccaaaagatatgctagaagaaatggctaatcttacgatccttcctatagtcaaagaaatgtctaagcaaggccatccatatgttggtatattatatgctggtttgatgatgacaaaagatgggcctaaggttcttgaatacaacatacgttttggcgatccagaatgtcaggtattaatgatgagacttgaaaatgatctcataacattaatagagagttgtcttacaggctcactttcaggtataaatttgaagatacattcaagtagtgctttgggcgttgttattgttgctgatggatatcctgatacttaccctaaaggtatgcttattgaagggatagaaaaagtaaaagagcaaaaagggatagaagtattccattcaggtactcaactagataatggccaattttattctaatggcggtcgtattctttgtgttacctcattttcttctactttattaaaagctcagcaagatgtataccaagcacttaaaatgattcatatagagaagacaagatatcgtacagatataggtttgaaaggattaaggtataagaatgaaacatgttaaagttgcaatatttataggttctccttctgatgagtcgattgtaagcccttgtacagaaattttaacgcagttaaatattccctatatatttacagtaagttccgcacaccgaactccagagcgtacagctgaacttatagatagcctagaggcaaatggatgtgaagtttttatttgtgctgcaggaatggcggctcatttagctggtgctgtagctgcccgtactttaaagcctgttattggtattcctattacctcttcttctttaggcggaatggatgcactacttgctacagtacaaatgccttcaggctatcctgtagcaacagttgcattggatactgcaggtgcgcgtaatgctgcatggttagctgctcaaattttagcattacatgattcaaaaataaaaaaacagttagatgctgctcgtaaaaaatttaaagatgatgtactttcagtaagtaaaagtatagaagataaatatactagtattattagttaataaaaatctttttatattataaagtggtcctaatgagattagaaggggaaattatttttcatgggtagtatagtaaaaatgtttcagtggttacgtaaaacagttttttgggaatatttagaagctatattttgggctggatgtatggctattattctcacaacgtttgttatccaagcttttaaaattccctcaggttctatgttggaaacattacaaataggtgatcatttattagtaaataagtttctttatggattaaaaaatccattttctgatagttatttaattaaggggattgatccaaaagttggagatgtcattgtctttcgttacccaaaggatacctctgttgattatataaaaagaatagttggtgtccctggtgacattctcgaaatgaaagataagattttatatcgaaatggtgaaaaagtagtagaaccctatgtacaacattcccaagaagatattattgttcctgtaagagataattggggacctatagttgttccttctgaaagttattttgtcttaggggataatcgggatgattctttagattctcgtttctggggatttgttaatcagaagaatatttgtggtaaagcatggataatttattggtcttcacaaggactacataatatacgttttgatcggattggaaagtttatccatgaggataattaaaatatataatagattatgctagatttagagatacaattcccccaataagtataataataccaatccatgcagaaggtttaagcttttgtccaaatagaaaccaaccaccaagagatgtacctaaaatgccaaaaccaccccacatagcataagcaacagcaagatctaaaccttgagttgcataagctaaagctaagaaggctagtcctacacatataagagagagaataccataatagatttttttaaagccttgagaacgagctaacattagattagcaataatgtctaaccctgctgctataagaatagctcctatgtaactattaaacattgttgataatctctccatatacattttgttttagttatttgatgaaatatttactgttccatggtgaatgagtattgctccactaagtagggcaaataaagatattagccgagtaatagtcattttttcatctataacaaagatactaacaagtgtaataagtataagtccaagtccttcccagaatgcataagctactccgattggtaaccctgtagcagcaagtgctaacatataataagaaagtcctatacagataagcataaggagatagccaatatttggttcaaatatccaagttcctagttgtgaaagcttcataacagaagtgcctataacttcaaggagaatcgctataattaagtatatccagtgcttaacttgtgaagtatattgacggggttgcataataccttctttaccttgatgttaaaaaattcactaaattgttaattctctttattaggacgtttattattataaagcatatattttgcaatagcaaagaagtctgtagcagcttgtctcatagattgcgtacgttcagattccttttcaattaagttattgcactctgtatctgcaagaaaatagagcccttctgtttcttcttttatataacaatacccatcttgtacaagtcggataaacgcttcagtttcacctgcaataaactgtttagagtcatggtgtgttgctggatctaaaagatttcttcccattgtttgattatgataagtaattcctgcaagagaagctagggttgggaatatatcaggttgtccacatgggtatggatattcacctggttgaattcttcctggagcataaagtaataggggaatatgattactttgtaatcgacaagctagatatccaggtgtcatgtttaaggatggatcattaagtccatgatctccaaaaatagcaaatatggtattttggaaccatggttgagtctttgcaagagcaaagaattcacctaatgcatgatcagcaaagcgcatagaattatattcttcgtcacttgtatatccgtaatttgctaataattctggtgtagggtttaattttataaaccctgcattatcgctaggtatggtgtatggtttatgaaagcttgaagtttggataacaccaatgaaaggtagtggagaattattaaaaattttgattgcttcacgaaagagatctaagtcagaaattccccaaacatctacgctaggtgaattccacttgccttcttcaaaaagttgaaggtgttctatgttatgatctaatagacctcttatattagcccagcttgcacttccaccaagcatataatatttttcatatcctttaaactcattcatgataaggtgttgctcaataagtttttgatttcttgaacttgttcctccagatcgatttacatcaggaattcctgtcatggttgtaaaaattgctcgagcagtagttcttgctggggcaaaaaagaatgggaaaagaagagattctttagcaagtttttttagatttggagtaggattatcttctcctggagctagtgatgtgcgaggccatgctaatgattccatgatgataatcacaatgtttatgggagttgattgcttatgaccttttattacacgaataaagtttaggtttttttcattagggttagtgacgttaagccactctgctattcgaggataacttgtatgtgttgcagcaatatcagggggaatcgcagacattattttataggtatcataaaggttttgaatgggatttaatcctaatatagcaagatctttgttgatactgaaatatgcattactccatcgaagtggaaaaagagttgtattaatttggccataagcaaataaaaatagtataatcaatgttattattgtccaacatcctcggggaaaggatgataacattgttatcttattactttttagtattaaataaatgaagaaaaggcataaagatagggtaagacaaaaagcaatacttatccaaaagatagggtagctttcccataccatatgtaatgaaattataggagttgtaagaaaatcaaagagagtggcgtcaagacgttgtcttaaatagaagaaatatccaaaatctgtaatataaagaataagaactaaactaataatcaggccatataaactaagaatatatggtatgtatttgggtagccgtttttctaaatatgggcttaaaagaagtaaacacagtggaatagatatgatgacagcaatacgtatatcaaatttacttcctatataaaaagcatacaaaatttgtgaaaatggtatgttagagagtgcatcatataataaaataaacatacttattcttgcaagtatgagtatgccccatattaaaaataagaattttgttatagtataaataaagggtgggagatgtaatttgatattcataggtaatataaaatctttagattaagatagtaagtagttatgtatgtacatgagaaaactaattatattgacgtcgggtatctaatattttttattatttggataagttgttttttatcaagtaagtataatgaggcaacataacttatgataccaataggtacaactaaacatattgtaattactggaaccccatcagataaaaaatatactgtagtgtaacataaaataaaagtacaacaggctgcaagaagttgtagcgatacttttttaaaaggaaagtgaacaggaataaagcaatgtaattttttccatagtaaccagcagtaaaaccataaactaagagaagcagctagtggaggaccaataatattaaagaaataaaggagtaatgctcccaatagaaagcttagtgtaatggttaacatacctacgtagaaaggtactgtttgattattaatagcataatatgttgaaagtagtgttttacttaatgctatggctggtagcccaggagcataggcacaaagagcaaaggttgttatattaacagcttgaaaattaaattcaccatgataaaatattgcttgaactaatggcatcgagatagctataagtcctaatgcagcaggaaaatttattgctaggataaggctgacgttttttgatacttcatctccaaatatagatagtttattttgtctatatatagtagttaacacaggtagagctactatcccaatagcgctactaagaataccaataggaaattctatgagtcgctctgcataaaaaagtgatgctacatgtcctgttggtaaaaaagaagtaagcgcagttgctaaaataaatgtgagttgtgggatagatgctataaaaatattttttggaatttttaaaacgttttttgttaggattgatatattatagtctacttttggttctgctttttttaagtataaggctaatggtagttgtgacatccattgaaagattccgccacagagtacaccataagaaaggaatactcccctatctattggggtataacctattgaaattaatgcaaatataatgactgaactattaaagagtacaggagagagggcaggtaaaagaaaatgtctttcactatgtaatacagctatacaaccagacgtcagaatagcaaaaataatataaggaagacaaatacgaaagagttgtattgtctcgctatgtacagtatgttcccagttaaatccaggtgctaagatatcaagagcaatagtagggataaaccatactacactactaatagtacctataataagtgcaaatattacagcaatacgaagagttagttgtatgccactattggaacatatagattcatgtcggcaaatactggttaaacctatagaaagtgaaccttcgccaagtagtcttcggaaaaaaaaaggtaagcgtaaagctatagttaaagcatctgctgttgttgtgctacctaaaagccaagctattgaaacatccctcattaatccaagaagttttgaaaaaaaggctccaatagttataatgagtgtatgatagaacatttttgcaacataatagaagttatattagatttagttataagaatggaatatattgagtaatcataaaaggtcaatcatcgtattgtaacaaattaacaacataatagattaaaaggaatatattattgaatccaccaggaacatttcatattactgccacagatgggagtgcacgtacaggtgtactttatacagcacatggaattgtaaatacacctatttttatgccagtaggtacagttggtagtgtcaaagcaattgctccagatgatcttgaggctatatctgctgaaattattttaggtaacacatatcatttatatctaaggccaggagatgaacttattgctcgtaggggtggtttacatgtgtttaatgcatgggaaaaaccaatacttacagatagtggagggtttcaaatttttagtctttcttctttaagaaagttacataaggatggcgtaatatttcgctcccatatagatggctcaaagcatgtttttactccagaacgagttattactattcagcgtaatcttaattctgatataatgatggttcttgatgagtgtgttgctgcaaatgcagattacacatatacagcccagtctcttgatttaactatacattgggcaaagcgatctcgtgatgtatacccaaaaggggagggagataatcttttatttggtattgtgcaaggaggaatgtttaaatctcttagacatagttcagtctcacaacttatagaccttgattttgatgggtatgctattggagggttatctgtaggtgaaccaaaagaaattatgatggaattgttatatgatacagcaccattgctacctaagacaaaaccacggtatcttatgggtgtggggactccattagatatacttaaaggtattgaggcaggagtagatatgtttgattgtgttttacctactcgtaatgcccgaaatggaacattgtatacttctcaagggaagttaaacataaaacgtaaagaatatgcagaagatgacttacctcttgacgagaactgtagttgctatacttgtcagaccttttcacgggcatatttaagacatcttttccattcacaagagttattggcatttcgattgaatagtatccataatcttacatattttttaaatataatatttggagcacgaaaagctatacatggtggatatttttttaattataagcaacaggttgaacagctttattgtaattaatattctgtttttctgttactatctattagttatcctttataaattattatgatacccttttggaacaaattactaaaaaaattagtatgattttctagaaaaattataaactatttgttattatacgattacttacaagtttttcaagagcttgaagatagtttttagttctttttgagcgattataaaataatgattgaatttcactacgaagtgtttggaatattccttgactattattgggttgtggagaggatgttactaatgggagaaggagttgtataactttttttctttctttattaatacaagcttctgcaaaaggtaaaagatctggctcggcatcaacttctggatgtaagtaatcatcagagaaccattttatatttaaatccgcaaatagttcaaagctaatttcaataatgcgatttagccaacgtatattttgtgtattcatatatggtaatgtcatttttagatcattccaatagtttttattaagataattaataaatggtttgatagcatttgcatctaataagatagattttacttctaaatagtgaactaatttttgttcaacaagtagttcgggcgatggaagaagatatttatgttcttgtctaatgaagtatagttcatcaatacattgagaaaaaggtacatttgaacttagtacatcaaatataaagcatgtagatcctaaactaagtttaaagtttggatgtaaaaaaggtcttcctgctttgccattattcagaaatggaagagaaaaaatccagcgtcctattgtgttacattcccaataatcaggattttcacaaaaagttgtatggtggatttcatcatgtggattattggctctagtattaagtgttttatcagaaaatgttacagcattaccacataccaaaggaacattatcttgaattgctatttttaaaagttgttctgctgccattggagctaaaaaatcatcagcatcaatccatgtaataaaatcacctttagcaaggttttgtccaacttgtctggcaattccagagcctttgtttggttgtgtatgatatctaatagtattcgtaatagaagaatagtgttcgataacttcttgggtattatctgtggagccatcatttacaataataacttcaatttttttatgtgattgccataagcaggattcaatagcaatgggaagccaataacccatattataaacagggataacaatagaaagagtgggcataatcactccaataagtaattagagagttattcaaatgattattatggttaaaagaaaaaagcgcaattaaatatattaattgcgctaaattttataatataaagcttgttttattttacttcaacagtagccccagcttcagtaagttgttttttggcttcttcagcatcttctttagatacaccttcttttagggtagaaggtgctccgtctactttatcttttgcttcttttaatccaagacctgtaagtgctcgtactactttaataactgcaatcttgttagctccagcttctttaagaataacatcaaattcagttttttcttcagcttcagcttcagctgatgcagcagtaggcgctgccatcatcatcccaacagcaggagctgctgcagaaacaccaaatttttcttcaagttccttaataaattgggaaagttctaatactgtcatattagatataaattcaataacttgttctttggttacagacatggaattactcctctaaaatatgtttgcaattaatttaagttgtttgcctatgcagctttttttgcctcaatagcttgaagagcataaaaaagtggccgaattatattagcaaacagggatacaaaattggtaggcacagcatttaatgttccaagtgtttgagcaataagctcaggtttacttggtagtttggcaagatcttctatatcttttgttgtaagaagagttccttcaagactaccatgacgaacagtaataaacttactagtttttacaaagtcgttgatagtttttgctattgccacaggttcattatagccaaatgcaatagcacaattgtctttgaactgatcttttataatgctatggataccatcggtgaatgctattcgtgccagtgtattttttacaacaagatattcaccaccgctttcacggagttttgctctcaggcacgttagctcttccaccgatatccccttaaaatctgtgactactacaaaagatgcagtatcagcttttgctttgatttgagaaatcagagcagctttttcagatctattcacgtgaatctccttcacgttatggggttactatggtggaatagcaagccaaaggtgttgtctagacaggttatttaaggaagtttccacctgttgtcttcgactcgaattccagtccttagccaaccatcttagttgtaagatggtactttttcatgaaaggttaactttcaagaaatttttttacaagattggtatctattttaaatcctggtcccattgttgtagatatagccatactttttatataagtgccttttgctgaggatggcttaagacgattcactgtttctacaagagactttagattaccaagaattttttctgaaccaaatgaaactttacctagtggtgcatgcaaaacacctgctttatcaactttgaaatcaatacgccctgctttaagttctttaatggcattagtaacgttgaaagttacagttcctgtttttgcattaggcataaggccacgaggtccaagttgacgtccaacttgtcctacaagagccataacatcaggggttgcaacagctgcatcaaaatcaagccagccatctttaatttttgctacaagttcttctgcaccagcatagtcagcaccagcttcttttgcttcagcttctttttcacctttacaaaaaacagctactcgtactgtctttcctaacccatagggtaaagtaacagcaccacgaaccatttgatcagaatacttaggatctactcctaggccaatagcaatatctacagtttcatcaaaatttgcaaaagaagtttgtattgattgagttacagcatcttcaaaagaaaggtgtagtgataagtctactccttttactgcattacgatattttttccctagcttgggcattactatattccttttataaaagaggtcttactatcatctattccctatattgggatgaaatgttgatgtgttaagaaaaatagtcagttaactttaactttaatttattttatttcaattcccatactacgagctgttcctatgattgaacgtttagctgaatcaagatcttttgctgtaagatctggtagtttgagttttgcaatttcttcaacctgttctatagatattttccctactttattacgattaggttcaccagatcctttatctattttagctgctttcataatgagaacagctgcaggaggtgtttttgtaataaaagtaaaagaacgatcagcataagcagttataactacaggaataatcatgcctttttgatcttgtgttcgagcattaaattctttacaaaattgcataatatttaacccatgttggcctaaggctggaccaacaggaggtgatggatttgctacacctgctggaatttgtagttttattttagcaagttcttttttagccattgtttttataacctctaatttgactagagtgttatagaacctatgctaattgcataagttctatctatatattttatctttaccccttagaaacttggataaaatcaagctcaacaggggtttgtctaccaaaaattgatacagaaactcgaagtttccctttatcgtaattgacatcttcaacaataccgttgaaaccaccaaatggtccatcaataacacgtatttcatcaccacgttcaaagctaaatttaggccgtggttgttcttggcgtgtttccatgagtgaaaggatctttgaagcctcttcatctttcattggtgcagggcgatttttccctccaacaaacccagttaccttgggtatagtttgaataaggtgccaagaataatcagtcatagtcattcgaagcatgatgtatcctggatagaatttacgtgtagtcgtacgttttagaccacctttacctaactcaacgactcgttcagttggtaggacaacctcatgaataagaccttcatcttgtccactacgcatcatttcttttatagtggcttccacacgttgttcaaatcctgaataagtatgaacaatataccatcgagactttcctggatcagctgttttattagcttgagcaagaggttcattatgttcagtcatgggaagtcctaaaatttaaggatatatgcaatagtttttgataggcctagatctactaatccaaggaatattgacatgatagaaacaaaaaccaatacaataaggcttgttgtttttgtctctttaaatgtcggccaagtaactttttttaattcaaaataagaaagttcaagatagtttttgaaccaaataatgtttctaaaaaaatttttgtgtgtttcttcttgagtagactctttctttttcatacagttatcctagaaaaataaaaaaccaaatggcagggcaggagggattcgaacccacaacatccggttttggagaccggcgctctagccgttagagctactgccctgcaaactaaataatacattatttggtttcacggtgaactgtatgttttttatcccaagggcaatattttttcagttcaacacgggcagtattggtccgcttattttttgttgtagcataattacggcgtttacattcagtacaagcaagtaatatattaatacgcatgagttttgtttactccacaatttcagtcactacaccagcaccaacagttcgaccaccctcacgaatagcaaaacgtaaaccttgctccatagctattgggtatataagttcaacattaaaagttgcattatcaccaggcataaccatttcaactccttcattaagagtaataacgcctgttacgtcagttgtacgacaataaaattgtggacgataacctgagaaaaatggtgtatgtctaccaccttcttcttttgaaagtacataaacttcagctttaaacttacgatgaggtgtaatggattttaatgcagagagtacttgacctcgttctacttcatcacgttttacacttcttagaagaactccaatgttgtcacctgcttctccctggtcaagaagtttgcggaacatttcaacacctgtgcaagtagtttttatagtgggtttaatgcctacaatttctatttcttctccaactttaatgacacctctttctactcgtccagtaactactgtaccacggccagaaatagaaaaaacatcttcaataggcataaggaatggtttatcgatatcacgttgaggatcagggatatagctatcacatgcatcaaggagttcaaggattggtttagcatcatcgctatctgcgctatctgagtttagcgccttcagtgctgagccacgtataacagggacgtcgtctccagggtatccatatgtacttagtagttcacgaatttctagttcaacaagttctagaagttcaggatcatcaaccatgtcacatttattcataaagacaacaagataaggaacgccaacttgacgggcaagcaaaatatgttcacgtgtttgtggcataggtccatcagttgcagcaacaactataatagcgccatccatttgtgcggcaccagtaatcatatttttgatataatcagcatggccagggcagtcgacatgagcataatggcgttttggagtttcatattcaacatgagctgtagcaatagtaatcccacgctctttttcttcaggggctttgtcaatctcgtcatatcctacaaattttccacccattttcatagaagctacttttgtaatagcagctgtaagcgtagttttaccatggtcaatatgaccaattgtaccaacattaacatgtggtttattacgtgtaaatttttccttggccataactgtctcccttcattagttgcgtcttaaatctagctaatattagagtaaaaagtaaaaaacattgttatagttttgtataatatatagtggacattttgtcatccagtattaatgaatacggccaaaaggagcagagtcatatttggagcgggaaacgagattcgaactcgcaaccctcagcttggaaggctgatgctctagccaattgagctattcccgcttaatgtgccgtagtcccctggcagatattgtgtctcctacagccgtgtatctaactctattacatagttcttgtggtggagggagaaggatttgaacctacgaagtcttacgacgacagatttacagtctgttccctttagccacttgggtatccctccatatggagctggtgatgggacttgaacccgcaacctgctgattacaaatcagctgctctgccaattgagctacaccagcaacaggataagctatttacctattctttttgagattggcaagtaaaaaatatgttaattagcaatctactatttaatttttatatttttctcctaaacaataatagtatatttttaatattaaggcaatattttaacgatataaggtttttcgctaaggagatatcgttgagctaattcttttatctgttgggcagttacatgtgttgctttttttacttgttccatagcatagttaagtggtctgttttctaatgtaagcatagcagcttcacttgcacgacttccaagactttgtctttctctatagtattcgccttcaatttgattttttgctctattaagttcagtttctggaagaagtttgtctataagagattgttgtatggtatctttgaatcctttttcagcaacagatattttgtttggttctgtaccaatatagaggcctaaatagccagtttctgtcgtttgtctattaaatgctgtaacagtatatccaagtgcttgttcatcacgtagatcacggaagaggagtcctccttgaccactaagaattgtctccataacattaaatataggtgtttcaggatttgtatcagggactgttttataaataagtaataagtgagcttgatttcttcctgggatattaatatcaagctctctttcttttccccaactaggttcaggtactactattttgtcttcgataggttcaggtaagtctcttacaaattgtaaaactttttcacgatcaaattgtcctgcaatagcaagtacccatggttgagctatttgtttttcccaaaattttttaatgtcttgttgtgtaaatttttttattacttccggatttccaagttgcatatagccatatacgctatggggaaagagaaatggaggagtttttctaaacgctaaacctagtggttgatcttcttgtgatttaatagcagcaagttgatcttgaatcccacgagatacttctggttgaaaaaaaactggatttttaattatatctaatactagaggaaatagttcattgttaaattttgatggtcctgtaaaggtaacagaaaatgtctttctaccagctgatgcagagagatcagctgctctatcagctagaaaattttgaatttctattacagttttgttagatgttccttttgttagaattgttgctgtaagagatggtaatccttgttgttcatcagagacaagagcatctcctcctgaaaaaaggagtgtaacagaacagtatggtaatgtattatctggaataagaacaactgtcttttttcctaatttaacaatttcttctttattgttagattgatttactacagttgcttcttcatgttttttaggccagtttttttctaatgttgcttgtagattaggcataggaacgtctttaggaggaagaactacagcagcaaatctttctggacgaatccatttagaaatagcttcatcaagcatatctatatctacactctgaatagcttcaattgtatttttttctccttcttcaccatttaagaaaaattcaaaataaccaagttttgaagcaaggcctgggagtgtttcttttgtacgataaagattatcttctaagttaagtttagcacgatcaagttcttgttgagaaaactttttagcactaagattagcaagatcttttgtcaatgtatcccaaaatggtcttattttgctaatttctacttcagctgtgattaagaatactcctgtgcgttcaaaagaataatttgtaacttggatatcttcaactaattgtttttcatgtttgtatgtacgataaaataagctagttttatcaccaccaagaagttgtgcaaggacatcaagtgtattggattcaatattaagtgcgtttgaaacaggaacagcagctgtaagatagattttattccatgtcccaggaataatagttacagtcccttgtccttctttaagaggaagttcttctgcataatatggtaaaggtaatataatattttgtgtattattatacttactaaatagatgatttgcttcttgcagtacttcatttgccttaacatctccaacaacgacaagaagcatgtcttgtggctgatagtgtgtagcaatataatcctttaagtcttgagaagtcacagcattaattgtttcaggataaccaatgattggtctagaatatggcgttcctgcaagactttttgcaagaagttttttaaaggcaaatgaatgaggattatcttctcctcgtgcaagttcagctaagataacttttttttcagattcaagatcttgaggatcaagcataggatgaaatgccatatctctcacaacatccatacctaacttccattggctagatggcatatcagttttatatacagtataatcataacttgttgctgcattcagatagccaccaactgcttcaacttcttgactaattgttgcatttggacgagattctgttcctttaaaaaccatatgttctaatatatgactgatcccagattgttctggtttttcatatgctgaaccagtatgaacataaagtcttgtagagacaagaggaaagcgattatcttcaagtacaagaactgtaagtccattacataatcgtgtaacaataggatgtttttttgtaagattttcaggtaaaatatcatttgtctttatgattgatgaggttgcctctaaaggttgaaccatataagtggccataaatactcctaataggaaaatagagaagataaaaaatagtcgttttttcatgaattgagttttctttttattattagaagcataaattgaattttgtggcatagatggttcctttccaggataaaaattttttataaaataacgcataacgattataatgacaagttacatctaaaatatatacttaaaaagtaattaaaaaacagtacgttgtactaaaacataattgttgaaaaaataaggaagagcagccgtgtttagcttagaaaaaaataaggtgttgtctgagttaattagtaaacatatagataaaattgcattagaagagagattaacctctgagcaaattaatttaggaatttgttctggtacaatggttttattaggtaacctaaaacatagtgatgttaagccaacacttataggacagcctgcacgtattaaggtgaatgcaaatattggaacctctccattagaaagttcttttaacaaggaaatggataaacttaaagtagcctatgaagcaggtgccgatactgttatggatttatcaacaggtggtgatttatataagataagagaagaaatgcttgcaggaacttcattaccccttgggacagtccctttgtatgcagttgcccaaaaatatatcaaaaaacattctgatccagcaaagatggatccagaagagctttttgaagaaattgagagacaagcagatcagggggtagactttatgacacttcattgtggagtgacatataaggctgcagagttaggttctcaaaataatcgtgtattaggaattgtctctagaggtggagcccttttagctcgttggatgtttaaaaataaaaaagagaatccactatatacagaatatgatcgactattaaaaattgcttctaaatataatgtaactatttctcttggtgatggacttcgacctggaggggggtgtgacgctggtgattctgcccaatgggaagaacttatggttcttggagaactcacaagacgtggacaacaagcaggtgttcaatgtatgattgaaggccctggtcacgttcgtttacatgaagttgaagcacaagtgataagtataaaaaagcttacacatggtgccccattatatgtattaggaccgttagttattgattcgtctccaggatatgatcatatctcaggtgcaattggtgctgctgtttctgttcgtgctggtgttgactttttgtgttatctgacaccagctgaacatctctcacttcctaacaaagatgatgtttatcaaggagttatggcttcacggattgcagcacaggctggtgaagtgtctttagggcgtcctttagctttggaaagagaagcttgtataagcgaaagtcgtaagaaacttgattgggatggtatgcggaacgcagcccttgatgctaatgctgtagatttacgtcgagaacctcataagaaagaaaaagtatgttctatgtgtggagatttttgttcaatggatatgttaaatgataaatggtaataggttactattataatttattattatgttaaattaatataacaagataaagttattatgtaatttctataaataaattctttctgccagactatgctatatttctggcagattttttatgtatattttgatttttctaacaatatttttttattatttatttagtactatcttttgttttgggacaacctgagcatacacttttttgttcatatggaacaggatattctccatttagacatgcaaggcagtagttattagaagtagatacagatttcagaagaccttcaaggcttaaataataaagtgtatctaggtgaagtaagttgggaagatcttcaataggatgttttgctgcaatgagttctccttttgatgaaaagttaatcccataaaaacaaggaaaacgtaatggaggacagcttacacggaaatggatttcagaagcttttaattcacgtagtttttttactcttgtacttacagtggttcctcttacaatggaatcgtctataatacacaatcgtttattagcaatcattgagcgaacagggttaagttttatacgtacaccaaaatccctaatattttgagaaggttgaataaaagttcttccaacataatgattgcgaatataagcttgctcatatgggattccagatgcttgagaaaatcctagagctgcatacactccagagtcaggaaaaggcataacaagatcagcgtgtgttttacattcattagagagctcaatacccatgttttttctgcaatgatagacatcttctccaaagacaatagagtcaggcctagcaaagtaaataagttcaaaaatacattgacgagtaggtacgttttttgagtgtagaaggggtacagatgtaacatgtccttcatcaataataaccatttctcctggcttaatatctcttataagtgtaatatctaaaagatcaaaagcacaactttctgaagcaagagcatatgaatcttctattttccctaaagtaagtggtctaaatccatgaggatctcgtatacctacaagcttatttcctacaagaataactagtgaataagctccttttacttgtgtgcaggaatataatatagcttcttctatacttctgtttgtaaggttgtgtgcaataaggtggagaaaaatttcactatcactatttgtctgaaaaatagcaccatcattttcaagttgttttcttaactgcattgcattagtaagatttccattatgtgcaagtgctagttctatatcacaaatacgtacagatattggttgggcatttcttctggatgaaataccagtagtagagtatcttacatgcccaatagcatagtggccttttaattctttacttagaatatcttcactaaatacatctggtacaagtcccatatctacatatgatgtaatattattaccattatatgatgcaatccctgcactttcttgtcctctatgttgaagagagtaaaggccaaaatatgccatacgggctgcttcttcatgattagttataccaaatactccacacatttttttaccttaataaacagagttaggggaatgagataggggtaacatccattattaactgatatagttattatattacaaattataatattcttgaatactttttacctgaataggagtatctcttgaagcttggatagctcgtgcgatagcttttgctccggcaagtgttgtgctatatgggatattatattgtaatgtggcttgtctgatagttctagagtcattagttgtttgttttcctgatggtgtgtttataactaaagcaatatcgccattttttataagatctataatattaggtcgtccttcatataccttaagaacatgttgtacaggaatgttatttttactgagtagtacagcggttcctgatgttgcaataagttcaaagcctagttggagatattgtttagctatatctataagaagaggcttatctctatcattaacagaaaaaaatactttacctgtacttggtaggtactgtcctacaccttgctgtccttttaaaaaagcttcttcaaaggttgaagctattcccataacttctcctgtagatttcatttcaggccctaatacaatatctactccagggaagcggtgaaaagggaaaacagattcttttacagaaacatatcctgttttttctatagcccaaggattgagctctttaagacttactccaagcataacttgcattgctaggtaaggaaggggtactcctgttgctttggagacaaatggagttgttcttgatgctctagggttaacttccaatatataaataacattatcttttatggcaaattggatattcatgagtccaataacttgaagttctttggcaagagctgttgtttgactttttatgtcttctattaattcttgggataatgagtggggagggataacacaagatgaatccccagagtgaatgcctgcttcttcgatatgctccattactccagcaatatatacattagttccatcagagagagcatcaacatccacctcaatagcatattcaaggaattgatcaataagtattggtcggtctaaattacagtcttttccatatagagaaaagtagtgtataagctctttttcttcgtaaataatttgcatagctctaccgccaaggacatagcttgggcggacaactatgggatatccaatagttttggcaatagaagctgcttcatttatagaagttgctgtaccatttgcaggttgttgtagttttaatttttggagtaatgcttggaatcttgatcgattttctgctctatctatagcctcagggcttgttcctagaattggtacgccagcacgaacaagtggtaatgcaagattaagaggagtttggcctccaaactggacaacaacaccatctggttgctcctgagcaataatattcattacatcttcaaatgttagaggttcaaagtagagtctatcagaagtatcataatcagtagatactgtctccggattggagttaatcataattgcttctatattactatctttgagagcatatgctgcatgacaacaacaataatcaaactctattccttgaccaattcgattgggtccaccaccaattataataacttttttctttttttctaaagagagttcttttgctgactcataggtagaataataataaggagtgaatgcttcaaattctgcagcacatgtatctacaagatagtatgttggaactatatctagttcttttcgtaagttacggatgtcagattctggtcgttcccaggctatagcaagctgtttatcagaaaatccaaactgtttagctttaagtaataaaggccttagttcaggattagaagcagttattgtattagatagtgcaaagttatgaagtatcaactccatttctatgagttctttgaattgatacaaaaaccatggatcaatatgtgtaagagtatgaatatggtttaaactcattccagaagataatgcttgatgaatagcaacaatacgtaatgaattagggtttcttaaaagtataggaagttcttcttctgtaaatgtatagttagagctattaaatccaggaagaccagtttcaagtgatcgtagtcctttttgaaaagcttctttaaaagtacgaccaatggccattacttctccgatacttttcatggacgttgttaattcatcttttgcaccaggaaacttttcaaaagtaaatctagggattttaacaacacaataatctattgctggttcaaaagctgctgaggttttatatgtaatatcatttcttagctcatcaagagtataacctactgcaagttttgctgcaattttggcaataggaaaacctgttgcttttgaagcaagagcagaagatcgtgatacacgtgggttcatttctataacaacaagttctccatttttaggattaacaccaaattggatatttgatcctcctgtttttacaccaatttcacgcataatagctatggaggcattacgcattttttggtattctatatctgaaagcgtttgtgctggtgcaacagtaatagagtcgcctgtgtgaatacccatagggtcaaggttttcaatggaacaaataatgatacaattgtcagctgcatcccgaacaacttccatttcaaactctttccatcctatgacagattgttctatcattacttcatttgtgggactagcagtaagtccttgtattgcaattagttcaagatcttccatgttataagcaattcctccacctgtacctccaagtgtaaatgcagggcgaacaataacaggaaatgggatatttaatgcaatttgatggacttcttcgatagtttttgcaatagcactagatggaactttaaggccaatattttccattgattgtctgaatttttcacgactttctgctttttctatgacatctgcgcttgctccaatgagttctgttccacactcatgaagtattccagatttagccaaattaagtgctatatttaatgccgtttgtcctcctagtgtaggaagtaatgcacatgggcgttctttccgaataattgcagtaactgtttctaattcaagaggttcaatataagtatgatttgcaagggttggatctgtcattatagttgctggattagagttgacaaggacaacattatatccctcctccttgagggctttaatgccttgtgtcccagagtagtcaaactcacatgcttgaccaataatgatggggccagaaccaataaccataattttttttatatccgaacgcttaggcattataggattccttactttagtaaaatatagataaggccttttctactacacatcatttttcccccttgcaagaaggttttcgttcagatgaatttgagatagaaaggtatagttaattgatatatgagctaaggagtagagcaatggctgatcaatgtaagtgtcctcattgtggtaattatataaaagaatacaaaaatcctcttccagctgtagatattattatttatagtcctgatcatggcgtgatagttatatcaagaaaaaatgagccattaggttttgcttttcctggaggctttatagagtatggagaaactgtggagcatgctgccataagagaatcatatgaagaaacaggactgcaaattattttacagggtgttttaggggtatactctaagaaagatagagatcctagacatcacacactatcagttgtatttgtagcatgccctttagatattgaaaagcttaaggcaggtgatgatgcagctagtgcaaagtttttccttttaaatgatatgccagagcttgtttttgatcataaaaaaatttttgaagatttcaattgttttttacaagggaagagaccactagcacctcttgtagaaccaacagaatagatactttttagtaatttaattattattaataaaaagtgaagagaatttttttacatgtattttataatactgtattgccagagttacctgatacattatcatttagaatgaatatatgtttgattttaggtgattgcatataattttgagagagtatatgtattaaattaattgagtaaatttaaggttcctttaacagttagggattattaactagtctttgtttgtgaaaatataaccaaggggtttgagtttggatcgaagtacagagaaaaatttatggtcacgccttttaagtttttttcatggacgatctaatgattctcttgaacaagccattttagaagctcgagatgatggagagttagatacagaagaaggaagtatgattcttagcatcctaaagtttgatgagttacaagtgcaggatgttatgatcccaagaacagattttgattgtatgccttcaggctcgccagtaagcgaagtagcaagttgtattgttgaaacaggtcattcacgaataccaatatataaagatacaagagataatatagttggtattgcttatgcaaaagatctcatagaattacttttagacccttcaaaacatcatacacctatagacacaacaatgcgtgaacctttttttgttccagaaacaaagcctgttagggaattattacaggagtttcgtacaaggaaaaatcatcttgctattgccattgatgaatatggaggtacttctggtttattaactattgaagatgttcttgaagaaattgttggggatattgaggatgaacatgatgctccaaaagaagaagatatccatgtaattggagataattgttatgagctatctggtagagcatatctagatgatcttctaaaattaggtattaaccttgaagcagatgaggttgatacaattggtggctatctttcacttgaagcaggacacgttccagagcagggcgaaacttttgaatttgatggttggaagtttgaagttacagaagctgatgcaaaacaaattcgtaaagtgcgagtggaaaaattacttgatgaatttagtagtaaagaagaaaataattaaaaaaattgatacctgcttaactatactatttaataagattttatatataaagtagaataatggcttttagtaagatacttgactttagatttgaagagggttattggcaaactctttctctgttagttatttcataatttttattttaattttgttgtggaggaattctatgccaactatcaaccaacttattcgccatgagcgaaagaaggttgtaaaacgtaaaaaaacacctgcacttcaagggtgtcctcaacgcagaggtgtttgtactcgtgtatatacaacaacacctaaaaagcctaactcagcactaaggaaagttgcacgtgttcgtttaactaatgggctagaagttacagcttatatccctggtgaaggtcataatcttcaagagcactctgtagtgcttattcgtggcggccgtgttaaagacttacctggtgtacgttatcatattattcgtggtacacttgatacctctggtgtgcaagatcgccgtcagcgtcgctcaaagtatggtgcaaagcgtccaaagtaatatagagctatttgttttgtatcccaatgggaatattattatttaatagtttaatactacctaatatgattaaaaaatcatgtttataaaacttataactagttaaaaaacattttactgccttgtggagaatataaatgcctcgtaaaggtcctgtccctagaagagaagttttacctgaccctatttataatagtcgacttgctagtcgttttgtaaatcgccttatgtatgatggtaagaaaggtgttgctgaaaaaattttttatggtgctcttgaaaatctttctgagaaaacgggggaagaaccccttcgtgcctttgagcgtgctctagacaatgttaaaccacaatttgaagtgaaagcccgtcgtgttggtggtgcaacatatcaagtccctatggaagtgagatctgataggcaaatttctctctctatccgttggttaattacttatgctcgctcacgtggtgaaaaaggtatggttaataagcttgcagcagaatttcttgatgcttttaataatcgtggtggtgctgttaagaaaaaagaagatactcaccgtatggctgaagcaaacaaagcctttgcacattatcgttggtaagttaggagagatatagtgtcacgaacagtccctatagagaagcagcgtaacattggcattatggcacatattgacgcaggtaaaacaacaacaactgagcgtattttatattatactggagtatcgcacaaaattggagagacacatgatggtgcctctacaatggattggatggagcaagaacaagaacgtggtatcactattacttcagctgcaacaacttgtttttgggatggttatcgtattaatattattgatactcctggacatgtagactttacaattgaagttgaacgttctcttagagttcttgatggcgctgtagctgtttttgatgctgttgcaggagttgagcctcagtctgaaacagtatggcgtcaagcaaataggtatggtgtccctagagtctgttttgtaaataagatggatagaataggggctaattttttccgatgtgtagatatgattcaagaacgtttaagagcaaagcctgtttgtctacaacttcctattggtgctgaagataactttgaaggaattattgatttaatacatggggtttccttaaagtttgataaggaaacaaaaggccttgaagttgaaaggggtcctatccctccagaattaatggagttataccaagaaaaacgtcttgaaatgatggaggcagcagcagaagaagatgaggtattgcttgctaaatatcttgagggaacagagcttacagcagaagaaattatagcttgtatacgtaaagccacaattgaacagaggcttgttcctgtactatgtggttcagcttttaggaatataggggtacaacctttacttgatgctgttgttcagtatttaccctctcctcttgatattccacaaatggtaggtcataatcctaatagtcctgaggaggaaatagtttgtcactgctcagataaagagccattagcaggacttgtttttaagttggcctctgatccttttattggtcatctttctttcttccgtatctattctggatttgttgagtctggaatgactgttcttaatacaactacagaaaagagagagagaattggacgacttcttaaaatgcatgccaataagcgtgaagatattaaatgggctggagctggtgatattgtcgctttagtaggtttaaaacaagcttcaacaggtgatactctttgtgatgaaaagcgtccagttattcttgaatctcttgatattccagagccagttattgaagttgcgatagagccaaaaacaaagacagatcgtgatgctctttcaactggtctaaataagcttgcaaaagaagatccttcttttcgagtaaaaggaaacgaagagacaggtcaaacacttattgctggtatgggtgagcttcacctagaaattatcgttgatagattattacgagaatttaatgtaaatgcaaatgttggaaagcctcaagtcgcttatcgtgaaacaattactaagcctgggaagtctgatacaaaatatgctaaacaatctggtggacgtgggcaatatggacattgtgtcattgaaattgaaccaaatcctgggaatgggtatacatttataaattctatttctgggggggttatacctaaagagtatattcccgctatagataaaggtattcaagatgcattgaagtcaggcatattagctggtttccctgttgttgatataaaagttaatcttgtttttggttcttaccatgaggtagactcttcagaacaagcattttatgttgctggctctatggcaataaaagatgctatgcataagagtaatcctatattacttgagcctattatggatgttgaagttgtgaccccagacgactatcttggagatgttatgggtgatttaaacggacgtcgtggtaaagtccaatctatggaggcacgttctggagcacaagctatccgtgctcaagttcctctttctgaaatgtttggttatgcaacagagcttcgttcacgtacacaagggcgtgcaacttttagtatgcaatttgatcattatgagcgagtcccagcagccattgctgaagaagttataaaaagtcggagttgataactataggttatcaaattaattttattattttttaaataaactgaagcatcttgtaaaaaatgctgcactagtattagcaatttctttttgtattaattgttttgtaacatcaagctcttttgaacacatttctggcagaacttgttctaagctttctgaacatggagaaataagagtagctgtagaagcttctgataatacaatcatttcataataagtagaaagctgcttttcaatatattgtgagtgatatttaggaggattaatataatcttttgttgcttctaccaaaagtattggtcttgataatgaagctaagctttctttagaaaaaaacattccaaaacctggagcaacaacaactatagctgttatcctagggttattatatgtttcttgaggatcaatttgttgagcaagtatgttcatcttaggttttacccatgaagaacagtaagcatcgttgactattatggatgaagacggtaatataatattgttacaataatcccaccatgctgaaggatcaagttttgctcctcctaataaaagagctgcagttcctcctgtacctataccaataatacctattttttgtgtatcaagaatatcaaatagctcctgatcattcattaaaaaatctataataatatttaattggtgtacacggcctgtaatttgttttatagtaaacataagactcatatcatcagcattatcaccttgatgtgttacacttactacaatgtagcccttttgggttagtgttgtagcaagctcatgaagagaaaaccgagatccagcagagtcatgagataaaataatagcagggtatttacctggatatggctttgcaccatgtgaagctataatattccaatcaccatagtttatttgtataggtttttgtagagtgggataccaaatagctaaatcaagttttgtttgattattttcaatgcataaactttcaagtcggattcctggttctatagaggcagcatggcttgtggtgtatgtaatacactccagtaatgttaataaaaagaaatataggaaaaaatgtagatgatgagtggtaataatgttaagataaatattaaagaattttttgtacattaaggtaagaaaactttataggttagaaggataatattctttttatacaagttgctagagacttatgaaagtagttgctctttactattgttctatcccatagtgttaattagtttgtctaaaaacatacttaaaataacggatagaagaattcttgacaagaagagaaatatgggtaatacaccacagtttcttatgaaaaatatttttttagagtatggatggaggttttatcatgagcaccaataagattcttgaaggtgcagttaggacaagtgagggtgtagagcttaaaggtgttattatgcaacctatcatagaaaaatgtgatggctgtggccatatccgtgaatttgaagaagagtcattttgtagtacatatcctattccttcaagaaaatgggctgatggccgttgtaattttgctactaatataaaaattgaggtaggtaaatctgctaaggttaatcctctgaaagcatcaaaacgtgctgctaaaggccgatagtaatttactatagattttttttagttaggaaggctgataagtcttcctttttattttatgatgaatagctatattgaatagtacttttttatagaagtaggaataagttataaaagaataatataataatatagctatggctactgttaattaacagttttttttagtaaattatatattttttcatcttagtgtacatattgcattgtagataacaagttatataagaatacattattcattatatatttttatttatattaaaaaatatagagataactttccttgttaactaactatattaaataaataaaatttttgaacatatatagtattataatattaagaaatgttattagttacaaagtaaaaggtactagttagttagaaagataatcaagtattcaaagtaatattttagttatatacaagtaagaaatagtattttatttatatatagctgcatgagatattattgtaggattatataaaattttattctatttatagtatgtgttatatccaaaattatattgtactaggtaactgacattaggtaaacaaataataattacctataatgatacatagaacaaataagattttttctatgtttaaagatgagaagagtgaatgaggacaacatttgattgtatagttgttggtggtgggcatgctggctgtgaagcttctatggctttagcacggttaggccaaaaagtacttttaattacaggtaatgttgatagaataggacatttatcttgtaatccagcagttggtggtattgcaaaaggacatattgttagagaaattgatgctcttggtggtatgatgggtttatgggctgataaagcagggatacagtttagaacattaaacaggagtaaaggaccagctgttagagcaactagggcacaagtagatcgtgatttatatatgcaagctgtaaaacaagatattttttctcaacctaatttatctgtttggcaagatacagttgaggctattattgtaaaagatggacatacaggaggtgttaaaacagcacttgggcaattatttaatagtcaatatgtcattcttacaacagggactttcctttctggattgatgcatataggacaaaagaatttttctggaggaagattaggtgatgtaggaacttcaaagctttcatcatcacttcactctatagggttacatttaggccgcttgaaaactgggactactcctaggttacttaaaacgtctattgattttacatcaatggagatgcaattgggtgatacaccaatcccatcctttagcttccatggtccaaagccttctcaaccacaagttccatgttatatcacttggacaaatgaatatactcatgatgtaatccgatcaggaatggatcgttcacctatgtttacaggtgttattactggaacaggggcacgttattgcccatcaatagaagataaagtcgcacgttttgcagatagagatcgtcatcagatatttgttgaacctgaaggattaactagtcaggagtgttatattaatggaatttctacaagtttacctttagatatccaattagcattaatcgcaactattccagggcttgaaaatgcacatatggtgagaccaggatatgctattgaatacgactatgttgatcctatgcaattgcatcctacacttgaaacaaaggttctcccaggtctatggctagcaggacaaataaatggaacatcaggttatgaagaagctgcaggacaaggattatgggctgcactgaatgtattctgtaaaattacacgacaagagccatttattttaggacgagataacgcgtatttagctgtattagttgatgatcttgttacacaagggacaaaagagccatataggatgttcacctctagagctgaatatagattgttgttgagagaagcaaatgctgatattagattaacaccattaggaagaaaaatagggttagttggcgactatcaatggaatttatttcaaaaaaagatatcagatatagatacacttgttaatagattacagaatattaggataaaaccagatacattggaccctagtatatttttagaattaggagaaagcattcctaatagggcatatacattagaggagctattaaaacgtccttctattacattccaaaccttgagaaaaatatattctgatttacctataacttcagaagatgtatatttagagactgaaactattataaaatatgctggctatcttgaccgtcaagaagaacttgtacagcggtctgcaaagttagaacattcatatcttcctaaagaaatagattatactaaagttgcaggactttcttcagaagttatagaaaagttacaaatagtaagacctcagacacttggacaggctggtcgtatttcaggagtaactcctgctgctattacatgccttgaaatatatttaaaaaagatacatgcttttagataatgtttgttattctttttaaagtagaaggaatagataatttatagatataattagagtgttaacttaaataagtttaataaacttaaagaaataaaagaattgttatctatctttgacttattgtttaatataatagacagttatataagttagctagattttttatatcattgtactatacattagttataactgcatatagataaatgaagtatgatgttagcctaacatttatcatgactcagatagatgcttataaaattttttgtttttatgaaaactaaaagatcttttcaacattattacttattagttttacttattacttatgttaactttttatttggatgttcttcaaaagttattgtaggaggaggttactcaaagaaaaatacactacttacacagcatatcgtaaaaactgcacagagtcagataggaactcgttatgtgcttggtgggacaactccaagaggctttgactgttcaggtttagtttggtgggcttataaaaaacatggggtatgtatcccaagattgactgaagatcaagcaagagcaggtattgctattaagttccatgctattaagcctggtgatattattatttttaaaacctgtaaaggaagaagtggtctacattcaggactttatactggatgtggaagatttattcatagtcctagatcaggaaagcatgtacgtcatgataaaatagaaaatttatattggaaaagcaaactacacactatacgacgtattatacaataattaaaaatagttatagttaaaaagttttgattttgttatgttaactagctttttgttgttgaggaatagtacgcattggaaataagttacgatatagttgtagatattgctttaccattgttgtagttgtaaaattttcaaggctttttgtcccttcagatacaattttttcacaaagtcgtggttcttgcatacagcggatcatagccatagctagtgcaactggatcatttactggaacaagaagtccattaatttcatcttgaataagttcagcatttgattctaaattagaagcaataacaggaattcctgttgcccaaccttcttttattgttgcattacttccctcaccctctactgagggtacaacaacagcatcagcaagaggtaaaattactcgactatcttgttgacctaataaagcaagttgagaagctacattaagttcaaatgcttcattaagtaatgattgaaatagttcaccagagcctgcaatacgtacttcccatgggggcagatcttttgctttttttataatatgcatagcttggagtaaattactatatcctttttgactagtaagtgccccaatactttgaaaaacaaatcgcccatcttttctatcttttttaggatagtatagagatggatcaatacaagagtggatagtagatactttattaggttcaatccctgattgaataactcttttacgtatttcttcactaacagtaacaatactatcagcaagtagatattttttcatccggctaccagtatgcagaggataagatacacgtctactgtgcattaggagtatattattaccatgtagtgccttactaaaggctcctaaagcagctgagtgtgcgtcatttgtatggataatattaatagataatttccgaagggctttttctagttggaagagtattaatggatttgcagggcttctaccaagaaggggaataaaagggatccgttcttttttacaaactactgcaagagcgctagcttttggacatgcaataaaaggtactacatcagaatgttggagttcttgtgcaaggtagtaaacttgccgttgtcctccacgtagttcaagtccaagatctaatagaagtacttgcataatttaacctaacaacaaaagaactatcccacaatataaacaagacatctataactcatattataattaacctatagcattgaccaccaaaatagtatactccatatttaacaggtaatacaagaaaaaacactgatccagctaactggatcagtgttaaggtattatttgcgataaatagttacgtcatcggcaactggaggctcacctttataggcttttacttttacttcgtctcctacttttagttcactgaaagatacatctttatcatcaaaaattgaacgttctatttcaaaatcgctttttctttcaactttgaatgagatggtttctccatgtttgtttttaattgtaaacatttgttcttcttcattgactgatgttacagtcccttttgtacgaaacttatcactctttgcatcagagagagtataactaaccatgatcagcataaagcaagctaagaaggaagctaagatacgacacatagtcttctccttttagtggttaataggtataccatgttttaacaaggtctttttaagcatgtttcttaacatattgcttataggacctgttgttccattgccaatgatatgtccattatactttgtgattcctatacaaagatgtgttgttccaagaactaatatttttttagctgttaaaagttcctgttcagttatacactgtagttcaatcaatacagacggttttaacgcttcaattgttttttctaatattgtttcaattaaaatgttttgaaattctaggaagattaaagtgttatcttgtgatacaatagcaatgttagcaatagctgactttgtgaagcaccattgttcattgaatgatagtgttagattgactttttgttctatggcttcaagttccataagaatacccaaaatataacttactgtttttatatttgttaagaataagatagggtttgataggatattacttttacatgcagtaagtccatttttgtaccaactctccaatagttgtgttgtgttataaactacaatatacaaactagaatttggatattctaatgaactaatactaaaaccacctagtcctctaccaataaggacacgtatattaccctcatttttattaactgctttagcaacagtcataatgagttttttcaattttgaagtagaacatgggagagaaagttttaattttttgcttgaagtaactatacgctttatatgttccttcagctgaaggatatgatattccataatagatagtgtttcaaagacaccatctccacgatgaacaagatgagcatcaatagggattaccatttggtttggaccatagtaaatatcttcagagctatggttataaaattcaagaagtttttctgctcctggacaaagttgatattgaatatggtctacgaaggcatttgtagctagtataggaagcatattatggtacctcttgatgactacctattaatatgtgaccgctagcaatactgatgtttactctgacacagtattatcattatagtacatataatatgattaatacagtgtatattataaaccatataatataataagatatgttctagtaactatatttaaagtagctatggttaattgtttctaatgaagtatagggattataaaaaaagattgggattatcaatggttagcaagtcgttattaacaagatgttcagcaatttgtatagcatttaatgctgcaccttttctaacattatcagcaacaatccataggttaagcccattatctatactatgatcttcacgaatacgtcctacaaaagttagatcttctcctgtagcatcaagaggagtagggtacatattctctttagggttgtcataaacacaaaccccaggagcttgagagaggatggcgcgagcttgttggggggttattttattttccatttcaatatttacagattccgaatggccgtaaaaaacaggtactcgtacacaagttgcagtgactttgatagcaggatcatcaaatattttctttgtttcattagttattttcatttcttcttttgtgtagtcattatcaagaaagctatcaatatggggtatacaattaaaagcaatacggtgaggataaatagttacttcaggttgttgtaggttaaaaatttggagagtttgtttttctatttcattgatacctttttgacctgttccagaaacagattggtatgtagaaactataatacgtttaatttttcctatattatgaagaggagctaatacaacaatcagttgaatagtagaacaattagggttagcaataatacctctatgattatccagtgtatgtgcattaacctcagggataacaagtggacatctatcgtccatacgccaatgactagaattatcgattactacacagccagatgaaacagcaataggagcatatttttttgatacttcacttccagcagagaaaatagcaatatctacatcttgtaagctttgatcagtaatttcttgtactgaaagttcatcagagttaaatggaatttttattcctactgattgtgaagatgcaaaaagttttatatcattaagaggaaagtttcgttcttcaaaaagtttaatacactctcttcctacagcgccagtggcaccaactatagcaattacaggttttttagacacaaaatacctcttcagagacaagtatgatgttattataaactacctttctttcttatatgccttttttctactgtcaagcattgtttttattcagttagattcttatttttaaaaataaacttcgaaattttaatatataatatataactatgcgatatgtatatttttttattatggatgttacagtatgcatagggttacagtgaaaagaataatagacatttaatatactatctaatatataaaaaacatagttattggatgttattacttattagaagtattttataatcctcatctgtaatcatataatagaagggttgtcagtatgattaattgttcttatactgtataagacatgttttcagagaggggttctttttatagtatcctgaatgtaaggagtatatatggcaacatgggcccaaaatgaagatatttcctttgcgctccaaatcaagcagcttgctgatgaagagttacttgatttttgggaagaaactcaacaaatagagtctgcacttcgggctgaatatcaacagccagtggcacctgctcaagattatgaacgcctaattgttatggaattacaattgcgttcttgtcagagacaaggcatagaaggtatttagactaattattttctatttgtatttagttagtaataagtatcacaaaaagagattaattagctattattttttatttatgattagctaatagctgttgagtagtttgtttcatttcaggtgtacttttgggattatctataacttgttgtagatattgtaacccctgatttttttcgtctaaatagtatagatagagcaatcctaaactatactgcgctgatgggtcaggttctattataagtacttttttgaacgaattaacagcatcaatgtattcttcttgattatattgtgtaatacctaataagtaaagtatatctggattattaggctctactattaatgcatgtagaagaaaatattctgcttgtttccattcgcagagttctataaaatatttacttaattcaagtaaaatcctagcatcattaggatttgcttgtagcttttgtgtaagtgtgagtaagtctgtttgactagcattagttatatttttatcttgttgaatagcagaggcttcttgttgttcaatatgcattgtaagtgttggatgttcaataaaataggaagttgttccacaaataatagaaagagcacctactataattataagtaaaatatattgttgtttttttaatatagctcgtttactcattatctaagtattccatttttttaagacgtttttcaagtcttatctgtttatatccaataaaacaaacataactgcaaagtaatatccatattataatatttgtatacacaagccaatttatcataatcattttcctttccaaatttgtgtactagtaagagcagcaagtcgttctttttgtatatattgtttccctcgtatactaataatgcataaccagaagaatccaaaacatataatacatgcaataagcgtaagtttcatttctgaatctagtcctccattattagaggcaaaaactgtgggatgaatagagcgccagattctagcagaaagaaagactaaaggaacgtctaaaaatgcaatgatacctaagacagagcatagtaaagaacgtcgctcttgaggaatatctaactgtcttaatactagataagcactgtaaagaaaccagaggactaatgcagttgtaagacgaggatcccatgtccaccaaacaccccaggattgtttcccccatatagaacctgtaataatagttgcactacttagaataacaccaatttcagctgttgcaccagataatgcatcccaataagtttttcgtgttttaagatatcctatacttgctatacagacgataaaaaaacttattagagcccaccaagcaagtggtagatgaaggtaaaagattttttggataattcctagttcactttcaataggtgcatagcagtaaataaggtattggcaaaatgccattcctaatccactgagtgaaactaaggtatatagccatagtggcttcatatagtaaccttttttttaattataacaatattctttaatatcataacttattcatctcctaaagatataactgggaagagagcaagggctgatgcagcaaaaatagcatcaaaagctataacaatatgcatccatgaatacatagcttctgtagactctgaagagagtgcatcagtacatgtatgaatacctgcaagaagaagaggaactacaagtggaaataaaataatggaaatgagagactcttgggtagattgcccttgagataagccccctattagtgaacctatagatacaagacctatattaataagaaatataatgagtagtgattgtgcccaacatattccaggttcttgattaagaaaaacaacaattgcaggaataaaaataagttgagcaacagaaatgataataaaccctgttaaagcttttcctaaccaaatagcttgaacaggacatggtgtaagtaacagtcctgaccatgtatcactttttttttcaatatgatagagaatattaaatgtaagaacctggcaaaagatagaagctaaccagaagatggtagctgctgcttgagctgttatattttcatctaatggttttgataaactaaaaataaaaatgagtaataatcccagaagtaatgcctgtatgacccctatacctctagagaacagaagttttatatctttttgtgcaatgataatagcatgagtaaacatagagtaacaatcatcctttaaatcaatatttcaattgatgttacttattgttgaaatgcataaggttcttttttggtatattcaatctttttgtttttaagtataatatgttgatctaccttttcattcttaataagattatgggaaatccaaactataccagcacctgcagtctttgcattaataatttcattataacatattgaaagagattggttgtcaagcccagattcaggttcatctaataatagaagcttaggttttaacatcagcactcgtgcaaagttaagccgttgtaacatgccacgtgaaaatgttcttgtacgttcatagatgaaacgagtaagtttcatttgttcaatagcagttgctatttgttttttatcaagacgttttttataaagccgcccccaaaagagaagattttcataggctgaaagatcttgataaataaatggagtatgcccaagataaccaatttcttctaagctacagttaaatataatttctcctgacgttggttttagaagccctgccatgatcttgagtaatgtacttttaccagctccattttctcctgttaaatatgttatagtattagaagtaatattaagtgatatgtttttgaggataggccgattactatatactttgctgatagctattagctgaagaagcataattttttcccctataactggatataatagagaagaatggtagcaaacttataatggcaccaccaatccaaatccaattgactaaaggcatagagcttaatctgaatagagcacgattttgatgatctacagctaagagagaagcataaagttcatttccaagagaaggaatagtatcggcttcagcaaattgcattttcccccattttttataaatacgacgttggggggcaataaaatcaataaacttcccatccttacgtacttcaagtaagccttctatataagcatagtcaactagttctccttcttggattttgataagttttatatcaaaatttcctacttttattgtttctccttcatgtagtatttgttcaatttctatcttatagggaccagagaaagcaattcccatagcaataagcgcaactccaaagtgaatgccatacgctagtaacataggtttatttgaacgtgtttgtttgtctaatacaagtaatactgtacttgtcatgatagcaaaggcagacgaagctcctagaatggcgataggtaactgatatcctgatagatacattatgcatgaagatgtaaaaaaagtaataagaacaagagtaatattttttagattatggatacctcttgtccatcctaaccaaggacataaagagagaagagccataagtattgcaaaaagaggaagacatgttttattataaaagtctgacgtaagtcctatacttcctgcagattcttgattgatggaagtagaagactggagaattgattgtcctaatattatttgattccaaaaggaagtaaagactggccacatagttgcaagaagaattaatattgcaagagcaagtaatagccaagaagtaaagataagaaatcctatacgactattaatagtagaaagttcactgttatcttttgttgagtatgcagtatagaaaatagagataatagttattgttgcaaatgttataaaaataaggagaggtttcccaacattgcttgttccaaatgcatgtacagattgaacaatgccgctacgtacaaggtaagtggcaaaaaaagtggaaagagttgttagtgccataagaaaaacgtttatgtgagttagtacatttttatgtgtttgaataataatagtatgtaatgcagctgttgatataagccatggaatgagggatgcattttcaactggatcccatgcccagtaaccaccccacccaagttccatataagcccaccatcctccaagaacaattccagcagtaagaaatgcccatgccgagagtataaatggcttagaaataactatccagctaggttcctctttttgattacttattgtttgtgcaagagcaaggcagccagggatagtaaaccaaccatatcctaaaaataataaaggtggatgaaaaatcatgcctggattttggagtaagggattaaggccatttccatctataggttttatatcaagtaaaataaatgggttattccatgtaatgagaagaagcccaaagaatgccataatacttaaataaagtatccaaaaccaaagttttgtgtctatagaaagttttttatagagataagtatgttgaaatatacagctagcaatggaagtagatagtgcccagaataacattgaacctgcttggccagcccaaaaggctgtaatacgataaaaaagaggtagaaattgatcagtataactggctacatattgtaatgaaaagttataactagctaacgcatacgttaaaatacctgaagcaatggaaagcaatattgtaatacttatagaagtaatttctgcaagtgtaaggcttactttttttgatgattgattaggatatttattttttattattaatatgaatttatttaatttatgccatggccaaagtgtattagctatccagaagatatcaattaaagctatagtcataatagccgctaagacactaaaggcaaaatagtacatcttaactccaacaactatttttattatatcttatcttggttactactaattgtttcattcagagaagaaattaggttattattttttgtatctatattataattaactttttttctcttctttttcgtatttagatggacattttgtcataagtgtttttgcttgaaagattccttcaggggtaagtgaaccttctacaatggcttctgcacctgttctgaaggtgtctggaataactcctgtatattcaacagatattacgtttgaaggatattctttatctcttaattggaaagaaatagtttttccatgttgctgtgtataatgttctgctataacaataccaaaaagtcttgcagacttaagtttttcactaggcattgctatggcttcttttacattaagaaaatatacactattttcatagaatcctataaatgcaagatagccaatacctactatgaataataagagagctattatatatacataagtagtattagaagtttttttatccatactcactctcctactttattttgaaaggtgtttcagcttacactttaagttatattaatacttattagagagtaaaggtatatttctgttattttaaaagagtatttttattattttggattaatgcactatgtcttttttttgcaagtgctctaagatcaggtgttgtatcactttcatcaacaatttctcttccaagcatagtttctaatacatcttctaaggaaacaacaccagataatcccccatactcatcaagtacaataaaaagatgttgtctttcttctaaaaatgcaagaagtaaatgatctacagtttgactttcaaggacaaattttgctggttgcataatttctaaaagttttttttctgtttctccattggtcatatatcgtccaatttcatatcgttggataatgccagtaatgtcttcgttattttctccataagtagggatgcgactatagttccatattttggggttgctataagcttcagagacagtaaggttttcatgaagtgaaaagaccatagttctgggagtcataatttcatgagcatattttaaatcaagactaaggatattttttatgacatgttcttcatatggcttaatacgaccagactctctggaaagacttgtaagtgcacggatgtcatcttctgtaactgtaggacgttttcgaggtgaaacaagtcgtgttaagtagcttgaaagcataataaggggttttaaagtaactataagaatacagagaggattaaggagaattatagcaatacgtttagagtaagcaacacctagtgttttaggtataatttccccaaaagctaaaataagcaaggtgaggattgctgcaaagaaaggcatagtagattcatgaagtgttgttgtagcaattgctccagcaagggcagctccagcagtatttgctatagtattcaatattaatacggctgtaataggctgatcaatattactatgtaaataataaagtttttctccttttttgcttccctgttcacgaaggtgttcaatataagtaatagggatagagtatatagcagcttccatcattgagcataatgcagagataagaacaataagaaaaacagttcctaaaaggattatcatgattattgtcctaataaattgctctaattagaagtgctgctaacatagcgtaagttattatagcttgtgctaattaaaagttgatatgtacacctatagttaatttttttctaacaagtagataattgaagatcaatatgttgaggaaagtaatagtaattagcaattatattgataagtctacacatcttacttaatttactatacaatttttttttaagttaaaaaatttttaataaaaaaatataacattgagtcatcagtacttgacgaatatgtttcacttaggtattaatgcctttcctatgtgttatgggattccctgtgcggcagggaagaataattttaaaagattattctattgttggattgccagcaataaattacaaggtatagacttttaagggtagattcactttagatgcaatataaatttgctaataattaaagtgtattttagagtaagaatataattaattaaatagtctaagtaccttgtgggaccacctgtcttttcctggactgttccagtttaggccaggcttagcagtaattatttttattaattttttaggatgctgctaggttggctcttgtcccgatattccgcatagtgctagctgtctagccaacagaaagtagtacttataaaggttagctttaaccatggttgggctattgtttgattttagttatcttaggtgggcgctgataggtttttgttgatatttagtatggagtaagacaatgacgacagtaagcagtgatcgtatacgtataaagttaaaggcatacgattatcgcattcttgataaggcagtagcagaaattgtagatacagcaagaaatacaggtgcaagtattgctgggcctatccctcttcctaccaatatccataaatttacagtaaatcgttctgttcatgtagataaaaagtcccgtgagcaatttgagatgagaatccataagcgtcttatggatattttagaacctacacagcaaacagtagatgctcttggtaaacttagtttgcctgctggtgtagatgtagaaattaagctttaatggaagagtttgaggggcgtcatgtctgaaaaaataggaattttgggtcaaaagttaggaatgactcaggtttttggtggaaatggatttgctgttcctgtaactgttgttcaagctgggccatgtcctatagtgcaaattaagacagtagaaaaagaggggtataacgctcttcagattgcctttggtgaagggaaaaagaaacatgtttcaaagtctatgcaggggcatttttctaaagcaggtttaagtctttatcgaaaaatacaagaggtacgtcttaagggtagcttaacaagttatgaggtaggacaagtccttacagtaggattattttctgtaggagataaagtaaaaattaccgggaaaagtattggtaaaggctttcaaggggctatgcgtcgttggaactttgctggctctaaagatagtcatggttgtgaaaaagtccatcgtgcagctggctctataggtaataatacattccctggacatgtctttaaagggaaaaagatggctggccattggggtacagagaaggtgacagttcaaaatcttgttgtagtagatattcggccagaggataatattattctgatacatggttctgttccagggccaaaaaatagttttttatttatatctatgcaataggtttggagaaaatatatggcgattgttacagtttataatcagcaaaaagaagaaactggtaaaattaatttatcttctaaaatatttgaagttcaagtgcagccagaaattctccatcttgtagtaagagcacagttggcagctaagcgtgcaggaactcattctgtcaagacaagaggacatgtctcaggtggtggtgcaaagccttggcgtcaaaaaggaactggacgtgcacgtgctggctcaaatcgttctccattatggagagggggaggaatagtttttggccctcagcctcgtgattatagttttaaagtcaataaaaagattcgtagcttagcgctatgtatggcattatcttcacgttttgcagaagaaaatcttatagtaattgataatattgtccttcctgagataaaaacaaagcattttgttggagttgcaaatatacttggacttcataaggctcttattgttgctccagtggagtcaacacaacttttgctttctatgcgtaatgtccctaatgttaaattgcttacttatgatcgcttaaatgtatatgatattcttaagtataaacagcttgtattattagagggtgctgttcaacatattgaggctcgtttaaaataggtggttatttatatatgcatcctacacaaattatattacgtcctgttataactgaaaaagtaactatactaagagacagtgtaaaaaaagttgcattttttgtacatcctcaatcaaataaaattgaggttaaaaaagctatagagttactttttaatgttaaagttatggctataaatgtagttaattatactcctcgggtacgcacacgtaatcgtcgtaaggtacatgtttctgggtgtcgaaaggcatatgtgactcttgccccaggagagaagatttcattttttgaaggattataataatggctatacgtaatttaaagccaacttcaccaggttgtcgcttccagactatttcagattttaaagaaattacttgttcaagccctgaaaaaagtctaacatatgggctttgtaaaaaagctggtcgtaataatcatggtcatataactagtcggcgtcgaggtggtggtgctaaaaggttatatcgtcttattgattttaaaagagataaggtaggagttccagcaaaagtagcacaaatagaatatgatccaaaccgtacagcacgtatagcattattgcattatgtagatggagaaaagcgttacatattggctccagtaggtattaagcagggtgatattatagaaacaggcgtagatgctgatataaagcctgggaattcacttccaatgcttcatattcctattggaacactaattcataatattgaattaaatcctggtcgtggaggacaactttgtcgttctgctggagcttatgctcagctggtggctagagagggtaagtatgctttgttaagaatgccatcaggtgaggtccgtaaggttttagccagtggggcagcaacagtagggcaggtaggtaatattcaccatgaaaatatttcgttaggtaaagctgggcgtaatcgttggctaggacgtcgtcctaaagttcgtggagttgcaatgaaccctgttgatcaccctctaggtggtggtgaaggaagaagctcaggtggtcggcatccagtttctccatgggggatgccaactaaaggttacaaaactcgagataaaaagaaaccttcttcacgcttaatagttaagcgtcgtgggcaaaaataggagtagttatgcctagatctttgaaaaaaggcccttttgtggataaagatcttatgaagaaagttgatgccgcaatagctaataatgacagacgagttttgaagacttggtctcgtagatcaacaattttacctgagatggtaggattaacgtttgctgttcataacggtaaaaaatttcttcctgtttttataactgagaatatggttggccataagcttggagaattttctcctacacgtactttttatggtcatgctggtgataaaaagacaaaggcaaaaaagtagtggtgaagtaatatggagtcaaaagcatgtgctaaatttatacgtgtttcacctaggaaggcaaggcttattgcttctaatgttaaaggaaaaactgttgagttagcaatgaatatattgaaatttactcctaacaagtcagcaggtattattttaggtgtaatgcgttctgcgcttgcaaatgcagagcataatgcaaagctagatgtagatactttgattgttaaagaagtaatagtgaatgaaggacctacatggaagcgttttatgccacgtgcacaaggtcgtgctactcatattcgtaaaagaagtagccatatttcagtggtattatcagaggggcaggaataaatcatgggacaaaaagtacatccatatggatttaggcttgggtataataaaaattggcagtctcgttggtttagcaaaaaagattatgcaaattttatatatgaagattacaaaattcgtagttatataaaaaaattattatatagtgctggtatctctaaaatggagattgagcgtgcaggtggaaagatatgtttaatgttatctactgcacgtccaggtatagttattggtcgtaagggagttgaaattgaaaagcttcgtctagaattacgcaaaaattttggacaagaattttctcttgaggttactgaagtccgtcgtccagaagtagatgcacaacttgtagctgagaatattgctatgcaacttgagcgtcgtgtagcttttcgtcgagcaatgaaaagaactgttagtatggctcgtaagtttggtgcagagggaataaaaataacttgttctggccgactggctggtgctgaaattgctcgtacagaatggtatcgtgatggacgtgtacccttacaaacactacgtgcagatattgattatggttttgctgaggcacatacaacatatggtattattggagtcaaggtatggatttataagggtgaagtccttgataaagaggttgaaaaataatgcttgcacctaaaaaagtaaaatttcgaaaatggcagaaaggacgtttgcgtggtccagcattacgtggaatttctattgcatatggcgatattgccttgaagtcaactgagcatggaaagttaacaagtcaacaaattgaggcagctcgtattgcaatgatgcgtcatataaagcgtggaggaaaagtttggattagagtatttcctgatcatcctattacagcaaagccactagaaacacgtcaaggtagtggtaagggttctccagtaggttggtgtgcaccagtaaagccaggccgtattttgtatgaaataaaaggtgtaaatattgatcttgctagagaagcattaattcgtgcagcacacaaattaccagtaaaaacagttattgttttaaaagagaggctgtagtgaaagataataaatatcagctaatggatgaagcaagtttaaaattaaagttagctgaaaaacgtgaagagctttttaaattacgctttcagcatgctgcaggtcaactggaaaagacatcatctcttttagtattaagaagagatattgcacggattttgacaatattgaaggaaaaggtatagctatgcctcagataatagcaaaatgtaatggtcgtgtgcttgttggtacggtgattagcgacaaaaatgataaaactattattgtgcatgttgaaacacttgtgaagcatcctttacttaaaaaatttattcgacatagaaaaaagtttactgctcatgatccattaaatgaatgtagtattggtgatacagtaaaaataatagagtttcgtccattaagccggaataaacgttggcatcttgtggcaatacttgaaaaggctgtttaataggggagagttattatgattcaagttgagtctacacttcaagttgctgataattcaggggctaaaaaggttgcatgtattaaagtgttaggtggttctaagagacgttatgctactgtgggagatattatagtagtttcagttaaagaagcaattccacatagtaaagttaaaaaaggtgaagtattacaagctgtaattgttagaactaaaaaggaagttcgtcggatggatggttcatatattaagtttgattctaatgctgctgtattactttctaagcaaggagagccagtaggaactcgtatatttggtcctgtagcacgagaattgcgtgcacgaaattttatgaaaattatatctcttgcacctgaagttttataggaaatattatgcaacaaatacgcatacataaaaatgataaagtaatggttattgctggcaaagataaaggtaaaattggcaaggttcttaaagtttgtcataagcataatagaatactagtagaaaaagtaaacatagttaagcgtcatgtaaaaccaaatccatatcgtcgtgaacatggtggcataatagaaaaagaattgcctatagttacttctaatctaatgattatttgctcttcgtgtacatctccaacacgcgtacactatcgttattctgaaagtggtaaaaaattacgtatttgtaaaaaatgtaatgagtcactataaggtgatattatgacacgacttgaaaaattttatcaagaaaaagtagttccagctttacaaaaagaatttctttataagtctattatgcaagttcctacaattgaaaaaatttcactcaatattggacttggtgttgctagtcaaagcaataaaattatggaagaggcaatatcagagctttctttaattgctggtcaaaaagctgttataactcgcgctaagaagtcaattgcatcatttaagttgcgtgaagggatgccgataggctgtagggtaactttaagaaaagagcgtatgtgggattttcttgataagttaatgaattttgcattacctcgagtccgagattttcgtggtgtttcagaaaatggttttgatggtcatgggaactttacacttggtattaaggaacattctatttttcctgaactggagatagatcgtattgaaaacactaaaggtatgaatattactatagttactagtgctgtattagacagtgaaggtaaagttctattagatttattaggaatgccttttaaaaaataaaataaggggtcaaaattgtgtcacgtacttctcttgaagtaaaggcaagacgtaaacctaaattttttgttcgtgcatataatcgttgtcctatatgtggtagagggcgtgcttttatgcgtaagtttggtttatgtcgtatatgtgttcgtaatatggctcatcgtggtgagctgcctggtgttcgtaaatcaagctggtaataatgcaatgtgttaggagaatatattaatgatgactgatcctatttcggatatgttaacacgtattcgtaatgcacagttggctctacataaagatgtagcaatcccatattcaaagataaaatattctattgcaaatattcttaaagaagagggttatattaatgaattaactttgaataatggtactattactctttacttcaaatattataaaggcaaagctgctattgaaggcttgaggcgtataagtaaatctggaagaagagtttatgtaagtacacatgatattccttctgtacaaaatggattaggtatttgtattctttctacatcgattggtgtgattggctgtaataaagctcgttgctcaaaagtgggtggagagcttttatgtgaagtatggtagggatattatgtcaagaattggaaagttacctattatgattccagctggtgtggaaattacatttggtgaaaaaaatattagtataaaaggaccaaaggcaactcttgttacaccaaagtgtgaactcctttcttatgagcataaagaagataaaataattttaacttgtaattttgatacacgtgaatcattagcacagtatggattacgtcgaactcttttagctaattgtatagaaggggtaactaaaggtttttcaaaaacacttgaagtaattggtgtgggatatcgtgtttcagtaaaaggtaacatagttgaattgtctgtaggttattctcatcctgtacatattgaactacctgatggtattactgcaaaagcagaaggtcaaaagcttacaattatgggatctgataaagtcctagtaggtgagatggcagcacggattcgtcgtatacgtaaacctgaaccatataaaggtaaaggtattaagtatgaaagtgaaattatacgtcgaaaagctggtaagtcaggtggcaaggggaaaaagtagttaggagtagttatgagtattaaaagtaagaataaacttagacaacatcgtaaaattcgaattagaaaaaaaatttttggtactgctgaccaaccaagactagtaatttttagatctaacttacacatttatgcacaacttgttgatgatattacaggatctactcttttaacaacttcaactctttctttaaaagataatggaataaatattcgtgctaataaatctggttcaacattagttgggaaagagattgcacgtttagcaatagaaaaacagattataaaaattgtatttgatcgtaatggatatttgtaccatggtagggtaaaggcagtagcagatggtgctcgtgaaggcggattaaagttttaggttagttaggaagaggcttttattatggaacaaagtgaattaggcttcattgaaaaagttgtttctttaaaccgtgtagctaaagtggtaaagggtggtcgtcgttttagctttagtgcgcttgtggttgttggtgatggtaaggggagtgttggttttggtcttgggaaagcacaagaagttcctgaagcattaagaaaagcaacagaacaagcacgaaaagcaatgatgaaaattcctcttattgaaggtactcttccatatgaaatacttggagagtttggtgcaggtagtgtaatgcttaagccagcatctcgtggtacaggtataattgctgggggtgcagttcgagctataatggaagcagcaggagttacagatgtacttgcaaaagctattggtacaaataaccctcataatgttcttcgagctacaatggcaggcttgtcagcattacgtagtgcacaattggtgagcaatattcgtggtaaattgttagaagcaccaaggaaataatgatatgtcttatattagaataaagttgaaaagaagtcgcatcaactgtactcctattcagcgtaaagttttggatgcacttgggcttcgtcgtcgtgaaatggtaaaaacttttacagatagtgcttctattcaaggtatgattattaaggtatcacatttagttgaggtaagtaatttatgaacttaaccacactttacccatttttagaagagcgtaaattgcgtaaaagagtcgggcgtggttctgcttctggtttaggttgtacttcagggaaagggaataagggacaaaatgcccgctcaggtggaggcgttcgcccaggctttgaaggtggccaaatgccattacagcgacgtttaccaaaacatggatttaaaaatgcattttttaaagttgaatatgcaatttttaatttggattggttaacaactttttttaaagggaaaaatgaaattttacttgaagatatttatagccataaattatgctctgtgggtacccctgtaaaaattcttggttcaggtagcatttctaatatagtgacaattgaagcacataaatttagtcggtctgcattgaagaagcttcatgaagtaggtggtcaagcaaagattatagaaaaataggggtatattatatggccgttagtactacaactcttaatgcagcacctgaattaaagataaaattattatggacagtaggacttttgtgtgcctatcgtattggcgtccatattcctgttccaggagttgacggaattgctcttactcatttttttgaaagtgtagcaggaaccttgtttggattatttgatatgttctcaggtggaggcttgagaaatgtatcagtgtttgcacttgggattatgccatatatttctgcttcaattattatgcagttattacaggtaattattcctgactttaagagaatggcaaaagaggaaggtgcagcaggacgatacaaaataacacaatatactcgttatggaacggtgattattactcttattcaaggaattggcattgctattggtcttgaaagtatgtatagtcctactaatatacctattgtattggaaccaggctgggtatttagaattgtaacagttttaaccttaactgcagggactgttctaattatgtggcttggtgagcaaatttcagaaaaaggtatcggtaatggaatatctttaattatattttctggaattgttgttggtattcctggtgcaatagtcaaaacatatcagttaataatacttggtgatatgaatatactaatcgcattagttttaatgttatttatgtttgctgtattaactggtgttgtttttatggaaagagctcaacgaagaattcctatacaatatgcaaaaagacagctaggaagaaaggtttatggtggacaatcaacacacttgcctctccgtgttaatacagcaggtgtaattccacctatttttgcttcaagtcttcttttatttcctgctacaatggctagttttgatatttctgattggttaaaagatattgcagtttggttttcgccatcaactatactttataattgtatttttttagtacttattttctttttttgttatttttatacagcaattatttttgattctaaagatatttcagaaaatttaaaaaaagctggtggttttattcctggtattcgtccaggagagaagacatgtgaatatcttgatggagtcctttcaagacttactctttgggggggggtatatatttcaattatttcaattttacctatgatgcttatttctcaatttaatgtcccattttattttggggggacaagtattcttattttagttggtgttgcaatggactttatgtctcaaattgagtcacatttcatatctaaacagtatgaagggctcatgaataaaaagactaaaggacgaggctaacttgtgaaaaaatatagaggtacattccttaaaaatgaaagagaaataggaattcttaaagaagcaaatcgtatggtagctaccatacttgaagaattagaaaaacaagttagacctggattatctactctttattttgaagacattgtgcaacaaatgtgtcgtgaattcaaagttaaaccagcattccagggttattatggatatccgtatgcactatgttgttctgtaaatgaagctgttgttcatggtgtcccatcagaaaaaaaaattcttcaagaaggagatatagttagctttgatgttggggttttataccaaggattttatggtgatgctgctaggacagttcctgtaggtactatttcatcggaagcatctcaacttatacagataacaagagaaagcttagaacttggtgtgttagagacaagagcaggaaatcatttatatgacatttcttctgcaattcagcatcatgtggaaagtgcaggctttcatatagttaaacgttttgtaggacatggaattggcatagggttgcatgaaaagcctgaagttcctaattttgttcctactgtaggtttaggaatacctttaaaggtaggaatggtattagcaattgagcctatggtaacaataggttctccagaggtagaaatattagaagataaatggacagctataacttgtgatagaagtttagctgctcatttcgagcacagcgttgctatacttccatctggaccttgtgtgttagatagtctagtataatttagtatttgacaaaatattttaaaaaagttaaggcttcctgttttatataaataagtaagaattaactggtaaggtgtggaagtagccatgaaagttagaccatctgtaaaaagaatttgtcccaaatgcaaagttattaggcgtagggggatacttagagttatctgtgaaaatcctaggcataaacaacgccaaggttaatagttaggagaaaaactgtggctagaatagctggtattgatttgccaagaggtaaacgttcagatatagcattaagttatatttatggtgttggtagagtaacagctctaaaagttcttgatgctgtaggtattaactggagtcgtagtattgatgatctttctgctgaagagttgaatgaagttcgtaaagagcttgagaaaaattataaggtagaaggagagttacgtagagaagtgtcagctaatattaaacgtttaatggatattggctgctacagaggtcttaggcatcgaaagggtcttcctgttcatggtcagcgtactcatacaaatgcacgtacaagaaaaggaccaagaaaaggtgctgtaggaaagaaaaagtaaaatttatacttttttaatcattagttaattcaagtctattatataaaagagaagttatggctaaaccaaaacgtattgggaaaaaacgtgaaaagaaaaatattcctgttggagtagttcatattcaagcatcttttaacaatacaataattacatttacagacccacgtggaaatactattagttgggcaagttctggtcaaagtggttttaaaggttcacgtaaatcaactccttttgcagcacaagttgcagcagaacaggctgcacgtcgtgctcaagataatggtatgcgtactgtggggatatatgtaaaagggccaggttctggacgtgaatctgctatgcgtgctattaatgctgtaggatttaaagttgcttttattcgtgatattacccccattccacataatggttgtcgcccacctaagaggcgtcgtgtctagtttttactagaggaggattgtcttggctaaatataatgatgccaaatgtcgtttatgtcgtcgtgaaggaactaagctttttttaaaaggtgatcgttgttttactgataagtgtgcatatgatcgtcgaccatatgctcctggacaacatggtcgtgtacggaaaaaaatgagtgattatgccatacaactacgtgagaaacaaaaagttcgtcgagtatatggtgtattagaaaagcagtttcgagaatattttgtccatgctgatatggcaaaaggtattacaggagtaaatttgctttcttatttagaacgtcgtcttgataatgttgtgtatcgtcttggacttgcaaattcacgcgttcaagcacgtcaacttattagacatggaatttttacattaaacggacataaggtcactatcccttcattgcaagttaatgttggagatagtattgaggtacctgaaaaaaatcgtaaaatatctgttgttgctgacgcacaatcgatagttggtcgtcgtgggtgcccatcttggcttgaattagatgcttccacttttaagggtgttgtaaaggcgctacctcagcgtgaagatattcaattccccattaatgagcatcttattgttgagctttactccaaataggtggaggattatatgctctttagagaaggaactaggcttattaattcacgtaactgggcaaaacttgtacgtccagaagcagtgataaataatatggaatccaatactacgacatacggacgttttgagtatgaaccacttgaacgtgggtatggtattactattggtaatgcattacgaagggtgttactttcatctcttcagggtgctgcatttgtatctgtaaaaattcttggtgttcaacatgagtttacaactattcctggaatacttgaagatgtaacagatattattcttaacctgaaacaggttcgtttagctatggatacagatgaaccacagcacctttctctttttgtatctaaaaaagggattgttactgccgctgatatccaaacgaatcaacatgttgaagttttaaatccagaacaacatattgcaacattaacagaagatattgagcttcgaatggagtttgaagttcgtatgggtaagggctatgttcctgcagaaatgcatgaagatcttcatgaggaaattggtcttattaagttagattcaagtttttcaccaattcgtaatgtaacttatgtagtagaacaagcacgtgttggtcagatgacaaactatgataagttagtgctggaagtatggacagatggttcagtttctcctgaagatgctattgcatacagtgctaaaattatcaaagatcaaatttctgtttttattaattttgatgagcgtatctcagggagtggtggaaatgaaggtagcggtagttcagatctgaatgataatctgtttaaaggtattgatgaacttgaactttctgtacgtgctacaaattgtttacgtagtgctaatatttcgactgttggagagcttgtccaaaaggcagaagctgatatgttaaagacaaagaattttgggaaaaaatctcttgatgaaattaaggcacttcttactagtatggggcttgattttggtatgaagattgacggatttgagaaaaaataccaagaatggaaaaggaagcaacatcatgaggcataaaaattctggtaaaaaattaaatagaaccccatctcatcgaaaagcattatttcggaatatggcaaatgaacttattaagcatggaaaaatttgtacaactgagacaaaagccaaagaattacggaggattgtagaacctcttatcacactggctttaagaaatgacttacattcacgtagattagcttttcaatcaatgggtgatcatcagttggtaaagcatctatttaataatgtagctccagcgtttgttaatgttcctggtggttatactagaattacgcgccttgcattaagaagaaaaggtgattgtgctcctatggcaatgattgagtttacttgtcaaaaaattgatgaaaagagtatttagtaattttcattgaataatacataataataaaaggtcaccttttcatttataggtgaccttttattattattattattattatgtattattttatttgacgcagttatgactaatttttcttttctataagatttatattgaaattttacttttatcttcttatctattttcaataatgtaataataaattaaatgtagtgttattagaaataaattaacagtacatcaccttattaatttttattagttttggtaatagctcattattaataatataactcttgaggacctatgatgaataacatttatcctatcattttgtgtggaggaagtggtactcgcttatggccgttatcaagagaatattatccaaaacaattcattaattttggttctggcactctatttgagaatacattgtcgtgtatagcttcgttaagaaatgtccaaaatcctatagtagtctgtaatgaggaacaccgtttttttgtttcgaaattgttacaacaacaaaatagggttgcaacaattattttagagccagaagggaaaaatacagcccctgcaattgcccttggagtatctgcggttagtgagttagaaagcgatcctcttattcttgttttgccttcagatcaccttatcggttctaattctatttttcactcagcagtaatgagtggaatttcagttgccattgaaggacattttgtaacatttggggtgaatcctacaggtccagagtcaggttttggttatttacaatatgggcaagaagttagtgatggtatttttaaaattttaaactttactgaaaagcctagtaaagctagggcaaaagagtttcttgcattaggcaattatgcatggaatagtggaatttttctttttcgtgcttcaacttatctaaatgagttagaattattagcaccacaaatttttagtgcttgtaagcaagggtgggatgagcgtactcaggatcccttaggttttttccgtcctaatagtcaaaagtttttacaatcaccttcaggttctattgattatgtcataatggaaaaaacagaaaagctttatatggttaaacttgaaaccaattggagtgatctgggttcatgggaatcattttataatgcagaggtacatgacagtatgggaaatgttgtatctggagacgttatagctcaagatactgaaaattgttaccttaattctacacaacgtcttgtatgtgcattaggtgttaaaaatattattgttgttgaaacagcagacgctgttctagttgtggatagaaatcaaacacaaaatgtaaaaaatttattggaacaattacgtatttcaggtcgtacagagtctgaaactcacatgcgtgttttccgtccttggggaagttatgaaacacttttttctagtacaggttataaagtaaaaaaaattactgtttctcctggagctacattatcacttcagttacatcaatatagagcagaacattggattgttgtatatggaatagctaatgttactataaataaagcagagcatatagtaaaagttaatcagtctatatatattcctgtaggtgtagaacaccggctagcaaactatggagaagaacctttggaagttattgaagtacagtcaggctcatatgttggagaggatgatataattcgccttgaagatgtttatggaagaacagagtaataattattgaatattctataaaaatatagctaaagaatagagacaagtaaaaagatattactttttatttttaagattaaataaattaaaagtaagataaataggaaggttagttgtgtgtaatctaaacaagaacataaataatgagtgatttgttgttgatttttattaaggatagtagaataatattcttatatttatttacttaaaaataataaatagtttttagttactcttagttaatatgaattctagagtagaatctatatcccatcacttttaggttgttttgatgattgatgagactgaaaaaccaaatgttgttgcattattcccgctagttatatttcttaccctctttattgggactggtatatttttaacttttatgggaacagagatggctttttatcagctttcagcaacagtcgctatcctcccagctatttgtataagcgtattacaggggaagtctaatttaagcaaaaatataacgatatttctctatggaatgggtgaaattaatatcgttactatgtgtttaatttatttattagcaggcgcatttgcttctgtaactacttctattggttgtgtttcagctacagttaattttggtctttctcttctttctccttcaatgattttacctggtctttttcttactggagcttttatctctacagcaatgggtacaagtatgggaactattgctgctatagctcctattgctgttggagtagggcagcaaacagatattagcctatcacttcttatgggagtagttataggtggagctatgtttggtgataatctttcttttatttctgatacaactattgctgcaacacgtagtcaaaattgtgagatgaaagataagtttcggatgaatttcttgatagcactaccagcagcactaattactatattcttactttgggctagtggtacatcttcctatgtggtgcataacgagtcatatgaatttataaaagttttaccatatcttgttattattactttagctatgataggtatgaatgtctttgtagtgttagctgttgggatacttttttcaggaatattaggtttaagcactacaaattattcttttttaatttgggcccaagatatctataaaggttttttggggatgaatgaaatatttgtactatcaatgcttatcgggggccttggagagcttataagatatcatggtggtattgcctggcttttaaaaatggtagatactttagtaactcatttatcaaaaagaaaatctccaaaggttggagaatggtgtataggtttacttgtaactttagctaacttatgtgttgctaataatacagtagcaattatcttaacagggaagatgagtaaagaaattgctgataaacatgggattagttgccgtaaaagcgctagtttattagatattttttcgtgtgtcatccaagggcttatcccgtatggtgcacagttattacttgcaggatccatttcacaggtttctccattttctatagcaattgaaaattggtactgtatggctttatttttagctgcttgtatctccatatggattgattaatagagaacgggactatatagaaatatttttatagatataggtacgttaagcaaaattataatacattagtcttatgctgacaacaaacctaacgttagttagagaggttgctgcaagaaaagtcattgtatatatgcaatagttgatacttaacttatttattattattattattttatagtctatttcaaaatattttgacaattatatgcagacaatttattcatatatttatatatgataaccatatgtttcccttcacttttaccacagatactgtggtgatactatgaataatataattacagctattaaaggtttttctgacttatttcagccagaaagtaatatgttttcatacatagaacatactgctagagctattttttctctttataattatgaagagttaagaatacctcttcttgagcggacagaacttttttgtagaagtattggtttagaaacagatattgtacaaaaagaaatgtacacatttttagatcgtaaaaatcgatcacttacattacgaccagaagcaacagctagcattattagagcatatattgaaaataaaaaatatacacaagaagctgtgtctaaatttttaagtataggacccatgtttcgctatgaacgtcctcaaaaggggcgaatgcgacaatttcatcaagttaattgtgaatgtttaggagttacagatagttatatagatgctgaaataattattatgttaatgcaatttttaacagcattagagattaaggatattagattagaaattaactcattaggatgcgctgattgtcggccattatataaagatatattacagaagtggcttgatcagcttgacacacagactttatgtgatgattgtcagcgtagaaaagaaacaaatccattgagagtactagattgtaaagtttctttttgtaaagaaaagacaagtcaagctcctcactttttagactatcaatgtaaaacctgtcttgatcagttttcaacagtgacaactcttttaagcttagagaatattccatatattattaaccatcgtcttgtacgtggccttgattattatatgcgtacaacatttgaagtaatttcttctaatataggttctcaaggagccattgctgggggaggacgttacaatgggttggttgcacagcttggtggtcctgatatccctggtattggttttgcttgtggtatggagaggctagcattgcttctcccacgaaaagacttgccaaggcctgattttatgattggtgtttttatcgctgaaggaaaagataaagcattttctattagttcacaattacataaagcaggttttagtggcgaaatgttattcaacttaggtagcatgaaaagtttaatgagacatgctaataaggcaagagtacgttattgtttgttattaggaactgaagagttagcattgaattctatttctattaaaaatatggatacaggagtccaggaaaaaatttctttagataaggtcagttcttatttcataacaaagctaagtaaataatattgggaggaaaaaagaggatgtgtaatgtctgaaagcaaaaaagaggttataatatgccagtcttgtgatggatggaagcgtagtcatacctgtggtgagttatcaataaaagatattggaaagcatgtaatactaatgggttgggtacaatcacgtcgggatcatggtggattaatttttgtagatttacgtgatcgctttggtataacccaagttgtttttagtccagatagctctttagaagcacattcaacagcacatattattcgtcctgaatacgttattgctgttgatggaattgttcgtatgcgtccagaagggatgattaacccaaatttggaaacaggacaaatagaaattttagtttcttcttggaagcttttaaatatttcgaaaacacctccttttcaaatagaagataatattgaaacaggagaaacactccgtttgcagtggcgatatttagatttacgtcgtccagtcatgaagaaaaatattatattgcgtagtaatgctatgcaaattatacgaaactatttatcttctcacggttttttagaaatagaaacaccatttcttacaaagtctacacctgaaggggctagagattttttagtaccaagtcgcttatatcatgggaagttatttgctcttcctcaatctccacagatttttaaacagttatgtatggttgctggtttagatcgatattttcagataactcgatgttttcgtgatgaagacttacgtgctgatagacagccagagtttactcagattgatattgaaatgagctttgttaacgaagaacaggtaatggaatgtgccgaacatttaatgcaaactctttttcaagaagcattatctacagagatttcacttcctttcccaagaataacatggtttgaagcaatgaagcaatatggagtggataagccggatatacgatttgggttagagcttcatgatgtgacatctatagtacatatgtcagagtttaaattgttttcacatgcaaagcttgtaaaggcaataagggtcccaggaggagcttcattaagtcggaaagaaattgatgactttacagagtttgtaaaaaattatggagcacagggacttgcatggatcaaaattaatgaagaggaatggcagtcaccaattgcaaagtttttatcagagaaagaaaaagaagagctttctatagaactgaatgtatcaaaaggagatatattatttttccaggcaggttctcctgaagttgtaaatgctgctcttggtaatttacgtgttcaattaggtaactatttaggattaatccctcaaaatacatggtcttttgtgtgggtaacagacttccctctttatgaatacagtgaggaagaaaggcgttatgtttcttgccaccatccttttactgcacctaaagaaagtgatattcattttatgaagactaatcctgcagaagttaaagctcgagcatatgatttggtccttaatggtaatgaagtaggtgggggctccatacgtattcatcaagctgagatacagcgtcatttgtttgaggatttaggattttctttagaagatattcaacaacaatttggtttttttatagaagctcttgagtatggcgcgccaccacatggtggtattgcctttggattagatagattagttatgcttatgagtaactctgagtctatcagagatgttattgcattcccaaaaactcaaaagggtgcttgtcctttaacaggagcgccagactttgtttcttcaaaacaattacgtgaacttggtttaactttacgtaataaaaattaattaaccttatctttttgtgggaaaaagggtatgttattcctataaaatataagaaaactataggtctgtaggttttatctggataatttaatgaatcagaatagctatactaaacctcttatagaatgtaatagtttaacaaaacattttgctataaggcatggtgtatggcaacgtatacaaggatatgtacatgctgttgaagaggtttcactaacagtttatcagggtgaaacttttggtcttgttggtgaatcaggttgtggaaagtctacattaagccgtatgattgttgggttattacacccatctagcggtgagttgttttttaatggtcaatccatttttgattcagtgaacaaaaaagctcttcgacataaattacagatgatttttcaagatccattttcttctttaaatccacgcttacctataggaatttctattgcagaacctttaacagttttaaaggtatctgcaaagaaaaagttagaaagtatattagagatattagagtttgtaggtcttcaaccagaacaaaaagatcgatatcctcatgagttctctggaggacagcgtcaacgtatagctattgctagagctcttattgctcatcctgaattacttgtatgtgatgaggctgtatcggctttagatgcctctgttcaagcacaagtattaaacttactaaaagatcttcaagcacattttggtttgacttatatctttatctctcatgatttagctgtagtaggatatatgagtgatagggttgcagttatgtatcttggaagaatagtagagttagccccaacaaaatctttgtttgaaagaccagcacatccatatacgcaaattttattagactctatccctattcctgatcctttttctcgaaaaacatatagattactaaaaggggaacttccaagctctctttcccctccatctggttgtccttttcatcttcaatgtccaaaagttatgccaatttgtcgtaaagaacttcctcaacttacggtattaaaacagacagaactagtagaaaaaaatagatttgttcgttgttttctatatacataatactattgtattagtatgaagaaattgtataataaaggttacgttataagaaaataaagaatttttatgaaaaataggacttttataattaagatggttatataatattaacattagctagagtggtaataataacaaatgagtcaaatatcccctttatactatggaataattcctgctagatacggttcttcacgtcttcctgggaaaccattaatagatatttggggaaaacctatgttttggtatgtatatcagaatgcagtagaatctaatatttttagatctgttgtattagcaacagatagcgaagaaattgctgaatcagcccatcagttatcaattccttatgttatgacaagtgttgaacacattagtggtacagatcgtgtgtatgaagcagctataaagatgaatatagaacctgactctgtagtagtaaatatccagggagatgaaccattagtaaagccagaagctattcaacaactagtggagccatttattgatgtttctattcaggttactaccctttctacaagaattacagcaaatcaagcaatgttacctcatcaagttaaagttgttgtgtcttctaatggtgatgctttgtatttttcaagggcagccattccttatttaagagataacgatactgatggatattacttaggtcatattgggttatacgcttttcgtatgcatacgttggataaattcgttcatttgccaccgtcccaattagaacaatttgaaaagttagaacaactaaggttgctagagaataatataccaattcgtgtagtaaacactaaccatacttctcagggtgttgatacagtagaagatttagaaattgttcaaggattattagctcaaagaatggaggcagtaagtcgttaatgaaagctttgctagcactagaagatggatttattcttgaaggtcaatctattaatggtcactgtgaaagtagtggtgaagttatttttaatactggaatgacaggttaccaagaaatccttactgatccatcttactatggacaaatggtatgtatgacatggcctctaataggtaattatggtattaataaagaagatatggagtctgaaaaaattcatgtatctgcattaattgttaaagagtgttgtagaaacccttcaaactggaggtctgaaacatctttacctaaatttttacaagaatataacatagctgggattgaaggtattgatactagagcactgacaagacacattcggataaacggagcaatgaggggtattatttctacctcgataacagaccctaatgatcttatattaagagtaaagaaagttccttctatggaagggcagaattatgttacaaaggttgctcctaattccccatgggtgttgtatgggcaatgtgttgtacctgctgatattaaagaggatggaagttttctttggaaacaaaataagatacctcttattgtttatgattatggtattaagtggaatattattcggttgctagaaggagcaggttttgatccattaatggtaccaccattattttctttagagcaagtaaaagcatcaggggctaaagctatatttttatctaatggtcctggcgatcctggaacacttatagatgagattcaaattattcgtgaattaatggagtattatcctattgcaggaatttgtcttggtcatcaattattagggcatgctgttggcggtactacaagaaaattgacttttggtcatcatggttctaatcatcctataaaaaatcttgctacaggtcatatagaaatttcctcacaaaatcatgggttttgtgtaaactttgaaagtaataatgatatagaagttactcatattaacttgaacgataatacgttagaaggtttcattcataaaacaaaacctattcttgcagtccaacatcatcctgaagcaagtccaggtcctatggatagccaatatttttttactcgctttaaggaggtagtactattaaagttaggatgctaactttaatagtgaagaactttttagtaaaatttacattatttttctgtggctagttgaatattttgtgggattaatcaagatgttatctcttgggtataattttattatgctaatatttcttaacttaagaattaacaaaaagaagcctagttaattggtgtgagggaagtgaggtagttatgtccaacgaattgacacgagtcagacagcaacttagccagattcgtacacagttacgtaaggataaaatccttcctgctattcaggcattacatcatgcaataacagtgattataaaaacaccattattaaaagcagaaaaagaagagtttgaacatatgcttcatgatgctttaggaagtattatggagcatccaaaggtgcgtgaaatttttcctctaactattatatatacaaaaggtcaagagcgccaattattgagcgatgtttatgagttgttaacagttgtagattcaactattcaggatgctgcaaaagaagcattaaaagattttgaaacacgcagagagagattgtttaatgaggggcagaagcagcttgaaaaaggaaatattttagaagctagagaagcttttagtaaacttgctaaagaatttaaagatgatccagaattaatgggccagattggtaaaatgtatcttaaatatgagtattatgaagatgcaattatatacttagagacagcgttaactattaatcctgagctagcatacctttataattacattggaatagcactacgtaaagttggaaagtttgatatagctgaaaaatactatctcagggcatctaagtatttagggaaagatcctaatcttttttttaatcttgggagattatatattgattggggagattgggaaaaggctattgtttcggcttcagcagcactaaaagtacgtccagattttatggaagccaaaaagttacgtaagtatgcagaaaggatgaaacataagaactcttcagtactttttgaagagtgatggttcacaatagttaatttatctaaaaaatattgaatagtaatctaccagtagaatgtttcatgtaatactttactacggtatacatcatatttacccataattccagcaagagtgtagggtaatacagtaaagaatgaccataataatgtttgtggagataccccaaccatccaaccaataatgccgattaaaagaattaatactaattggttactttttttcctaagtagaaaaaatataaataatgaagttaatgttgaccaaaaacttatagtagcaatgattgaaatatgttgattagtagaaagaaaacaatagtatatgaatattggtagaagtaaaataataagccctattataacctcagtatattgaagaaatatcatcatacaaagtataaagcaccctatgactaaacatatagaagagatgatctctaaaggtgtagtaagtggttgtataataggtaatggctggaacatagcaggaatattaagtgcaagaagtattaaagcttttctccatatgcccttataaagataataaatactaccaaagagataggctaaagggttaaataatgttgaatcaggaatgggtggattaaagaagggtaagcccagggagtatgaaggtgtaacaaccctattgttaaaaagatgaaaatagttttcttcatacaaagcatgcttttttttcattgagtaacccttattatatagctttggtagatagtcaaaagactaacagatttagaaagagatacatagtagttagagtttgttgtggagggggtataccatacaacaagctttttgcttttttattaatgaattgttagtagaaagctgcaagaattagaaagtaggttagaataaagtcagaactttagtaatataacatttgatggttagttagtattataggattaagactattataaattttttaattaggtaaaatagttactaacatatttaaaaaagaacatttttttcttattatatcaacggattattatatcttcttatatataagaagctaggttagttgaagaaaaaagtttagttgcgtaatgtagtggagattgtctcctactgttaataaatagttttttataattaattgtattaatgtagaaattatttatagggtgtttctttttataggagttcctatgcatggtttatttttattaaaaggtctaatcattttatggggtattggtgctgggttaataagttgttcttcaaatgaacaagcaagtatgccagctccacttgttgaagtgatgaccattgaatcaaaagatacgcctattgttttaacatttgttggacaaacagaaggctcaaggtctgttgaagttcgtgctcaggtttcaggcattttaatgaatagagcctatgaagaagggcaatatgttgaaaaaggacagcttctttttgaaatagaacctgatacctataaagctaacttagagcaagcccaaagtatgatggagcaagctaaagcaaagtttgttcaagctcaacaggaacgcgatcgtattcttccattgtataaaaagaatgccgttagtcaaaaggatcgtgatagtgctgtagcttcttataatgctgcaaaggcagatcttgatgctgcaaaagctgaagttacagaagctaaaattaaattaggatatgcttatgtaaaatcacctgtttctggttatgcaagtaaagaaaataagacaataggtaatcttattacggcaggttcatctagtgatagtttgcttacagtggttaatcaagtaaatcctatatatgcaaatttttctattccaagtcctcaatacatgcatataaagatgttaaagtctgaaaatcttcttactattgataatcctacggcaacaatgacattagcagatggaagtatatataaagaaacaggtaaagtaacttttattgataaacaagtgaatccatcaaccagtgttgttgcagctagggcagagtttattaatccagacgctcatgtgttaccaggacaatttgtacgtgtgaatgttcaaggtgttatattagtaaatgctattttaataccacagaaagctctcattcaaacacagaaaggtactgtggtggcagttgttaacaaggaaaataaagtagagatgcgtccagtaagaattggacaaaattatggagaaaatttttttgtatatagtggactctccaatggagatcgtgtgattgttgaagggaataacaaggcaatccctggtcaacctgtacgtctaaaagaatctatacaacccgcaatgaatgaagcaggcggtaagaagtaatgagtaataaggagaatattacagaagtgaaagaaggattttttcttcgccgtcctattttctctactgttatttcattatttattacatttatagggatattagctattttttctttgccaattgagcagtatcctaatttaacacctccacaggtagagataaaaacaacatataatggtgcaagtgctaatactgtatctgaaagtgttgcttcagtccttgaagaacaagtgaacggcgttgataatatgagttatatgaactctgttagtgcaggaacaggtactatgactcttactgttacctttgatgtaggtacagatcctgaagaggccactattaacgttaataacagggtacaattagcaactccaaaacttcctcaagacgtacagcgaacagggatttctgttttaaaaaaatctccagcaattttacaaattgtctttcttacttctccagatgaacgctatgatacaatttttcttagtaactatgcgctacttaacattgttgatgatttaaagcgtgttcctggtgtaggggatgttcaaaattttgcaggacaagattatgctattagagtctggttaaaaccagatcgtatggaacagttaaaaattacaccaaatgatgtaattaatgctattaatgatcaaaatattcagattggtgccggacgtattggggatgagcctgtatcttcgtctattggggtaacttggcagataattacaaagggtcggcttgaaacgccagaacaatttgaaaatattattcttcgtacagagcctgatggatcaatcttacggctaaaagatattgcacggatagaacttggtgctcaagtttacaattttacaggtaggcaagatggacttgctgctattcctataggcatttttttagcaccaggtgctaatgcacttacaacagctgaagctgttcgtgttaagatgaaagaattatcaacacagtttcctgttggtgtagcctacgatatcccttacgatacaactacatttgttaatattgctatcaaagaagttgttaaaacattatgtgaggcaatgtttcttgtttttttagtggtttatttatttctacagaattggagagcaacacttataccttgtttggcagtaccagtgtctattgtaggtacgtttgcaggtatgcatctattaggtttttctattaatacattaacaatgtttggacttgtccttgctattggaattgttgttgatgatgcaatcgttgtattagaaaatgttgagcgacatatatctgaagggcagccagtgcatatagcaacagctaaagcaatgtcagaagtaactagtgctattattgctattgtgcttgtgttatgtgctgtttttatccctgtagcttttataggcggccttgctggacgtatgtaccaacaatttgcaatcactatcgctgtctctgtagtgatttcaggtgttgtagcattaacttttactccagcgttatgtattgttttattaagaaattatgaaccaacaactagtagtttttttaaaaattttaatgattggtttgctaatataacaggaaagtatattcatattgttaaggttttattacgtcgtactttattaactatttgccttttttgtttagtattattaggaaccacagcacttataaaaattgttccaagtggattagttccagatgaagatcagggatattttatatctttagttatgctgcctgatggagcttctctttctcgtacttctaagactgctagtatccttgagcaacagcttattaaagattcttctgtagagcatgttatgagtttttctggattagatgctattagtggtgcttctaaaacaaatgctgctacaatatttgttacacttaaaccatggggagagcgaaagaagaaagatgaatcttcttttgctattgtccggaaagtgtttgggctaggtagtgagatacctgaaggatatgttgttgcttttaatcctccaccaataagtggtatgagtaatactggcgggtttgagttgtgggtgcaaaatcgtataggagctagtgaagttgagctttatactatgatacagaaggtacttcaaaaagctcggggacgtaaggagttacaaggactaaatagttcatttggtgtaaatgccccacagttatttatagaacttgatcgtgagcaagctgaaactttgggagttagtatttcagatgttttttcagctatgcagtctacatttggctcctattatgttaatgattttaatctatatggtcgaacatttcgtgtatatacacagtcggagtctgactacagagctcttccagaaaatataaaggaagtttatgttcgtaataggaatggagagatggtgcctattatctctttactaaaggtaaaacctattgctggctctcaaattatagaacgttttaatggttttcctgctgctaaaataatgggaagtcctgcatctggatatagttctggtcaggctatggatgctattgagtctgtagcaaaagaagtcttaccagaagggtatacattagcgtggtcaggttcttcctaccaagagcgggttgtgagcggtggtggatcatttgtacttcttttatctttaattatggtatttctcatccttgcagcacaatatgaaagttggtctttacctttgacgatattaacagcagttccttttgcagcttttggtgctatcttagccatttggttaagaggaattgcaaatgatgtttattttcaagttgctctaattacacttgtaggtttatcagctaaaaatgcaattttgattgttgaatttgcagtagaaaaatatcgtctagatggaatgaatattattgatgccattgaagaggcttcacgattacgttttcgtcctattattatgacatctttagcatttattcttggatgcgttccacttgctattagtaccggagctggagctgccagccgtcatgcaataggaacaagtgttattggtgggatgttattggctacgattattgcaccattatttatcccattctttttccgctggattatggtgatttcagaaaaattttcaagtaagaaatccactcaggagtaatccatgaaaagattgttactctgtattataacatgtgttattgtatcaagttgctcttttgctccagattacaatcgaccacatttagagttacctgaggtatgggttagttcaccagagacaggagttcctgcttctatgcagtggtggaaacgctttaatgattctacacttgatattttagtagcagaagctttgcagcataatagagacttaattgcagctgtggccagagtagattatgcacaagctcagttaggagttgctcgatcagatttgtttccacatttttcaggaaatgctcaagcaacacctgtatgggtagatcataagagggttacagatggacaatctccatatagcgcaaacttttcagcaagttgggaaattgatatttggggaaagatacggaatgccaaagatgctgcattttctcaattaatggctacagaagcagaaaaagagggtgtttttctttctattgctgcccaaacagcaaatgcttattttttgttgaggagccttgacttacaatgttctattgcagagaggacagtaaaaacacgtgaagatgcattaagtatctatactgcacaatatcaaaaaggatttattaacaaattagatttaactcgagcaaaaacagaagttgagacagcacgtacagcactttatcaaaaacgtattgcacaagagaatgctgaaacagctttatctgttttgttaggccgttctccacggttaattatggacacagcaattgagcgtggggtatctatgaaagatttatcttgtattcctgttattcctcaaggtattccttcagagcttttagaaagacgtcctgatatacgtcaagctgaatatacgttaaaagctactagtgcaaatattggtgtggcaagagcagcttggttaccatctatttcattaacaggattatttggtattgtaagcccacatttaagtgatttattaaaaaatcctttaaaaacatggagttatggggaaactggaactgtgcctattttagattttggtcaggtatactataatgtggaagcagcccaggcaaaagaacgtgaagcattagctaactatgaaaaaacagtacaaaatgcttttaaagatattcatgatgctcttatacggcaatatgaatcaaagaatatagttaattcacttgaacgaatggtgaaagagttacgtatagctgtacatcttgcacgtactctttacgataatggttatacatcttatcttgatgtgttagatgcagaacgtgctctttttcaaagtgaactagatcttgctagtgcttggagtgatcgcctatcttctattgtacaagtttgtttagcattaggaggcagttgggaataataattatgtgtttagttatattatctctttttctatgtatatagtagcagtgtgtaatgtgttttagagttattgctagacaaataatttattctctattatatattaactaattgtaacttaggagtcctacatggcccataaaaaaattgaacgtaaaaaagaacttgatagacggcgtcaacgtcgtgccaaacgccttaagaagcgtatcaaggagaataaagctgctaaagctactaagtaaatttttagtctttaatttatgaaaataaattgtgtcattattttttaatgatcattggaccagcggtttcgtttatcgtcaccgctgttgtttttaagtccatacatgttgtggagctagtatatgccaatttatgaatattattgtacacaatgtgataatacctttgaagagtggtcaaagaatgcgtcatctcatgaacataaaaagtgtcccaactgtggtggagatgcaaaacaacttatttctaatacagcgtttatccttaaaggaagtggttggtatgtaacagagtatggaaataaaaaaagtgaagagcagaacaaaaaaaatacttccgataaaacagaggtgtcatctgactcttctagcactacattagagtcttctggtgatggaagtagttctacagagactcataagacaccttcaataagtgagcctcaaaaaacatctaaagaaaagcctaaagttcaacagaacactaagtctgctgtaacagcatcaagtgaagtaacaagcagtaatgaagcaactattagtaagtaataattatatcctttgaggtattataaaggttagggtttacatgattgatcgttatacacgtaaggaaatgggtcgtatttggacgttaaacaatcgttaccagacatggctacgtgtagagctagcagtatgtttagcttggaataagttgggtgtaatttcagatgatgccttcaagaccattcaggaacgtgctgtgattgatgtgaatcgtatacttgaaattgagagtattacacatcatgatgttattgcatttttaacagctctagaggagcaaataggaccagaagctcgttttattcatttaggttgtacttcatctgatattgtagatacagcaacgtcacttttacttatagaggcaggagagcttatattaaaaggttttgataagctacttacatctattgaatcccttgcattaaaacatcaagggttgctttgtatgggtagaacacatggggttcatgctgaaccaacaacatttgccttaaagtttgctaatttttttgctgaaatccaacgagataaagagcgttttgtacaagcatttaatggtattcatgttggaaaattttcaggtgctgttggtacatacacatttctcactccagaagttgaaactattgcatgtgatatccttgggcttaaacctgatactatttctactcaagttatacagcgagaccgtcatgctgaatatttcacagctcttgctattacagcaggaagtattgagcgactttgtgtagaattacgtcacttacaaagaacagaagtacgagaggtagaggaaggttttcagaagggacaaaaaggttcttctgctatgcctcataaaaaaaatccaatttctgcagaaaacatgacagggctttctcgccttatccgaggaaatgttcttgctgcattagagaaccaagcattatggcatgaaagagatattagtcattcatcagtagagcgtgtaataatgcctgatacaactatattgatggactatatctttcatcgtttatctgggatattagatgaattaatcgttcttccagaaaatatagaatgtaatatgcaggcctcatttggtttattttattcacaacgaattttgaatgctctaatagaatctgggatgggtcgtcaggaagcttatgtttctgtacagcgtaatgctatgcagagttgggagactaaacaaccttttcaagaagttattatggatgatacaaatattgtatcttgtttaggtcaagaaatgttagagaagttattcgatactagtttttatcttcgttatgaaaaagttatattagggcgaatatttggtgaatctactttacagaaatatcaagcaaataagaaaaattaattaggaaactaatagttaggttgtgtggtaatggatattttaaaaaaacgattagcaaaaattttttttgaacgttcatataaagaaggaaattttactttaagttcaggccgtaagagcgattattattttgattgcagacaaacagcattacatcctgaaggggcttggttaataggaaatcttcttaatgcattacttgttgatgtagatatttcggcagtgggaggaatgaccttaggtgctgatcctcttatttcagcaataactgttatttcatatgaattagataggcctctttcaggacttattgtccgtaaagaggcaaagttacatggaactgctcaatatgtcgaaggtcttgcaaacgtccattctggagatagagttgctgttattgaagatgttgtaactaccggaaactctttacttttagcatgcgaacgtattaaagcttccggattgactattgctattctctgtacaatatttgatcgtgaagaaggagggaaagaatttcttcaggaagctggttatgaattacgatctctttttacccgtaaagagcttgtagaccttgcaactagtctataatgttatttaacctagtttagtgattgatagtaagttaatccttaaaaaataggtttcaactaataaggttatattatattttcattatatattaataggaaatgtttttttaaaggtagaggtctttctttttttatggtatagcctattgtatattgaatacatgctttcttattgttttataaagtgaagttgaatttatagtatatagtaattattatagttaactttttattagttccaatgggttggagttccgtaatttaatacttaggattagttgtatgtattatgagttattttaataaaataaaagaagtcagaaataaatattatttttatttattaataattggaggatgcttttttttttactataggtatccacttaacaacatttaatacttttataagtataaaagatatctttcaagtaaataaaatagctattgctgaaatgcattctagcatgattccaggaagaagggataatgtatctcttagaaaaccaagaaatcaggaaggtacttcgtatattagtcagttaaagaataggacagttcagtggaatgatgcttgggtaaaacgatcgttaactttttttgatttttattggcctgaagcatatacagtattccaaggtattccttttcaggaatataaagataaagaagtaaactcatttaaagtaaaccagtgggtagatagtttttgtggagagatccatgttgaaaaggaagcagaatattgggtttcatggtttcatcaatatttacgtatgcctaatagttctatagagggcattcgcaagctttattggaaggaaaatgaacaaggtgaattaaagattgttggtatgaagtggattcctcaggagcttgatttagaatcttcatatttagaaagtataacttccaaaattacagcttttatcgaagattggaggtttgcttgggaaacaggggatgttgaaaagtatgctgtttattatgccgaagattctattcagggtgataggcgtggaaaagacgcaattatagagcataaaagatcaacttggaatacaaggaagccaaaagaagtctttttaacaggtctgcgtgttatggctgtaaaagatggtattcaggttgatatggcacaaaggtttcatgatgcgttagcctatagtgataaaggaataaagacattattgttacgtcctactggcaaatcatgggttattgtccgtgaagattggagtgagatactacaatgaatacaaaaagtagcatgttaagcctcattcttatgcatgacgatggtgaagcacgtagtatacgtataagcaaaagaggtctatggctactagtaatacttacaattttagctcctatagctggtcttataggtttatgggttggttgggaagcttgggaatctatgtctaactggcaacaagaaaaacttgcttaccaaactcagattgatgaattacgtgttcagttagaaagatttgctacattagaagcattattaaaacgtcaagatgctgcacttggtagtaaagttgataatcctcagctacagaaagaacgccaagtaaatacatcagaaaaaaaggatgtaaaaaaaactatagaggagaatgaaggagtagcaaaaaattcttcatctatgggtacaatcatgcctcctaaagctatcccccagtcttctatagtaccaacatccactggttcaggggttaaggaaatatcgcatgcttttgaatctcattcaagtgataagcaaaattatgaagggaatattcatactacttctatacaaccttcagtagttacaggaaaaagtgctcatacaacaggagagcaaagttctttcattgactatggagttgtcaaagttgaaaacgttcaaaagcagattatacaaggaaaacgtattcaagcacaaataagtttatttaatacagaaaaagttcctcaattatctggccacgttcagtttgcacttattactaatgatgggaaaaagtatgcgctctctggttctgatacaagttttcgtataacacgctttaaaagcatgttcatagattctgagttgccagtatcggatgcaattgcacaaaagagtaaattacttatagaagtagtttctggtgataaagttgttttccgtcaattatatcctctttctgagaaatagagagctatcttttcattttatctttttaccatatattcttctatataaactaaaaaagcagagtttctgcttttttagtttataattattttgttgatatcactaattctaatattagtggattaaccattaggttgaaataaagtaaaataattgagaaaaaaataacaaacaggtttatttttaaataaaaataacaaactataaaaataatacaatgtaataaatttggaatcataattgcagttaaacaactgttacctctattattgtaactattttgaatgagattataaaatagttagcattaaatatattatatataatatatttaatagaatttaaaaaagtatgtactattattattttattcaaaataataatttaactatctcataatatattatataataatttattatgctagttaattactgttgaataatccatatgtattaatcttatatcttttagtttaattataatttttcatattgtattcatattctaggtgtttttattaaagctacttgacatagtgtgaaaatagtaacaatatttattctaatctagtaactgtgcagctaaatattgctttactagggggtaaagatgtctaaagagtctctatggaaaagtccatggtttaagtatcttttaggcggctttatattggggataattgttattgtggggattaactggggtatgaaggtaacagactcaaggccattttgtgcaagttgtcacataatggagcaggcagcagtaacaaataagttatccatacatgctaacttatcttgtaatgattgccatgcaccacatgagttatggagaaaaattccatttaaagcaaaggagggaatccgagatttttatatgaatacaattgggaatgcacagttaccgattattccaggaacagaaacaaaagaagtagttaatgaaaactgtaaggcatgtcatgctatatcaaatatgactgtctcaagtacagaggcaaaaccctattgcgtggattgtcaccgtgatatgaaacacatgcatatgcagccaatcagtaaaaggatagtagccgatgattaatcaaattatattaaagagtgtatatgggctgttactttgtttagtggttgttctttctgggtgtggtgatgtagatacagagttaaaaacaccagaatataacacaggattacctgcagatcatttaggtaatcttgcttttaaaaaaatatttcctttacattatgcatcatatgaattgaataatgaaagtagtattatgacagtatataagggctccgttccttatatgaagaatgataataaagatcctttaccagaaggatacaagtatgcacaaccttatttgaaaaatctttggctaggttatccttttatgtatgattatcgtgaatctcggggccatactcatgctataggagatgtcctagactcagatcgtcctaatcgttatgcatttaaaagtggtcttcctgctacttgctggaactgtaagactccacagatgcttaagtggaccaaagatgatggtaatgcattttggtcaaaagatatgaatgagttccgtgaacgacttcatccagaagatgatactgtaggatgtgtcaattgtcataatccacagacaatggaactacagctttatagtgaacctcttaaagattatttagtatctgtaggaaaagatcctgataaactttcaaggcaagaaatgcgttcgttagtttgtgcacagtgccatgtagaatactactttgaaaagacaggtgtgcctgctaaaccagtcttcccatgggcaaaaggatttaatcctgaagatatgtatcaatattataaagaacatggtgattctactattcctggatttgaaggccaattttatgattggatacatccagtttcaaaaacacctatgattaagattcaacatcctgaatatgagacatggattgatggtcctcatggttcagctggtgtgacatgtgctgattgtcatatgccttatatacgaggagagaatggtcaaaagatgtctagtcactattggacatctcctcttaaagacccagagatgagggcatgtcgtcagtgtcatgctgataaaagtccagagttcttaaaagagagtgttgtttctgtccaaaaagcaacatttgatcaattgttgatagctcaggagctttctgtaaaagcccatgaagcagtacggttagctgatgaatatacaggtccaagagctaataattatgatcaactcatgatccaagcaagagatatgatccgtaaaggacaactattctgggattatgtatctgctgaaaatggagttggattccataaccctgtaaaagcattgaataccttggcatcttcaatacaatatagtcaagaagctattaacctggctatggaggcaacaaaatatgccattgggccaaaccttcaaggagatattaaagaaatagttccacctattttggttatgtctcgtaaattacaacaagatccagagtatcttaaaacaaacccttggtttaagtatctaaaagtactaccaaaagctgaaattgaatgggatggtacaaaatacttaggtgataaataacaaactctattcatataattatgatataaaatgagcccattatactagtataatgggctcattaactaattagtttttaacatatcagaacctatgaaagactagcaacatcattttgtaattcaaatacatcatggagtgtccgaacagcaagctctgtatacttttcttctattaaacaagaaatttttatttctgatgtactaattaataaaatatcaatattttcatcttttaatgcattaaaagcttttgcagcaaccccagcatggtttcgcataccaacaccaatgagagaaacttttgcaacattagtagcacattcaacgcttttccctccaatagacttaattagctcttccattagattacatgctctagttagatctttacgagatacagtaaaagttatgtctgtcagattatttctacttgaagcttgaataatcatatctacaaggatgtgttgttcagctagaggcccaaatattgacgctgctgttccaatgtgatgtggaatatcacagagagtaacacgtgcttgatcattatcatatgcaatactagaaacaagaacagcttccataattgaattctcctgagtaaccattgttcctgatgcgttactaaatgtagaaagtacttttatagggacattgtatttttttgcaaactctacagatcgaatctgtaatactttagcacccatagaggccatttcaagcatttcgtcataactaacatatgcaagctttctagcttttgtacataagtttggatcggttgtataaacaccttccacgtctgtataaatttcacatttgcatgagcctaaagaagccgcaatagctacagcagaggtatctgaacctccacgtccaagggtagtgatttgtccttcttgtgtaactccttgaaatcctgctataataagagcatcataatttttaagctgcttataaagcatgtctccattaatggaaataatccttgcttgtccaaagtcattatttgttaagataggaatttgccaaccaagtaaggaacgtgtttttataccttgcttgttaagtaatagactaaaaagtgtaatagatgcatgttccccagtagaaagaagactatcaagttctaaagggtcagggttttctgcacatgagtgtgcaagctctaataatgtatttgtttttcctgccttagctgaaaggacaacaacaactttaaatccgttattaagagcattagtcactttctgttgcacttgttttagacattctaatgtagcaacagaagttcctccaaatttttgtacaagaatttgcatagagttatactataggtgaagagagattttgtgtattcattagctttaattggattacctgttgatgttgtatcagagagtcaataattttagctgagattactccatgatgataacacgatatttgtcgagtatttttttcatctagtgaaagagaaaaaataatacactcagtaggaaatagttcttctgggagatattctgcccattctatgattactaacccttggtgatcataaagcaattcatatatctcttcagggattgtatgagagcagcgataaagatcacaatgtataacagtaggatttgttggataatagttacaaatagtaaaactagggcttgagacttcagcatattcattatacaggaaatgttgtactaatccacgagtaaaggttgttttgccacttccaacttctccgtagagtaaaataacaggcataaaagaatagtttacaagaagagttgctatatattgtccaaaataagtcatactattcgggttagaaatagtaaatattacagagggaggagaattttgtgtataagtttttgtaactatagaggacataggtggtgtgttctgcaaattattatacataggcactataataactgggctttacaaggaattcaatagattcttgtcaaggatataaaaaatattgttgcatgaattattgcttggaattaatataacaagataagtagacttgtgaagcaaaagagagtatgagttttagtagatggaacaatatcatggtcttttggttgtaaataagcctcaaggaattacttcagcagcttgtacgtattatttaaaaaaaatggggcaaagaaaaattggccatgcaggaacattagatcctatggcacaaggtgtgttgcttatccttttaggacatgggacaaaaatttttaactatcttcttgaaggaggagaaaaagtatataaggcaacagtttgttttggacaaactacagatacttgggatagagaaggaaaagtccttacaacacagagttgggaacatattacttcagaagaggttagggaacatattttttcttggaaaggtataaacaagcagcttatcccaccatattctgctgctaaatatcaggggcagcctttatatgctttatcccgtaaaggggaaaacactccacataaaacaaagaaaatagaaatttcatgtgtggaagttcttactattaacctcccatatgtaacctttcgagttacatgtagttctggtacctatatacgctctctagcccacagcttggggatgcgaatgaggtgtggggctgttctcacagagctgactcgagagtatagttatccttttgggcttgatacagcaattccatttgaggatcttgtaaccaatccagatttattactagatcggattattcctattacagcagcattgcctgactggtcaattgttgttgttaataaaagtgaggtttcacagattaaaaatggtattcccctttttagaagagatacaacatgtctctcaggtaaaaagacagtacttttgctggaagatggaacacctttagcacttgctgaagcaatgaatacttctaatggagctgtatggactttactcagaggattatggacataaaacctaaaattataatatgaggaaattgctgtggtaatggatgcattacaaaaaaagagtattattaatgtatatgctaaacatgagggcgatacaggttctccagaggtacaggttgcattattaactgctcgtatagaagttcttacagagcattttaagttacacaaaaaagattttcattctcgtcaagggttattaaaacttgtaagtcgtcgtcgaaagttacttagctacctaaaaagtagaaatattcaatcttatcgtgatgttattgcaaaacttggcttgcggaaataataattgttttattgggggagaattccccctttttattatatttatattataatctataaattttatagattataattagtagtataaattttagatatagtaagaaaggttacataattcaccaagttgttaatgagtaattttataaaattattattttgacttacggttattatagtacttttttgacataaaaaggaaatgtatgagctttagaaaaccccccattcgtttagctactcaagttggtggtaaagaaattatttttgaaactggttatatggctacacaggcaaatggttctcttacagttcaatgtggtggtaccattgttcttgtaacagtttgttctcaaccccttgagtctgacaagggttttttcccccttactgtggaatactcagaaaagatgtatgctgcaggaagaatccctggaagcttttttagacgagaaataggacgtcctagtgaacgtgaaacacttatttctcgactaattgatcgtcctattcgtccaatgtttcctaaaggcttagcagaagatgtccaaattttggctaatgtaatttcttcagatcaagaaaatgaatctgatattttagcagtaacaggggcatcagcagctgtaatgctttcttctttaccttttgagtgtgctatagcagctgggcgtattggacgtttaaatggtcagtttgtattaaatcctacaattaatgaaatagaattaagtgatttaaatattgtttttgctgcgtcttcagaggctgttgtaatggttgaaggtgaagcaaatgttgttgaagaggaaatcattattgaggctcttgaatggggtcataaagaaattcagccaatcataaccctccaaaataaaatccaagaacttgctggacgaaataaaataccatttgttcctgttgaagagaatatagttttttctaaaaaagtagaagaattagcggataaatttggtatagtagaagctatgcaagttaaagaaaagcaatttcgtaaagaagctcgtaaagctgttaaggaaaaagtgttagctatattaaaagaagatcctctttatgctgaacatagtgatatacttaatacagtaagtgaaattattggaaatttagaaaagaagattgttcgtcaaagaatagtaaaagaaaatttacgtattgatggacgtgatacaataacagtgcgtcctatagcaattgaggtaggtttacttccacgtacgcatggttcagccctctttactcgtggtgaaacacagtcattatgtattacaacattaggaagttcaacagataatcagagagtagattcacttgcaggagatacagttaaaaattttatgcttcattataatttccctcctttttctgtaggagaagtaaagcccgttcgtgtatctagacgtgaaattggtcatggtgcattagcagaaaaggcacttaaatatattcttccttctcaaaatacgtttccttttacagtccgtatcgttgctgaaacattagaatctaatggctcttcttctatggctgctatatgtggtggttgtttatcattgatggacgctggtgtcccaatttctgctccagtggctggtgtagcaatggggctgattaaagaagatgatcaatttattgttttaacagatataattggtgatgaagacgcctttggtgacatggattttaagattgcaggcacaactaagggtattacagctgttcaaatggatattaaaattactggcttgactacagatgtaatgcgcaaagcaatggagcaagcacgtgaggctcgtatacatattcttagtgaaatggcaaaagcattagatgtcccacgttctaacctttcacagtatgcaccacaacacgctgagcttgtagtaaatcctgatgctattcggatgattattggtcctggtggtaaaaatattaaacagattacaactgttactggtgcagctattgatattaatgatagtggaaaaatttcaatttttgctcctacatctgaagcaatggaacaagcaaaacagatgattttatattatgatcaacgtccagaattaggtaaaaactataaggggaaagttcgtaaaattttagaaataggtgctattttagaaattatgcctaatgtggaagcatttgttcatatttcccaacttgctgttgagcatattgcacaggtgactgatgttgtacagctaggtgaagatatgataattaaagttattgaaattacaggtgatagagtccgtgcaagtcgtaaagcagtattactagaagaagaaggtataacttggactcctgaagagagtagtcgtttttctaaaggaaatcgtaatggtgatcgtagtcgtcacaacaatagagaacgtacacgtcggacataacttttattaagaataactactaggttatataggctgattgattcttcttactaaagaaaaatcaatcagttttgattatactatattattaaaagtagtaaatttttaacttaggttattttgataatatattatgaagtgcttgattaacaagtgctggattagcttgtccctgcatttttttcataacttgtccaataaaaaaacttaataattttgtttttccatttttatatgcggctacttcagtaggattttcagcaagaacttcaactacaattgtatcaatagtctttgtatcagaaatttgtgttaagccatgttttattacgtaatctttaggcattaattgtttgctaaataaatcttcaaagatatcatgagcaattttgatactaataagattttcatcaataatagctgcaagttcagcaattgcttcaggcttcattgtacattgttggattgttatattatgctcattaagcatatgtaatagtaatattttaataaggttagcaatttttttaggttttgggtataatttaactgctttttcaaaaaagtcagcaagttctcgacttgatgtaagtatttctgcatcctgatgagctaaaccccattctattacaaatcgtttttgtcgactatccgataattctgggatttcacctttccatttttctatttcctgaatagtaacataaataggtactaagtcaggatcaggaaaatatctgtaatcatgggctgtttctttatctctcataggggtagtgatatctttatcactattataaagacgagtttcttgtattattgttttaccatcttctaatatatcttgctgacgattgatttcaaattcaagagctcgttgaacatttcggaatgaatttaagtttttgatttcagttcgagtccctagatgtttagaattatatggtcgtaaagaaatatttgcatcacatcgaaagttgccttcttccatatttccatcactgataccaagatatgttacaattgcatgtaagctttttaaataagcaacagcttcagaaggagtatttatatccggcttactaacaatttcaataagaggtactcctgctctattaagatctataaaacttttattttcatgaggagagtgaatactctttccagcatcattttctagatgaatttggtggatccctattcttttattgttattttttatagtcagatcaagatatcctgaagtacagagagcatgggtaccctgagatatttgatatccgtttggtaggtcaggataaaagtagttttttcgagaaaaaaaagagtgagtattaattgtacaatgcaatgcaagtccagctttaactgcgtattcaacagctagtttatttagggatggtaatgcaccaggcatacctgcgcagatttcacatatattagtatttggtggagttccaaatgttgtagggcaagagcagaagagtttagactttgttccaagctgaacatgtacttctagcccaatgacggcttcaaagtgactcatgtatagatttctcccttattaggatgttagtgaatacagttgtgggttaagagaaggattgttatacatcttatattggaaataaagtttaggttttcggattccttggtggaattcgtttactaggtttaggatagcattattaagatcaatatgttgttcttttagtacatgtaatttttgtttacaattttcaatatgttcaatagtaacgtcgctacgttcgacctgttcattcatatgccatatctttaggcttaaaatagaagagcgatcaatagccattcctaatgactcagtatttgtatgtacattgttagtattagtaggtagtaatggttgaataaggttaagaaaagctatatcaatttgttccataaaatcgtttcgttgttggtttaattgatcaatagatcgtttacattctgcaatcagtataggttctatatcacgccgacgtgcaatatcttcttcatgccagattttaaaattaaatagatgttgaataacaacaagttctttaaaaatagatggagtatagacagtttttagtttgggtggctcaatttcaggtagttcttcatgccaaagcatagttttttgtgtttgtagttcaaaacattctataagcatagttatacaatcgtgtatattcatcagaaaaatatccttagaaagtttgttattataacgattggaaagttatatttgtttttttgttgaaaagacttttagttgtttgacctatagcttaattttgttatattaatctgatattactaacatttagtttacacaatataaaaattatatgttttattaaatagtaaaataagttttttattttttatagttaagagtaatttcaatccgttatagtttgaacggtaatagaattgttattaatccacttgactatatttgtttttaacgaaaaattacataattatccagtatgttactcgtataaactaatgggaacaggaacatacaaaagattgaagatggctcattaatgcatagtggccctatgtatttatttctatttataactatagagtagaggaggcagaatatactggtataatttagtatagttaattaccatttattttttaacttttttatgtatataaaaaaagttagttattttgatagataataaatgaaatacaaaagcaaaaagtaaagaatgctatattaatattaagaaacatttttttatttaacgataagagataataataaatacaataactatacttagtataagtttcgttaggttattgatatctataagttaaaatctgtggaagataaaagaccttttttttgtaggtgttgtaaatagctatagttggctgtagtgtatataagaagcccactttttattccttgaattccaacactatcattgggtttaagtacaaaaccttcttgtccatcgactgtaaggaatggttcaatagcatgaggtgaaggtgtaagcgtaattgttgttgatagaggtaaaactagcggaggtgtacttctgaagagtgtcgatacagaggtcagtgtaagtgcttgcacatcaggatgaactaatggtccatgagcagaaattgtataaccagaggtcccaagaggagtagaaacaagaataccatcagagcgaatcactccaatatgatgtttattaatagaaacatcaacagcaagaactcgtgcaagagctccacgtcctactacaacatcatttatagcaaaaccattttttataacttgattatgacgaattattgaccaggaaaggactatttttttttgaagaacaagcttatgagaataaagttgttcaagcatttgtggccagttttcaggatgaatttctacaagaaaaccaacttgtccaaagttaatacctaaaacaggtatttgtttttcaataaggttacgggaaatactaaggaaagttccatctcccccaagtataatagctacttgtgtatgaacaagtgattgttttaattgtgactcaggaatatcagatgaaaagagatttgaggttacattcttattataaaaccaatgttggatatcatgtgctgttttttctgcttgaggatttcctactttatatacaataagggcatgtttaagcgttttcatattaaatgttgttaataatattttttagtgtgaataattagtttttatagttaagttaaaatcatttgttattagtataatctttttattatgctttatcattaaagatatatgttatcttagttaagataacaagctataataaagaataacacagagttatagttgtcaccatgagatgatcaacttattcttagctgaaataaaaaaaattagaaagctatttattttatgtgaaaaggagtagtcctagtttcatgaataaagcatttcaacttattacttcccatttagaaacaggaataaaattacgttctgaattttttactgctcatgccagtacaatagttgagatggctcgacaaattgcttcatcagtagcatgtgggggtaaaattattatagctggtaatggtggtagcgctgcagatgctcaacactgggcaggagaatttgttaatcgctttcttttagatcgtcctccattaccagctattgcattgactacagattcttctattttgactgctattggtaatgattttggatttcatctcatctttgcaaagcaacttcaggcaattggtcaacaaggggatgtttttttaggtatttctacatctggtaatagtgtaaatcttattgaagcactgcatgtagctcgtaaacaacgtattaccacagttggattaactggcaagggaggaggagggatggcacctttgtgtgattttttgattgatgtccctcatcaatcaacccctttagttcaggaggtacatgcaactattggacatatgctatgtatgttaatagattatttcctttttgagaacgtttcagctattcaaccattattaaacgatccagcaccacatgaaaacaatgaataatatttttttatgaacagtaggagatatttcatataaatatacttagtaagtatgatatgtaaaaagaagtagaaaagttaattcagtaactataagaactaatataaatttcagtataactagtgtataaaagtagtaagtttaatataaactattttagataggaaatagctgtgtattagtaaactaacaacactcttataaagattaattattaagattaattagcatctacagagtagtttatatttaaataatgtgactattaaggtattaaatataatattatgctatgggagtaacataatagttgctattaatactttaatagttaggaataaaaatgaaaaagatcactattgctacaagaggaagtaaattagctttttggcaggctaactacattaaagatcaattacaaaaaatgtattcttatcttgaagtagatttaatggttattaaaacaaaaggtgatcatattcttgatgttccactggcaaaagttggaggaaaaggtctttttgttaaagaaattgaagaggctcttttatctggagaggctgattgtgcagttcatagtatgaaagatgtccctatggagttaccttttgaactttgtttagctgctattacagaacgcgaagatcctacagatatgtttctttctataaagtatagtggtgttaaaagtctacctgaaaatgcattagtggggacaagtagtctgcgaaggcaagcacaacttttagcattacggccagatcttcaaattataccattaagaggtaacattgatactagactacggaaacttatggcagaagagtttgatgcaattattatggcaactgcaggaataaaacgtttaggccttatagcaccatatatgtcctcattgccttgtagtgttatgcttcctgctgttggtcagggagcccttgggatagaagttcaaaaagaaagacaagatgtattggagctattttcttttttaaatcataaagagacatatcattgtattcaagctgagagagactttttagcaggccttgatggtggatgtcaggttcctattgcaggttatgctactatttgtaaacaagaaactatctgcttagaaggtttagttgctaagagtgatggttctgttatgatccgtaaccggttagaaagatcagtaagtgatgcatatgatattggtatgacattatcaaaaatacttcttgctgaaggtgcggatgatattcttgcatcaatgcatactatcctgtaacttctaatagttatgacataccagcatagttgataatcttagtttttttaacagttagaattttttaatacgtttttggagtaccatgtggctaaagttttaccattacctgtatctcgtctttgtgcaagactctcgcctgaccgaatcccatgggaagtaagtagtgaaattcctaaaaatgtatctcaccgtctatctcttcagcctcgtgtgcataaagcattagagcgtgcacttgctataacgatttcaggttataatatatatctttcgggagaagcactgcttggccggtcatatctattaaaggaatttttagtcccacgtgctaaaaaaatgcagacaccaccagatttactttttgtacataattttaatgaagtagacaaaccatgtttactcactgttccttctggacaagggaaaaagatacaaacaggattaacaaaggttttgtctgaaattcgtaaacaagttcctttgtggcttgaaaatgaagaatatattaagaagcataatacaataaaagataagttccaaagtagccgtaataaacttcttaaagaaatgcgaggagtggctaataaacaagagtttaatgtagatcttgatgaacatggtggattaacattatatccgctagttgaaggaaaacgtttaagtgaagatgagtttaatcgattagacgttaatcttaggcaatcattaaagcaaaaaggagataacttattaagttcaatgtcaagtatggtacgaaaattaagaaatgcagaaaaaacattccaatctgcagaaaaaaatcttgatcaagaagtaattacaaatcttcttgataaactttttgtaccttttgttgaagaagtattacgacattgtcctgataacaaatcactaaagaattattttaatgaattacagaaagatatttttgagcacccagagtccttcatcacacgtgataatgcttctatagcattacatcagcaacatgatgttagtcagttatgtcctacagaaacagagcaatataggtattatattaatatttttgtagataatagtaatacaaaaggggcacctattgtttttgaagatcatcctactgctacacatttgttaggttgtatagaaagagaagctgaaatgggtgcattaataactgattttacacttataaagtcagggtcgttgcataaagctaatggaggttttcttatattacatcttgatgatatattacaacatcctttagcatgggaaggattattgcttgcattgcgttcaggtgtttcaacattagaagattttggagagacaacagatggaactatacgtacaaaagggattgaaccagaatctatccccttagatgtaaaagttattcttgttggaaatgaggatttttatgaaagattattggagcatgatgatcgttttagtaagctttttaaaattaaagctcaattaactactacaactgaaagaacagctaaaggaatccgaagttggctgttccaattatctaaaattatagatgatacaatgctattaccttttgatgctgaatcccttgcaggacttgtagattatagttcaagagaatgtgaggatcagaaaaagctttctttacgttttcctttaatacgagatgtaatgattgaagcatctgctattgcaaatatggcaggcaatgagcttgtgcaaaaaattcacttagatgaagctattgcttctaggctgaatagagtcaacttagtagaagaactctttattgaagaatatgatcgtgatcttataaaagttatgacaacaggatggagtgttggtagggttaatgggttgtctgtatcttggtatggtgattttgagtttggattaccacatcaaatttcttgtacagttggtgtcggtcatggaggaattattgatcttgaacgtgaatcagagttgggtggtcctatccatacaaaagctatgcttattttgaagagctatttagttgatcaatttgcaaagaaaaaacctcttgtacttacaggtagcctttgttttgaacaaaattatgctggagttgaaggtgattctgcttctggtgcagaacttgctgcattactttcagctgtatcaggtgttcctttgaaattatctcttgcctttacaggtgcagttaatcaatcaggacaaattatggctgtaggcggggttaatagaaaaatagaaggtttttttgaaatatgttcacgtagagggcttacaggagagcaaggtgtaattattccttatgataatattgatcatctaatgttaaatcctaaagtcattgaggcagtcaaagacaaaaagtttgctatttatccagtaaaacatattacagaagcattagaacttttaacagatatgccttcaggccgtcctttaaaaaaaggaggtttttctccaaactcgttatatgataaagttgatagcagattacaagagttaggtcatctagctgagcatgcattcagtaaaacttatagaaaaaaaactaggaaataataatcagatagttataactactagttaggaactataacttgttttactttgacttttaaaaggttagttatccaaatacaaccaatagaataaagagctaggcaaataaagcctatcccaaatgttaggtgttccccacaatatccaagaaacattgttatccctccatttgaaataagacctgagcttgtcatagacaaagacattaacagagcttgttggctaagtggaaagcgtatagcaaaagccttaaagatagaagggaaaagacatgatatcgaaatggtttggaagatgatacctataatagatagtgatggaatatcaaatgccatagcggtaagggctaatgtatgaagaattaggcaaaatttaatgataaagtatacattaaaacgatctgacgcccatcctcctaaaattacaataaagggagtaattagccgtgaactagatataaggatattagaacttcctggtgtaaaccctacctcatctgtgagatataattgtaatatgctaaagacactatattctccagcttgagcaataataagtagtataacaacagcccaacttgctggggtaaaaagaagctctttataaccagagtaagatggtaaagggacatgttcttgtcctcctctaccaaaaaatataaaaagtatactaagtactaacataggccaaccaaggtaagcacaaacaccttgccaattagtaacttgtaaaaataattgagctaataaaggaataagtataaaattaagattagctgcaacttcatgaatacttatagcttttccccagtctgagggataaacaagtgttgataggactgctattcctgccggaaaataaaaaccacatccaaaacctagtaatgcaaaaagtaatcgagcttcactaagtgtctccacataaggcattaagcataggcagatacttgagaagaagacggaaaaggctaccatatgtgcaggagtaatctttgagagtaaaaatccacaggaaaaaagactaatactatatcctatactctgcataagaagaaggcttgtagattgtatatggcctatttgaagactattttctacatagacaagtaatggggctaaggtagatcgagtcatataactacataaaaataatagagaaactgcgcttatccaaggcagtgcttcacgaaaaggcattgggagagtatagtcatgtttaaacatatatgaggttacttaatagtagcttgttgtaagtaaaaaattaaaaagatattagcatactaatgaattattgaattaattctagtataattttttcaatgttcaagatagataaagaaataataaagataagaataacatcaagctatgaatgagtaaatatattgttattacatatagcatctatcgtataatatatagataattatgacatattacatgttatagttataggaacaattctaatgaaatagaagaagatcgttattacttgtctttaaatggagttcaatgtatttgttatactgtgctgagtaatgcttagattaagtataatgcatataaatattgttagagtaaggcatagaaggttacaacttatgtataatacacaaaatttatctttaagaacttttttttctcctcaaatattacctgttaagtcaaaattttctcaagtttctgcaattcaaaaaactgttattcttacaggttggcttgaagagcataaggcacagaatgtgctagcctttgatgtagtaaataaaaatttatgtatggatattgtagtgattttaacagctacgtcttctcgtcatgcaaaaggacttgcagatggaatccttgaggagtgtacaaaacaaaattttgaatatcttcgaatggaagggtatcaatatggtcaatggattttagtagatcttaatgatatagttataaatattttccaggcagggatacgtgagttatatgctcttgaaactctttggaaagggtgtcctttattaaatggacaattagccactaatactctttaatcaaggatgtatttatgaatgtagtgccaatactattactaattcttgatggttatggtcttgcacctgatagtactggtaatgcagctaaattagcgtttacaccaaacattgatagaatgttagctatgtcaggtggaactcaaatacatgcttcaggtcgtgctgttggtcttccagatggatacatgggaaactctgaggtagggcatcttaacataggggcaggtagagttgtttatcaacaaatgacacgtattgatgtagctattgaaaataaagagttagatagtaatccaattttacttgacctttttacaaaagttaaatcatctaatggtcgattacatcttttaggattgttatctaatggtggagttcatagccatattagacatcttgaagctttattatccattgctaaagagcataatattcaagtgatattacatccttttatggatgggcgtgatactggtccaaaagatggtttaaaatttatgaaagaaattgtttcatttttaacatctacatctagcggggtaattggtagcttttgtggccgtttttatgctatggatcgtgataagcgttgggaaaggatcaaacttgcttgggatgcaattgtacatggagtaggcttgcatgtggaagattctgttaaagcattagagcaggcgtacgcatctggagaaacagacgagtttataaagccaagagtcatgggcaattctagtgtaaactgtgttcaggataatgatgcagtattattttttaattttagagcagatcgtgcccgagagcttgtcagtgcttttatccttccagattttaatggatttgatcgtggccgtgttccccatttatcagggattgcaacaatgacaatgtatgacaaagagtttaatattcctgttctttttaatcatgagaatataactaaaacattaggtgaagtcgtttctgctcttggattgttgcagttacgtatagcagagacagaaaaatatgctcatgttacatattttttcagtggaggacgtgaagaggttttcacaggagaagaaaggatacttgttcaatctccaagagatgtagcaacatatgatttaaaaccagaaatgagtgtgatggaagtaactgatcgcttactaacagcatggaatagtaagaagttttctttgattgtgtgtaacttagctaatccagatatggttggtcatacaggaaatattaaagcatctatttctgcacttgaagctgttgataactgtgttggacgtatagaaaaagcagtagctgaacagcatggttgttttattttaacagcagatcatggtaatgtggaagaaatgctggataaatctgggcagccacaaacagcacattcttgtaaccctgtccctttgatagcaatatatgatgggaagcctcttaaccttaaagaaagtggtaaacttggagatattgcaccaactattttgagtatatgggacgtttctattcctaatgagatgacaggtaataatcttctttcatcggagtgataaagtatgcatgaacaaaatcgtcctatatctcctgtatcaccatcaggaatggaacttctttttatctataagtgtccacattgtggaaggaaaatgcctcttatttcaccaacacaacctgcaatgactcaatgtgattcatgtagcttggcctttccacttgttcctgttgatgaaaggactattcattatttaaaaattatacttgctcagggtagagctgctgttgatcctgactttatttaagaattaaatacaaaccttaaaataaataaagactgaaaaaatttttttcagtctttatttatttatttatttgttatgctatatgaggaggtaatctattgagcaataattgaaagtttatgtaactcattatctagcattgaagttgcttgtccaacagatagtttataaccttttaaaactttttgttgtttttttgaagctgagagttgttgctggatatttgttttaagttttgttccttcttgtataagttcttcttgtaatgtttttatagcaagtaattttgatcgaatttgttcattttcagcatcacgaatattccatgcattttctaagagttgagcacggtgattacaatattcatcagctttttctacttcttcagcttttaatgcatctaactccagttggccaatatgtaatgcttcatcatacaatgctagacttttagacatactaagctccaagattattttggatagctttgcgtaactcttcaataataatattccaacgttcacaagcaggaattaactcatattctaatagatctgcaagcatgatccaatcttcttgttcaagcacgtctgtcatttcgcttaataaagatgaaatttgttcactgcaatctgcaaagacgttatcgtctgtaacaataaagtcagttcgtaatacacttaccattgtcataaaatctcttataacatctagtaagtcttgaaaaagttcaagtccttcatcatcttcacctcttctaaagtgttgagcaacttctttgctgcctgtagcaataaagttagaaacttttaaaagttcttctgtaatattatatgccatctctccaaaaggaatagagcgtatttctacagaatttatttcatttgttggaatatcttctgcttggtgaggatatagttcagagaagagttcatcatttaacaatacatcagtaacaattctattttcaagacgtgaatcgcttgctgcgtaaagtaaaatttcttcaaggttagaaaaatttttaatttgcatatcagttttattaccgtcgattataatcataatgcctcctcatatgctattaatagtagttacaagatatcttgcaagaggtgagccattattttagagaattattccattttgtaatgattttttgaaaggagttagcaatagttaatacatgtgataaattgtcagcatgttcatggatcgacattttccagaatatccctagtgcagtaaataattcgttttgttcaagtagttctgtaatattataggtagtagaaagaaattttttaccaaattgtgaaatatgtttttcagaaaggagaaggccttgttgttctaataacttgagaaggctagatatctgttctagagtattggatgcttgttgcctaacattctgagataactgtgagataacctttgtagataaaggacgataactttttgttgtattagggttatctaacaagtcaataagttgacgataataatatcgttggatatacaaccaactacttctatcttctttatcatggccagacagagattgaagattaaaaaaaccataatgatctcttgttgttatccatacccgcgctacagtagatgtttcaattggtgctttttcaggccattttttgttagttaaacgataagtaagaagtggccagatagcatcagcagaaattgtagtacgacagattgtatcaataggacatgtggtatcaaagtcacaagggtgacaatttaatgatggctcaagacaacaacagtcttcaagatatggaccagtatcatatggttgagcagttgcaagaaagatagcaagagagggtatacccattcctgcagctaaatgcattgttcctgtatcatttgtaataagaagagagatatgtaataggatagctgcaagttctgcaatttttgtttttcctacaaggtcaatacatggagcaccagttttgatgtattcttgagcaaggtgttgttcagattcgctaccaaaaagtacagggataattcctaattgattatataacttttttcctaattgtgcgaagtgagatacaggccattgacgcaatgttgaactagcaccaagttgaaatcctagatattgtttattggtttcaaaaatatgatttttaaagtgtgttgttgaggttagtaaatttgttttttggggaagtttaagtttatagcatgcaggaatatgttcaacatgagatatcattctgaatagatctacaagattgtatggactacatcgtcttttttttgttgaagcttcaaagagttttgcccacattgagtcacttacaccaaacccgtatttatcgacactaaatccttctactggaataattgattgtgaaagaccgtaagctaagagacgagcaggaatatgaggagtaagattgagaattcggtttggcgggaatgtattatagatttgttctatccattcttggaaattagcaagagcataaatccaattttgttcaatcaatgatagtaatttccccccagagataggattcacatatgttatatgtgataaacatgatgttgcatctacaaagctggatagacaaataagtccaacttgatatccatcttggtgaagtgctgttataacaggttgcgtctgtattaagtcaccaaatcttgataggttaataacgatagcatgcataatataattattatatgcataatgtaacagatgttaaactaaaaagataaaaatatcagatgatagaagatagtaaggaagttcagtttataacagtctactattactattttatatttgattattgtagattatatgaaaagtttagtataatcataagaatggagcccttgagcaggattgaactgctgacctcatccttaccaaggatgtgctctacctactgagctacaagggcatagtgtcaattttgtaaaaagtttctatgtcatattattatagtaagtcaagttcgtcagagggttcagatccactagctgtattgcacacacctctttcactattgcgaataaaacgaataatactttgaacttctggaacatctggatattttttttctaaagttttaagtgattctggtcgagggatagtacttttccaaataagcttgaatgtatctttaactgctgcaatagttgttgaaggtacattagcacgtcttaatcctacaaggtttggaccatgtattatacctttcctcccagttataagcatccaggggggaatgtcttggctaattcctgtcattccaccaataaaggcatgttcaccaattttgcagaactgatgaacagctgataaacctcctaatatagcaaaattatctatatgcacatgacctgctaaggttgaacaatttgacataacaatattactaccaagaatacaatcatgggctacatgtgtataggccataaaaagattgttattcccaattttagttattccaccacctccagcagtcccacggtgtaatgtagcaaactctctaattttgttataattaccgatttctaaccatgttatttcaccagaaaattttagatcttgaggttgtcctccaaccatagcatgtgaatgaatatgattatctgttcctatcctagtgtattgtttaattactgcatgagaatctatatatgttctatctcctacattaacatcatcttcaataattacataggggccaatggttacatcaatacctatttgtgctgaagaagcaataattgctgtaggatgaatagttacagacattaaaaattttccttgtttgtcattgctgcagttagtattgcttctgccacaagcttattatttacaaatgcctggcaagacattttccacaactgtagtttatggcgaattatttcacactcaagaataagttgatccccaggaataacttgttgacggaattttacattttctatccctgcaaatagaaaaactttaccttgtagttcattaataggaaaagattggagtactgtgattccacctgattgcgccatagcttctaaaattagaactccaggcatgacaggaaatccagggaaatgaccctgaaaaaatggttcattaatactaacatttttataagctttaatatatttgccagcattaaattcaataactctatctacaagtaaaaagggataacggtggggaagtaactgtagaatttcttggatatttggaggtaatggatgggacattaatttttcctatatattatgctcttttttcttttctaaaattttttcaagcttttttatacgcttaaagagctctgggaatcgtggcataagtacagatgtttttaaaaaagtttgtcggtcaactgcagggcttcctcctaggatttgattgtcagggatatttttaccaataccagattgtggaccaatagtaacattattacctatagtaagatggcctgaaattcctgcttggccggcaagaatacaattatcccctatagatgtagaaccagatataccaacttgtgaaacaataacagtatttttaccaactgttacaccatgtccaatttgaacaagattatctattttagtgttttcatttatagtcgttgttcctagggttcctctatcgacagttgtattagctccgatttccactttatctttaataattacatttcctacttgaggaattttttgtttttcttctgtaagtgcgaatccaaacccatcagagccaaggactactcctgcatgaataatgcagtcatttccaattgatgtgtttgccataagtactgtattagggtaaatagtacaatttttcccaatatgacaatgttcaccaatgtatacacctgggaatagagtagtattttcttcaataacagtatgtgatcctataaaaacaaaaggatagatagtagctgttttagagacttgtgctgtagggtgtatataagcttgatgacttataccatcaaaacatccttgaggtatagagaataaagaaagaactctaccaaaatctctatatggttcagtactgattagtgctcgtggaacacgactagcatattcttttgaaagaataatagcaccagcctgtgacaaaacaagctggtgaatatatttagcatttgctagaaaacttatctcatttggtgatgcatcttgaagtgtatttacgcctacaacttcaatatcatcaccttgtaatgttaagtttaaaagtttagcaatttctgaaagtttatactggggcatctgttattttttccggtttgccatctctggaagtttacttccaccttttttccatgcagcatttatggcttcaagaatttcttttgtaatatctagatttttttcaaggtacattacacttccactagcactatcaagaacaagttttaaccctttcttttttgctatagtttcagcagcaagatagatttgttcagctagatattgacgtaatgtgttttcagcttgttcgacacgtattgcaaagtcacgagatttttcttcgaaattacgacgaagttcaagaaattctctttgtttatcttcacgtgcttggttagacatagctgctgacttagcttgtaaatcatcagcttttgtttgcaaatcttttgcttgtttttcaagttgtgttttttcattaccaaattctgattgtaattttttttgagcggccttagctgcttcactctccatggcaatggattgagaattaaagacaccaatagggaagtcagccgaaaatgcactgttagctactaataaacaagctaaaatagccatggaaagagtttttactttcataatgaagctcctctgaatgaataaagtatggttgcataatttttacatttaaaagcttacaggtaaccttcacatggatagccttcatataataattcgtcaagctattaagtgcaattagatagaataaaactagagtaaatatcaaggtgattgtagtttttttaggtaacagaaaatacctttagctaatccttctattaatgctttttggtaattactagatgccagacgctgtgcttcagctttattactacagtaacctacttcaacaagaatacttggtattttgggtcctataagaacatgaaaaggtgcagattttatcccaccattgtgagtattataatttttttgtataaggtgggtaagaatattttgatgtacagactctgcaagtctacgtgattcatgcttttttgatgttaacatcacatcttttaaaagtatatcaagatcatttagtgttttttcacttgtagaattttcaattcgggcaatatatgtagactctttagatcttgcaagtccaaggtagtatgtttcaagaccatggatttgtgtgtttttatttgcattaatatgaatagaaatcataagatcagctttaactgtagtcgctttccgtgagcgagcttcaagtgctacccatgtgttattttgtcttgtatagtgtacagtaaaaccttttgcagctaaaatttgaccaagttttttagaaagttcaagagtcaattcactttcaataattccattatgtgtagctccaggatctttgcctccatgtcctgcatctataagtattgtttttactgttaagccgagttgttgtgcaagatcgtgtgccacaataggttttggagaagtggattttgggtgtgaatgttttgtttggccaattttcattccatttgctattccatcaggagtaggtgatgtgtaaataatgagctgaaaaggattatgtgttgtttccactttaaatgtttttagatcactaaaatctagcaagagttttgtgacagttggagtggagagatccactcttagtttttctagtttgttttgtttaatacatattcctggttttatacaaggatttggaattgtgttgtgtaattctataagtaaacggataggattacctgttttagggtttgctggatgagatattacatcccatgtgataggttctgtaagagtaataataagtttaagatagctcttttttacttcccatctgatattttcaagttgtgctaatgttttttcggaagtttttttttgtaaatgagaatttttttgtttggatgttgagtggaaagcttcttttgctttagatgtgcttgtagtcgaagttttttgaggttcctctttaaggttttcaaggctttttaagtatatctgagcttcgtttattttatcacttttaggatagtctgttaataatttttggagatactttttggcatcattaggtttatgaagtcgttcagcataaacttttgcaatatttagtaatgcactttcagtaatagttcttttaggatatttagttatgacagattgataacacttaatagctttttcagcatcagaaactgtgaaagaatgttttgcaagttcgtcaagggcaacagctgaataataaagtgcaaaaggacgattaatccaatcaggaaatgaagtatatattttaaaaaatagatcagaaatttttagccaaggatctctaagtttttgatttatagaatctgactgaagattttttaatgcttttttagcttcttcataacgtgcacctggacttgtaggtgcagctgcttgtattatgttattattggttatgacaataaagtaagctaggataggtatccataacagttttttccaataaatataattggataaaattgcaatggcttgtcgacaaatgatgttgctcatgcttgcattgaagagaatatgttatattcatctatttcctagtgcagtagttatggcataacaacatttttatggggcggctccctgcacctctcatctttaaatttatagtatctcttattttatgagttatattatgttattagaagaattgccccattgaaaattcaaatctaccacgagtttttttgccactaacatttttattgagtggtataccataggcaaatcgcaaatctcccattggtgaacgccagcgaagttcaaggccatatgattgtttgagtttagagaatgggttagaagtttgtacagaatctgtttggaatcctatgtcatagaatggaactaatgcaagacctagctctggctggaatgtccaaatatactctaggttaagaaaagccatcctatcaccaccaatttcatctccaaagcgaggatcttttggtgcaagatcttctgtatcatatcctctaatactatctataccaccaataaaaaatcggtcaaatactggcacaggttttttactattcttataagctgcacctgcacgtgtacgccaatgtattatatggtttttacttcttgaaattgagtaaaatccttgtagttcagcaattggcttgaagaagttatcattaccaccaagaccaccacctccatattcaacaattagttttgcaatatgccctttagatggtctctcacgactgtctgtagaatcaaaagtaaaaccaccacttactacactagaaatatttttcccttgatagtcaagataagagcgtggtgctgtagatggaatatcatatagacgatattgatcaattcgatagccaacaaagatagatgaatattctcctatagggtgaaatagacgtatggtatctccataagtttttttacggaagtcatcccattcatctcgtagcgtataaatgttattactaaagccaaagtctgtatcataaacacgaggattggtaaaagaaagatcaagagaagatgacttactagaaataaaaccttcaatacttaaaatataaccttttccccataagtttctttctgagatacttcctgaaacaccaaatttagaatgtgttgagtaaccaacaccacctgtgattgcacctgttcgagcttcttgaacttttacaagtagatcaacttcatcatctttccctgtaggcagtgtatctgtatctacttggttaaaatagccaaggcggttaaggcattcattagagcgtcggagatgttgaccattaaaaagatctccatcagcaaggcgtaattcacggaggataacattatctctagtacgagtatttccttcaacaattattctacgaagaaagactttttgttttttatcaataaggaaagtaacatcaattgttgcatcttcttcatttttggttgtttcaagatctacttcagcaaatgcataaccataatctgaataaaaatctgttaatgcttttacatcatcttgcataacagaaagagaaaaatactgctcatagtttttatgatcatcaatttttgttactttaaggagttgttcatttgtctcaataagatctcctttaaagtctatttttcctattttatagcgcttaccttcttttactctaaatgtaataacaattcctttttcattgaatgttacttcaggtgaagcaacttgaatatctacatagccatgattcatggcataggcagagattgctatagagtcacgttcaagatattcttcacgtaatacacctgttccagtaaaccatgataaaaaattacgttctgttaatgctaactctttttttaaagttttagcttttattgtttcaagtccttcaattcggacatctttaatataaagttttttcccttcatttactgttaacaatagtgttgcagaagaagtattttctttctcttttatttcataattaacttcagcgagatagtagccttcttttctatagaggtcggtaattttttgaatatcttgggacaatagtctatcactaataactgatccttttttagaactcattgcagcaagaatgttatcgatacttacagcttttgagccttgaacaacaacatctgtaattttaggcttttcttgtacagtaaatacaagtaatcgtccttccccgctttcttcaatacttgcagagacatcactaaaatatcctaattcccatatttttttgatttctgcattaattttggcatgatcagtatgatctcccttattaatagtgagtcgtgtaaggattacatcaggatcaagaactttaagcccatgaatacgtacatcagcaatagtgtttttctttataaggccattacttatacgttcagcaagttctgttacagcaatatttagctcattaaattttggtttttctatgtataatggacgtgcagatgctacacctgtactatcaataagcctactatcaatactaaaattttcacctgtttgattgaaactgccgtatactacatagtcagcatggagttgttgagctaccttttttgcagtagaaatattaagttgggagatattttgtttatatagaagatttaatgcagatttattagggatgacacgaaatcccttattctttaatgcagttgcaagaagcattggtagttctgtttgtaactcttcatcatttgatgagccattaatttgaaatgggagaaccacaatagaaggatcgtcttttgaagcagcattggctattatattacaataaagtatattacacagtaacagtagaagaaatatattcaggcgttttgtcatgtagatctccggacttcagctcaaggcagcgtcccatagaatgggcaatatcattattatgtgtgactacaataagagttatattaaaagttttattaagtgagattagaagattggcaatgtgttcacctgttttttgatcaaggttgcctgttggttcatctgcaagaagaacttggggttctaataaaatagctctagctatggctacacgttgacgttcacctcctgacaacattgttattctgtgatggtatttattttcaagtcctacactaccaagtgcttctcgtgcaagcagaagagctttcttttttggtataccagcaataagagctttcattgcaacattttcttcagcagagaattctggaagtaagttgtgaaattggaaaataaatcccagtagtttattacgaaagcatgctttttcatttgggcccatatgacttaaatttttattattaaataacacagtgccagaagatggtatatctaatgctccaaggatatgcaatagggttgatttcccagaaccagatgcaccaataatagctaatgattctccgtgagctatagaaagatttattttatgtaagacacaaataggttcagaaggactgtcatactgttttactatattttctaatagatattgtgacatttttactcgtaccttaatccttcaataggctgtagtcgagccgcttgatgggcagggtagagagtagcaaaaaaacatagtagcatggcagaagtaccaataatgaatatatctagccaattaagtaatactggcaagtgatctattgtatataccccagggggaagtttaatgaattgatatttctgcaataaaagtgcaagagtaattccaagtagataacctagcaaagttcctacaataccaataatagttccttgtaaaatgaaaatacgacggatcatttggcttgtagcccccatggaggttagaatagcaatatctcttgttttttccattacaagcataattaatgttgtaacaatagaaaaagaaccaatgagaacaaccatagctaatataataaacattccaattttttcaagcttaagtgctgcaaataaatttgcattcatatccatccagcttcgtacagaaaaattatgacctaactcttgttgcagttggtttgtgatataatttgcttgatacacatcatgaatactgacttctattccagaaatataattgtgaggtagtccaagaagttctcttgctgcattaagagaagtaaatgcaagagaagtgtcatattcaaacatacctgtatgaaagattcctgttacaataagtggtcgtatccgtggctgaaatcctgaagatgttttttgtcctgttggtgagagtaagtttacacgactacctattgttacattgagtctttgggcaagctcattaccaataataataccgtctggagtccctaaaactttagggataagatcttcaagatttccttttgttagatgagaaagcatagaaatgacattttgtgctgatgagggatctatcccccttaaaataagaccttttactccatgaggagaggatatcatacattctgcataaataaagggagtagcacctattatcgcagaagtttgttgaagtttatttaggataataagagcattttgggacagcatagaagtagttgacagctgagtaaaacttgtaggttcttctataggtgaatcaaagtttcctgtaataataatatgtgcattagctccaagaattttgtcacggatatctatagtaaacccattataaacccctaatacaactacaagagaggcaacaccaatagcaactcctaaaattgacattaatgaaataagataaatgaaagcttgttttcgtcttgcaaagagataatgtagagcaataaaaagttcaaacttcattagcgttctgttcgtaatagagggaaaaggataacctctcgtatggaaggagagtctgtaagaagcataacgagtcgatcaattccaataccttcccctgctgctggtggcattccatattctaatgcacgaagataatcttcatccatgggacatgcttcttcgtctccacgtgctttctcaagaacttgttcttcaaaacgcagacgttgatcaataggatcattaagttctgaaaatgcattagcaatttcttttcctgcaataaaaagctcaaaacgatctgttacttctgggttatctttattttttttggagagtggagagatatcagtaggatagtgatagataaatgtgggttgaatcagtttgttttctacgtcaaggtcaaagagtttagcttgaagttttcctattttgtcagttgtcagaactttttctccatgttctttaatatattcactaactttttcaaagttattataaaactctggagaatgcccaccaattttttcaagagactcatgaaatgtatatttttgccatgtcccaggtgtaaaatcgattgtatttccttggtaagatatagtcatagtaccacagattttttttgtaaggtatgcaaacatttcttctgtaagttccataagatctagatatgttgcataggcccagtaaaattcacacatggtaaattctggattatgttggatagagattccttcattacggaagctacgatttaattcaaatagtttttcaaaaccaccaacaagaagccgctttaaatagagttcaggagcaatgcgcatataaagggtcatatccattgcattattatgtgtagtaaatggacgcgccattgcaccacctggaataggttgaagaataggtgtttctacttctataaagccattttcttctaagaatgctctaatttcatgaataattttactacgctttctaaagatatctcttgttttaggattaacaataagatctatatatcgctggcgatacctaagttctatgttagtaaggccattatgtttttctggtaaagaacggaaggacttagctaataatgtgatagtggagcagttgagagttaattctcccatttttgtacggaaaagttttccattaacaccaacaatgtcaccaatatcaaactttttgaatgtactaaatgcttcttctcccatattttcacgagatgcataacattgaatgcgaccgcttctatccatgatatgaaagaatattactttaccaaatgaccggagagagataatacgtccagcacaagcaaaaatttcgtctagtgattcaagttcagatgcactataggcttcatattcagcacgaagcataccagcataatgctctttaacgaactcatctgggtagagaggaattcctgagtctaaaagctcacaggattttactacacagtttttgataacttcattaagctcatttttttctgcaaggctctcaagcagaggtttaaaataagatacatgaggtgacttggtagctaatttaattgggggatgagatttttttttctgtatcaatgaatgcttctccagtaatacaattaaggcgtattctatatttaattagcggtagtccaaaagagcttgatagtcaagaagataaaatgagtcttgaaaaataaaaagcttgactgtatggttttgtttagataaacaccaacttaagttaagtagcgttccccggtagctcaataggcagagcgggtgactgttaatcactaggttggcggttcaagtccgtcccggggagccaaaattaggtattatgaagggtgtcaaagtgtaataatcctttttggtaccttttcctctcaatgtccagccatgtttggttgcatcccaaagtttgtaggtatatctctagacatggccatgctatgatccattataatattcacatggacaactgtttgtggttacagaatttttgtccacataggtattgcaaaattcaaagagatgtagggagttgacgatgcccatcaccgatatctacattcacagtttgaatcctaatactagccctgtaaatattttgatagtagtgaatctaagactatcggcctgtttgcatgctttgtgggtgaatttgaagtaatgtttgtaggtgtggaaccggtttttcatttttttcattttttttgaaatataataatatatctgaaaaatatcagtagataatttaatgctaggaaagtggttatgaaaaatttttttgttttattgtatattatggcgttgtctgtagtacacgtttcggcatcatccttagaattattcaaagatcaaagcggagttttagatatagctggtggtacagcacacctccctgtaatgaagcaagctgctaaaaatataatgatggtgaatcctgccatcaaaattactgttacaggtggaggatctggtgtaggcgtaaagaagttagcagaaggacttattagcataggtaatacaggtcgccctttgaaagagtttgaagttgaacaatatggacttgtaagttttccttttgcaattgatggagttactattattgtaaatccttcaaatccgataacacaattaactaaactgcaacttaagaaaattttttctggaaagataagaaactggaaagaagttggagggaataatgctcctatttccctttatataagagaggacggaagtggaacacgagaggtttttgaagataaagtaatgcataaaactcatccttataaaaaagctaatgtatttaattcaacaggatctataaagacagctatcagccaagataagaatgctattggttatattgggattggatatttggacagttctgtaaaaggattagttgttgataatatgatccctacacaagaaaatacatttaatggttcttatactataagtcgtttactttacatgaatacaaagggagagcctaaaggtattacaaagttatttatagattatatttattcccctgatgggagagatatcattaccaaagcaggatacattcctattgaaagagaatagcgtgtgagtagttattttatagccaaaactagttacctgtgtgtttttatctatgagttggctcaaagttagtatatattttgctgtaagtatagttttaacaggtattttagtacttataacaatgcttattgctcttgctttacctataataagtaatactaacttggaaaagattatttcattaacttggcagcctaatgaaggctattttgggatccttcctatgttgggaggttctttttttttagctatttttgccctgtctctagcatggccattagctctgggcttgaatatttggatgttgaaggtagataaaaggtttttagctagagtggttgcttattttataaagcttatgatagctattcctacagttgtttatggttttgtagctgtttttttactagttcctttagttcgtgaaggagctggaggtacaggtttttgtttattttctgcaggtgttattcttgcattattaatccttccaactataaccttagtctttgaatcaggattagctacttctttagaaaagctacgtcttgaaggcattgcattaggtttttcaagattagagcttttttatttttttgtattaccaaaatcaaaaaaaatttttgttgtagcagcaataattggctttggacgagcaataggagatacactaatatctcttatgttatcaggaaattcaccacaattacctcagaatatttttgagagtatacgaacgcttacagcacatattgcactcacaagtgctaatgaaatgtctggtatggcatatgattcactttttttatcagggattcttttacttatcattaatgctacagtaagtatattagtacgccatataataaaactatcatgaaccaagtatttttatttttattttctttactagcatccttttcagtagtcattattatggtagtcatttgtttttttatagcttttcttatttggaatgggttacctacattaaatatagcaatattttttgggaatgttccacctttaagggctttattaggtctagagcctgtatgggacgggatatggccagcagttctaggaacattagagctaattgggattacactatctttagctatcattcctggtataggatgtggaatttttttatcagagtatgcgtcagcatctcaatcttattatataagatggctagttgatatcctttcaggtattccatcaattgtgatgggattatttggttttttacttattatatttttacgtcatacaatatggccagaagctaatacttgtttattattagcaggaggctgtttagctttacttgtcctacctacaattattgttacttctcaagaggctttttctgcagtctcaaatgaactgtatttaagcgctacagcattagggtttactaaagaacaatttatttggtttataaaattacctgctgctagtcgaggtttgtggggaggggttttattagctattagtcgttctgctgaagatacagcagttattttacttacaggtgtagttgctaatgcaggacttccttcaggactaggttcaaaatttgaagcattaccttttattatttactatactgctacacaataccaaacacaacaggagcttagtcaagggtttggagctattattgtgcttctttttttaatagttagtttattttgtattgctaggcttattggttctaaaatttatagatttagttatagagaggggaaatgtctatagctgtacatgtagttgatctaacagtttcttttcatcaacaagaagttctcagtcatataactatggatattccaagtcatggaatttttgttataactggtcgttctggatcaggtaagacaactttattacgtagtataaatcggctaaatgaagaatttgatggttgtgttactaaggggtacattgaagcagatttaggttatgggttaaaatctgtttttccatctattcagaagaactttacattatcaaagttacgtcagaaaattgggatggtatttcaaactccaaatgttttccccactagtgtatatcgaaatatttctattcctcttgaacaattaacacactatgctaaaaaagatattcctacatatgtttattctgcactagatagggttggtttattacaagaagttgaaaatcgtttagatattcctgcacactatctttctggtggtcagcaacaaagactttgttttgcaaggatgttagctttagagcctgctatacttctactagatgaacctacatcatctttagatattcatgcaacacagaaaattgagtctttactattagagttagctagtgaataccctattattatggtttcacataatatcacacaaatttgtagattagctcacgaaattgttattcttgagtatggaacaattattaataaattaacagaaaaagcctactataaagaaatattaactagtattattgaacataatattaatatcattaattaacttatgatgaagttatagttctttatagtatgctttacttacggttagtactaactataagtaacgctaaaaattaaggtggcttataagccatttatttttattatacacgtagtccatctttataatttacatcttcagcgttgtctctattgcctgaaccaagaacaatatcttggcattcttcacgccaaaactttagacgatcaagaaaacgttctaaagtggtttgaaagtcagagaaagagtttttttcaacagctagagcaatatgcataacaatggactcttggtttatgtcatagcctagggtagaaccaagtgtttctcctccaaaaagattgcctgttagaagtcgtgtaaagagtttttcacgtcttcctggaggaggtacaggtgaaacttgagcataaatgtataacatacttccatctggtaaagcttcaaagtctacaggcatgtcgtcaaattctacacgacagacattattttcatcaagagcaagatcaggaagattgataatgggccctagttctttaataaggctttgagcatccataaaaagctccttggaatagatgtatatgttatagtgtaggtagtaaaaattaactatgagaagaaaactttattataaatgtatcttattattctctattgatgttatatcgattagtgatattgtcaagtgtctatttatagtattttatatggtagggtatgtattttagagtagaatattaaatttattctaatccataaccttttccaccaatgaagctcaatatcataattagtgtttttgaaagaaagtttgattgtgccattaaacgagttactgctgcttcattagagttagcttgggataatttttttgctaggtttaggccatccttatctatttctttagcaagaacagataattgttctcgtacggttgtatcttgtaattgaggatgattaagttttgttagtaaatatacaacagacaaaattagattttgtttgttagaagggtatatatcccactcattattaaatacagtgcgtgcttggtcacagagaagtctagaaagctgaatagctgtacgtttcttttctttaatatcttctggtgattgtgttattttttctattaatggagatatgttactattagaaactatatgcattgatttttcaagaagtatcattgtaatgtggctatcttttgtagcagcatttgtaaggatcccagcttggattatagtactataaaacgaatctgataattgtgaaagaattttttcataaacacaagcagggatttcagtaggtgttccgtttttttgattagcagttttttctatattatctgctgcagtataaagtttagttaaaatagtttggcgtgggagagccattacttcttggggtgttgcattaagtgcatttaagactgctttaaggccagtttcaatacacttatctataactttttcttgaataataatattttttgttgaaataattatatgacggttaagttcttctatactttcttttagcatcgaaggtggaccagttagaacaccttctatttctgaattaaattttgttaaaagaaattgtacgataggtccaaggttgacatctgaagtcgttgaaatttgagatgtaactttatttattatatgttcttttaatacagtatcatttagtttagcacttaaaagttctttgaacattttttctgataacttaggataatttgttatatcatttctaagttgttgtagtgcactatcaataaagtttttaggatttgggacatctatcccttcaaaaaattgggaggtactcattataacattttctttaaccctaggaaacatagggagtttgtttgggtctaaatggctatctattatttgtagattgtgttgtgctatttgtgcttgacgtacttgaggagtgttattatttggggtatgtcttgttctatacgcccttaatgcaagtcttgctaattcagtcatccctaggctaattagggctaggaatatacgacgtcctctattcctatttgtattttctcgaggcctgttatgtggagcaatcggcatagggttagaaatatagatgtcactactgtagtgtgaagtagagtttaccatgatttcctcacagatagattaaacattaaagcatcataatatatatatatatgatgcgtccttataattactaactagagattagaatggtaagcgtaatatatactacataattactgttgtttattaattaatatctttataattattttttataatttcaatacaacagattgtaatatcaataatgtatactattctctataaactaattttttcttaaaatcattagatataatttttatatataatttaaatattactatacattgatatagtagttatatttacttttttattaaataaagcaatcataaaatgaagtatcagatagtaagctttactaaagatatgtttctctaaatagtatttttctttaagaatagatttactaaggttagagaactagatatatcatcagcattagaagaggtttctccttcttcattatttctctgctgaatttcttctaactgttctttgacttcttctataagaagttggttttcttttaagaagggtcctaatatcttatgcttacgggttagtaatgcacataatacacggagatatagctctttttgatgttgtgataagtcactccaatcatcttcccctagagctgtaataaggcataattcaagttcatgatagagagtagggagttgttttcttagttcttcaggagttattagtggattacatataactactattgtgccagattcttttaatgcttcatatgcttttaaaccagaggttattattttaaaacatttttgtttatcttttactagcttacttaaatgcataccaacatctttaatacactgaaagtaagaatctgcagagctagaaagtctttctttatacttttcttcaggaacagctttaatagggcccttattgtttttttgtgcttcttgttcagtttcttctgcttccttttttaacacattccctacagtctcacgtaaggttggattagtttgataactattaagattaaatgcccaagcaagacctttagcaactgtgtctattactgtagctattatactgtcttctttttctatatttaagcatgtggtatatacataatctgctagctcattgcatctttcttttaatagcgttggcggaacttctcctaaggcagtgataagtttttgccgacgttttatggcacgttctaatattgactgttcaacttgtcgtccatctttatcataagcttcttttactttagcctcaatacatctttggagagcagtaagttttaaagaatcacataataatttacaataatgttcagaatcaagacgatcttctagttttattatctccttttttaaatatagtaatgtttcgtccagagtagactgtggatcttctatttctatccctgactcttttaattcttgagtagttttgtttaaaactttgattgcagttccagggaatttagagtcttttgtatgatctagatcagattctataacttctttattaaagtattgaactctatgtttttctacttttgctgtagaatttccatatgtggcttgatatgctgtgatagcatatcttactatttcagatacacctagtgttgcaaatcccaaagcaacacgacaacctattttgaaataacttgctgttggaacagtagtaggttggtctggtcgattttgagctcttgatgaacccaaaaaatcaaaaataccctgtattgttgagctaataggcatagtgttatccttatttaagtagtagtcatcattatttttaataagttataataagatggtattatacttatctatataatataaatagatactgaaagggaaagggtataaaaatataaagtaagattgaataaagatagaaatagtactagttaagaatgataatataatgtaaagttactatataactatatcataataattaatagttgattgtcaattgaagtatttttcacatttatttaacatagtaatatattataatttattatatataataggttaagtatatagatttttgtaattttacttgtagtatattagttagttaagttatataatagtaattgtataattagtttttactaaaaaagtatgatttgccaactttttaggcagagctgagtatatttatggcaattaatttatgggctgctaatatacctatatataaaaagtaataaaatataaatggttatgttaaattataatatataagcctactataatttttattacaataacatattatgcatataatgagccaagtagtttggtaaccaaggaatattgtatgttctataggttaagaatagataggtgtaactgataggataaagctatagataagtattttgtgtcttttaagtatgttgtgtttctaaagtatcaaaaaatggttctgctgtttgagtaaagatatatctataagcaccaattggtattacaggcatttctccaccatttcttgaagtctctcttgcttcatattgttcagctttttcatcaatggctagtagtaattttcgtagctcggtatcttgcatcgcctcctgactgttaatgtcaataccttttacttcaaggtagagttgtttaatctcacgtttggctttcccgtagttttgtaaagattctgctaagttagccacttttataacaatacttgttagttcctgtgatagacgttcattcgaatagtaacataatccttctatagtttttgctttcctttgtaatagaactgcaagtgaaccttggtcatactttactcctctggtgtcaagctctgtttgtaattcttttattacttgttccttaataagaatattttttatttctttgctaataattgtagaaagttcttcttctgttagtttatgttgtttattaggagtaagccaaagctgttgatatgcacgttttataataggttgagcatcaggattttttctaatactgctttgctcaagttctttttcaacttttttaatggcattttttaagacatcagaggtggaagtatttggagtatcttcaaatacagtttttaataatcttgcattataccgttctgttttgtttttaaatagactaggatcaaattcggtacttaaacgaggttcttgacttataattcttttggcttggtaggactgtactgctctaacaacttcagttattccaaatgatagaaatgctaaagcaatacgtggaattccttttgtacgtaaaacatatttagattgagatgatttttgctgttcgattttagcttcttcagtagactgtgattctgttaatgattgagtcgttaggatatttatacttcctattggtatagggttaatttccatagtatttttacctttcttattttttatagaacagtctacttatagggtataactcataactatcttccaatttattagcctttatcttttatatttagttagttctttttgagagctagctactattctttgttatagatccagtttttaggtagaagtaaataaaaattaaagaattgtagcattaatacctatattatttaaatatggtgctgcaactccttgaaagatttctctatagtcttgtaggcttatttctggtaattggccaccattctttgttgtgtatgtctcttcaagttcaagtgcagcctggtcaagctttagctttagctctttaagttcaggaagctgacttgcttcttgtttagtcatatctttattaaccattattgcttcaatgtatgtgttttgtatttcattttttgcttgagtataatttcgttgtgttacagcattatcactcatagaggtgacaagattttctatagttttttgtaaattttcgtttggagtacgagctaatgcacccatctcatattgttttgtcatgagtagtgtagccattgcaccttcatcatttggtactcctcttgttcctagttcattttttagattttgtactacaacgtcttttagtaaaatatttttcatttctgtagtaagcagtgaagtcattatatcatcagtaagtttagtttctagttttgttatactcatagaaaggttgttcaaagcagtagatgtaatagatccaacttctttatgagagataccagcaagatccttaattgtttgcttagtagcattatctatagcattaggaaagggttgtggttgatttggatcaagcatctgacttattaaatctctattttgaagccgtatttcattttgttgtacacttgttgactgtgtagttgttagaattgctgttttatattcttgaagtgtacttgacacaaagttaacagcagaattaagagcagccataatacgaggaatagcccctttacctactcgaggttgtccatcttgtgtgttagccttctgcttgttttcagtagcttgtacattttcaagattctgagaagaatctgaaacatttctaagttgtacttgcatttttttccctttaagaataaaaaaagcaacaggttacaattagctacttaatcttatattatgtcttcagattgataactatctattctataactatatgcatagtacttgaaatgcatatggtatgtagtgataatcaactatcatttattttgatacaactactaacgtacccctagctctattaaaaattgttgtgttgttctatgtagtgcttcttcataagaagattgagatataagaggcataagtcctccattgcgggctgttagttgacgttcgtgcgtacctgctgattcatcaagtagtaattttagcttcttatattctgggttccctgtaacttgtgcatttgttagttggaatctatccataacagcttgtacataagcactaagagcacttttcctagcttcagaagaattatgtaaattttctcctctagtaaccatttcactgacaattttttctagttctctattaatttgatctggtggataattagttagtcctcttatgtccttactacgttcagacaaaagtcctgctctatcggcaccatatccccatggtccacgtttgcctagagcatgtcttaattgtttattagcttcttctaatatcatttcttgttttaattcttttgaaagtaaatgactaaggcttttgtctgtgattggttcatcaaaagcactaggtttactttggagacttaatatagagcgtccaagaagatgtcgtgggtctgtactagctataccttgaagatcagtttttgctttttccatagcactttcaacggcttcttgatgtgggaattggaattgtcctgttgcaacattatcatggagttgttgaagaagctgacgattttcacgttgaatttgttgattagcaagtgctctaggtgcagcaccagcactttcacgtgtgttgtagccatggagagctcttgctaattcgcttaaacctagcgtacctaatccccatcctacacgagccaaccctgtggcagtaagaattctttgtcctaatgatctaggtggttcagcttgatgttgatgatctatttgtgcaagtactttggtacgttgctctctatcatcaacaggggtttgatttgtaggaccagtgaaacgtacaggaagcattggcataagcatatccccttatatttttaggttatatgtgcacaacgttatatagagctcattcaaatattattctataaaaatatttaatcctttctttatcaatagattaagaactattgttatactcaattatatctttctatttttttgatacctatatttaggttgttgttgttgttgaatctattctcttgtataatattacgttatttacataaaacctatagcaatcctatagtatatgttagctacctattaaatcataaatatctaaagcgtgttgagggaaatatgtaatagtatagtattaataaagattaattattataattaattatatgattatatttagtttcaatatatttaattaatttgtaaactaactgttttatttcttttgacatagtatagtcagggttgagagctaatgaaacaatttttgtatgttctgtatgaagcaagtaagatttatctatttcgtctatatagatatttttattttttaactcattatgcaagtcagataaaattttttctttaatgataattagttttagttcttgaataagtttttttataatattttcttttgtaaggttagtttttgtttgaggtatttctagaccatatttagcaagaggtaagggagcagtatttgtagtagcagtaaaactattttgtatattctccattgttctttttatgttattagggagtagtgttttttcttcagagagaggttgtaatatatgatagccgtagtcagaatattcatctttttccatagaaaaaaaagatgattttgatttactattaaatatactacaagtaactttaataagttcatatatacctaatgttattaagcttaagcaaatacgatgtaagtattttgaagagttagagggtgtagttaaagtctgttgtcgagtagtaataaatggaggcttatctatatcactaataataggactgccgataaaaacagttgggagtgttaacatataaatatattccttatttatagttacttttgtgctatatttatgtattactacgtaaaaattttatatataaactataacataactatattttgtcaacaaatatatattattataatatagttaataatatttatataaaaataaaatattaaatttaataaaaattatgtaatatattatatattatatttgtaataattcataacatatataattatataatagttaatatgtatattaaattcataacatagaaataataaaacaaaaaacagttgcattgatataatatatcagatcaactgttttctgttcttttaagaagctttttagcttcatagttaaagagaaaataataattttctaatagatattgaataattacttattgatatttatgggttatttactaatgtctttataagattacgttttttaagctagtaaaaatgtaacaatcaattttgacgctattttttattttactttaatttgtttatgttacttgttgttctaattctgaaaggagtttttttactaactcttcatatcttgattgtatggaatcagtccttcttgaagtagctcctacaagagtagcagctctctctgcatcaattttttctcgagcttttttttctgactgtttgagatactcaatacgttcttgacgagtttttggtctgtattgttgttgagctgaagagatttgggtatgattctgattttcaaaatcttgtatttgctctttgcatagttcttctgctagcttttcaaagaggatagctggtataacaggtacattattttctgtgtgttttgttttaatagtagattctaatactattgtagctaatttataattttcacataattttttgtagttacaatgggttgatacaagaaatgaacgtattcctgttttattagcaatcaaatttttgagcttaatagaagcattttgtattgctttgtccgaattatgtttattttctattgtattagctagttttgatacagcttgctctacttttaatttagtttcattttctgatatacagccagatatgtctaattcaggcttttctcctgttaatatcaagagggatgtacttgatactggtatgcctctgttgtcacattctatctttacctcctctataagtactttttggagaaggagttcttttaatttttgtataaatattgttgtaaaaacttcttcatctaagcatgttggtaattgaagcacttcaggcttcaatgctttcaaagctttttctaaaatatcttcaggtgaatcttcagaataagaaccaagttcttcttcaactttttgtacagcattttcaatagcattagggtaaggaaattctttatttggattacacatatcttctaatagctttttgttatactgtcgtgcttgggtttggtttactctaggttgttgattttggtttctttgtgcacaataactttgtattgcaaagactgcctcagatacccctaaagttactattgctaataagactcgagaaataccttgtggccatcttctttgattttgttgtgtagatgacagattcctatcagtggctactgtagggccttgtgtatatggagaatgttctataatcatatatcagtccctcataaattttaattaagttataatgaagttctattattaatactaaggactttatttttagtacttatatgaatattatataattatggtaatgatagtcactaacaaaatgtatgtactaagtaggtacatgtattataattttgtactactataaaataagttgttgttaagtatcttgtaaaatagttagttatatattattagtatagtatgaatttatttttattaaatactagtactcactatactactattactattattatggctagatgagttatacgtttgtagttgacgttgaagcatagtgatttctgaagacaataatttttggtagtcctcaacagactttcgtggagtgttatttctatgctctcttcttattttgtggtcatccatatctaatgtaattctacagttattagcagtatctttatatagtttagattgtcttacatcttcttcagtatactgacctgaggtgataagaagagtacagattttttcttttattctatttaaaacataagttgaatttaacatgttttgtaattgattcccaagattttcagtgacttgaacaactgaatctcctagtttcattttttctgatcttttatttggagaaggaagagcagctagtttatatagagtttgttttcctcttgattctataatatattttataagctgttcatctactgattctaagcatccagtcactggatttatagagcttagtttagattgtattaaagatgaaactatctcttcaagacagtgatactttatctcttgactaagatacataaccattaactcataggttaacttttctttcatttgaggagtattcattttgagtgtttttagactatgtgataagtgtttttgaacatcaggtttaaatccatattttcgtaaatcactacaagccaaagccaaagcctcatgcatagctccaggaaatgtagactcttgatatggattagtcatggagtcaacaacattatagttatagagccgtattatattcctctgaacatctggggatgataactgcttggctgtacgaaagttttgtacagcagttacaagttcagaaatacctagtgtggctattcctaatagaattcgagggataccacatggccgattagttgtatttttttgtgtggggatacgtgaacttctttctattccactgactataggaccaccaaatatagtaggaaaggcaggcatgatagattccttttaaagaagcatggacgacggaaaaccatacctaattttagatggtaaaaacagaaaagattgcctataatgcatataatttatagcaagttagtgttgataataggataacctctagttggacaattaagtttagttttgtttatgagctacatcaaagatgataaaaatgattgattgaatttaagaaaggcgtcttgatacatatcaacagtcactacaggatattcaccaggatgttctgcttgtttagcatcttggagctctgtacaacactttactagtttagttgaaagttctttatatttactatgctctttggcttcttgttcagatatactgtattgagttataagatctagttttaagtcttctaatacttttttacgagcttgtttagcattatcattgcttagtattattgctgttgactttaagataagtttattcattgcttctgaaattttttcttttggcattgtagaaatttgttttaacgtagatgtttctactgtgcacatctgtgatatacactctgttggaggttcagaaataccttcttgttgtaatctttctattaaagtttttgagaataagtttttgacaagattgaattttatttcttttgtaagttctaattcaaatgattgacttgtaaatggctcaggaaattcatgaagtctcatttgaagtccacttaggctttgttttaatatattttcatctacagaagtaattataggtttaagacagtcttgagcatctaatatagcattttgtatagcttctggaaaaggtgatgttttagactcaagtgaactacatattattttataattttggtgtctaacaccattaagtggtgttctcatagcttgaggtggttgagcttgagcttttcttgtataataagaatgaatagctagtacaagttcagaaatacctagtgtaactatccctaataggattcgagggataccatgtgagcgatttttactttgttgtgtgggagttttcgaatttttgtctgttccactgactatagcaccattagatatagtagagacggctgacatgatatattcctttttagaggatggttgtcaaaaaacatacctaattttagatattagaaaaaaggagtgaccttatttatgtaatataaggaataattaagcttaagatatatgattagaagttaactagtgtatataatttgtagcaagatacttatacaatatatctaacttttattttgtcaatgtatatacatatacttttaatacagagaagttagaaggtaaatataatgaaagaataatgagttcttctaagcattttttatacttcctttatttattactttataatcaagctgaaaattataaaattatactaattgttatattaggttatatagtatattattactttcataattaattatagatgctattaatgctattaatttatttagccatctactcatataactatgatatcatagtaagttaagaagagttagaattttgtttctgtaacaccaaatattgctaaaaatggagcagtaacttcaataaatgcttcttggtatgtacgtaaaggtactacaggatattcaggatgttttgctttttcagcatcttggagttctgtactacactccatcaatctagtttcaagcattttatagccgttatcttttttagcttcttgctcagatatattatatctagatgtaataacatgctgatagatagataatgactcttcgcgagcttgtttagaattatgagcgttatgtattgttgctgctgactttaagataagcttattcattgcctctggtatttcttctttcggcatattagaaatgttggtgagtactggtgtttctattgttctgagttgcgaaataaattctggttgaggtggaacttttctttgttgtaattcttgtattaaactgtctgagaatgaatttttgagaatagtaagttttatttcttttgtaagctctagttcaaatgattgacttgtaaatggttcaggaatttcatgaagtctcatttgaagagtagttaagcttcgtgtaagaatgtcttcatgtccgggagtaactataggtttaagatattcttgtgcacttaccatagcattttggatagcttctggaaaaggggagtcttgtttagggtctattgtgctatgtattactccataattgtggcgtctagcagcttcatttagtggagttccttcacgagcacgtaatctagggctttctttctctgcaacttgagctccttgatgttcagagctttttgtacaataagagctaatagctcttacagcttcagaaatacctaatgttaatgcagcaagaataatacgtctagtaccacttgaattcatttttgtttgtccaaattgacttgagctatcagtattagtttctttgaaatgtgtttctacaatgtgttgagtactactactgttactaatacgtgatgtaactcctcgcatataacctcccatgatgattcacttgttagattatacattattagctgttatattatagctatattatcaatatggtatattaatatattaagtttaattttattatattttatataaaaatataataagctattacatatatatatattaatattattttaactagttaaaataatattaatcatagtataatatagtaacattatttttttatttttagttaatatatattataatattcataacctataactataaaattagaataataaaaagtataatgaccatcttaatagtagatggtcattataaataaaaagaaaagaaagatataaaattgcagttaaaattaaataaaaattgttatttgactaagtactctgtattcacaacagattgtggtttaccatccatccatgctttaagattttcagcaagaattcgtacaatatttctccgtgcttcaacagattcccatgcaatatggggagtaaagacagtattaggagcagataatagtgggttattaaggttaataggttcgtcaacaaaagcatcagatccaagacctccaagtttccctgaaataagagcatctgctacagcttgctcatcaagtaatgcgcctctagctacattaataataatagcaccgtctttcatagtttcaatacgttttttattgacaaggtgaaagttgtcttctgtgagtggacaatggaggctaagaacatcagcatttttgaaaacttcatcaagatcagcgaaagaaaaaggggtatatgaaggtggttgtacaggtctttcatcataagcaagaacactcatgtcaaatccatgagcaatgtatccagctttttggccgatattaccatagcctataataccaaaacatttataggtaagttctacttgtggatatttccaaggagcccagtcagggcttgaccatgcaccatttctaattgcttgatcaagagctgctgtatgtcgacataactcaaggagtaatgcaaatgcatgttgtgcaactgcatcaacaccataagctgttacatttataacagggataccacgtttaccagcagtttcaatatcaatttgattataacctgttcctaatacaccaatacatttaagttttggtagctcttcaatgtgttcagttgttagtatatctctacctacaagtagtatatctgcatctttagcacgttcaacggtttgttcaggttttgtaagatcataaacagtaagtttccctaaggcttccagaggagtccaagggttatccccaggattagtttctttaccacttaaaattgttatttgcataaggggcctccatgtatgaaataagttttatatgtttcccttaatggcaatcacataaagttagtaacctttataatccagttattcttttagaagttcataaggtaaatggctacgaatttcatcgccaacaaatgttcctagttgttcaagtaggattccctctgttataaccatatctgtaatacttggacctgtcataagtttttttgtaaaacgtcctgtgtgagaaattttatgtgtgcttgatgaaagtgtccaaatagcatctagtatcacttcattattaggggcgccatcaaactgaaaaatgtttacagttaatatccaatctggctttatcattgagtttggaccaacagctaatccatttattggtgctaaaacattagagatagcttgttgtaatacacgattaataccttcagctagagactcactccatctatggagttcagcgaattggacaactgttgcttctccttctcgtataaaaatttgtggttgatcaagatagccagggatagttatagtgtctattgcaacaattggtcctgtgatatcatgtttagaagtaagaagttgagttaattttatagatggttggagaacataatatgtaggtattggacttctatataatagtccacatccagggagtaatagtaagattataaggaggcattgaaataacatattcatttttgattaataccttttcctcttataaggacttcaggatttctttccagcatgtttgcaagaatacgtatagcttttgcagcttttgagacttcctgtaacatatgatggatgtctaaaagtgtagggctattattaccaagtaatcgttctgttgtattgttaattgtttgaaaagattttgttgcttcttttaaggtaagggagagttctgtattaagcccttcaaccattgtaccatattttttacttgcctttcgtatatcaataagagattgattaaattctgctacagctgctagcccctgatgtaaaaaattggatagttgtggaataatgttaggtgtctcaggtgtattaagaagtatcttgaggctatttgtgatttctaagatatttcctgaaattttgtctagaggcaaactagttaactctttaagaatgttgtctagctttgaaggtacagttgggataacaggtgtacctttataaaaaacaacatgtgttgtgtccatttgtgattctggtgtaataaaatttagttcaatcattagttgacctgtaagtaaactttgctgtgctaaacttgctcttaatccttgttttattaggttattaagatactctgtttcttcttcctcttcttgaggtaagttatgttttataaatattgtatgtgtattttcataaagttcaacatatacaggaattgtaaaacctatatcattggatattttgtcgactttaatgtcaataactcgaccaacaggaacacccataaagacaacaggggaaccaggtgacaatccacttatagatttatcaaaaaacatgacaaatgtagctgtgctattaaaaagtttaactgagccaaaaaaaattatagctataataagaagtaaaatagagccagcaacaaatgctccaataagagttttactgacttgatgactcatagtggagatcctagagtatattgtgtaggttgcttccctcttgtgagaaatcggatgacttctggctgatgagtattttctttgagttgtttaggatctccttgagcaagtatagtgtgtgttgcagtgtctaagaaaatgctattagtaccaatagataaaatagtatctaaatcatgtgtaacaataatgacagtcatagtgaggttacttgtaagttctacaattaactcatcaagcattcctgcactaataggatcaagacctgctgatggttcatcaaaaaaaacaatttttgggtctatagctagtgctcttgcaagtcctgcacgttttttcattccaccactgagttcagatggatagtagttttcaaacccagatagacctactaaagaaagttttaaagatacttgttcctgaatttctgctatagacagtttggtataacgttctaatgggagagcaatattttctgcaagagtcatagatgtccacagggcaccactttgaaaaagaagtccaatattatgaagttgttcaagtcttttttcttctgttaatgcccaaaagtctacgttattatagtatacattacctactgatggtctatgaagtcctactaaagcccgtaataaagagctttttccacaaccacttggtcccataataataaaaatatcttgtttgtttattgtgaaagtaagatttttttgaacaatatagtcatcatatgcaatagtaaggtttttgactgtaatgagtggttcatttgtagtattcatataaggctcatatattaaatatattaaatataatggttaaacaagctgttgcaatgacaatacctacaattgaatatactactgctgaagttgttgctaaaccaactgcagatgcatttttcccactatttaatccttgatagcaacctgttatagcaataatgattccaaatgctataccatgtataataccaacccaaagattttttaatgcaaagcctttttgggtaaagtttatatattctaatggctcaataccaagtactcctactccaacaataaaacctccaagcattcccataaaatctgaataaacaacaagcaaaggtgtcatagttgttagagcaataagtcgaggcataactagaaaatctgaggggcggataccaaacgtcatgagtgcatcaatttcttcattcacattcattgttccaatagtagctgcatatgacgcgccagtccttccagagaggataacacctgtcataacagcacccataatacgtgtcattcctattgccactaagctagatacataaatttctgcaccaaacattcgtaattgtatgactccaacaaatgcaaggataagtccaacaagaagactaataagtgaaacaataggtaatgcttcaactcctgcttgttgcatacaacgccaaatatttgttgaactgcagtcagaatggcctgtaataagtcttttggtagaaagggtcatttctccaaggaaggttaaaattttttgaatggtactaggtagagatagggtgatatctccaatatattcaaggaatgagatttgagtagtttttttatgtgcttctttattaggaggtgtttgaaaggcaagctgtataagattttttattcctgcaggaagttcatgatcattaatagttatctgttgtgattgagctttattaataagtgtttttataaatgcaataagactactgtcccatatgccaagactattagttttgagatatagttctttaactacaggatagttaagttgagaagcaaatcttgttgcatcaggaataggttggttaagttgccagttaccactaaagctgatttctaatgtctgcctaaataatgttatattagcagaggggggtaggtcatctttacctggtaaatgtgttgtattttgcaacatattcacactattttattagttaaatataatacaataaccatgttcttatccatatctatatattatagttaaagtagttagactgtaatttattatagttttaacttttagttatctgtattcctcactgtaagaaaaaagttaatatttatttatttatttgtattactgttatttttgtttgaacttacagaaacttttgcaggtctaagtaaacgttcatataattggtatcctctttggtgaagagtacttacatgtccttcagggatatcttcacgctcctcatgtgcaatagcctcatgaagttctggattaaatggctcatttatttcacccaatactgttacgccatattgtttgagtgtatcaaggaatagttttcgagtcatagaaacacccattaagatatctttacatgcatcgtcattacttccatattgtatagcaaggtcaagactatctaggacaggtaacatgtctgtaagaagattatctatagcataacgtatttgttcatcatgatctttttgaagacgttttttgaaattttccatttcagcaagcgcacgaagacgtatttcctgagcttcctcttcagtaatataattaggtccaatttcttttttatcttcttcttcaacaagcatttcagccgatgtatcttgatcagcttgatctgttatttcatgttttggttgaagaggggtatggtcagtcataactactccttaaagatttttccttagaaactttattgtttttatcttggtacaattaataaaaataaagttttcatggtgaacatagtaaagaagctagaaaggttctgcaaccctattaaagtctattactatattttttattaataaaccttaataagttattaaggtttttgctctaaacttttttttatatagaccgattagtttgttagtatttttgcagttatcatatattactaatagtaaaattggaatatttttaagggatagttttttattgatagctactttttggataaaggtaatgatatagtttaaggaggaatatgtggagggagtaagttttgctacgtatggacttaaaaatgcgttaagcattcagtcaaatgctgttaatcaattgatggctggtgctgctagcgtgcagtctatagctccaagtggagataataatctattacgtatagaagtcatgaaacaaaatggaataggtcaacatcttaatattataacataattttttgattaaagtacaacatttataatataaaataagccaaacagtagtaagatatgcttggcttattttattattattattattatagctatattgtctaaagtttttcatttagatagagtgtaaggaagagtaaataaattttaaagcattatattttgattagtaaggaatctaaaaaggaaaagtagtatgatgaactcaaggatcattcaatgggtagtattgtcagtttgtatgacacaattattggcatgtggttctctttttagaggctttactggtgaaacgttggtatcagatgctcaaccttctttatctgtaactgtaaaaatgcctatgttgactgcagggcaaattacaccatatttatatacagattatggttatcagtttcctgtgacatttatcgctgtttatggtgtaaatgaaaacagccctatggctatttctacattaagctttactcccaataactggcaatgggatcccctatcctttaatatggtagatagtccagtaacttcttatgaatcctttgatggacataattttgaaggctctacacatattattaatggagcaaaggatccatttactattcttgttgccccacaggaacgtttagcttcaatttattggcttgtacagcgttatgcttatagagctttttttaataaagcaaaaattattcttgaatatagagaaccattaccaagcaatttgtcagaaactacaaagctttctgtaacaaatcctgagatacaagcatttcaacagcgtgctattaccgcatttattgtatcttttaactataaaggagtagaaaaacctacggcaccttacttgaagggtattaattcaagaatggttggtaactatcttggaagcatgagttttattgaaccaagaatgattgaacactagttttactaactagttataaaaacaaaatagattatatttgttaatataacttaactatataaataagtaaaaatggatagagattactagtattaatcagattgaggatattgctttctccaactatcttcagtaattgactcatctacaagcataacaggaatgttttcatgaacaggatatacaactttacatgtagaacaaagaaggccttgttcatcacttataggtgtaactgaaccatgacactctggacaagcaagaatagttagtaattcagggtttaaattcaaagatacctccaatatctattttaagatataataattatattaaaaaacaatatgttatatagtaaagtctttcaaattataattttctagttaacaaaagagactatggaatgcaaccttactttgttgatttacatacacatacaatagcttctgatggaacagatacacctagagagttagtcataaaagctgcaaagttaaagcttgctgcaatagctattacagatcatgatactattgcaggtttagaagaagctgaacaagcagggagagaaaatcaaattgaagttattcgtggatgtgagctaggtgttacaagtaaatatggagagattcatttacttggattatggttaccttatgataatatcagtcttaaagaaatgtttaaaacattacttaaagatcgacatgaccgggctaaattaatcataagtaaacttaataaactaggctataatataagttatgaagaaattatagcaaatattcctggtgaagctataggacgtctacacattgcacaacatttaacccaaaaaggttattttgttgatacgaaagaagcatttaagtcctgtcttggacataatggtttagcttatattccaaagacaacaatatctttaaaagaaggggttcgtgtattagtagatgctggagcaatggtaagttttgctcatcctatgctactaagatgtccaaaggattggcttgaagatactattgttatgcttaaagactatggtctttctgctattgaagcttatcatagtgagcattcacaaaaagatgagcgatactgtgttgacttagcaagccgatatcagcttggaatcacaggtggctcagattatcatggatcaggtaaatctaatgtaaagttaggtagaggccgtggaggagttcgcatgacattggctatgttagacgttttaaaagaaagacattttagaattaatcaaactatataacttcagagaaaataggtatcaactagaatatataggttacttaaaaaataatgctataaactataaataatttttagagagttaccttttaccttttcttctttaaatatttttttaatcatctactattgacatctggcttaacatagctcactcctttgaggtatatttttgttttagttagtgggtatccctcatactctttttttatttttttagtatatctatatatcattattgggttgaggaaggagttcttatgactgactataaggaaacattaaatcttcctaatacgacttttcctatgaaagctaacctagtgcagcgtgaaccagagattattctttggtgggaagaaaacgctgtttatgaaaaaatgcttgaagcttcaggtgcaaagggcatttttatacttcatgatggtccaccctatgctaatggacatattcatcttggtacagcactcaataaaattcttaaagatattgttattaagtctcgtaacatgcaagggtatcgctcctgttatgtccctgggtgggattgtcatggattacctattgagctgaaggtagagcaggagttgggtaaaaagaaacaagaaatgcctctatcattaataagaaatcgttgtagagaatatgctgagaaatttttagatatccaacgcgaagagtttaaaaggcttggagtatttggctcatgggatcatccatatcaaacaatggatccaatatatgagtctgttattactcttgaacttgctaggtttgtagaaaaaggtagtgtgattaggagtaaaaagcctatttattggtgttattcttgtgaaacagctttggcagaggctgaagttgaatatgctgatcacacatcatcagctatttttgtacgtttccctatacatgataaaagattacacacaatattcccacaagcagatcttacaacaacttctattgttatttggactacaacgccatggactcttccaagtaacatggctatagcactcaatgctgattttgattatgcattactccagtataaaaatgaatatattatcatagcttctgaacttgtagatatatgtttaaagcagtttaattgggaagatgcaaaagttattaaggttgttcaaggaaaagatttggagggaatgaaagctagacatccattatatgatcaagagtctatgattgtcttaggtgatcatgttactcttgaggctggaacaggctgtgtacatacagcaccaggtcatggtcctgaagattatgaagttgccttaagatataacttggatgtctattctcctttagacgatcagggaagatatttagataccgtaaaattttttgcagggttaagggttgatcaggctaatcctgttgttattcaaaaacttgaagaatttcatcgtattattcaaaaaaatactatccagcatagttatccacactgttggcgctgtaagagtccagttatttttagggctacgacacaatggtttataagtatggaaaaaaataatcttcgagaacaatccttaaaagccattaaaaagaatatagagtggattccctcttggggtgaagatcgtatttataatatgattgcttcaagacctgactggtgtatttctcgccagcgtatttggggagtccctattgtagcacttatatgtgaaagttgtggagaagtttggaatgatccttcatggatgaagaagatagcagaattttttgcaatacatcctagaggatgtgattattggtatgaagcaaagcttgaagatattgtccctgtaggacttaagtgcccacattgtgaaggcgaacagtggaagcgtgagtcagatatattagatgtatggtttgattctggttcaagttttgctgcagtattagaagagcgtcctaatttaggctttcctgcagatttatatcttgagggctcagatcaacatcgaggttggtttcattcttcactacttatttctattggtacacgtggagttccaccatatcatgctgtacttacacatggatatgtcgtagatggtgatggtcgaaagatgtctaaatctatgggaaatgtaacatctcctcaagaaattattagtaaatttggtgttgaaatattaagattatgggtttcttctgttgactatagggaagatgtgaggatttctaatgaaattttacaacgccttgtagatgcctatcgtcgtattcgtaatacttgtcgctacttacttggaaatataaatgatttaactttagatgagttagtccctgtaaaagaaatggagtcgttagatcaatatattttagatgtagtagctacagcttatacagagattcaaaaatcttacatctcttatgattttcataccgtatttcataagttgcataatttatgtacaacagacctgtctgccttttatttagatatattgaaagatcgtctgtatacttctggagtaagaagtcataagcgtaagtctgctcaaacagctctattttatattttacatatgttgttaagaagtatggcaccaattttgagttttactgcagaagaggtttataaatatattccagacacactgaaagatgataatgttatttctgtatttatgttaccattttttgaaacttcttcatttttattggatgatagagtacgtagttactgggaaacactattattaattcgggcagaagttaatcaagctattgaaccaatgcgtaagaaaggagaaataggacattcattagatacacatataacactttatgttgctccagagctacatacgttactgttggagttgaacacagatttatgtagtttatttattgtttcacagttagatattatgccattatcggaggcatcagttgatgctgcagttagtaaaatagatggtcttgctgtagccgttaacagagcacaaggtaataaatgtcagcgatgctggatgtataaagaacttggttctaatcaccaatatccaacactatgcccacgttgtacagaagttgtagaaaatatgaaaatataaaaaattggaaaagaattttgtataatgcgatattgtataattagtttagttgcacttattatttttttagctgatcagcttacaaaattttggataacccatatcattcctttgtatagttcgattaatgttattcctgatttttttgatttagtgaacatccgtaatagaggtgctgcatttggttttctaaatcgatctgatattgaatggcagttttggttatttttaggtgcaacgttttgggccatagtaatcatcttttttttagcacgttctgcacattctaatgaaagatttttattttggggacttggctgtatcttaggtggtgctttaggaaatctttttgatcgactcaggatacgagctgtaatagattttttggatttttatattggtgactggcattggcctgcttttaatgtcgcagatatagcgatttgttgtggtggttttttagtccttatttctatgtggcataatgagaaaattaagagaaatactataaaagaataaatatgcttttattcttttcgctatatttggttaagctattttttcaaattactgtggtctaagaagcaaattatttatgctatttattctgataggatataacataaataatttgatatggttatataggtaccttattgaattgttagaaaaagaacgatattatcatacaacaattttgtgtttaggatgggggactatgagagaaaaggtagctatggtacttatattgggaagtttattatgtatttcaggctgttttggtcaaaatacagatacattgcgacatcagcttgatcaacaacaggaagaaattcgccaactaaaagctcaattgtcaggggtacaaccagctcaggctgatacatgggctcaagtccaaagtttacgtcaagaactagctagcataacagggcaaattgatgacttcaatcatgctacaggcgcagttggaggtattgcaggtttagcaagtaaagtagaaaaaaatgaagctgcaattcgaaagattgagaagcagtttgatctaaaattgttagatgatcagcctgctccatcttcacctattagcaatacggcgagtcctcctgtaacccctcctcaaatgaattctagtacaggtttaaataacgagtctggggcacaaactaactctcaaccaaagcaatcaactccaaataaaatagatacagctactgtcctttatgatactggggtaaaactttttaatgaacgtaagtataaagaggcattacagtcttttactgattttactaatacatatggtacacataagcttatttctaatgcttggttttggcgtggtgaggctaattatcaactaggtagttatcctgctgctgcacttgattatgagcaagtcatttctaaatatccaaaaagcggcaaaattgtttcttgttattttaagcaagcattgtgtttttataaaacagggaaaaaagatgcagcaaagtttagattagaggaggttattaaaaagttcccaacttctcctgaggcaaaaagagctaagcaaatactaaaatctgatttctgatactgttaatatatctgtcaactggctatactttgttgaagtatagcaatggaatattaagataaaagaagtattaatgtctttatacttactatgaggttattatgccagatccaaaaagtatattgcaagatgatacaatccaaaaagttgtgactgatgttacagataaaattcttaaggagttatatgaaattcttgcctctgagttagcaccaaaaatttcctctacgcttatacaaccatttttagaaagcaaattttatcagcgtattagtaatgatatgcaagatgggttaaaacgtatttataaggaaatttctactataagtgatagtcctgtaaatacagtctctgtagataaagtgaaaacagaatccctttttcatgaggcatcagaacaactttcagaagtccttaagcagacagaaaaggctgctatagctattatggaggttgttgagcaagatatagtgttacaggaagaagctacaacattgcttaccaaacttaactcttcccacattaatattgatccagattttattcgtcttaaagagattattcatctatttggagaacatcttagtagtgttatgctttctttaagctttcaagatctcacaggccagaggattaaaagagctgtttcagcattgaaagaaatagaaaagacagttgtagaactttatttatcagcaggattattaatgcaagctcgtgacaaaaatccaaataagagtatagacgaaattgaagctgatacacggcaacaagttttggcattaaaggacatacaaattataggttctgagctaaaaggaccaacttctggtgtagcacaaaaagatattgatgaacttatggcaaaattaggtatggactaggactaaaatattaggtataagcttttttcttatggacccatagctcagttggtagagctaccggctcataaccggcaggtcggaggttcgagtccttctgggtccaccaaattttaacaccttacaagtagtaaggtgtttttttataaatagcatgattgttttttttcattagtaatgttgtatagtatctaaggttaatgtatagttaaactgagatagtaatcgtgaaatattagtttatatgaactagcaataacttactgttgtactgtttaaaaaagtatatttatatcaataactcaatgaatggatcaacaatataagataatttaatattctttaatatattattgagaatataggtaggaaaaaaatattatggcaacagtgtggattaatgctggagaagtttctggtgacttacaggcttcagttttattaaatgcaatgaaagaatatcagcctgacataaaagcatatgggatgggtggagaatatcttaaagctgcaggacaaaaaaatttgtttagtattgatgagttatcagttttaggtattgcagagatttttacaactataccacgtgccatacagatattgagaaagataaaatatgagcttaaaatacttcgtccagatgttgttattcttgtagatgctccagagtttaattttcgtatagctaaaattgctcatgagcttggcttgttagtttgctattttattccaccaaaagtatgggcatggaggacaagtcgaatccactttttgaaaaaatatgtagattgtattattagtatattaccttttgagcctaaattttatcgccaatttgggatagaaatagaatatgtaggtaatcctcttactgatcttgttaattggcctagaatagagcatatacaaccagtagaaggtcgtataggtattatgcctggaagtagaaagaaagaggttgagcgattacttcccgagtttagctatgcagctgaagagctatatactaaatatcctcaattatctttttattgtattaaagctccaaatatttctacaagctatttaaaatcactatggttttcttctatcccgttatgtatagaaacatcagtagatcgatattcagctatgcgctcatgtgaatatattattgctgcatcagggacagcaacattagaaactgcattagtaggtgttcctacagtagttacatataaagtttcttctttatcagcactagttgctcgtttagctttaaaagtaaagtgggtgagtttaccaaacttgattttaggtaaagaagtatttcctgaacttttgcaagaaaatgcaaaaggttctaaaatatcttttattttagaacattggatgaaacaacaaaatataacaaaagaacttcaaaaagatcttcatgagataagaaagcagtgtggagagattggtagtgtgagccaggcagcacgaatcatagttcaaaaatttttgtctcactaaggttatatgtcaaaaaaagatcagtatactcaacaaagcacttctaaaagtatattatgcctaatgttgactgcaggttctattggagtacatttgatttcaggtatgttggtaggcgtcttatttggctatagtattgacttttgccttgatagttatccatggttcagtggtattgggctgttatttggtattattgcaggttttcgtcttatatggatagatacaaaaaaaatgatacataaggacccatatgagtaggataaagagactacttcatctacttgagttaatttattggaaaagagaaatttatagtcctgaaatacgaaaaatatttgtttggcaaacaaatattatctgtgtatcatttattattggtataggtacatttttttattctaagtggatgatatggttttctattgttgcgctaatttctttatggaatttttatatgttggtaaagcaggtaatgaaagttgtaaataaaccattgatagcttcattacatatttcttttttaataaatacaacattacggatcttgattacatgtctattagggtatatagccttagtaaaccttcgtgctcctgctttagcagtattgttaggtttttgttctattataatatgtatactaggtataaatataaaggcgctattttcaaaaaaacagttgaatgtttttcacatagactgtgaagaaaatagtaactagtatagctggatgagaataaaaggtggagtaaaaaaatggctgaacaacttcctgaaccagttcttttatctgaattgcttcatatggataaagttactattgctggtcagctagttgaatttagacatgtattttatacttggattgcaatgttgatcctttttattgtaggattgattgtccggcgtaaattgacacttgttccagggagattgcagaatttttttgaagttcttattagtagctttgaaaattttactgtaatcaatataggcgaggagggacgtaaattttttcctgttcttataggtatatttttacttattgcagttgaaaatttattggggcttatacctttgtgtgatgctcctacagctaatattaatacaaatattggtatggctatatttgtatttctttattacaattatgaagggattaaaaagtgggggttccattatatccatcattttatgggaccgagtatagtcctagctccttttatgataattttagagtgtatttctcatctagcacggccattatcacttacactacgtctttttggtaatattaaaggtgaagagatagtcttacttctattttttcttatggccccattagtaggcacaataccagtatattttttatttttacttgctaaattgttacaagcatttattttttatattcttactttgatctatttaaaaggcgcattagagtctgctcattgattatgaaaaaaatgattttttatatacaattataactattactagtgaggagtaatattatgttcaaaggtgttatagggatattagtaacctttattgcattaggtattacaagtgttgcatgtgcagcagatcctgttattgttggacatgtggtgaaactcgacccttctagtttaggtctagcaatctttggttgtgcaataggaatggctttagctgcacttggctgtggtataggacaaggtcttggtttaaagggtgcatgtgaaggtattgcacgtaatcctgaagcatcagggaagatacaagttgctcttattttaggtcttgcatttatagagtctttagctatttatgctcttgttataaatttgattattttatttgcaaacccttttgtataaaagctagttagatctaataactagattaagtgctaagtgataggtatgtttcctcttaaaagtgaaagaattcctttagccacaattcgaaggcttgctttatatgttcaggttcttgaagatatagaacgtaataatacagaagttatttcttctaaaccattagcagaagcgtgtggtgtaaatgcctcacagcttcgtaaagatttagcttactttggtgaatttggtgttagaggtgttgggtatgatgtaacaagtcttattaaagctattaaagtatcccttggcgttaaccgtgaatggaaagtagctcttattggcataggaaatcttggaagagcattattgaattatgaagaatttaagcatcgtggctttcatattattggagcatatgattgtgatcctttcaagattggagagcatgtttatggtcttgaagttacttgtacaaccaagttaaaagagaatgtaagaaaacaaaaaattgaattaggtattattacaacgcctccagagcgtgctcaaaaagcagcagattctcttgttgatgcaggtgtgcgtggtattcttaattttgtttctgcaagaattcaggttcctgagcatgttattgtagaatatgttaatttttttcactatttgtattcgttagctttcaaaacttctattgcttagcggtactatagttaacttataaaaattgtttaaataagatagtttttttctcttaaaaaaggtttattcctttttaggaatattttttgcataattttctttaatagaaagtcttcctcagtgatatatttaaataggtgccagttatggctgcttttcgattctctctacagcaagtgttagattatcgagaacagttatctgaacaagctcgtgtagagttagcaaaagtaacagcagcagttatttctgaagaaagaaaagtaaaagagcttcaagaagctattcatactcaagagactaatttaagagctcttgatctaaataatataggggagcggtggttattagaaaattttattaaaggtcttcaagaagacttacgtattagtttagctcaacttcaaactttacagaatgcattaaaagaagcacagggaaaagtagctcaacttgctaaagaacataaggtattagaaaaacttaaatctaagcaggcagaacgtcatgcaaagagtgaacgtcaaaaagaacaacaaaactatgacgaaacagcctcaatcagattcaactctaagactttctagactatgtcgttggattttgatccttgggacatttaaattattatttttaggttctatgtttattttttctgagcctcaagtagttatagttgcaaataaggaagaggaaataaaagaaaataagagccctgatacttctattaaaaattttgttacaaaaaaagtagaaagtccattagcatatgcccaaccaactacagcagtaaatgttactcctcctgctcctaaagtacgtcagaatacatctcctttttctcaagatattcagccatttggggacacagcaaataatttaggagaggcatatccagtaacaattccaaaagcagatcctaataatatttcaacaaggcctgatgaagctcttgtaacaccagcgccagcaccaaaattaaacccttttgttcctaaagactctgtccagcgtaaacaagaagagcttaatcgacgtgaacaagaacttttatctttacagcaacagatgcagtctcgtttggatgaattgcatgctcttgaaggaaaaattcagaagatgttagatgaggctaataatgttaaagatcaaaaactaacacatcttatagatgtatactctaatatgaagccaaaacaggcagctgatgttttagctacgcttgatccaaaaattgcagtcaaaatattgtctggtatgcgtggccgtcaagcaggagaagttttaacatatatggcaccagagccagcagcgaaactctctgaaatgttaagtcgaacccaacttcctaattgatggtataaaaaagaaagagtaccatgccacgtttgaaatttacattagcttatgtaggtacagcatatcatggttggcaaacacaacgtcgaaaaagccttccagagttaccgactattcaatctacattagaaaaggttattgcatctattattggaaaaccagttcgtgtatgtggtgctggacgtacagatgctggtgttcatgctgaaggtcaagttgctcacgtagatattccagaatcaaaattgaagcttgattggcagctagtacttaatgcaagtctacctaaaaatatccgtgttgtacattctttatatgtagaagatacattccatgcacaacatgatgctgtacaaaagctttatgcatatcgtttgtggcttaatcatcgatatactccccctgttctatatccgtttgtatggtcttgtggtagattagatcttgaagcaatggataaagcaagcacatttcttttagggacacataattttgtaagtttacagaatagaggaactaagttgttatctactgtaagaactatatctgctctttacagagagccctcacagtttttttcattgaatgaaagtcatgaagtgacatggttttttaaagcagatggttttttaaagcaaatggtaagaaatataatgggacttcttgtactagttggtcgtaggaaaatacaacctgaaaagataccttatattttggaggcaaaagacagaagacatagtgcacctactgctcctgctcatgggttgaccttgaaaaaagttttttattcttaaatcaatttttgatctgttttcataaatatattgacgttacatattttttttgtattaatttatttcttctttctttatgttttttacttgtattattactagttattataaaataagctaacttgtaatataagtaataaaatgtttatattgttatatagtttgttagaaaaataaatctagagaaagtcttgatttttatagcacgttgtgtagttttaataaaaataagttcagtataggagtatgacatgccccaggtcgctgcgcgtataagcgagcaacaagaacaatggcttaaggattatttccgtacaaagagtgcaggtgcagagtttgtcttgccatgggttgtggataccttttttcgtgctgttacaaatattaaaaatacattttcaaatgtagaattaaaagccattattgaagcacataaggattttaaattattacctgcccatactcgtctgtcttatcttatgttaagagtaaatgatgcatgcgatctttcttctgtacacaataggtatggtgttagtagatcaagtcttgaagctaaattaaagcgtcttgatgatactcaagctgcagcactaatggtttgggcttctgctttttgggtaagtcgtaattgttccgcagataacatggatgagtatattacttcttattagtacatactaagtattaacgtaagcttaaaaaaatattatatagttagtgatattaatttttataataaccacttgttataatttataataacagtggtttttttattaactaacaagttattttattcttttatagctttatctgtaataaagaagtaaagttaggttaaccattagttaacctttaagtagatagtagttgttgttattaagaataaaacatttattaccctgaggactgcttcaggtataatgtagagataagttatgggtaaatatcgttttataatgcatgaagagaattgtataaactgtaaagcttgtgaaaatgtttgtagaactacacatgatacagctccaggattatggttagggaaactgctttatacaacgccagaaggtaaaatggaagcacaagtaaagtttagagcttgtcctcagtgtaatcatgctaagtgtgtatctgcttgtccaacaggtgcgcttattatgagagacttagatgggattgtatatgttgatgtagataaatgcacaggatgtggattatgtctaatagcatgcccccatgatcttctttggaaagatcctaggacagggaaaattgtaaagtgtgatatgtgttatgaaagaatggatcaaggtctagagcctagctgtatagcaagttgtcctacaaatgcattggaacttattgaaagaaaaccaggagagcctttacataagatccatcataaaaaatgatattaagtaatctcttgaaaggttgaaattggctaacttttgataaagaagttattgtagaagatgaaacagttaggtttccataggtagaaaatatgtaaaaatatattcacgtaaagcttggggccaaggacggatagaaatacctgttatttgacggtaacgttcacagtttaacacagaataggcagggcgttttgcaatgtttttcccccactcattagtggaaataccttgtattgtacaagataagtttgcttgtcgaatagcttctgctgcaaactcacaccaagatgcttgtccactattagcgatatggaatattccttttcctttgttttctactagagatatagaggcttctgctagatccggtgtataggttggagagccaatttgatcatgtacaacatgtagaaagtttttagtttttgctagttctaagattgtttgtataaaattttttcgtcctggcccaaatagccaagatgttctaataatagaatagttttctaatttaagttgaagtatagcttgttcaccagcaagcttactagagccatatacagagagaggatatggtacgtcttcttctacgtatgggacattttttgtcccatcaaaaacaaagtctgtactaaattgtataagatgagtagatgttccttttaaaattgtacctaataatgagggaagtgttctattaataagtaatgcatcattactatgtgtttctgcaagatctacttgagtccatgcaatggtattaaagatagcattaggagaacatttatcaatgtaattactcagaaaatctggttgtaaaatatctccatcttctctaccaagtgtatgtacatcccagtttttttgttgaaggcacctaacaagagacttgccaagtaaacctgtatttccaccaaggacaagagctactttattattcacaagcgatccttataccatctattcataaattctttatagtctcctgaaagaatattttgtacccaatctctatgagagagataccagtttactgttgcagcaagccctttattaaatgttatttgtggcatatatccaagttcttttgctgcttttgagaaatccatagcatatcttcgatcatgaccagggcgatctttaacatgatgaataagagagtttggtttattaagaagatgtaaaatttcttttactacagcaagattggtttgttctgcagagccaccaaagttatatatatttcctggtcttcctttctccagaacaagtaatatccctcggcaatgatcttctacatgaatccagtctctgacttgtagtccatctccataaataggtagagattcatccataagtgctcgatgaatcataagtggaataagtttttctgggaattgatagggaccatagttatttgaacaacgagtgataatggtatttattccatatgttttatatgctgcatgaacaagcatatcagcacttgctttagatgcagagtaaggactattaggggataatggtgttttttctgaaaattttccattaattccaagagagccatatacttcgtctgtggaaatttgtataaattttggaacattcattgctcttgcagcatctagaagaatttgggttcctaggatgtttgtggtaataaaaggtagagcatttgtaatagagcgatcaacatgactttctgctgcaaagttaataatagcatcaaaggaataggactgtagaagagactgaacaagtgttgcattaccaatatcaccatgaataaagaggtattgatcaggttttgttgtttcgatctcttttagattataagggttccctgcataagtgagattatctaagtttacaatatagacatcttttaactctttcagggcaagttggatgaaatttgttccaataaaaccacatccacctgttataagtaattgcatctatactcctattgagagataagttaactttgcaaagagaaataattgttatgttaggttctaaaagatgtttatttatgtatgataaatagatactgaaatattagcagagagcctttagtaggtcaatgtattcataattataatttagttgtactgttttagttagtggtgtttttattatctagtaattgttagtataaaagtatatcaggtgaaatgtattttatggtagtttatttagataggggtacatttttataatacatattggtatgttttgttattatgaaatatggtattcttttaaccacgtttggatcttttaatttgtactgcaaagtatctttttcaaattttgagtctcaagttcaagaatgttttcctactattcctattcgttgggcatttacttcaaatgcgttaaagaaacagaacatatttagggatgaaaagataggtcttttagatgaagtattatctaagatggcttttgagcagtttacacatatcgcagttcaacccttacaagttattgctggtatggaatattcaggaatagtatcaaaaattaaaatactaggtgaacgtcttggtttttcttccattttagtaggagagcccctaataacaagttctattcattcaattgaaagagttaaagaagctattttttctgttattccttataagaggaagcaaactgaacctgttatttttatggggcatgggaataaatctatgtttaaggataaatatagaaccttatccattgctgtgaggaataatgatccattagtatttataggaacaatggatggtagttataggttagagcatattttatcagctttggagaatgcattgcagactgtttggttaatgcctttttttactattattggaaaacatgtattagaagatatggttggaaagtcaccaaattcatggcagtcacgtttagaagcagctggtttttcatgcatacctattttaaaaggcttgcttgataataaggcattctcagatatatggatagaacatttaaaaatagtaataactaatctatataatacttgaatatatcttatatagaagtataatagtttatactataagttggttatacattaaggatattatatgtatcattttaataaacaacttgtattatactatattgtagcactatgcttgtatttattagtaaatatttcaatagctaatgcacgtattattgtagtaatttatggtggagatacatgtataacagcccagcaggcttgcagtatagctattgctgaagctttattaattgaatcagaagagtatctttctcataaattttctgagcctagacgagaagctataaaaaaatattttagtatggtttctcctggtttagtattaaatactactgagttagaaccaacctcattggaggatggaagaataaaaggcgtatttgatgttcctatacgtaaaacagcattatatcgtttattacgtgagctaggcctctcttatactacatcgtttatacaaccatatgtactaagtatgtttaatgttcctgatgaaatagctttgcttgataaactatttttattagaacaggtaactggagttgttcagagtgaaaaagttgataatacttctcataaaatagagctacagcttagttttgaggatggaatatgggtggcaaagcttttgggggcagcgcaacctattcaggcttctggttactcaatagacaatatttggagagagatctggggagcttttttttctcaacgtcaaaaagaaacttcttcatatttacaaagctatttattaagggtttcaggatggaaacatgctgtagaagtagaggcattgggaaagactttatctcattgggaatctattacaaaaaatgttttgttacatgaagttagtattagtaagggagtaatagcagctcagtggacgttaactatattaaatatggatgggtttgaaaaacagataaaacaatatagcttagcacgaaagctacactatgaaataaagccgtttgaggctatcataaaggataatagtattgatatacaatgtattggtaactaatataaaattacaatttaggttatgaataactattatgaattttttattatttgaaattatgtatatttaataaatatagcagatagaggcatagtatatatttattatatatcattcagcttagtataaattaattctaatctacatagttaggtatagtattaaggagttaattattttctatattatttttaaagatagtaagatagaacaaaaatactttttgatagtagaaggttgttcatagtgactacttttttattaagattaatatccaacttcctaacttgactatagtatattatataggtatatatgcctgatcttggtttccttaaaggagggttatatgaaaagaacataccagccaagtaaactgaaacgtgcaaggacccacggctttagagcaagaatgagtactgctaatggtagggcaattattagacgtcgacgtgcaaaggggcgaaaaagattagccgcttaacatacccaaaagaaagtcggatagtcgatcggaaagattttttagtttgttataaattaggttatcgttttttttctactcattttattttttttgttcgtccacgattatccaatatagctatatcacgtttggggttagctgttagtaaaaagattgggaatgcagttgtaagaaatcgtattaagcggttgcttcgagaatgttttcgtttacatcaagaatatataccaaaatcagtagatatagttgttgttcctaaataccatcttagattagtacctattacattatctatggttatccaagatattatctttatttcaaataagatggaaaagtttttatctactaatggtattgaggtatagattagtgctaggttattaaaatatgcttataataagtgctataatgtcaaggaactataataatagtaagggagatttcatttaaatgaaaatgagttttccttgttgtttttttgttactattatttatctttatcaaaaattactatcaccttttagtaaaggttgttgtcgtttttacccttcttgttctgagtatgcgatagcttctgtccgcaggtatggggtattaagaggttgttttttgatattattgcgcattttacgttgccatccattttcctctggtggctatgatcctatcccttcccagtttacctttttgttatatcagcaggagcatcaaaaatatcatggaagataagcgtatagttttagctataatactttctcttgttgtctttcttggctggcactcttttgctgagtatatgggttggatttcaccaaaggtacagcacgttgcaaatgaacgacattcttctgtagatcaaactgctacttcaaatatagctttggattctgttcagtcagtattttctccacctacaggtaaagatgtatatattgagacaccactgtatatagcaaaaatacactctagtggtggtattttaagttcatttattttgaagaaatataaggtgaacttggataatacttctcctttagtaaatcttgtaagtcctgaagcatctcaagcaatgccattaggtattactttaaatggccaaccctcatggagtaatggtaattggtcttttttaggtggtgacttatatctcaagccaggagaaacaaaagagcttacttttgttggaattgttaatggagttaaaataatacggatatttacatttaatgcagatagctatttaattcacgaaaagttacaactagcttcagaaaaacagaatagttgtcctacaaaagttggcttacttgtagctgcaacaccctttggaacaggtcaatatgatcctacacgtatggcttggagtattaaggattcatttaaagaggaaacaagcatagataccttaaaagaaaagggtattcaggagtcaggtgagtttaactggggtggagtaatgagtaattactttatgaatgtagttgctttatctgatccactatatcttactattaaaggacggatccaaaatgatgtttggcgtgtagcacttgaacgttcaaatgttttaatccctgctgaaggaactacctccattacagttaactggtggtttggtcctaaagatcgtgaacttttatctcgtgctccagataagcttgaaaatgctatagattttgggatgttttcaattattgctaagcctcttttaacagcacttacatttttttatgaatatacagggaattggggagtagctattattgtccttacattatgtattaaaatagttttttggccattatcacaaaagagttacaactctatggagcaaatgaaaaaacttcaaccaatgatgcagaagttacgtgaaaaatatgctaatgatcgtgatacattgaatcgtgaaattatgcagctctataagacatataaagtaaatcctgctggaggttgtttgcctattttgctgcaaatacctgtatttattggtttataccaagcattgttaaactctatagagcttcgtcatgcaacttttatttattacttgccttttacccatcttgtttggctagcagatctttcagctgctgatcctttttatataacaccattattgatgggtgctagcatgtttttacagcagaagttgactcctgcatcaggtgatcctactcaacagaaaataatgatggttatgccaattatttttacagttatgtttcttaatttcccagctggacttgttatttattggctatttaataatcttctttccattggtcaacagtggtggatgcttcgtaaggcataatctttgaggagaaagaggttttcatggaagagttcagggagtttgaagaaagaacacttgatgaggcaatacgtgctgcatgcaaattttttgatgcaacaagagaacgtcttgaaatagaacttatccaagatgcaaagaatggtatatttggtcttgtaggtgcaagaaaagcacttattcgagcaagacttgctcaaatgcagtcttcggtagacacattaaagcagaaaaaaatatcatcattatcattgagtaagaaaacaaaaaaacaaaatagaaaaattaaccatcatcaaatagaccaagttgggaatgtgggagaaatttctacacagcaattaaaatcatcttataatcaatcattaaataatacagttgtcagagaagaatttccacaggttgataataaaatagagagagaaaaggataatgagtttagtcagcttttagatttatctatagaaaataaaggtaggttgggtccggaagttgcaacactagatgtcaatgaagaattatttaatgataattatgatggtaccacaaagaattttagtgaattagatcaagataaactaattactgaagcaactaatgttgtaacaaagcttatcatccctatacttggaaatgttcctatagaagttactattcttaataatagattagatgttcatgttgattgtggtgaatattcaggacttatgattggtcgtggtggtcaaacattagcttcattacagtatttatcttctcgtattttaagtagaataatgtcaagttctatacgaatacagtttaatattggtgattatcgtgagcagcaacatgaaagacttcgtcatttagcgttatctttagctgagcgagtgagaaattctggtcgttcatgctctacccgtcctatgagttcttatcacagaagaattatccatctaacattgcaaaactatccagatattcaaacacgcagttctggagatgggatattaaaaaggataattattcaacgtcgtcgtcaagaaagacgttaatatcttttgtttaagcatagatttttagttattttatagtttgattcatatagctatgtataattatgtgtgatactattgctgcaattgctactccttcaggaactggtggaataggaattattcgtataagtggtccaaagtcaaaagaacgtcttacagaattatttcattcagtttcgccaaaatttacagactttaaaccttggatgttacacagagggtatttagtagcccctaccaatgaatttttagatgatattttggcagtttatatgccagcaccatatacttttacaggggaagatgtggtagaacttcattgtcatgggggacattttttattattaactatacttgaaacagttctttgtaagaatattcgtcttgcaaaaccaggtgagttttctcagcgtgcgtttttaaatggacgaatggacttaacacaggcagaggcagtagcagaactaatagcagcatcttctcgtaacgaagtattattagcttctaatagacttaaagggctacttggtcagaaaattatagatattcgtagacgaattgaagaacttagagtatggatatgcttagccgtagacttcccagaagaagagtcaggtattttccctttagaaaaatttattaatggactgttagaaattcatgaaataattcaaaagttgatacatgcagcagaacgttctcgttgttggaaagaaggtgttactgttgcacttgctggtgctgttaatgcagggaaatcaagtttattaaatgcattgcttggaaaagagagggcaattgttacagagcaccctggaacaacacgtgattttttagaggaatgtattatagttaatagcctttcgattcgtcttatagatactgcagggttgcgtgttacttctgatccaatagaagaacaaggaatacagaaaggtcgtgaaaaaattgatgaagcagacgttatattatttattattgatgggacggttggtgttacagaagagtcaaaattgttaattaataattttggagtagaacgtacaatccttgtttggaataaggtagatttgaaagtacctccttcaaattggactgaattatatacctcgagccaggtaagtggaatatgtgtatcagcaaagacaggtagtggtatagaagaattattagtactattatataattttgtgctatctcaacataatgcccaagaaccaacatttgatactattgtccctaacatgcgtcaagtagaagtattttctttagtacttgaagagattagaagtctttatgaagacattcgttcaggcatcccatatgatctttgtgcagtgatgcttgaaaatatatcttcaatgcttaattcaattataggttttgatacaccagaagaagtccttaatcgaatttttgcatcattttgtattggtaaatgaagtatgaatgaagaatcagtatacaatggtaagtctgtttcaaaggaagatattaatattttgcctattattacttataagggcaatataaaagttgtgcagacagaaaacgaacttagagatgcattggatcttttaaaagatgaaactgttcttgggtttgacactgaagcaagaccatcctttaaaaaaggaaaatcttatcctactgctttagtacaactagctagttcacaacacgttatacttataagactaagtaaggtccctttaggagaattattagtaaatattctctcttgtgcaaaaattattaaggcaggcgttgccattcatgaagatatacgcttattacaaaagttacatccttttgaagcagaaggtattattgatattgcagaaatggctcgtcgattgcaacttaaagctcaagggcttcgtacattagctgcaaatattttaggctgtcgtgttagtaaggctgtacagtgttctaactgggaaaaaaaagaattgtctcctcaacaagttttgtatgctgcaacagatgcatgggttggacgagaattatattttaagctccttgaaatgggtgcataatttattatttatattgtctttttaccataatggagtaaattttttattttgttcattcttatcataaggtaagatggttttatgcaaggtcctccatttcttattataccttgggaaagagactttttagaatgtttatcatctattattataaaggaaacagatggacatttagataaagctgctgtgatttttatgcatgatcgtccaagacgttatttaacagcatattttcaacaacatcccgaactttccaagccttgcatcctcccttatattttgacgattcaagaattgttatcttgtctttatttggagcaacatacttctttatgttatgaagcaggtcttcttgatcaggtagacttacttttttcctgtgtagaacaactatcagcattgaatgtctccttattcaatttattatccaaaggtggagaagttgggtttttcccttggggtcttcagttggcttcagtctttgaagaatgttttactcaaggtcttaagccaagagatttactttatactgaaggtgaagtggcgccttttggtactgcattactagcatcattaggtcaaatttttttgttatataaacaaaaattagaacaagaagggatgacaacccctgcattaaaagcatatgtgctagcagagcagattcgccaaagtacttttgacttaccatcctttcttaaacaaaaaagtatatttcttgcaggatttagtacattaactggtactgagaacataatttttcgatatttatgggaaaaaggtgcaaaaatttgtttacatgtagactcttctcttgctgatacaggtaaaggacactgggcatgtagctcacaagctaaatggatacaatcttggaatgcttctacagagttagtttttcaaactaaaccagtaaaaaaaacatggcatttttttgctggttatgatttgcactctcagttagaaaaattacaggatgatttttcattacacgaagatatacaaacttctacagccatagttttaacaaatagtaaatctcttcttccaatattacatcatttaccacataaaaattgtaatatttctcttggatatcccctaaataaatcgttattatttcgtttgttagaaaacatttttaaaattcgtgagttgcaacaagaagacggtacaatctattggaaatctttattacatcttattcgacatccatatcttcgttttcttaaaatagatggttttgaattgtatagtttattacataagctagaacaatggatagttaatggtcagaaatatattgatttaaacatgttttttagggaggttgagtatgaacaacctcacaaaaagtatgatttttctgaaagtgaatgtttgttacttaagcaacttattaaggttacagtagaaaattgtataactattgatacccttgcaaaatttgcagattttttaagtatattgtgtgatttccttttgcagtttgggtatgagagttggcaacgtttccctctagatgctgaatgtttatttaggttagtccataaggttattcctgcattaaaggataatcgtatggcacatactgtattatcatgggatttactccaatcaatggttgtagctttgattcatgatgaaagagttccatttgaagcggatcctataactggcttacaagttcttggaatgctagaaaccagattattacatttttctaaggtatttcttatagatgtaacagacgatcagcttccaggaaatcctataagaagttctttattacctgatagcttaagaaaaatattaggactacctaatgcacatgatagagatgtattgacagcatatactttttatagattgttagctggtgctaaagaggtatacctttactggcaagaaggaatagaggtgtcaaactcctttgaaggcaaaaagcaaaaaagtagatttgttgaagaaattctttgggaagaagaacaaagcattggttcacaaataactccaggagactatatattaaatatagctaaaccagaagtttctcctccactcaggaggcgtagacatattattaagactcctgcaattcaacgacaattaaatagtatattgagtcatcctgtttcagctacacagttagatacttatttaatgtgtccattacgtttctattttgaaagagttgctatggttcgtccagtggaggtagtaaatgaagatgatgatccagcatctgttggccagttgttacataaagtattaaaagtattttttatggattatgtaggtaaagaatgtataaaggaagatttgtcaaatgaaagattacgaatgttatttaaagaagaattactatcgtctgggcttataaactctttacctcctgaaagttctatgatgcttagtcttagtggacctgaaaaattggtccgttttttatctaggcaaccagataaaacaaaaattatatatcttgagaaatactttcaagcaactctacaaataaatggtaatactcgtgttcttgaaggaattttagatagagttgataaaaggggaaatgaaggagttattatttttgactataaaactggtcgtattaaaaataactctgataagttgtggcaggatgagagtatttggtcaaaccttgaatcttttgatttaacttcttgtatagaacatccagaaaaagctgatgagcttctttttactctttcagaaaaaatttcaactatacagttgctttactatatatatctttatagagatgctacaggtgaagaaattcaagatgctgcatttatttctctaggggaggatggtgctgaatattggttaatgagggacttggcagcaaacataaaagaagatattattctgaataagattcctaagcttttaaaatttttattataccatatggagtataggttagaaatacgaccacatgaaggccgtcattgtaattggtgctcttggaataatctatgtaaggtgaacggataatacaacaaaccatataactagtgagctttttattcactttaattttgaggtttattatgtcatttccaagtttaaaaataggtgagttatgcgccagagtccctattatacagggaggaatgggggttggaatatccctttctaaattagcatctgctgttgctaaagagggaggtattggagttgttgctagtgctatgattggtatgagagagcctgacgttgccaaaaatcctatagaagcaaacttaagagccttaagacgtgaaatacaaaaagctaaggaggcaacaaaaggtatcattggtgttaatattatggttgcactaacaacttttgttgagatggtccgtacttctattgaggaaaaggctgatgtaattttttctggagcagggctacctttggagctcccaaagattttacttgaactctgtgaacaaaaaaaagaagaatttaaaacaaagctagtacctattatagcatctggaagagcagcaacacttatagcaaaaaggtggttatctcgttatggttatttcccagatgcgtttgttgtagaaggcccaaaggctggtggacacttaggttttcatgaaaaaaatctatttgatcctaactatgctttagaacaacttgtcccaggagttgttgaagcagtgaaaccttttgaggatcaaagaggtcaagcaataccagtaattgctgcaggtggtgtttttacaggtgaagatattgctcgctacttagagcttggagcttctggcgtacaaatggggacacgttttgttgcaactcatgagtgcgatgcagatgataggtttaaacaagcttatgttcaagctaaagaagaagatgtgactatcattaagagtcctgtaggaatgccaggtagagctttatttaacacatttattgactctatgcgtaaaggtaaaaagagacctttcaagtgtatttttaaatgtgtaaaaacttgtgagcatgaaactactccttattgtattgctacagcccttattagtgcaatgcgtggtaatcttgagcgtggctttgcatttgctggtgctaatgtcccacgaatagataagattatttcagtaaaagagcttataacaacattacaacaagagtttgatgcatttattcaaagtattgtcccaaaatctcaacctactgtagaataattatatagttacgttactagctagctaaaaaaggagtagagctatttctactccttatagtttattctaactaaatataattgtagttaattttttgaagaatatataacacctgcttgtgctgctccccatagtccgcttgcatcattacagttgagccaaattggcattcgagagagtatttttttatgttctcctccaatgtttacaaattcttttttaaaggaaggatgattgactaatatttgacatttttttgctaatccaccagtgattacaatcccttgttgggtcagactaaacaacgccaatgagcgacatattcgagcataaaagcatgaaaagtatgtatgggtttcactatcaataaactcaggttttaaggtaatttcttcaggcttaaactgttctttagttaaaaaaagatgaagccaggtaagacctgatcctgaaagaacatcatctaatcgggcataattaagttttttcttttgacaaaggaaatttccaaactcaagctcatggtttgttataaaaggaaaagctgaatgtccaccttctgatgctataacttttgtttttccatacatatcaagttcaagaacagccattcctagtcctgtacctgcaccaatgactcctaacctcccagacttattattaaatgaaaatacattgttattattgtgaaaggagttatgttttggttctggatgtaataaaacagcatctgacatactttctgtaagacaagaccaggcttgtgcttcaaagtcattgataaaaagaatatttttacagaaagataataaatctttttttataatagaatatggaagatttgaaggttttactatttcttgattatctattggaccagcaatagctaatacacacatatctaatggtacagatgcaaataaagaattagacattatttgttgtagaatagtagtaaacgaagttgtataactagaaatatactctttatgtattaggcatagagggttatctttaaagagagcaaaacggctatatgtaccaccaatatctgcagcaaggatatgcacttctataaagctcctctaaaaaatatattgtatgttgaaagtacgtatataagattatttttataaaataattagtataacttaattacatattatacgctattaagcaattaccctatatctctaattaataaataatctttatatcattagagataaagaggagggtaaggtttcttgtgctaatttatcattgtaagaatagagagaagcgacagctttttgtgaaggaggtaaatgtgctcctatcatattaccatctattgtagtattctttgcagatgaaaacataaaaggcgacgctaagaatccaattagagattcatttactgagaaatttcctattttattaatagattttttttcttgtttttttgttgtaatagtatttttttcagaaagtttattcttaccattttctgcattttctatagaatttttttctatttttgcttgtgcctccatttggtttgcctgagaagcaacttgcatatcctgacttgatggatttgctggtgctaaagcagcactacggattttacgtgctttttcaatagttttttcaggatttccttcttcaggagacacatttatttgtacttcacctcctgttgcatagcttttattatctggtccttttgtagttgtataacttgctggactggttaaatctccaccagcagtcatatgggcttgttcatgagtacgtacttcttgatcacgtttttttaattcttcaacttcttttttttgctcaggggtaagtctaagtcctgttgcatcagtatctttctcttttgaaagattattttgaattggagtattcgtattctcttttttgcttttttgactgtcactatgtacagaacatcctgagcatcctgagaaacttatagaagaagatgaaattccttcaatcatgtaatatccccatgtggaagtttcattgtacaatgtttatcgggagagtgttatgaaactttagggattaaaagaaaaaaatacgacgatccggaggaggagggatcgtcgtataggaaggaggaggaggatgaggtggttagggaggtttagtctcctcaaaatagactctcactagatttattttgctgtgttgaagcattccagcggtctatgtgtagcctgtatatattaacggcactttgccgattgaactgccttgatccaaaaccaaggacttttggactcatttgtcataataaaatacaattactatattttatatatccttttctaattttctattagattagagtccttgttaagtttctattttaataatttcactatatatatatatattataaaatggactaacacttgctaataccttaataaacaccttacctaaaaacttatatacttctttttaccactatgaagttattaagaaataattgctaataaactttttcttttatgcgtgtttttttgtttgatatttactttaaagcaactcgtgtgccaaaagtataatatattgataatatttattattcataaatgaaatatactaaggggagagttttgatatatataaaaaatatacataaaagaaagtgctgtatattttttatgcagtatatataatttttttgttaaaatatatagtatatatttatttttggataggttagtttaaaggacatgggatgggaagaaaatagcttataatttcaaataaatatataaaaatatataattatagtgtgaatagcttgccaaaaattattatctggttactttatattatatataacttcattttttctttttattacattaggttataatattcaatctggttttattttttactttttttaacataagattaacataagatttttattttttgattattctttatatataataatcagatataaaaaagatagataatacctttcaacataattaattagatcgtaacttattaaaaagtataatttttacaatctagtatatataaataacaggtagttaatttatagattaaatatattttatataaacttacaaaaattattttgataggctagacaaaagagaacttatgtataaaaaatatacattatgttaataaaaacaactatgaaagaatatcagcctaaactttcttggagaactatagggatattttttttacttatcttattagctacttttattataggaaagtcaggtaaacagtctcagaatattgttctgcagctttttttagataaaggctctactttgattaattctatagctcatttaacaaaagatgatacaataggatataataagggatttcaaatacaattggtaattgataagttagtaaggcaaaaagatgtttattttattgtagttacaactcaagaaaaaatattttttgcacattcttcagatagtaactttcctttaaaccgctctgaaattaacacattagtggatatggcttcagcaactgttataccaggtgatggtataatgtggaattttttacagttaaacaataataatgcttttgttgtatatagtaggtccccagggatagttagtgactctccagttaatgtaacacaaggtaattttaaagatggctccttcatttttattggatttaatcctgaactttttttagaggtacaagatgctgataaggaacaatctttactatctatttgtactattttatttttttgtcttcttttactattaagttttatattttttagaaactttggatatattcaaaaaacatataatgtaattaatgcattgacagaatatgttgtattaacgtctaaagatggtcttatgttacttgactcagctggagctgttttgcaaatgaatccagctgcagctcagttttttcatataagtaaccctattatagggtcttgggtttatctcagtaataaaaaacacgatgagcttttcccacccattttttatgatgtgattaaacaggttattgaacaagggaaattagaagaaacagagctcttcttatctttagcaggagaagaacattatataatagttcaaggtaattctttggatacatttaagaagggtcaaccagaatatcttttatcttttagagatattacaaaaatacgactattagaaaaagatctttatcaaaaagatacgttagcatcaattggaagccttgcaagtggagtagcccatgagataaggagtcctttaagttctataaaaggatatgtgaactatctaggtgatcgattaccctatgatagttctgatcaagaactcattaaaattattatgcaagaaatcgatcgtcttaatcgagttatttctgacttaataggactgtctgtccctacagatgtttatccagagtatattgatttacaaaaagttattgaagatacgttacgtttagttaaacttgatgctaaaagacattctgtagagcttctattttatagaaatgaagagcttccttttgttcctttagatccagatcgtattcgtcaagtccttcttaatctttgtcttaatgctcttgatgctatgccagatggtggttcattaaaaataatttttgacgttaacaaaaatacacagcagttttttcttgaagtgattgatacaggcatgggtataaatgaagaagtgttaccacgaatatttgatccatattttactacaaaattgaagggcacaggtttaggactttcaacagtccgtaagatagttgaggctcataaaggaacaatactagtttcttcagaattagggaaaggaactatttttcgtttagtttttcctcttaaacttaatgagttatgacagttttggcagaggtactatgatgaaacctattattcttattgtagatgatgatgatgtacatcgtagtatgttgtctgcattactaaaggggtgggggtatgaaacagatgaagcaagtgatggagatattgcaattacaaaagcaaaagagcatgcatatgatacaattttatctgatttaaaaatggcaagagttgatggtataaaaatgttagaatgtattttaaattataacccatccatacctattattataatgactgcatggtcttcagtagagacggctgtgcaagcgcttcgaatgggtgcatatgattatcttacaaaaccattagactttgatgcactgaaaaaaacattacaaaaggcattaacacatctacaggtacatcctatagtacgggataatgaatcatttcacaaagttaatacaaaaattgaacaatctaatttaggtattttgggccgtagtccatgtatgcttgaattaatacaaatggttagcacagtagcaccatccgaagctactattttaattgttggtgaatcgggaacaggtaaagagcttgttgctcgagctataagacaagcaagccatcgtagtgacgcaccttttgtcacagtcaattgtgcagcattaagtccagcacttcttgagtcagagctttttggtcatgaaaagggggcattcacaggtgctgatcgacgaagagaaggtcgttttaaacaagcagatggaggaacactttttcttgatgaaattggcgagttacctttattgcttcaagcaaaattattacgcgccatacagcaaggcgagatacagcgtgtaggaagtgatacacctataacagtaaatgtaagagttattgcagcaactaatagagatttaccagaagaagttatagcaggacgatttcgtgaagatttatattatcgtttaaatgtaatagggatagaagttccaccactaagaaatcgtattgaggatattccactacttgctacattttttctagaaaaatttgcgctgtcaaaccgtaaggtaataaaaggatttacgcctcagagtatggatgtactcctaaggtataattggccaggtaatgtaagagagcttgagaatgcaatagagagagctgttattttaactacaggagactatatatcagaacgagaattacctatggttatgacttctccttcacaacctaatgtactttctagtcaatcagataaagaaatagtccaatataaagatactgttaaacatttaagtcaagagcaaaccttaacacttgaagagcttgaaaaaagagctattataaatatgcttcatgaaacatctgagaataaaagtgaagcagcacgtagacttggcatcacaagagcgacattacacaataaacttaaacgatatggaatagaataatacttgacagtgatattatcaaaccctaatttattgttgtcttattataagttataatccagtttattatttatttagttatttattgtgacttattcaaaaaataagttgtcttaaaaaatagggagaaatatgtcagaggttctgtatgagttttatacaggtttaacaatgacacagggtaatgattcagctttaagtagtaaatcaccattgaaggctttttcaaatcagactattgattgggacttatctcctgaaaaggcagtaaccttacatctagagtatggcaacaataattggcatgtcatacatacagggggttgttctggtcatgattcttctgtttattttatagttgatacatatagtgatcctatacaagtacgccttattcgaaggaattttgaaatggcagaacaccttattagtataccattaccggatacgttagttaaactttttcaaaaagagtatggaaatattcgtggtgtatttgaacctctccctgagattaaggaatggctacgtacagagcttggccaatagtatttaagtagtccagttgtataatattattagttatagagccaacaagaaacattatgattattgccaatatatgtagagggaggttttattatacaacgttcatgtgctagtgggcaacgaggtctaaagttgcaacctatggggagttttcctaaagctggaaccgtcccaggtatagattctagacgtaatttgcccttttttaataagggaatagcattcattaaagcttgtgtatatgggtgtgcaggctttttgaataaatcatatacagatgcgttttctataacttctcctgcatacataacacatacttcgtctgccatttcagctactactcctaaattatgagttataagtagcatactcatttgatgtttttcaataagctgtctaagtagcacaagaagttgtctttgaatcgttacatctaaggctgtagttggttcatcagcaataagtagactgggtgaacaactaagagccatagcaatcattatacgctgtcgtatgcctcctgataattgatgtggatagtccaaaatacgtttttccggagatgaaataccaacaattttaagtagctctatagctttatgaagagcgtctttctttgagaagtgaagatgttgaataagtggttctgctatttgatctcctacacggatgacagggttgagagatgtcattggttcttgaaaaatcattccaatatctttacctcttttttcccttatttctgcttctgaaagctgagtaagttctttgttgttaaataaaatttgtccagatataatacgtccatattcaggaagaagttttagcaaggctaatgctgtcatagtcttcccacacccagactctccaactaggcataacgttttccctttattaagacaaaattggatatgttggagaattgttataggggtatccagattaaactgtactgagagatcagttacttgaagaaggtattctgtttgtttaactaagtattgttgctgcatagagttactcaatagtgaaatataatgtttgttatatataatataatggttagataacgtataataaaagatatataaagtaacttattataaagggatacaaaattctattgacaatcattatcaaaaagttcaaaatattattattctagagaggtaatacattatgataggttgggattcagtccttacaggtggaattattatatatactattatttttgtaactattaagctttttcggttaaagcaatcatgtaatcccacaaaaaaaaatagttgtacagggtgtacttcaaatcataactgttgttctatagagcatagtctaaaataacataaaacttggagttacggaacataggtaaaagttaatgatattgaattaacccattatgttttttgtaatataattatatagttattttttatgatggctcctttagataaaggatgatttttgtctataaaaagtttaattattatagataaatatagatagtttgtaaaaattgggaggagatatgtctgcagttgttgatagtatgacaccatttccttgttcagaacatgatgagcttccagttataaatgaagcaacagcatgctgtgtctttgataaggtagagagttatatttcattgcgtgatttaaaagtaggacaacatgctcgtgttgtacgtgtgcaagcagatggagagctaggaagacgtatccgtgatatgggtcttgtcccagggacagaggtaactattgttgggagggcacctcttaaagatccagttgcattaaggttactaggttttactcttagtcttagaaatagtgaagcagactatgtgatggtatcacctatttcataaataatatgagtaagtattaaagtaaaaatataccattaatttgtatataaaatggttaaagtaacctttagtattatatagttgtttttccccttccatttgatatattaccaagttaagtgagattatggttattttacaaaaacaaacatttgctttagccggtaatcccaattcaggtaagtcaacgctttttaatactattacaggttctcatcagcatgtgggaaactatccaggtattacagttgaacagaaagaaggctttttacatacagatactgatgaaattttgcgtataattgatcttcctggaacatactctttaacagcatacacagaagaagaaaaagtagctcggatggtccttctcaatgaacatccagatgttgtgattaatgttttaaatgctaatgcattagaaaggaatttatatttaactgtacaacttcttgaaatgggtatgcctcttgtccttgccctcaatatgatggacgaagttgagtcacatggtttaagtattaacatcaagaagctttcttctaagatgggtttacctgttgtcccaacagttgcccgaacaggaaaaggttgtaaaagattaatactagaagcatgtcacttagcagatgcacgaagaggtgtggaaaaaaaacctttactaatttcttatggtccagatcttgatcctgtaattaagtttatggaagaaaaaattcaagaggcagaatttacaatcaagaatactcctgcacgctggattgcactaaaatttttggagatggatgaggaattaatagaaaaaactcgtcagttaaatcttaatttatcaaaacaacttgaagaaaaagttgcagaagtaactgctcatttacatgcaacttttgatacatgtcctgaggctgtaatagctgattataggtatggatatatttctgctgttctgagagaaggagttcttacacagcaggatcctgtgcgttatagaattaaattgtcagataagctagacactgttcttacacataagttttttggtccagtattcatgttttttatactttatgctatttatcatttcacatttacattaggggcaatccctatgggttgggtagcatctcttttttcatttcttagaacacaggcaggacttttactgccttcaggacttttaaaatctttagtcatttctggtattattgatggtgtgggaggagttatgagctttatcccactaattttattaatttttttacagattgctgtacttgaagattctggatatatggctcggatggcatatatgttagaccgagtatttcgtttttttgggcttcacggatgttcagttgttccgtttatcattggggggggtattgcaggaggatgtgcagttcctggtgtactcgcagctaggacattacgtagtcctcgtgaaaaactagctacattactagttatcccatttatgagttgtggagcaaaattaccagtatttattctctttgctggtgtatttttcccaggtcatgaagcaagtattatgtttgggttaactcttgccggttgggggatagcactattaacagctaaactttttcgttcaacaattattagaggtccttcaactccttttgttatggagttgccgccttatagattacctcttttaaaaggactgtttattcatacgtatgaacgtacttggagttatctgaagaaagcaggaacaactattcttcttatatcaattttgttttgggcagcaatgacatatccagaactttcaaaagataggttagcaatatattcaaaaaaggaggaagtgattcaaacagaaattaagcttacccaagctaaaggtggtgatatatctagccttcaagactcactccaagatgtaaaaaagcaggttggagaagaatcgttacgtaattctctagcaggaagagttggtttgtttcttgaacctataacagaaattgcaggatttaattggcagatggatattgctttgctaggtggctttgtagctaaagaaattattattgctacattaggtacagcatactcattaggagatgtagatcctcaagatgcaaaaccgcttgcagaacaactacatcaagataaaagttggacattggcttcggctttagccttacttgtttttgtattattatatgcaccatgtcttgtgacgcttgtaactattcgtcaagaaacaggttcatggggatggcctatatttagtatgatttttaatacactattagcatttatattagcagtcattgttagatacgtatccttgctatttttatgacctttattgtggagtttgtttgagaattctatgtaataaggttagtggatgaagagcttctactcctgtatgatggtacatttgtagtctacatgttccacactctgaaagtgtaaataatgcaccactttttttaattatatcaaataaattgttaccgatagatgtagcaatatcatatttatcttttttaaatccataactgccagaaattccacagcagccagcttctgcatcttcaatattagctcctggtaacctttgaagaagttcaaagcctggtttaccaattccttgagcttttagatggcaagctgtatgataaagaagcttagtcgaatggagtgttacattaatttgtaactctttagattctataagttttataataaactcacatgcatcttcaatattcctagaaaatgaagtaacttgatctatcatctctgggaaaagttctgcatattcttgtttaagagtaagggcacaactaggacacattgtgacaattggtatgttttgttctgcatactgttggagtatcttactattatggtgagctacttttttcccttcactataatagccattagaaataagtggtagattacaacatctaacttttggtaatataacttcgtagtttgctttttccattatagcaacaaagtccataccagtttgtggttcatagtaattaatataacagccagggaaaaatacaactttttttgtataatgacccttctgtttttttttatatttgctatataattttgggaaatatgtaggtgcgaaaaaagggatagaggcacgtcgatcaattccaattttatcaagtaaccaacgagtaataggacttttcattccaataagttgtaattgataaggtatccactttataagttttgctaaaaacggagcatgcgcaagaagccagtctctaaagggaggacgtcttgttctgtaatattcggcacgagctaacatatttagagaagagatttttacatttgaagggcagcttatatcacaacatttacaattagaacaataagatagtccttctatctctttttgttgtttgagtctaaatcgttcagctgatggtcctgtgagttttggacctttaaatttttttgtagctgctattacaggacaattgatagtacatatagagcaagttatacaactatcaatagattcaagaggattcataacatttacctttatacatttagagaagcaaagtatgctgtagatattgctacaccattcccagacttttcataggcagagtcatatccattaagtgtatttccaataaaaaagacattatcacaaataggatttccatcagagtcagttggacgaaggaaggaatcaacagttggtccaatcatactaaataaatgtgatttttttattttaggataaagttctttatttgcccagtctggtgatgagggattagctggaagatcaatgttaaagataggttcccaagcacgattatgctttgtaagaataccattacttattatccctcctgtagcaataataaagtgagttgcttcatatttacgaatgttgctattttgagttgttattacagaaatacagtggttatcctttacttctgcacttgtaacagcagcattatcaataattgttacatgatattttttaagtatataacgcaatagtatgtttagtcgataacctgtaatggtaggaggtaaaacatcacattctcgaataagacagttacttttttgttcaagtttatgaagtaaatgtggtaagaaagttgttccaagaataggaggaagaattataaggtctgactgatttccttgttgctttattccttgaacaagccattttaatccattttctgtttctaaatattgtgcaacattgaaagtagatatatttctctctgattctggaaaatgaagttttgcttgtgtaaatgttttgttagcaaaatattttttagaggataaccctttgatgatcaactcagggtaaaagtctttcattccttctattcccagtatacaaatattttttatatcaggtatgattgacatatccatagattctgtaaccatccatgttggctttattgtgccagcagctgtgactacataagtatttttttgactccttgttttatatataacattttcttctcccactaactcactaaaattttttaatgcatttcttacagtcaattctcctattagttgatatggatgtcttttaggtaggaatgtaactgcttcaaaaggattactgactggcttaccattaggaaggtatccaagaacatcaattgttccactacctattgtgatagttccatttccttttgtgataagaatacattttttgcctttccgtgcagcaaaagcagcagcagtcataccagaaagtccaccacctactacaataagatcgacttttctattcatgattttcctgctcaatatttagagtagcactatagatttgtctaaatagttcaacttcacgtaaggactctccccataaagatggataaatgccaacccattttttttgttggaaagtttgtagtaaatcagtgattggttctttgctagagagtaagttaaattgtagaaagtttcctatagcacgtagagcacaaaaagttccttgacatgttcccatccccattcgtgttctgcgagagatatctcctagtagataagatgagggctggctagcaatgtattcaacctcagcaaaagtaaccatttcacattcacatattagatctttttttagtagattattttttatagcagtagagacttcatttatagagttacctaagcgggagagtgctggttcaaaaccttgtataggaaaatattttatttttttatgtaatgtaggatctacttctgttataagtggttcttttgctgtattacatggaacattattgttgaagtagttgcatactacattagagatttgttcagccattaagcgatatgttgtaactttaccaccacatatgcttgccatgccagatagcccttcatttttatgatcgattatacgaaaacttcttgaggcatagagttctttaggtgatttatacatactatataatggccgtgtccctgcaaaagatcgtaatattctgtattgatgaattttagggaataatacactgcctatatttaataattctaggatatcagactgctcagggattatatcatctggtctattggtgtttttagatgttgttccaagaattgttgtagattcatgaggtacaaaaatatcaccatcagaaggtggatgaagcctattgataatttttttagaaagtcgatgattaaagacaataagtgcacctttatttggagttaagtgaagttcaattcctgcttttgcagcgacatcaccacaccagctccctgcagcattgataacaaagttacaagtaagatgtgttatttcttttgtccaaaagtcttctatagtaacacctgtaacaacaccattactgtttgtaattgaagtaactttagtataagtacgaaattctcctccatatttttgggctgagattacattatgccatactaacttaaatccatctatacttgcatcaggaactttataagcagacagaatatgttttgagagagtaggtgcttcttttagtgcatcagtaatggaaataggtgtggttttgattttacaattgttacaagctgtaacccagtttttttcaaattcaggatcatcttcattagttctgataaaaagaccaccgatattttctatacaaggcttacatattttagataatattatattttcttttgcacagtcagtagcaacaccttgatctttcattacatatcgtgctccactatggagtaacccatggaaacgtgaagtggttccataagcaagatcttgttgttcaagtaatagagttttaagtccacgcattgagagatctcgaagtgtacctacgcctgtagctcctcccccaataacaattacatcccagtgttgatttttgtaaaatgataaagccttcatcattcaacctttcccctgaaatagtatagttatatgatggagataaaagacaacatgtggaataagatgaatctaacaagagtatttttaatatgcaatataaaatgccaattatactagtaagatatctatttaaagtatttactactactaaataataagaattaggaggttaatatatatatatatggttgtgactagctagaagttataactaataaactctataatttattttttattccttatagcctatattagtgttagttctctagttagaagaataactagatagtatttatttataaagtagtgtaatgataattggtacacatattgtaagaacagcacctgaaaatatagctaaaatagtgttcagttctccagaggtacgagcaattataggtatacatagttcacttgatgctgctgctacagaaagaggaccaagtccgccaaccaaacgtacaaatagaggagcaaaggtcattgctataatttctcttgctatatttacaagaagggttaatgcaccaaggtcaggtgtagtaaattgagttacaagcatactagagagactatagtagccaaggccagatgcgacagctattacgtctctaaggaatatattttgaagaataagccatgaaattacggctccaagtaatgttcctataagaattcctaatggaactaaaagtatttttccttttaatgatcggataacttgccaggcttgagagttaattcctatagtcatgccaacagtaaaaagcataaagtagacaatacaggtggctaagccttcatatataagctcttttgggactaactcaatatgaccaataataatacctagtaaaaaacaagctagaacaataaaggattctctcattttaagtgttcctttaagtgttcctgaatattttctggaattatatggacaaatcgagataataattttgctgcaatgaggcttccagcaatacaaaaaaaagtaataattattgcttgaatccctaatgtatcaagttgttgaataatagtagtatttgatcctaaagaaagtcctaataaaaaaagtaagatccttactgaccaaattagactgtaatctactgtttttattaatcgaggatgatttcgtattaaaaaaccaataggagccccaagagaaatacagacaatttctgcaaccataagttatattatccttatattataaataatatatctatcaattattacttactatataactattaagaaccattaatatatactttttataacatatggcttgagacactaatctaggctatagatatgatcaatagatatcttttggtttagcaagtaaaaatatagtttgttgaccagttgtttctcttattatatttgaaaatctgtagctggccatatactttatttagtagttatatataaagctgccattagttttatataccgttaacttatcgtagtatgtagagaaacagggagtaactatggaacaagttatggcattagaacaaacatggactcttcatcgacctgaggattttaaagttcgttggaaagaatttgttttagaatactttaaagtaggtgaatataaaaatcctccctattggcttaatttttggccttcaaattattttttgatagagtggttatttcatcataaggaagatattgcaggtgaactatgtatagatcttggttgtggtttgggtttttcagcggtaattggtcaatggttaggggcaaaggttataggggtagagtatgtatttgaagcactgacatatgcaaagtataatgcagcttctaataatatatcacagccatattggataaatatggattgggataaacctgcgatagttaaaaattctattccatatatttggtgtagtgatattatttatgatacaaatgatgctgagcccattatttgtttttttgataacatgcttaaagaagacggcataatttggatttcagaacctaaacgacctgcatatgatgtagttcttaataaactagaaaaaagaggatggaattgtaaatgtatgtttgaaagcgaaattcctcattgtcgtcctttgcctaaatttaaacgaatttatactcgtatgtgggaaatttctcgtggttagtttcctcatttttacttagttagatgaatatggatttttttggttaaatacaaggaaaagatatgggagaaactgttcgttttggtgtttcgttagacgaagatttacttaataaatttgataagctttgtgatcggcaaggttaccctagtcgttcagaagcattacgagatatgattcgacaggcattagcaaaggatatactacaatctaaggatagtaatgcagcaggtgtcctttcgttagtatatgatcatcatacacgtgagctatctcgaaagttgatagagagacagcatgaaatgtacgattctattattgctacattacatattcatttagatcgttataattgtttggaggtattaataatcaaaggtaatggaggtaaaattcaacaacttgcagatatgctttgctctattagaggggttaagttaggggccttttcttttcttccagttgaagaagatgttttttaatatttttaggattattgtagcttatgaaagatattcaaagtactcctgcacagattgcatttcctattgatcgtgttggggtaaaaggtcttaagtttcctattcagattcaaacgcgtgatattggaatgcaacatactgttgctatagtggatatgggagttgatctatcagtatcatcacgtgggactcatatgagtcgttttgttgaagtattacaggattggaatgaaccactatgttgtgagtcattagagaggcttgtcaaacaaacacaaaaaaaattacagtcacagcatgcttatattgcattttttttcccttactttttgcataaaagagctccaagtacaaatatgttaagtttattttcttatgactgtaaactttcagcaaaatctattaactataatatagaatttatacttgagttaactgttcctgttatgacagtttgtccttgctctaaagctattagccacgagggtgcgcatagtcaacgttcagagatatatattcaattaagattagaacagtttagatttattgaagactttattgtattagcagagtcatcagcttcttcgcctttatattctttactgaaaagagcagatgaaaaatatgttactgaagatgcatttgctcaccctaagtttgttgaggatgtcgtcagaaatatatcaagcaagttaattacagtaacagatgttcttggttttcgtgtcgaagttgaaagctttgagtctatccatgcacataatgcttttgcttatattgaacatgagtttatttgttagttatataagaagggcttgagattaaactaaaaaattaataagagacaaataaaataattcaaatactttttttgatgtaacttgttatatttaaagtaaatttttgtaaattcttctctgtcagactcttgacaccttcactggatatggcaaacagtaaataggggaaagtatcagtagggggaaagatggagattgtaagcaacggaattattggagagagtaccactttaaaagaggtctttcatgtcctgcataaagttgcacctactgatagcactgtacttgtaactggagagtctggaacaggtaaagagcttcttgttcgtgcactacatgctcaaagtttacgggtaacaaaaccatttgttcctattaattgtggcgcaattcctaaagagttattagaatcagagctttttggccatgagaagggggcatttacacatgctgttcgttcaagagcaggaagatttgaagttgcagatggaggaactgtttttcttgatgaaataggagaaatggatcttagtttgcaagtaaaaattcttcgtgttttacaggaaaaagagatcgaacgtgttggaggtacaggaccacgtaaagtagacgtacgaattgttgctgcaacaaataggaatcttgaacaagaagtagagcaaggacggtttcgtgaggatttatattatcgtctaaatgtgataccacttcacctaccaccactaagggaaagaggacgtgatattttattactcacagaaagttttcttactcgtttttgtgctagaaaacaacgtcctattttaaaaattgatccagaagtatctaaagtttttttagcttatcattggcctggtaatgttcgagagcttgaaaatgttatagaacgattaagtatcttagtagatggaaacattgttcgacttcatgatcttcccagaaagatcattgattcagttggtacattagaagatttaactaatatagaacttccaaaaagtgttgagtccattcctacctctatttctccacaagaatttatttggcctaggctagaagatatgcgtactagaggagtgggattaaaagagtttttagaacaaattgaagatcgactattgggagaagccttattattatctgatggagtaaaaaatcaagcagcagaaattttgggtataaagcggacaacacttattgaaaagttgaaaaaacgtcgacttgatggagaagtgtgaatcaataaatgtgttataatttaatataacgatacttttttaccaggtatggttttgtgaagttttttatttactcatggttgttccaattttttttgattactggaggaatgatcttatttactgtggaatatgtagaggcagtttcatggaaatggtctatgctcccagggagagaaagaataataatttcatatgatacacctaatcaaggtaaaaaagcttctcgtattagtacaacccaattagaaattcctctttcaacacctgcaaaagatctttcacgtattggagcttctccttccccagaaagtttagtatcagatttatcgttagatggctcaaagctccatataaatttaagagatgcagcatttggctatattacaacctctacaaatcctaatcagttaattattgatgttttttcagatcctctaggaaatcgttggcgtaaccttggtgtaccagctcctgcatctgctccttctagagcatcatcagcattacctgaagttcctaaaaatatttctaaacagataaaagtatccaataatggacaacggttgaataaagatcaggaaaagacgtcattaagtcaagagcaaaaacaagtagcaaaagcacctgctgaatcgataacttcggagggtaaagctgaaaagaagcaatctattaaagctgatacttctaaggataacgtaaaaaaatctcaggacgtaaaagggactttaccagtagatacaaaagataagcagcaagtaagtaaaaaggaaaatcaggaggctataagtaaagaagaaaaaattgaaactgtcccaacagttcctcctccttctgttgatgaacttactatgcttacagctaaagtagaaaaatcacaattagcatcagatgagtatagttggtcaaaaaaggcaaaaagtccagctcaggaagataatacagaggagaaattagaaaaaagccagaataataacaatcaaaaagttaatatactagaaaattcttcttctagcacagagggtactgtacaatcaaagcttactgaaacacctattgttgaagcaccaatagaagagactgtaaatagcattcattcaaaattaaatttcaaaggaccagatgcttggcctaaagaaaaagctttaagtacattggataagttagaagaggtactaaataaaaataagcttatgcagcagcctgaaactcgcgatagtcttcaacctttatcaaaaactaatgaagagaaaccagtttcagagccagtggttgtatatgttgatgaaaaaggtaaccctgttgggaaaccacctgatacaaccgctattattgaagaagcaaaaaaaaatatgagagcaggacaagtgcaaaaagctaaagatttactagctactttaaaaggccatgcactagtccaagaacagcatgaagaggtattatatctatttagtgaacttaatgaaaaaatttataaagataggtggattgaagggtatgaacctatcataaccagtactaataaagctatgaattttaatctaagatctccaagagtagctgaagcccttatgcgtcttggaatggttaatcttagaataggaaatcaagatgaagctgctggttattttggagcattacgaagaaaatttcctcagagtgaatttataccagaagcctatttagcattaggaaaagatcaattttcaaagggagagtatgcagatgctgtaaaaactttccaacttattttagataattatccagaaagtaaagcagttcaagatgcatcacgctttatggctgaagctctttttaaacaaggacattatagccgagctcttattcttgtagattttgtagatagacgatggcctcgattatatcttgaagatccaaattatttaaaaatggttggagatctttattctagagaaaatcgtttagatgatgctcttaaagcttattggacatactataatttagttccagaagcaaaagatagccatgatacattgtttaaaattggtaccagttattttaaaaagggattaatgcagggtggtaaagacgtttttgaagagttattaaagaagtttcctaaatctgactcagcgccaaaggccttacttgctctgggcgaagagcaagtaattaaagaaaatccaacaatacaagaattagttactatttttgaaaatcctagttctactatccctgaaatttactataagaagattcttgatgaatatcctaatagcccagaagcacaacaagcagcaatccgtttagctgcatggaaactttggcatagagacattcctacagctatgacaatggctcaacagtttttggataaatatcctgaatctccctatgctccaagagcagaggaaattattgcacgaggttttgaccagtcttttgcattagcactacaagaagagaattatgaacggattctttccttatgggaaaaatatccttatttgcagatagcgtataaagatatgactgacgagttacgtgtagctttagccagggcatatttaaatagaggtgatgaagagaagggtatggatctacttaatcagtttttagagtcaccacaagatccaaattatggtgattatgtttataacctttatcttgctcattatttaagaaaagaagactggactaacattttgaaacttggtgaaaaagtttctagttggaagtttcctgtatctgcacgtgctcaattagattatgcactagctattgcttcagaaaatcttgggttagggaataaagccttacctctttgggagaggctatatcaacgtgaagatattcctttataccaaaaagcttatgcaaattattttatggcaagggatgctgagcgacgtagagatttgaatgcagcatataagttaaacctaaatacattaaaactatttgttacattacaggaagagcgctcagataaagcagatcctgaacgtgtacgtgaatctcttgcagcacttatggatgttactgaagttgccaaccgttttgttgaatctttagaatgggcagatcaatatgcagcatttgttccagaaacttctcctgattatgcaggactattatttcgtaaagcacgactttatagaaagatgggagatttgagtaagtggaaacaattattagatgaaattgttcgtcgtgagccagaaagtgtatttgggcgaatggctgcatcagagctacgaacatatgaagtttcaagagatctttctcgttttacacaataaaatgccacaaggtaataattagaaatattatgcgttattagaatgctcttgtctaagtttgctttctagtgctcctgtgagatatgcatttaataaaggtacagtaaatgtactatcataacgttctttatcattggcaagtagttgtgcagctgctttaggtggtattgcttgtgcatatggtcgattacttatcattgctgcaaaagagtctgccacagcacaaagtttaccaaatttacttaaatgtgtttctttaagtttgtttggatatcctgatccatcaagacgttcttgatgttccataactgcttgagttatttcattaaatccaagattcaacttttggagaatttttacaccagcaagtgtatgtagtaaaattttttctttttcttcacttttaaggggtgtagctttttcaagaataaaagaaggtattttactcattcctatgtcatgtaaaataagtcccaatgctgatcgatcccattctcttcgtatgagtttatcttcatgtgtagtctgtagaagccacagacctataaataatgtattaagagagtggtgagaaagagtatgttctgtataaagccgacgcataaagagtttaattctgtgtttatcttgccaaaggaattcagtaaataccattaaatcgttatagagtttttcaaaaacaggtaatactggctgcccaataaagtctaatagtcgcatatctaatgctcttataaagatatcagctgcctctgcttccttaagatttgagtctagtaagacaagatcaacctgttttacaatatgttcagagtaaatagggtgatctgtacgagaaacaaaaagtcgtccttcattacaaagtatttgaatttcttctatttgttcatttgttagacgacatcctttacgactgtatggatagagttttaggatatcttcacgaaactggaagagatctactggtggacgatatttaggaaaactagaaagaatttcatgagatatttgataatactcttcagcaatattttctgggacagttgctttagactgtctactgcttaccataggttatttcctgaaaatttttataaagtttgtacctcttggttgaactgtatgtggagcagattgtccagctgtaataataatatcttctcctatggcaaaggtagggttttgcatgataaaattttcagtcctaaggagatctccctcagaagatgccgatagatattgggggagtacaccccaagaaaaattaagtcctttaagtgaagttcttgatggtgtaagggcataaataggctgagatggtctacatgtagatacatgtctagctgctgttcctgtcattgtatgtgtaacaatagcttttgctaacgatttttcagcaagaagacatgcggcatatgctaaaaattcttctgcacttttttctgcttcaggttcttttagatgacgtgtttctatcataagctcttctgcttttgtcgtaatatctctcataaagcctactgtttctactggatgattacccatagctgtttcttcagaaagcataacacaatcagcaccatcaagaacagcatttgcaacatcggttatttctgcccttgttggtgtagggtttgataccatggaaagaagcatttgggtagctacaataacaggttttgatgctttattgcaagcacggataatacgtttttgaattgctgggagttctggtaaaggacattcaatacctaaatcccctcgagcaaccatgataatatcgacttctttaagaatttcttcaagatgttcaatagcattacgacgttcaagttttgctattacaggtatatcatatccattggctttaataatacgttttgcttcaataatatcttcagcagattgaacaaatgaaatggcaacagcatctactccaagcttaagaccatcagaaagatctttttggtctttttctgtaattgctggaacttttattgactttcctggaagagctaaaccttttcgtgaagtaataataccatcttcttgtgcaataagaaggaatgttccattggaattttgttctttaacttgaaattgaagtgttccatccgcaagtatgagtatatcattaacaactaggtcgcttaggattgctttatgatcaaagggaatatagggataatcatttgttcttttatcttctggaccaagacataacacatcacctttagatacgtttaatgcaacatcaccagggagtgcacctatacgtattttaggtcctgataagtcttgcataattgtaattggtatttgatgaatatgttctaactctctaattgttgaaataagttctataaaggcagaactatctccgtgtgagaagttaaggcgaaaaatactcactccagcttgaataagttgagagagagtttcctttgaattagaagcaggaccaatagtagcaattattttagttttcataatttttatattgttatcgtagcatcattatgtgtcaagatattttaaatatactttatataaatttcagatagtgacctcttgacagaatatataaaataaaacaaaagtggaaataaatggagataagtggagataggtggttaaaagtattttttctatttgatatagattctgtctttttcaataagatcaaaggtagatcatgcagtttcgaggtcagtcatatagaaatattgattctaaggggagggttattcttcctccaggatatcgtgaaactctagaagagtattctagtgagggttcttttgtactgactacttatgataattgtattgtaggttaccctgagcctcaatggaaagaaatagaagaaaagttttctaagttaagaaacagttcaaaaaaactacgtgattttcgtcgactttttcttggtggagcagaaaagcaatcacttgatcttcaaggtcgtgtaagaatttctcgagcacatatagaatatgcaaagttggatcatgaaattgttgtattaggccagggtgagcattttgaaatatgggatcaaaacagatttaaagcagttcttgagcaagattttgatgatgtggctgatgaacttgtagaaagtggaattgattttcctttataacaaataacaagatgtatatcgacagcctttaattgtattattaatattttttctgaataaaaggtagactatgcatcagccagttatgcttgaagaaacaatagcaatgcttaagcctcatgcaaaaggaagatatttagatggaacagttggtttaggggggcattcatttgctattttacagtctgcaggagatggcgctgaactttgtggattagatcaagacaaaaaagcactcgccattgcagaaatgacgttaaagccttttaagaaaagggtgcatttagttcatactaagtatagttcttttcctctaatattaaaggctcttggttggaaattattagatggagctctcattgatataggtgtttcttctttgcaattagacaatgcagaaagagggtttagttttttatatgatggtccattggatatgagaatggatcaagatgctaataataactcactgtttgagatagttaataaaagtcgacaagaatacttaaaagatattatttctcgatatggtgaagaaccacaagcaaatagaattgctaaagccattgtacaaaaacgaaggactaagcctattacaaccacaaaggagttagccgatcttatagaacaagcttacccagcagcatggcgtgctaagtctcgtcatcatccagcaacaaaaacgtttcaagcttttcgtatagtggtaaatagtgagcttaatgagttagaaaaatttttaaatatgattatgggttggatagcaccaggtggaagagttgctgtgatttctttccactcattagaagatagaattgtaaaacagtatatgaagtcatggacaagaagttgtatctgtccaccatatgtcccggtttgcaaatgctttcataaacctgaagccatacttattacaaagaagcctattcgtccttcagaaaaagaaatatcagaaaatattcgttctagaagtgcaaagttacgtgtagcagaaaaagtgttgctttgaagagttaaataatttttcaatcaaagatttattataatgcaaagaaaccaaagaaatttaatttcaaaaaataataaactaacttctcgaccattttctcttagttgggttttatggttaacgttttctattttattaagtatagggatggggttaggtcttgtatggataagcattgagcatacagacttagcttacactataaaacaactacaaaatgagctgaatagtcgtgtagtttttaaaagtaaactagaagtagaaagagaacgtttgcttgctccatttgagcttaaacaaagagcagagagtgttggaatgcatgaggcagattccaaacaaatcagaagactaactatacagtaattatataaaaatggttattatagaaagttatagaagtatttgagaagtaattatagataggctgtatggatctcaaattgtatattttattgttttactagttttagtatagctaaatttatagagtcaggtaaagattatgagttatttaggattatcacatcgacaaaataaatatcataagtttacttggactacttctaggaaaaaagtaagaggaaaatatttttcttttaggatagataagtggaatgcttttaggtttcaaattgtagctattcttttttgtattgtttggtgtggattatggtgtcgatcagcttacatccaactatggaaaggtacttttttttcagaaaaggccagacgtcaacatattgccttagaaacagtatctactccaagaggaaatattgtagataggaatggaagaattctagcaaaaagcatacaatgttattctgtttatgcagatcctttttccataaaagacatagaaagtactgcaataaagctttcaaactgtcttcacttatcagaagaaaccataagaaaattactccaaaagcaaaatcggtttgtatggatttctcgccatattgatgatgctacagctatagctattaatcaaatgaagattcctggagttatgttattaaaagaatatgaaagagtttatccatataaacatgttgctggccagctccttggctttgttggagttgatggaaatggccttgaaggtcttgagcattcatttaatgattatctcagtagtttttcaacaaagcagcttgtgatgagagatgcttcaggaagaaggttttatatcaataatggagaagaattacacaatagtactagagagttacagcttacaatagatttacaaatacagtctattgctgaagatgctatagcacaggctgtcagcgaggttggggcaaaatggggtggggttcttattgtagatgttaaatcaagcgagatattagcttggtcacaatatcctttttttaatcctaatgcatatcgtcaatataaacctagtgagtatagaaatcggttagctttagatgcatttgaacctgggtcaacatttaaaccttttttgattgctgcagctcttcaagaaggtattgttacaaaagatacattatttaattgtgaaggtggagtttggaaaattaaaaatgttgtcattcgtgatgatggtacaccacaaaaagaactttctgtaacaaaaattttaagtcactctagtaatattggttgtggaaagatttctttagagcttggttcacaaaagttttactattatcttactaaattagggtttggacagcctactggacttaacattattgaaaataaaggtattttacgtcgtcctcgtgagtggagtgaagccgatctcatttctactgcttttggacagagtttatctactaacgcacttcagcttacacagggttttttaacaattgcaactcatggtatatacaaaccaataagtctttttaagactcctttgaaaaaagtttctgagcagcgtattttttctgaagatataagtagcgaagtacttacaatgatgcggcaagtagtagagtcagggacaggaaagcgagctgctatatctggagtttctatagccggaaaaacaggtacagctcaaaaggttgataaaacaggcaagtatggtcaagaacgtatagcctcttttgttggccttttccctgctgaagaccctcattatttgattatggttgttatagatgaaccaataacaaaaaaatatggtggagttattgcagctccagtgtttcgtaagatagctactaaagttatggcttatgtaggttctcctgaaagtcttcaatatcaagttgtaacaaaagaggaagaaaaaattagttctaataaggtttcttcattagttagaactaacaaaaaagaaaaaagctgttctaatacattagaagttcgtcaaaaaatagatagaaaagatccaattgagtacgctacatcattaaaaattcctgatgttgtaggaaaatctattcgtaaagctattgaactttttgctgggcaaggtcttgttccagaagttaaaggtaatggtattgttgtaataaaacaagagccagaagccggaactcatttaatcaaacaacatttattagataagaagtgtatcctttgggtttcggagaaataaaatgaatagatatcctcttaaagcccttgagtccgaactagagaaaaaacatatgctaatctgtatagactcacgtaaagttgagaaagggtgtgtttttgttgcacttccaggtagcagtgttgatggtgggctttttattccagatgctgtttctagaggcgcagcatatattgtttgtcgccataatgaggtagagtattgtggtagtgcaatacctattgttgtggatgatcctagatatactttagggaggttagctaggattttttataatacaggaaatctatccatgccaataattggagttactggaacaaatggtaaaacaacaattacttatcttttagagtatctttttagggcaaaaggaaacaggacaggtgtcattgggacaattgcttatcgctggcctggattttctaaagaagcaccacttactacccctcaatgcttagacttacatgcaatgcttgcacagatgcaggtagataagacagaaattgtgtttatggaagtttcttctcatgctttagatcaaaggcgaatagcaggtattagttttaaaggggttatttttacaaacttaactcaagatcatttagattatcataaagacatgaaagagtattttcatgctaaagcaagacttttttttgaatacccatctaaaaataaaataatggtagcatcaatggataatcaatgggggaggaaattagcaaaacttgtcccagagataatagggtttggttttaaaaacaaaccaacacaagtttcaaattatttatttgggaaaatactttcttcttctagagccggcttacatctgcagatgagttttaaagataaggtttgggaactttgtacacctttagttggagtacataatgctgaaaacttgttggctgtacaagcaataagtctccaattgggtttagctcctgaggatttctgttgttttgaaaagtttacaggtgttcctggccgtcttgaaagaatagttaataaaaaacaattagatatttttgtagattatgcccatactccagatgcacttataaatgtactttctgccttacgtgatgttggttttaagcgaattataacagtttttggttgtggtggtaatagagataaagcaaaacgtccattaatggggaaagctgttgcaaaactatctgatgtagcagtgttaacatcagataatccacggaatgaagacccagagttaattatggcagatgttttaccaggcctcaaaaaagctaaacaaattattacagaaccagatagagagaaagcaattcgtcaagctatagaattagtttcacctggagatgcattacttgttgcaggaaaaggccatgaatgtacacaacaaataggatttatgaaatatccctttagtgatcaaagtgtgatacggaaaattttaggatgcgattaagcttagatactatccttagcgttacaggaggtacacttgtagccccgactactggatataactcctatatagatggggtaagtatagatagtagagctattactactaattcactatttatatgtatttctggaaacattactgatggccataactttgttttaaaagctgtagaggaaggcgcatctgcaatacttgctagtcataatccttttgaaggagaagtgcctgtaccagtaatattggttccagacacattgaacggacttaaagtattagcacaagctgctcggaagatgacaaaagccaaagttattggaattactgggacagcaggtaaaacaacagttaaagagttagttgctcaacttcttacatcaaaaggaaaagttgctaaaaactatttaaattttaatactcaaattggaatgtctttttctattttagcagctcaaggagatgaagacttttgggttatggaggttggtataagcaatcctcaggacatggaagaattaggaactatattaacacctgatattgctcttataataaatgtagggcctggtcatcttagtgggttgaacaaacaaggtgttgcttatcataaggcacaacttcttcgatatatgaaagatgaaggattaggaattgtaagtttggactatcctgatcttgttaaagaggtaaaggaacttcgttcaggtagtttatttttttcagtactagacaatcaatgtcgctattatagtaagtatacaggtattgtcgaaaatggatatggtacttatcgattatggcttgatgatgatatagtagatgtaacctctccctttttaggtaattttggtatggaaagtgtccttgcatccgcaaccatagctcataagttaggtgtatcaagtgattctattaaacagcaattgttccaagcaatattacctcagaatagattttcttgtttcactcatggtaactggctgtgtatcgatgatagttataatgcaaatcctttgtctatgaatgcagtaatagagtcaacatataaactttcagacgaaaaaaagcctcttgtatatgtccttggtgaaatgcttgagcttggagattcctctgaagcagagcatgaaaagattggtaagaaactggcacaaacaggagctagtataattttttggaaaggtggcatgatagacaatgttcttataggtctaaaaggaggtggctttaaaggtatcttagaaaaaatatctacagaacaagagttccaatcactatttttgaagcataggttagatgaagggatcattgtgtttaaaggttctcgttctaataaaatggaagtatttgtagacgtatttatgaaactagtaggaacaaaataatgttgtataatatactgttccctttaagttcagactatactatattaaatgtttttaagtatattacatttcgttctgtttggtctttaattacagctttaattttaagcatattacttggaccttattttattcgttggttacaacgtataaactttaaacaacaaattcacgaagatgtaaagatccataagtcaaagacaggaactcccactatgggaggagttcttatatgtttcagttcgctatgtagtactattctttggagtgatttaacaaatatttatgtttggttaacgctattagtttttataggtttttcttttattggctttcttgatgattatataaagattttacatcatcaaaataaaggtttttcagcaaaagtaaaattgttagcccaagttgttgtagcaggtattgctatgttatttttagtgtcagaacctgcttattctacaaagttagcatttccattttttaaatctttacatccagattttggttatttttatgttccatttgcaatattagttatggttggagcctctaatgcagtaaatcttacagatggattagatggccttgccattgctcctgtgattgtgtctatctttgttctttctgtatatatttatgtaacaggtaacgtaaagttttctcaatacttacaagttgactatattgctggtgttggtgaagttgcagttttttgtggcgcacttattggagcaggacttggttttttatggtttaatgcatatccagcacaaatatttatgggagatgttggttcacttggacttgggggagttttagggtttttagcagtactttgcaaacaagaacttctattacttattgttggagctctttttgtattggaaacactttcagttattgttcaggttggatactttaagtggacaggtggaaaaagaatttttcgaatggccccattacatcatcattttgaattaaagggtattccagagtcgaaaattattattcgtttttggattatatctattacttttgggttaatagctctttctgcacttaagcttaggtaacataggaataaatatgctttctatagctaacaattgttgtatatctttagctcaaaatgaatggccattatataaagtagctgttgttggaactgggcgttcaggaatggcagctgcaagattattacattctcttggtgcttctatacgtatagtagataaaactagagaaaacgtatctaaaacctttatggattggattaaacaaacaaattgtgaggttatgtttggagaacattgtccaaaacagtttgaagatatagatatcgttattcctagcccaggagtccctcttaatttacttaagccacattttttgaatactattcaagtgttatctgagacagaactagcatggtatcagttgtctaatgaaaaagtcattgccataacagggaccaatgggaaaacaactatagcaagtttatgtgcagcaatgttggtagaacaaggtataagtgtttttgttggtggtaatattggaactccactatcagaatatgttttgtgtaaaaagaaagtaagtgttgttgttttagaactttcaagttttcaacttcagacatgttcactatttcgtcctgatatagctatatgttctaatatttctataaatcatttggattaccatagaaatatggatgaatatatttctgcaaagttgaatatatgtaaaaatcaatgtgaaagcgatcttgctattcttaagccagggatggaagcactagtagattcatataatttgaaagctcgagtagttttttatagagatttaggaaatttttctacaagtcgattattaggagtccataatcttgagaatgcagaagcagcttggctagcttgtaaagaactaggtgttacagaggagatagcaaaaaaggttgtaacaacttttgaaccattagagcataggcttgaacaggtaaggcttttaaatggtgttttgtatgtaaatgattctaaaggaacaacagttgaagcacttcgtgcagcgcttgaatcttttaagcaaccaatactccttttagctggaggtaggtttaaggggggagatctaacatcattacgtccaattataaaaaaacaagttcgtatagttgggctgtttggtaatagtcgagaatattttgaagatgcttggggagatattatcccaataacctgggataacacattagaacaagctgtaaaacgtctttcaaacttagcacataatggtgaagttatattactagctcctgctacttcaagttttgatcagtacatgaactatattgaaagaggtaatgactttaagcgaattgttcatgaggtgttgaatgagcattgttagacaacatagaagattatcaggatctaatcgacataaagatgatatcagtgatatagcatcatatgattggttgttactgactgttgttttgattcttttatgtatagggctgattatggtgttatcagcaagtgggatggtagcagagcgtcttacaggagataagtattacttttttaaaagacaatgtttatttaccattattagcggaattttattatgggttatggcagttataccacgctcattgatttacaaactccaatatccatttttgtttgtaattattggtttattatttttgacgattactccattaggagcaaaagtaaatggagcaaggcgatggatttctttagggttattttctattcagcctcttgaatttacgaaaatagcattagcactgtatcttgcatattttatgagtacaaaacaagaacttgtaaaaacatttagtaaaggcgtcatcccaccgtttgctgtaacacttattttggctattatgttacttgtacaaccagactttggtggtgcaatgattctaattatgattttattttttatgtgtcttgttggtggaacaaggtttatttatctttttttatcgatagctatgtcgtgtacaatagctgctgctttggtatggcattcaccatatagagcacgacgtcttgcagcatttcttaacccttttcaagatgcgcaaaatacaggatatcaactgatacagtctttatatgcattaggttctggaggattctggggagcaggtataggtgggagtaatcaaaagatgttttacctccctgaggcacataatgattttattatgtcagtaataggtgaagagcttggttttctaggtattaccattgtaatggcattattatttttgttttttgtacgtagttacttaatagtagtgaaacaaagagaactaagggatcgtctctctgcttttgctgtaacattagttattgcattaggatgtatattaaatcttgctgtgataatgggtatggctcctcctaagggagttgctatgccatttttaagttacggaggaagcagcttattagcaacaatgtgctgtgttggtcttttattaaatttttctcgaattggtcgttagtgttatgaaataccggatagcaattactactggaggtacaggtgggcatgtatatcctgcacttgctgtagcagagcagtttcatgataaagcagatctattttttataggatctcaatatgggccagaagcagagatggtaaaaacatttaatattcctttttatgggcttcctgtcagaggtgtgcttggaagaaagtggaaagctttctctgcattatacagtatgataaaagctatagtcaaagctagaaagattcttcagaaatgtatgcctgatattgtcgttggttttggttcatatgcatcatttgctccattagttgctgctaaattgaaacgtattcctactgctattcatgaacaaaatgttaggccaggattagctaaccgaatgttagctcgattagcggacagagtatttttatctgtgccagatacgttacatatttttactaaaaaaagtaaggttaggtatacaggaaatcctattcgtcaatctattgttgatttacattataaatttgaagatacaaaaaactcctctactagacatttacttgtattaggtggaagcttaggtgcaatagctattaattctattgtcgttgatggattaagtcgattgttttcaaataggattgttattcgtcatcaaacaggggtgcatgattgggaaagagtgaaagaaggatatgcattatatggtagaacaaattctcaggttactccttttattgatgatatggctgaagcatatcagtggtcagatcttgttttatgtcgagcaggggcaacaaccattgctgagttggctgcagtagggaagccatctatattgattccttttccttatgctactcatgatcatcaaacgtataatgctcaatttcttgtaagagtaggtgcggcagtccttattccagaaaaaaatgtagtagaggttgatgtgattgaaaaaattatagcattatttaacgatagagtaacgttagttaatatggctttagctgcacataaacatggacgtatagatgcagctacatgtgtagcaaatgaaattattgatcttttatcagctaatgcaatgaaatgaatagtaaaataaaaagtatttatatggttggaattggtggttctggtatgagtggaatagcagagattttattaaatcttggctatgaagtacatggctcagatattatggaatcccatattatccacaggctacgcaaactaggagctattatttctattgggcaccaggcagaaaatttaggagatatcagcgttgttgtaaaatctagtgctgttacagaagataatcctgaaatacagttagcacgccaacatggtattcctgttattccacgagctgaaatgttgacagagcttatgcggttacgtaagggagtggctattgcaggtacacatggtaaaacaacaacaacttctcttactgcaacagtttttgatacagcaggttttgatcctacagttgttattggtggtgtacttaatgcttatggtgctaatgcaagattaggacaaggacaatatcttattgctgaggccgatgaatcagatggttcttttcttttattgttacctattattaatgtagtaacaaatatagatcttgatcatttggattattacagaagttttgaagaaattgaacatgcttttgtaacttttatgaataatgttcctttttatggcatgaatgttgtttgtggagatgatcctggtgttcaacgtgtattacctagagtgaatcgtcaggttataacctatggttttgagtcatctaatcatatttgggctgaaattattgaatgtggaataataaataggtttaaagtcatagcccatggagagtgtcttggggaagttatacttacccaaccggggaaacataatattcttaatgcattagctgcaataggtgtagcattagaagtaggtatttcacccaaatgttgtattgagggacttgctaactttaaaggggtaggaagacgttttgaatataaaggggaaaagaatggaattactgttattgatgattatggacatcatcctatagaggtcgcagctacattagaaacagctcgaaaagtttttcctgatcgacgtattgttgttgcttttcaaccacatcgtttttctaggacccaagctttatttggtgagttttgccaagttctttctactgtagataagttattattaacagaaatttatccagctttagagaagcctattcctggaataaatagtcaaaatttagcacaaggtattcaacaaatttctaaaatagatgttacatattatccagatatagacgctgttttccatgcattacctcacgtgttgtgtgcaggagatgtgctgattactttgggagcaggaacaataacgacgattggtccaaagtttttaacttgttagctgtatgtataatatactaggatggtagaacatgctacaaattactacatcacctgatttatcaacactcactacattgaggcttggtgggaatgctatagcattaattgatgtctttgaaaaaaaagcgttagagcagttaccccatcagatttataagataggaggtaaacctcatattcttggtggtggtagtaatattcttgctagtgatgggagtctgccatttgttcttatccgtagcaaaattcttcatgatccaatagttacatatatagatgaacaaggagttgtttttgtaaaagtttgtgcagcaatggggttagcacgttttttagcttggtgctgtaaagaaggtttatctggaatggagaacttagcaggaattcctggaactattggaggcgctgttgctggtaatgcaggttcttatgggctttctattggagaatgtatttatgagttagagattttttctttcaataatggtatgaaaatattgaaaaatgatgaaatacaatatgcatatagaaagttttctattgatgaagaaccaggggaatttattattataactgccactgttaagttaaagtataagcaaaaacagcagattattgaggtaattagagaaaatgttgcaaaaaaaacatctgttcaacctgtacaagcaagaagtgcagggtgtatttttaaaaatcctaatgatggattatcagcaggaaaattactagagcaagtaggatttaaaggaaaagggaaagatggaattggtttttcatctattcatgcaaattttttaattaatgaagggagtaaaaacagtaaaatagcatttgaacttgttcaagatgctaagcaagaagttcaaaaatcttttaacatcatacttcaaacagaagtaaaggtatggtcatgttaaaagataagagaagatacaaagctaacaattataatagtaggatagcttcttatccctccctacatattagtaatgagaatattagatttggatctattgttacatggagttgctggtgttttattggaattatcgctttaatattattttattttagtggattacatctttatcgcttgataacaacaagtaattttttctgtatagaacgaattaatatatatggagcttcttttttccataggagtgacatacttaagtatacaaatcttcaaactggtataaatagtttttctgtcaacattgggaagatagaaaaaatattaagtagtaacccatgggtagaaaaagtatctgtaaaaagaaggttacccggaatttttgatatttttattaaagaatatgaacctagcttttggatccttaaagatgatattatttattatgcagatagtgttggaagaataataacgccattagatacagataactttaaatctttgccaacacttgaggttatggaaggtggggaaaaatttttgccaatacttaaagatttaattgtttttttggaatcttcaaattcaataatagatgtaggtacaatttcatcagtacgtttaagttcagctagtggcattgaaatactccttgaaaattatgatattgtgttaagttttgaacctcaggcatggaaagagaatttacaaaagttgtgtttagttttgtcggacttagcttgtagaggggaattaaaacaaaccagatctgtaacagcagtagcaacaggtgtttgggtttctcaagaaaaaaatttttaactgtatagagtattaaagtttatctagacttttctaagaaaatatgatgtagcaataaagttatatgggtttgtatgaatcataacaaataatactacttgtataatattatttaaaaaaaaatactcaatagtttttgttgttataagtcgatcattattaactttggtttaatttatttaaggaagtagacatgcctcagtccgaattaattgttggtcttgatataggtacaacaaagatttgtgctgtcgttggtgaactgtctggggacgggagtgtcgatgttattggtataggtacaagcccttctaatggtcttcgtaaaggtgtagtcgttaatatagaacagacagtccagtccattaaaaaggctcttgaagaagctgagttgatggctggttgtgaaattcgctcagtatatgctggaattgctggaagccacattaaaggttttaacagtcatggtgttattgcagttaaaggtggagaagtatctcaaagagatattgatcgtgctcttgatgcagcaaaagctgtagcaatccctttagatcgagaagtaattcataccttaccacaagaatatattattgatgatcagagaggtattatagacccattaggtatggctggtgtgcgtcttgaagtaaaagttcatattgttactggtgctgtaacttctgctcaaaatattgtacgctcttgtcataaaagtggtttagatgtttctgatattgttcttgagccattagcatcttctaagtctgttttaacagaagaagagcgagaaataggcgtagcacttattgatcttggtggtggtacaagtgacattgccatttttgcaaatgattcaacaaaatatacaggggtgcttccacttggtggccaaaatcttacaaatgatatagcgtttggattaagaacaccagtagctgctgcagaaaaaattaaaataaaatatggatgtgttcttgctgatattattcaatctgatgaatatatcgaagtccctagtgtaggcgggcgtgagccccgaagattatcacgtcaagtattagctgaaatttgtgagcctagaatggaagagattcttacacttattgatcaagagatagtgcgttctggctttaaaaatatgataggagcaggcgtagttcttacaggtggaacagcccttattcaaggctgtcaagagttaggagaacaaatttttaacttgccaactcgtataggatatccaagaaatgttggtgggctgaaagatatggtaaatagccctaaatttgctactgctatgggattacttcattttggtgcagaaaaagaagggatggagcaaagatttcgtattcgtactgagcacacaatatttaactcaatattatcacgtatgcgaaagtggtttgctgaaatttcgtaaaatagtaactatcttttaacaactatcccctgttaaaagtggagggatataatggaaatgctttttgatacaatggttcctcaagctaaaataaaagttattggtgttgggggtggcggaggtaatgctgtacagaatatgatagaatcctctttaaggggtgttacttttatttgtgcaaatacagatgctcaagcacttgctcgttcaaaagcagatatcaaacttcaaataggagagaagcttactaaaggccttggtgctggtgctgagcctgcagtaggacgagatgcagcacttgaaagtattggcgtcattaaggaagctattggtgagtccgatatggtttttgtaacagcaggaatgggaggtggaactggtacaggtgcagctcctattgtggctcaagctgctaaagaaatgggagcacttactgttggtgttgttactaaaccttttgtttttgaggggcacaaacgttcccgttcagcagactatggtataagccagttacgtgagtatgttgatagtcttattacaatccctaatgatcgtctgcttacaattgctcctaaaaatgctaagcttacagatatgcttaaatgtgctgatgatgttttatatagtgcagtacgtgggatatcagatttgatcacagtcccaggtataattaatgtagactttgctgatgttcgtacaataatgagtgtctctggtcttgctatgatgggaacaggttttgcttcaggagaaggaagagctatagaggcagcccgtcgagctattacaagtcctcttctagaagatgtctctattacaggtgctaaagcaattctcattaatattactgccacaactgaacttggaattgatgaatatagcgatgcagctaattacatccatgaggcagcacagggatctggagatactaatatcattataggtacagcttttgatgaagaggctggtgatgaaattcgtattacagttatagcaacaggaattgaatctcaggttggtgtgaaaatgcaaggttcaacatcttcaaaggcagctatgccatcttttagaaagtctagccatattacaaacacaacatcatttaaacctgaagcaataaaacataatttggcatctgaaaaaccacggtatagaactccaaggttattaacaaatcctatagagatggactataaaactcaaggagatcatagtgaaatttttacagaagatacaggggtaaattatagtattccaacgtatctcagagcattacttggaaaacagggagcccagtcttcaaaagaggaatatgatagaactcaccatggtgacaacaataagaaggatactcataacccagggcatgagaattttgtttttgatggtaatgagcaagatattccgatttttattcagaaacaagctaattaaaaattttagtatagcataataaataaaaaaccccattaattggggtttttatttctaatcttattaatagtttcacagctaccttcattgtagtggatgaaaagagatatgtatcttgagatagagcgaaaatttttagtgataggtgatgactggaagtgcaataattctgcagtattatttaaacagggttatatacagacctctccatgtgttgtgcgtgtacgtatagaaggggtaaaaagctatttaactattaaaaaacagatagaagggattagccgatgcgaatttgaatatcctatccctatggatgacgcactctatttacttaacaatctttgtaaaaagccattcatttctaagcatagatatactgttttttatgaaggtattcaatgggttatagatgaatttttagatgaaaataaaggacttattattgctgaagtagagcttaaaataaaggatcaatctattatactaccttcatgggttggacaagaagtaagtaatgatccccgatattataatagtaatttagtacaatttccattctctcagtggagcttatcagaaaagagttaaacttttttaagggataaagaaggtgttcttgcaattatacaaacatcaatagcttgagtatgctgttttaataaagcttttgtagcttgttgtagagttgttcctgtagtcattatatcatcaataagtagaatacgtaatccttttacacctggatctgcttggaatgcgtttttaatgttaagaagacgttgtgtctgtgataaccctgtttgatgggatgtaggtataacacgacttaagaggtcatgcctaagtggcctttttaaagcataagaaacaggcctagctaactcttggcattgattaaaacctcttttgtgtaatcgagaaggatgtaatggcataggaataatagcatctggagtaggaagttttaagcaacattcagcaagtagtatccctaatagttgagtgatacttggattccctttaaatttagattggataagaagttttttatactcgccttcataggcatttaaaaaatagaaatgttcccagcttggtggatttttaagacaattattacaaggagtaataggtgactgtttatctttattaagttctccacatgatgggcaataaccttttgtgcgtggttgtaatagatatctgcactgtaaacaaagttttttctttttatttaaactgttatttatttttggttgttgtattttaatagaatgattagtttgcacaaatggtatatgacataaggtacatcgcttttcataccttattgtatttataattgaatatagaaacttaaacttcatttttcttaacttaatttagattgaattattttggcaaatgaagacacttgagcttgagcttcattagagtgtgaaaaatcatgaggtccatcaagatcacgtagaagcagtgtatcacaaagagaaaaacctatacattggaaaaagcattttaagattaataaagttgcctcaaatacacgctcgcctttatttcttgctgcaataagagtaacaaaagctggttttaaaaaaggattattaggaattggttcatataaggtataatttgagttattccaatacttttgagacctatcaataaagcttttgagttgtgcaggtgggccatagaaaaaaattggtgaagcaataataagtgtacttgcagcacggattttatcaaatagccaacctacttcatcatttgcttcaagaaaacattgatctggatgtgttatacagaatccacaagagatgcaaggtctaatagataaagaacgtaatgggatgatttctataggaagtaggacatcatttaattctttaaaaagagctgctcctattgagtctgtatttccatttgctctaggactacatgtaagtaggataatattagacatgctctttctctacggttatctgttaatcataattttttatttatgatatatggtttttattgatttatttgtagcttattgaaagatccattctaatagtgctttttgcatatgaagcctattttctgcttgatcccacacaagagacttttcgctttctatgacttgatcagaaacttcttctcctctatgtgctggaagacagtgaagaaattttacgcttggcgttgcttggttcattagtgtgttatctacacagaaatctttaaagtcttctatacgttttttacattctttttcttgccccatagatgtccatacatctgtgtaaatataatgagcatcttttacagctagcagtggattatttgtaattgatatttttgcattatttttttgagcaaaatcaataagttctttgtttggttcatatcctttaggtgtagctattgtaagtttaaagggaaagtacatagatgcttctatccatgagttgagtacattattaccatcaccaacccatgttatattgatatttgcaatatctgaagtttgctcgtatatagtaagaagatctgccattacttggcatggatgaccatgatcagtaagtgcattaataataggaatagagcctagttgtattagctcataaagtcttttttgttcaaaggttcttataattatacagtctacatacctagaaagtacacggatagtatcttttaaaggttcttctcgtccaatttgggtttcattaggtgttagaaaaatagtagtacctccaagttggcgtacagcaacttcaaaagaaacacgagtccttgtagatgctttttcaaaaaggagggcagctactttcccctgcatacattgatatggattagttttgtgatctttcatttcttttgcacgtagaagaagttcccatgcttttgactgtccaagatcagctattgttataaagtgatttatcatatgtagcttgttgatataggtaaattaaataagaagaaatgtaatcaacctctttaataattaataaataacgttaagatagagctctaagtgaaagtattatattttttataatctttttttaaagttaacgttagtattaactaatttataattttttcttctttgatagttatttttgcttgtttctcaagcatagttaagaaacctttaaacatctgttcacgttttgactttacaattgctgacataaacgcttcttttatgttatcccattgttcttttgatggatacacaacttcttttgagacataagcaatcaggacaccctgttcaactgtataaggtgttgtaagccagctgcctggtgttgctttaaaggtatcgggaactagttgtgggttcttcaagttttcaatggttgctgaacgtattattgctgggctagtttttaaatttttagctactgctggtgggatagatgaattttttaatatagtaagctgttcttctgctgctttcatggctaactcgttagctttttgtttttttaatagactactaatttgattttctaccacttcgattgattttattgattcaggttttatatcttttactttaatgataacatatcctgttttagtaataagcggattttctaatatagtcccagggctaacatgagttaacttagagagctcatcaggtttagccagttcaagttggcttgctatatcttttatagggaataaacctgtagatatgggggaaagattatagggttttcctgcttctgtaagacttttattttctataagagcaagttgaacattttcaaggacatcttgaagttctattgatgctttatcttctgctaaacgttgttgaatcgtttttgaaacttcatcaaaactttttatttcttcaggctttttatcgattaatttaataatatgataacctacaggtgtttgaataggttgtgatatttctccaggtgttaatgaaaatgcaacgtcagcaaaagcaggtacagcttgttcatatgtaaaccatcctagatctcctccattttgagcaacattatcttgagagaattttttggctacacttgaaaagtcctcgcctttttttattgcattggctgcttggttaattttttcttgggctttttttagaacttcaggttcactattttctggtgcaaagactacaatatgttgagcatgaatttgttcaggggatttaaagtcttctttatgtttttgatagtattcagagacagttgtgtcatcaattgtttgattattagctaaagatcttggggtaataagaagatattctaaattaagttctgtaggtgttttaaattgttctgatgattcattataaaatttagctacttcatctgctgatatatttaccttgttaaggtagtcctctgtgggaaaaagtaggtattggatagtacgtgtagcactttcatacatatatacgtcataagcttcagtaggagaaatataagctcctgccgtaatttcttgttggattttatttataaggagatttgtacgtatttgtgattcaaagtgtccaggggtgtcatttcgttctttaagaaattgtaaataaatagcaggatcaaatttaccttcagtattatgaaaggcaggaaaggattcaatagtttttcttaattctattggtgtaataataagacctatacgatttgcttcttgcaatactaaagtttcaaggattaactgttgtgtggctaattgtttaattcgaaatgtattgatttctgcagcagagatagtaggaaaattttgtcgtatattttgttctatttcttcacaacgtttttgaagttcttgtattgtaatagactggccatttacagaaacgacttctacttctggtcctcctgagagagtgccaataccccaaaatataaagacaataataattaatccaaaagctattttgaccccccaagattgggcatttgatcgaatgaagtctaacataatatctccacaaagtgtattttctgcatacagttcatcttaatttattataaattaacgatttgaagttttaaataaaatttttattattcatttagcgaattatcttttattttaattatagtgcttaaatattattctataatagaattagttagtctacagaagtaacataacaagtacatctgtaatttaagttatctaatagatatacctggaaataatttttggatcaagttagatatttatactatgttatttctattgtctatccttactgtaaagtaaagataaactaaatagtaaaaccttgttctttgtattcattcagcttatttcttaaagtacgtatagagatcccaagtagttcagctgcttgagttctatttccagatgttgcttctaggccttttataatcattagtctttccatttcatgaagtggaataacggcattagggaatacagaagaagtggtagtagcagtggtagattttgattgtggatgtgtttggagcgcttgtgtagtattagatatagtaataacttcaggtattatagactctgtttgttgctctagcggaacttcatcaaaaagaggccattcttcagtttcaaggagaaaatgattaggggtgattaatcctcctccagcaagaagaacagctcgttccataaggttttgtaattcacgaacatttcctggccaattatgattttttagccaggtagtagcttcttgggataattttgttggtttaagatgatattcttttgtatacatattaataaagaaattagcaagttcaagaatatcatctccacgctcggctagtgatggaagacgtagtggaatcacattaagtctaaaaaagagatcttgacgaaatttgccttcatctacccatttctccatatctctattggtggtagcaagaacacgaacatcaactttaattgtttctgtaccaccaacacgatcaatctcaccctcttgtaatacacgtagaagttttgattgaagagcaagatccatttctgaaatttcatctagtaaaattgttcctccagaagccagttcaaacttgccaagttttcgtgcaatggctccagtgaaagaacctttttcatgaccaaagagttcgctttctaaaagatgttctggtaatgcagcacagttaactgcaatgaatggccctttacttcggttactccaagcatgaagtgtacgtgcaaacatttctttacctgttcctgactctccagatattaatactgatgccttagaaggagctacttgctttgctagtgcaaggacacgtcgtatagcaggattgcttccaataatagtaggtgcactagaaagatcttctggcttatgaccatcaagagttgactttgaaggtagtggggttagtttatatgatttttggagaacagttttaattttttctgtggaaagtggttctagccaatagtcttgagcacctaaagtcataaggcgttcagcttcttctgtagttcccttgtctgtggtaaccacaataggtggaaattttggatcttctttagcaatattaaaaagctcctctactttatacccaggaagtgtaggtcgtgaaattatgatatctggacgtgatttttttattgcagcagaagcactgtttatattttcagcaaggctcacttctattccagaatctcgcaattctgggaagatgcgagtaatgatatgtgatggtgcaagaaaaagaatatgttgtttcatcattgcttgaaagcttattagctaactattacagggtatagaatataatagcacattaaagagttatagtaaaaagattaagaattatttatattaatatatatattatgtaattatgtagtatattcacctatctttttttattagttatatatgttattattataattatacactataattaaatagataaattatatactataattaaatacataatctgaaatagtatattgaagtaattttaacatatctactttataaataataactgctcaataattatggataaacatacttttgtacttgactgaatgtaaaaatacatgtgaatatccttttaagaattattattaaattataacatatatacatagagtcgttgttgtggtgtattaaatatcagatgatttaagctttaaggatataattatgaagtgtaatcagtgtgaacaaacagcagctaatgattcctgcactaatattggtgtttgtggtaaaacagataatgtgagtcatcttcaagatgtattaatttatgcattgagacggttagcacatgcagcactttctgcaagagctaagggaattattgttcctgaaatagatttttttactgttcaggcattattcattactcttacaaatgtaaattttgatcctaatgttattgagaggtttatcgaacaagctataataaatcgaaaaacatttgctcaattaagaggttgtaaaattgataatagtacacgtcctatagaagaagtaaaatctatgatgagtatgcctacaggaattgatgattttcataaagacaaaaataactgttcggctatgcaaatgctcctttatggacttaaaggaacttctgcttatgcataccatgctgcagtccttggtaaagacgatccaaatctatatgagtttatttatgaagggttagcagcaggtttcccggatcgagaggggaatattgataaggagcgaacacttagtgattggatggatttggttctgcgttgtggaaagagtaacttacgtgctatggaacttttagaatctgggaatgttgaatcttttggtgtacctacatctacaaaagtttctcttggtcaaaaaaaaggaaaagctattttggtttctggtcatgatctgaaagatctttatgatcttttatgtcagacagaaggaactggtattaacatttatacacatggagaaatgcttccagcacatggctatccaaaattacatgcatttacacatcttgtaggccattatggtactgcctggcaaaatcagcataaagaaatatctttattcccagggcctgttctatttacaacaaattgtattcagaatcccaaagaatatattgaaaatgtttttacttcaggtgtcacaggctggccaggtgtgcagcattgtaaagatggtgattactctaagcttattgagcgtgcaaaggaacttccaggtttttctgaagatgttccaggaaaagagctcttaacaggatttggtaagcaatctctacttgatgctgcacctgttatccttgattcaattaagtctggagtccttcaacatatctttttagttggtggttgtgatggtgcaaaacctggacgtaattattactcagaatttgttgaaaaagcgccagataatacagtagtattaactcttggttgtggaaaatttcgtttttttgacaaagatcttggaatgataggttctcttcctagactaatagatatgggacaatgtaatgatgcttatgctgcacttcaggttgttacagctcttgcagaaattcttgactgtggagtgaatgacttacctgtttctcttgtgttatcttggtatgagcagaaagcagttagtattttattaacattattagccgcaggagttaaaggtattcgattaggacctagtcttccatcttttgtttcagaagatattttacaattgctggttaaggaatggggaattgctcctattacaacaccagataaagatattgctttattaatgcagtaagatattatagaatgtattatatgttataatatattaatgtataactatgagtaagttatattgatagagtctcttgcaaaagagactctgttcatttatttttattatgtatttactattgaactactacaaattgtaattatagttatataagagttataatttgatagttatatataaaaagtataaaaaagctaatctatttatatattgacatatatattttatatattgacatatatacaatgataaattttttgtttgtttttatagtatgatctagtagtttttctttatctaggagggactatggcacaaacaaatattttacttgaaactggaacaaatgagcttgaaatagttgagttctacattgatgagccggactatagaggctattatggcataaatgtagctaaggttgttgaaattattagagaacagcctgtcacagctatgccagaaatgcgtcatccatcagtaatgggtgcatttttatatcgtaatggccgagtcgttcctcttattgatctatctgtatacttaggtggtgcaccaattaaaaatacagattcacgggtcattattacagaatttaatatggttatgaacagtttcattgtgagtggtgtaaaccgtatccatcgattaagttggcttgatattgagccacctgggaaatttatccaaacaatgagtcagagttctatcacaggcgtagttaagatggatgatagagtagtttttattttagatcttgaagcaattgttgcagaattacatccatctttagctattcgtatggatgaaacttctgatcatgatgtacctgaacatccatataaaattcttcatgcagatgattctgctagtattcgtaagttaatttactctcttttaggaaaagaaggacgctttgaagtaacacaagctgtagatggtcaaggtgcttgggatttattaatgaaatatcgtgatgaagctatagcagaagatagacctattactgattttatagaaggtgttatcacagatattgaaatgccaaatttagatggtttaaccttgtgtaaacaaataaaagaagatagcgtattaaaagtgattcctgtggctgtattttcttccttaatcaataatagcttaattgcaaagtgtaaaaaagtaggagctgacgcacaatttgctaaaccagatcttcaatctttaagtgatagtatgtatagtcttattaaatctaaagagttagagctttctcgtaaaatatgacaagaagctatcttttttgtgcgtttttgaatatatattatgaatgaagtgttaggagttattgcgggtagtggacagttcccatttatggttgtgaagggagctcaagagaaaggctataaagttattgtttgtggttttcatggacatacagatagcaagttagaagatattgcagatcattttgaaatgatgccattaggccaatttaataggttgatccgtttttttcgtagatcaggtgttattgaattatgtatggctggagcaataaataaacctcgagcactacaagttagaccagattttagagcttttcgtttatacttttcgctttgcaggaaaggagatgatgccttatttcgaacaattataaaggagtttgaaaaagaaggttttttgatggtttctccttcaacttttgtcccttttttacattgtcctcctggggttttatctaataaacaacctgataaagatatattagctgaaataagttatggctggcctattgcaactagtttaggaagatttgatataggtcaactaatagttgtaaaacagcaaatggttatagctatagaatgcttagaaggcactaacgcaactctacaaagaggtgctgaacttggagggaaaaactgtgtggctattaaaatagctaagcctattcaagatgagagagtagatttaccagcaattggtcttgaaactattcatttattagtaaaatatcagtttaaatgcattgctgtttcagcagaaaaaacattattttttgatatgcctgaagccttaacattagctaataaacataaattatgtgttatgtctttatctgacacagatattaggtagatttataataggttatagttatattatttaatgcttaatagaaagagagacaaagaaaatttaaactatcccatcagaaaaaagtgaagttacagtctgacaggatagttatattctaattattaaaaaggagattataaaccttttgtacgtaaaaagttagataaatcagcaactctacaagaatagccccactcattatcataccaagaaataactttagcaagattatctgtttgaactattgtatattcttcttctacaatagaagagtgagaatctcctttaaaatccatggatacaagtggagttctattataggccataatacctttgaggtaggtattagatgcttcttctaatgccttgcggattgtttcagtgtctgaatttttctttaatatagcagtgaaatcgacaatggatactgttggtgtaggcacacgtaatgaccagcctgtaaattttccttttaattctggaataactttagctacagcttgtgctgcacctgtagatgtagggataatattgcaagctgcagcacgagcacgacgtaaatctttatgtggtagatcaagaatacgttggtcgtttgtataagaatgaacagttgtcattgttccagattcaataccaaaatgtttttcaagaacaagggctattggtgctagacaatttgttgtgcatgaggcattagagataatattatccttagttggatcatacatatcttggtttacacccataacaatcataatatcttcaccttttgttggagctgtaataataacttttttggctccattattaaggtgtactctagcttggtctgcagttttgaaaattcctgttgattctataacaatatcaacaccaagacttgcccaaggaaggtttgttggatctttttctgcaagacattgaatagtccagtcaccaataataactgtattaccattaatatttgcatttaagttagctcttccatagttagtatcatattcaagaagatgaaagttagtatttgtatcataaagatcattaacagcaacaacttctagttgttctttatacatagtataaattgctttaaatgtttgtcttcctatacggccaaatccattaatagctatccgtgttttactcattatttactccttccttataacataagtaatgggtagtatacagttagagagaggtaatagtactgcagaattttttttaatgctactactatgagacaatgaacttatatttgagctactaattaattttgtttgtaaattgttatacaatatagctctattatataaaaaataagataactatataatactaattaggtatattttataactgtaattaatttttaaataacaatatgttattgtgataattaagttgctacagttagctttaagtataacttttattttgtaacatttattattttattcaattattattttattcaatgaattccagttgtttttcttttttataggctgtgagaatagcatctatgatatttcctcttatagcagttctatccatatggtttatagctgcaatagtaatacccccaggagaacaaacttgttcacgcaataaagcaggatggtttccaggttgagttgctaatttggctgaaccattaagaagttcacttaccatataaatagactgttgacgggggaatcctagtgttacagctgcttcaactaatgcatccataaagtggaaaacatatgcagggccacatccaataagagctgtaaaagcactaaattgcttttctggcaaaattattggtaatccaataagagaaaatagatcaatgacactttgtgattgctcattagaaagttttggatcttctaagcaaagagcaaagattcctgatccaacaagcgcaggcgtatttggcattactctaataacaggacagaaggattcaactgcttctgtaagcattatttgtgtgatacctgctgcaagtgaaataataatatgacctggtcttaagaacggtaaacattcttttaaaataggaactacagcagaaggttttgttcctaatatgatgatatcattttgttggataaggttaggtatagtgtcaatagattgaactcctttttcctcaagaggtgctaatttttcaggtgtcctattgtaaccagaaaggataagaccattatcagggtgtgccattggtacaaggctagatagaatagcactacccatggttccacaaccaatacagccaactcggacaccaacaagagaatcttgacagagcattaccgtatcctttcaaaggcattaaaaaaataattaatctctattattgcattttcatcagaatcagaaccatggacagcattttccattaaactaattgcaaaagattttcgaatagttccttcctgtgcattttgaggatttgttgctcccattagttctctatagcgagtaacagcattttctcctgttaatataagactaacaatagggccagagatcatgtaatcaacaagttcattaaaaaatgggcgttcacggtgtacactataaaatccttcagcttgttgacgattcatttgtaacattttcatagctgaaatataaaagtcatttttttcaatcatgttaataatagcaccaatgagatttctttgaacagcgtcaggcttaattagagcaaatgtgtgttgcataattatgaattcctttagtaagttaaaaattattttttagaaaagtagtctgatttgactgtttctatatagataggttgatatcttagtggtacaatatggatagaggtatccctcaatgaaatccatttttttaaggcagatatagtttctggataaggatgcccaataacaatagcttgtcctttttcaatagcatatttctcagctttttttaattggtttaatatagatgattcagtatgatgtccatggtcaataaaatgcgttcgatagtaagctggtaatccttttcccttagctatattataaaatgaggatgaaggatgtgttttactatctaagacaaagagaccttttgatgcaagaattttacatacagtatgatttcctttctcattacatgtgaaacacgatcccatatggttattgagtcctgaagcatatggaattttttcaatatttttacaaagtatgtttgaaatttcttcagcagacatttttgtatgtatttctccaggccctgctgagacatacggtgactgtatagattccattggttgatgtataagaacctcatttcctgtactatgcgtaagcatggcgatagatttagcatagtgagtatgtggcaaaattgaaagtgtaataggaaagtcaagcttaataagctgattagcagcttctatgctttcaccaatgtcatctattacaatagttattctaggtttttcatctatagggcattgtataaacttttcaccagtgggaataaaaataagttcatgagtggtaatttcatttatagaaagtttatagatgtgttctgagcatgctctaagttttatttcgtctgcccaagcttctaaattttcttgtaaattagtaacaaaatattctacactatgtggcaaaaagatttttatttgttgaaatcggtatgtttcatttttattatgatagtattttgttaataaagggtaaactctatccttatggatatctagtcggataaatgtttgcataagagcaaaatctgtttgtcgtatcctattggtaagtgaagttgtggctttttcttgataaggtaagtcagtgtgtaggaaagactccctataggattgtccttttgggatttttaatgttgaaagagtttttttaggactttcaagtgatgtgatcttatctggttgaaaaaaatgtaatgtggtagaaataagttgataagaaatatacccagtggataaaataactgcagtaagtaaggatataagaccagaccctaaaatggtacgtgccatatgagggtagggctgtagtaaatatatactatgcttagaaaaatatttgctaagtcttgaagacattgcgtcatatatttttacattgcaaataataactaaaattatagcaatgagattaatttgttataatatattataaaagtttactagttttattcaacttattatatgctaactgaactgtatctgttataaaatttatttttgccgtatagtatatatcatgtcaataagattatctagtcttaaagataaagtgtttttttattaaaaaattaatttagataaaaataaatttgtgagtatcgttagtgagtactgagtatagtcacacattttttattaattaggttatagttattgtacagttattgaatttggcgaaattttggtaaagttttcactagttgtaaccccattcgaagttgattatctttatttaaaaattctttaacttctggtaaaggttcttttttgttttgttcagatttttgattatttttagtgttcttctcttcttttgtattagaagtatttttttccaaatgtttacgtaaatcttgctctctcatcatatgaagagggttttgtgtttgtgtagctactggatttggatcaaaaggaagttcaatatctggttgaataccttcagcttggatagatcttcctgaaggcgtgtaatagagtgctactgttaacttaagaccagtttcatctgcaagagggacaatattctggacagaacctttaccaaatgtgcgttcgccaacgattaaagcacgtttatgatctccaagagctcctgcaacaatttctgatgcagaagcagagcctgcatttaccaatacaacgattggagcagtgatatcacttgtattattggttgctttaaattctttactgctttcttccattctccctctaatagaaacaattgttccttctttaaggaagacatctgtgacactaattgcttgttcaagaagacctccaggattacttcttaggtcaagaacaataccttggataggcccttttttagaggcggctttaagtacttcatttaattctgaggtggttctttcactgaatcgactaattcgaacccaatagtaaccaggttcaagttctcttgatttaatactaatgagtggaatagtctctctttttatttttatagttgttggctctttagcatccttatggagaatagtcagttctacttctgtttttttaggcccacgtataagagatgcagcctcttgtaaggacatttctgaagttggacgtccatttacagctaaaatataatctccagctttgattcctgctttgtctgcaggagtatcatcaataggagctactactgtaaggtgattattctcttgtgtgatttcaataccaataccacaaaattctccagaggtagcttcttgcatctctttaaattcttcttctgtaagtaaagtagagtgtgggtcaaggctttgaagcataccttttagagcaccatcaacaagttctttgcgtggaacttctttaacataatagcgttcaacaatgtctaaaacttggctgaagcgtttaagtgcatcaaatttatctgagtcagatacagcagcaataacacaacttccaccaataaaaaggatactacctgttaaaataagggcagctacccgtaaccacacacgcatagactcctccaagcagaataatgaaaaataagattagctataaatagttaaaaaagcaatgtgtgacctaacaatttaagcaaatatcgtttaattcaaacagagggcactgggagcaaaggggagtttttttatgacaccaatgcttgcatgttcggacaatgagagcatgatattcattaaaaagttgaagatgacatggaaggttttctaaaaataatgagcggatatcttcataactagctgttggttgaattagcttatgtctacttaatatacgttttgtgtaggaatctacaacaaaactgggcttgtttaatgcataaagtaaaatagaatctgctgtttctggcccaacaccatggactaaaaggagtttttttcttaaatgttgaagggagatatctttaagtttttcaaaagaaaaagaacaagatgatgcaaaaaattgtaggatagcttttagtcgctttgtttttatattaaaaaatcctgctggtttaataagattagaaagttcactatctgtaagtgtaagtattttatttccatcatggaggacacctgcatttcggaggttgcagagagccttttctacattggtccatacagtattttgtgttaaaatagctccaataataacttcaagagtagtttcagctggccaccaaccactagcttgtaatttatttaataatttttcgtatatttctattaagatagcttgatagtttatttcagggttcataatgtatttttagaatattacttttattttagatagtattatcttcagttttttcagttgacaggatagtaaggtagaacgtagatccgtttttgtatatagggcagttagctcagttggtagagcatcgctttcacatggcgggggccacaggttcaagtcctgtactgcccaccataataaatacaaagaagagtgattacctattgatatatatgtaataattttttttactagtctagtgttaataaaaaaataaaaaaattataaaaatagttgcaagtaatggatattttttatataagcacatttcgatatttataggctatattggagcggtagttaaggtggttataacgccggcttgtcacgccggaggccgagggttcgagtcccttccgctccgccaatttttttaatttcatttatcttttattttctagttaagatggtgtaaattttttcagtcgtaatgcattaaggacgacagatatagatgaaagtgccattgcaagaccagctagcataggtgaaagtaaaggcccaccaaagagttttaatatacctgcagcgattggtatacatattatattataaccaaatgcccaaaaaagattttgtcgaatattcctaagagtagcacggctcaataagagtgccgaaactaagccagatagtggatgatttgttgataaagaattaagaagaacaatatcacttgtttcaattgctatatctattccacttcctatggctattcctacatcagccttagcaagagctggtgcatcattaataccatcaccaaccattccaacacgaaatcctttatttttaagttcttggatagcataagctttcccttctggcattacatcagcaataacttcattcaggtgtaaatgattagcaactatttgagctgtttgtttactatcacctgtaagcataattgtacggattcccatatgctgtaattgttctgttacactattactttcttctcgaataggatcagttactgcaattatccctgaaaactgtccatttatagctacaagtaaagatataaagctttgtcctgcaaattcttcaagggttgttattcctactttattgtctaaagaaatatgatgttcttcaaggaatgttttgttaccaactaaaacagttatagattctgtcttcacttgaagttctccacgtactcctcgaccaggataggacataaagtttataacagggtaaagtacaaggccatgtttatgtgcagctctcacaatagcatctgctaaaggatgttctgatacagcttctaatgaggctgttatacgaagaagttcattatctggcattgtttttaggggaactgtatgaataaggtgtggttttccttctgtaagtgttcctgttttatcaaaaacaatagtatcaagatctgctgcatattcaagtgctgcaccagatttaataagaagtcctaattgtgcccctcttcctgtggcaatcataattgacataggagttgctaatcctaaagcacaagggcaagatattacaagtacagtcataacaatacggatagaatctgcaatagatgtatcgccaagtaacaaccatgtaagtccacttactaaagctatagctataactactggtacaaagataagacttatttggtctgttatacgagatattggtgctttagaaccttgtgcttcacgaactaggcgtataatgtgtgctaacgctgtattaagtccaactttttctgcatgcataagaaacatgcctgaaaggtttatagtaccaccaataactttgtctcctacagttacaaaaacaggcatagattcacctgtaagcattgaagtattaatgcttgaagagccttttaatattttcccatctacaggaacttttgagccaggacgcacttgaacaatatctcctacttttatattgctaagaggcacttcctcaaaagattcttcttgatcagatagagaagaaaggcgtaatgctgtttctggaactaagttcattaatcggcttattgcatctgacatcctgaagcgtgagagcatttcaaaatattttcctaaagaaatgagtgtaataaggacaactgctgtttcataatagagactaggttcagtataatagtttccaaagcttatttctattgtggaccatatactatagattatagcagcgctagtactaagagcaacaagtgtatccatattaggactcattttccagagccttgagaatcctataaggtaaaaatatctacctgaccaaattacaggaatagttaataaaagttgtgcaatagcattatttagaggatatgttttaggattaacaaatacagggacaggaactccccacattggtcccattgaaatgaagagaactagtatagtaaaaaagaattctataataaggcgttgtttgagttcctctaagtaatgagagatggattcttgttgaagaatccatgttttttgttcagcaagatcttctgctaagtagttagcaataaaaccagttttttctgtttcagaaatgacttcttgaataagcttttttatattagcttcagggattggaataactgttgccattgaattattaaggcttacagtaacagattgtatttcaggaatattacctaatgtacgctcaagccttgaagaacatgaggtacaactcatgcctttgacaataaagttcaatgtctgttgtttagacacagttagctccaacagtattaggttgctatgcaacatgttataagcaagaacaaaatatttcttgtattgtttataatagttataataattttattatttcatcaccttatgtattaagattttctatttttgttgtatataagtctagactagtatatcgtctaccagttattataaattttagatctaaatatttctgtaatagttttaccagtaatatgtgttagtaagtagattatgcatattcttctttatcaacctgagatacctccaaataccggtaatattgccaggttatgtgcagcaacacatacacctctccatcttatagaacctttagggtttaagctagaagatagatatttaaagagggcaggtcttgattattggaaacatgtaatattaaaagtttggcctcaactagatgattatttactttcagatggattaggacgacggcttgttataacaagcgcacgtggaggggtagctgtacatcaatttatgttttctgcagatgatactcttgtttttggtcgtgaaacagcaggattacctaaagatttaatggatcaatatgaacataaagtgcgtattcctatatatagtacagtcagaagtctaaatctttctacagcagcaggtattattttatatcaagcactatctataactggtatgcttactaagataagttgatcttacattataaaaatttataactgtaataggttatagttaatttagaagaatgatgtgaaaataaaaaataaataccaacaaattcaagaaatatggcaattgacatggcctcaagcctctatgttactatgccaattttttattagtattacagatgtttgggcagctggtcagttaggttcagaagtgcaagcttcaataggtattattgctcaagctcaaatgttattattatctcttgtcatggcagcatctagtggtgctgtggcatctataagtcagtctcttggggctaaaaaatacatcagagcacagcgttatataggacttgttgtttttagttgtcttattcttggagtttgtctcacaattcttggagttatatttcaagtaccattcttagaatttgtgcaaacccctgaatctattttctctatggcacttatattttttgagttttatctgttagcattgcctggccagtatatgttaactattggttctgctgtttttcgtgctgtaaaatctgtatatattcctttatatgttgctatcattataggtatactcaattttattggagatatggcttttggtcttggatggtgggggtggccttcatatggtgctataggcattgcatggactacatttatttctgtttcttttgggggtgtggttatcctctttcttttattctataatcattggctcactcgatacagttttcccccttggtgttggattaagaaggggtccatgtatttactacaagttgctggaccctctcttgctactgcagctatttggcaaacagggtaccttgttctatttatcattgcaggaactctgccttctgaaggtgttgctacattagcaggacttacagctggtatacgtatagaagctattttgtttttacctggaatagcttttagtatgacatctgctattcttgtaggatatgctttaggacttgggaataagcaagaagcaaagcatgtactccttatggttgtttttgtagcttgtttatctatgtcttttttaggagccatgttatggccttggagagatacacttgcagcttttttatcttctgatccattagtacgtcaggaaatagttagttaccttagttataatatactatgtgtgccgtttacaatagcaagtatagttcttgcaggagggcttaatggtgcaggtgcatcaatataccctatgattatttttggttgttctatatggggtatacggttacctttagcatggtttttaagtcattttttgtgggaaacgtcttcaggcgtttacatggcccttcttgtttcacaagttgtacagtcaatgttacttttatggattgtactacgttataattgggcacgtttttcaatgtataatagtatgtcaaaatagtttttagagggcactagggagtatagtaatgatatgactatgctatagacactgtcaactcagcttaggaggatatcatgagtgaagcagcgttttctccagtacatccttcaaaatttgataattataccttattatgggagatgactccccaacactcttctgactacacactaacaaatatctggggttggaaagatttttatggattggagtggatgtttgagtctggtttatgctggattcgtcagacacgtcatgttgatggagcagattatattttttgggctcctataggagattggaattctattgactgggttaatcttcccctttttaaaagaggattacatatgcaacgtgtgcctgaaatgttatgttctttattgcaagaaatattacccagaaagataaatatagaagaaacaccagggcagtgggaatatatttattcaacaaaagatcttactactctttcagggagaagatttgatagtaaaagaaatcacttaaatagtttttttagagaatacaaagaggactataggccaataggagattctaacatattagaacttattgagtttcaaaaagaatggtataaatggagagaatgtaagaaatctccttcattagctgctgaaggggaggtactttgtgatatttttaaaaattggggattatttccaagtttaagaggtggagcactctatagtaacaataaggtaattgcattttctataggtgaaactttggatgaaaatactgttgttgtccactttgaaaaagctaagcctggaattcgaggtgcttatcaggctattaataactgttttgtacgttatgaatgtaacgattttgattttattaatcgtgagcaagacttaggagaagaggggttaaaaaaagcaaaacaaagttactatccaataggatttttaaagaaaaattatgtaacagtttttcctgagtcttaatttaccttaaagtataaatttttttaaggaaaattattatgttcctttttatgaataaacgtttgatcagatattcaaggtcgattataataacaaatagaatgtttcactagacaatattactattaagttaagtaaggataatagcatacatatggcgatgatagaaataaaagatattcacaaatggtatggtgaatttcaagttcttaagggtatttcagaacgtatagaaaaaggtgaagtattagttatttgtggtccatcaggttctggaaagagttcacttattcgttgtattaataggttagagtctattcaggaaggtgatatcctttttgaaggaaaaagtatttttgatcctgatgtagatataaatgaactaagaacagaagtaggtatggtttttcagcaatttaatttatatccacatctttctgttgtggataatgtgacattagcgcctataaaagttcgaggggtgagtaaggcagatgcacatgttttagcaatggagttgcttgcacgtgttggtattgattctcaagcattgaaatttcctggagaactttcaggaggacaacagcagcgtgtggctattgctagagctctagctatgcaaccaaaagtaatgctttttgatgaacctacttcagctttagatccggaaatgattaatgaagtattgtcatgtatgaaagatcttgcacgtgaaggtatgactatggtttgtgttacccatgaaatgggttttgctcgagaagtttctgataaagttatttttatggatcatggtgtaattcttgaagaaggtccaccagaagagttttttggtaatccacagcatgagcgtacaaagagcttcttaaaagagattttatcacatcattaacaattaatataacttattgagtaataatatttttatgtctaaactattatgtattgaaattattgctgatgatacacagttagatgtaattattagtattttatttcaatatattccatatggatgggaagaagagagtctttcaacaggtgaaacaatattacgaattcattgtgataattctgaagtaaagcatacagtgtgtaataaacttcaaagtgttttccctaatattaaaatccatgttaaagaggtaccaattcaagattggtctatagcatggagagattttttcactccagtaatagctgatcaatttcttattcttcctccatggcttttagatacaacaccaaaaagtgatcaacagataattgttatagagcctaaatgtgcatttggtacaggacatcatgcaacaacagtattatgccttgaatctattagtcattgtgctaaaaaaggctatcttcagccaggaatgcggttttttgatcttggaacaggaacaggtattttaggtattgcttgttctttactagggttaacaggtataggtgcggatattgatcctatagctatttctaatgcatcagaaaacatagcattaaataaggtagaatctcaaatggtcattacagaagcaggagtagaagcaggtttaggagaatcttttaatcttattgttgctaatattcttgcagaacctttaaagtgtcttgcattagatcttatagagcttcttgctccttctgggaatctaattctttctggactacttgattaccaggctgatgatgtagaagctgcatactcaaaattaggaaaagcacaaagagttatttcaggtgaatgggtagcacttatatggaatagacaaggttagaacatctcaatctatctccctataagttaaccaactactctttttggtgattatcaactgaagactcttggtttgattgtgggtgagcttgtgttgtgttggatgaattttcaatttgtacatcaagaattgttgattgattagctgaattagtattagtgataatattgtagcttagggatgtaataataaatataatagcaagaaatgctgttagttttgtaagaagtcctccagctcctgaacttccaaaaacagacgtattaccgccaccaaaaatgactcccatgccttcttttccagattgaagtaaaacaataatcacaagaagaatacaaactattagatgtagggaaagaatgagagtattcacaataaaagctccttaagcaaaaatagaagttctttttatagaactattgatagatggttagttttaaataattaactatgtattttaagtggatactattcagaaaatccagcatgtataattttcataaaagattctgcttgtaaagaagcaccccctaccagaagaccatttacattgtcaagttctagaatagaagaagcattttcggagttgacacttccaccatatagaattctgatgttttggcttgtattacctatcatattatgtaaaatttttcttattagagtatgggcagttataatatcttgttgagaagcaacttttcctgtaccaattgcccaaactggttcatatgcaatgacaagttgtgaaatagcttttgaaggaatatctgtaaggcttgttctcaattgttgctctaacacactgttaacaagtccagcttctcgttcttgtgcagtttctccaatacatagaatgatagaaaatccatatgataaagcaagttttgttttttgttcaataagtgtaggtagttcacctataatatgacgacgttcagaatgaccaataagaacccatgagcagcctacatctttaagcatttctaaagaaatttctcctgtaaaagcacctgaaggggcaggatagaaattttgtgctccaatgacaatagtagaattttttaatttttcttttattgtatcaatagcaagaaagggagggaaaagaacaatatctctttggggaggaatcccttctggcatagacataagtttttcaatcatatcctttgcttctagccggtttttattcattttccagtttgctgctataagtattttcatgaaaactccataaaaaatattacaaaatatctgatgtaactttttttgaatatataagggcatcttcatttgtatcagaataatatttctgccgtattcctgtttgaataaaaccaaaactcttataaaaagcaatagcggaatcgtttgttgcccttacttctaatattattttgaggataccttttttagcagctagtcgcaatgctgtattaagcaaaagttttccatatccttttcgttgcatttgctttgctactacaatattaatgacttctaagtaatcctggttatagtaaataaaaatatagcctataagttttttacagtatgtttgtacaccaaaagttttatatcctttttgtttgagaacatttacaaattgaggtatattccatgtatgtgaagtatattgtttttctagagcaagaatttcaggtaaatcagaataggtaagaggtatacatttctgtgtgtagattgggtccatatgaataatattttttatccaatagatgcttttaataacgataaagcaccagttgtagaatttatagacgctgactgcaagactttgattattgcacctataacacatgcaccaaggcttaagttgggatataaagttgtttgggtacagctttttgactctaaccgtcgtatatatttaagtcgtagagcatcacatcttgtaacttatcctaacttgtgggatttctcagctagtgggtatatcctagcaggagagtcatgcgaggatgctgctcttagagaacttctcttatgttttggaatagataaagcttcattatctaatcctagatcctattttttccctttgcaagagaattttattctttccacactatatacagtttctgttatgactacttctattcatttttgttatgactatatacaagatgggatgttcttggatgaagatgagttaacaggatttagctcagaattatcagaatttttgacaccatcattattatgggcaattcataataaaataattttttgagaaaatagtactaatatataatagatagttaatattttgttaggttattttattctaagagtagttgtttatatctagcgatatcatcaagtgttgctcctgctccatttattacagttgttaagggagttctgtccacattaacaggcagtcctgtaaggtttgttatacaagtgttaagaccttgaataagagaacctcctcctgtaagtaatattccttgttgcataatatctgcggaaagctcaggtggtgtttgttctaaaacatcaagaattgatttaagtataatatcaataacaggagtaatagctttttggacatgtgtatgatcaagttttaagtttgttggtccactatttgtgatatgttttccagaaatttccatagtgagaggctctggtggtgtttctagtgaacctaaagtcattttgattttttctgccatgatttctccaacaaatatttgcatatgctcttgaagataacgctggacagctttatttaatgcatcacctgcaactcttacagattgagcacaagctttttcacccatactaataacagcaatatctgttgttcctccaccaatatcaacaatcatactaccaattggttcaaggactggtagactagcaccaatagcagctgctattggttcttcaataagtcgaacttcatgagctccagctcgtttagctgtatcaataactgctcttctttctactcctgttatattaataggaacacaaataatcatatgtggttttctaactaaccattttcctataattttttgtagtagattagctataagtgtttgagccatatcaaaatcagcaatacaaccatctttaagaggccgaatgacttctatattgtgtggaactttaccaatatatgcatgagcttcttttccaacagcaaggacttttccagaaagagtatcgatagcaactgttgatggttcattaaggacaatcccttgtgactgaataaacacaagagtatttgctgtacctaaatccatagcaatgtacttacgtttcataattattcttctttaatatgcgttatgggtgctgtatcaggatcatagaaaatagcgccacttctatggattgttgcatctggaagaaggcgattaagacgatatttcaatgcaactatattaaggtattgagcaagagatattgtagccattgttgtaaaaattctcatatcctgaggaagaggtctggctgtacagcttgctaaacataaaacaccacatgtaattttatttatactaacaggcagacatatgatagactgaaattcaggtatataagatacctttccaaaaagaggagtagatgaaccatcagttccctcagcatatataggcacttcgttacggaatacccatcctagaagacctccattaactaatgaaaattcaggtaaaggttttttgtgtggaagtactagtggtgaactttctccttcaacaaagtatgttgaagatccctctacgctagaaacaaaaacagaatagtcagagtctgtagtctctgttactatagcaagaaatagcgaaagaaattctttccaatttgtttgttcatgaagtttaaatagttgctctaaaccgtcatagtaacgccttagtctctgattattattagcattacccatagtatttatttgtctgactacaagttttgcaaatcgatgtaaaagttgctgatctacttcagtaaaaacgtggtttgttatactatcaatacaaagcgctcctcctccaggaaggtggcagcccataaaagaagtgataagtttttcatcgttatttgagtaatatcctagatacccttgtcgttgatcaaaattattaaggattaacggttgctgatggcgtaacacccatcctacaagacctttcccaggaggtataataaattcttctgtatagggttcacactctgttgaagctgagacaagagtaaagttgccatcctcagtgggtaaaaaaagggcaacgttatgtacctgaaagacactacgtattaagtcaagaatattatcaccattatgattatcagtcattaggctctctttataggattctctaaaatactagattattaataactataaatagttgttactttttatatgaaagtactaaataacttatcaaaggcaagggcattcatgcaactatcttttcttggataaattagtgaataatttattatttaataattttattttatatctattaatgagttgtcaaaagtaatacagttgcttaacatatactctgtagtatctatatttgtttatagatatttatagtaatgtaatatattataaacattttaaatatattaaacttatatattttatatatggagtattcagttgacacgtgttattgtagttgatgactctgcattttttagaagctctattactaaaatgctaactcaagattcagaaattgaagttattggagttgcaaaagatggtatagaaggtcttgagaagataaaaaaccttaaacctgatgttgttactatggatattgaaatgccaaaacttgatggtatttcaactttaaaaattattatggatgaaatgccattacctgtaattatggtcagttccttaacaaaagaaggagctgaagcaacattaaaagctcttgagtttggagctgttgattttatcccaaagtatccaggtaatagcttggcaagtatggacttagcagcactatcatcagatctgtgtacaaaggtcaaagctgttgcagcacgagcaaaacgctttccattaaagcggataaggaaagataaagtacctattatctctcctgtaaaaaaagatttttttacatcacctaatcattcagaaaggtctaggagagatattattgccattggtgtttcaacaggaggacctccagctgtacaaaaggttctttcagagcttccagaaacatttccagcttgtattcttattgctcaacatatgccagcagcttttacaaaaccttttgcagaacgacttaacagtatgtgtaaaatttctgtaaaagaagccgagcatggtaatcctataaaaaatggcatagcttatgtatgtccgggtggaagacatttacgcttagacttgaaaggtgctttacctcagatttctgtggtttctgaaccatcaacagctctttataagccatctgctaatgttcttatggagtcagttggtaaaagcatgggtggaagatctgttggagttattatgacaggtatgggaagtgatggggttgaagggatgagagtacttaaatctaaaggaggatttgttattgctcagagtgaagcttcatgtgttgtttatggtatgccaaaagcaatagtagatggtggtcttgcggatgaagttgttgatcttgataacattgcggaaagggtagcttcggctctttataaataatatatctgttgagagtcattatcatgataaatcataatgtggaacagataacacaagaaattttgacacgacttgagagtgataagtcagatgaaattcgttctgcagcttttgaagcagctgaactaaaggcttctgacagtattcctttgttaataaaacatctccagagtccaaattttggagtacaggaagctgcagaatatgcaataagaaagattaggggagtagagacagtacaatctttaataccactattacggttagaagatgttgcaattcgtaatagcgctatagatattttacaagaaattggcgctgatgatctcaatactttatataaattacttcatgatcaagatgttgatatacgtatatttgtagctgatattttaggatctgtaggatcgttttcagctgtaagtatgcttatagaagtgctcgagaatgatacagatgtaaatgtacgttatcaagcatgtataagccttggtaagttaggatatagtgaagctaagggtgcattaagtaatgctcttgaaaaagacgaagattgggttcaatttgctgcagttgaagcacttacaaaactaaaggctaacgcttgtgtcgacattttgttagctgcactccccaaaagttctgactttgttgctagtacaataattaatgcattaggtataattgggaatatgttatcagtgcctgttctacttcaacaacttgataagagtacagggccgcttcgaaatgctactgttaaggctataatacaaattattggtgctccgtctcttggtcttttaggagagaaagatttagataagctatatacataccttcttgttgcccttgaagatgaagatgaagagattgttcttgttgcgttcacaggtctttctttctttcaaggtaaggaagcaacaacacgtaaggtttttgagcgtattcaaaaaatggactctcttcatgatgctgatcttttatcagcagccattaaatgtctcatagatgttggttataatagtgctttgaaagaaggaattttttctaaaaatgaagaagttgttaaagttgctattgaagtatgtggtagtataggtgaccaagattgtgtaggactttttattgaatctttttggattttaccattagaactacagaggtttgttataaattatcttgttaatattgcagatacatctaatcttagtttttttactgaagtattatcacgacatacagatatttctattattaaagctgcacttctcttcttgggaaaacaattatcgcctgctttatcttctgatatactaagctatctttatcatccagatgttgaggttagaaaaacagcacttgaggcctgtctggctttgaatgatgaacagataaataaacaagttattgagttattttttaatgaagatccttcacttagaatgttagcaatatatgcaatgggtaaaataagtccagaaacatatgtaaactctttattattagctttaaaggatagttcaggcgaagtaagaagagctgctattgaatcattaggagagctttctaaaataactcctgaactctttgaatctatctcctctattgtatatgatgaatgcaaggaagtacgattagctttaattaatttggcaaaaaagataggaacacaacaatcattatcttttattatcaatatgttggaagatagtgatagttgggtggtgatcagggcaatagaggcattaattgattataaaacagaagaagtagcagtattagctatcattaatagattagaaaatgctgatgttcttgtgacaatgaagattattgaagcacttgggattataggtggaaagcttgctttccaagctttgttaaaccttattaatcatgagaaccctgatatccaacaagcagtttctgatgcattaagttatattcaggaagagcaaggagaagatttttaatggcacttccaattgaaacaacatcacttcgttctagccctggaattacagacagcgagttcaaacaattacgtgattttatacatcagaaaagcggtatttttattgccgataacaggaaatatcttatagaaaatagacttgtaggacgtattagagctttaaatcttaaaagttatggagagtattatagttatttaaaatttgatcctaataggcaaacagagcttacatatctatttaatgcagttacaacaaatgaaacaagtttttttcgcaaccctcctcaacttgaagtatttcagaaggtggttttgacaagggttatagaagaagcaaaaaagagtggacgtaaaaagttgcgtatttggtcggcaggatgttcttcaggtgaagaaccctataccattgctattattatccatgaactattatgtactgaaattagtcattgggatattaaaattacagctaatgatttatctgagtcagtattatctatagcaaaagaagggttatattcagagtatagtttaagaacaacaccaaagcatattatagataaatatttcactagggaaggacaaggatatcgtataaagtctaatattaaatcacttgtttcttttggaactattaatttaaaagataaggttcaagtaagccgagttgagcgttcacaaatagtcttttgcagaaatgttatcatttattttgatgatgaaatgaaaaagcaggttatatctgctttttatgataatcttctgccaggaggggagcttattattggacattcagaatcactacatagtattacaaaagcatttaagctagaacatcatacaggaacaatcatttatcgtaaacaagattagatggtaagtataattatgaaaataattgctattgctaatcagaaaggaggagtaggaaaaacaacaacagcactctcgcttgttgcagctcttacaagaaaaaagaaaaaagtactttttattgatcttgatcctcatgtttgtgcatctgtacatttacgatattatccaaaagggcaagtcaataccttatatcaaatacttattgcaaatagggaagagcttcctcttatatggtcaaaggttattttaaagagagacagtcaagcatgggatgttgtttctggagatactagactatctgaaatggagagtatattgcacccttttaaaagaaaaggttttattttgaaatatgcgttatcattattatcagataaatatgattttattattatagactgtcctccacagtcaggagtgttacttataaatgcattagtagctgcagacttattacttattcctattcagactgattttttagcgttacatggattaaaattactttgtgatactgtgaaaataataaataggagactacaacagccaataccgtatcgtgcagttgcaacaatgtatgataagcgtacgaaagcttgtagacatatattagaagtattacaattaaagatgaaaaatattatgttttctactgtagttcctatagatacaaagttaaaagaagcaagtacagcaggaaaggttatttttgaatatgatgctttttctagaggagctttggcttatgagtcattggcagaagaagtagtatcattatggtaaaatctccaatggaatattttgaagagcaacttcttgattttagtgatgttgatactaatggagtggctgaagcagaacaatatatagtacagaattatctggggcaagatgaatttttagattcagagtataccacaatatcagaaaggggtagtggagaagaaagaagcattatacaagaggcgttagtaactaatgattatgtggttacagataagtatatccaaagcataccagaaattcagctagtaggttttcagcttggtagtcagttatattctatacctacagttgtagtacaggaggttgttagaaaagtcccgatctttaaacttcctgcttcttcaaaggttgtttctggggttattaagttacgtggatatattacacctattgtacaggtatctagtttacttaatataactaaaaattttttaggtgaaggttctatgtttacacttatttgtaattacaaagcctttcagtttggtattccaatagataatattcatcatatgtatcgagttattcatgaagatattcagtggagtgtagactcattattaggtgtggcaggagaatacattattggtttatttaagttatatgagaagcttatacctatattatctattgagcgtattattacagatgtattccaaaggaaggtgtaggaggggggaaatgagtaaacatatccttgtagtggatgactctaagactgtacgtaatcttatgtcatttgttttcaaaagcaaagggtatcaggttacaacagctgaagatggtttagatggacttgaaaaactttattctgtcgataaagtagatcttatagtttctgatataaatatgcctcggatggatggatttacttttataaaaagtgtccgtgagcaagatttatatagaaatataccaattattattctttcgacagagaaagaagatgaggatataaaaaaaggtatgaagtttggtgctaacttatatatggtaaaaccagctcagcctgatacacttgtccgtaatataaaaatgttattaggttaaagggtaatctttgttttagtcttgtgcacattttatacaaaaggtatgttgttatgagccaagattttatggatcccgaactatttgctgacttcataattgaagcaaaagagcatcttgaaacaatagagcctaatttgcttgaattagaaaagtctccaaataacttagcattacttaatgaaatttttcgtccaatgcattcccttaagggagcttcaggttttcttggtttaaataaaatcaatcatcttgcacataaagctgaaaacatccttgatgagcttagaaaaggtgaaatggttattacatcagaaattatggatgtaatcctttcagccactgatgccttaagccaaatgatctataatttagaaaagacttcgtctgaaggggatgtagaaacagaatcaattatgaatcttattgatgccataatgagtggagaactaaatgttacagcgacaatagttcaaccaactcaagatacagagagtaatactagtgaaagtaagacccaattaactacagtgctagaggctgttgatcagccagctactccagttcctttggagatgatagatgttagtcctgttaatcaagttgaaacaaaagttgaagctattccttcacatgaaaaaaaaaatagagaacttatcttcccatgaatggattaacagtttagaacttaaagagtcatatgccctcatagcttttggggaaggacatctcaaagactttattgatgaagctgtagaaattacagaaaatttaactacaggacttttagatattgaaaaagacttaggtagtgatccagaaataatcaacgatttattccgttattttcataatttgaagggtaatagtggtattattggttttcatgaattgaatagcctcactcatgaagcagaaacattgttgaatcgagttagacatggagaaatggtagctactcatgagttaatcgatttgttacttttggttgtagatgtaatagatagtttagtagagcgtatagagagttctacaggtattgtacagccatttgatatctcagagatccttgtttgtttgcaatctgctgttgcaggcaaagatataacattgcctaaagcccttattggttcattaaatacagtggattcattagagcaaaatagtattgagcatggagtggagactattgaaaatcaagtttcccagacaagcactgagtcttcatcagcttttaattcttcagataaagaaaatgaaatagcttttgcagtaacggttaaacagcagcaatcaactatacatgctgcacttgaagcacttgctcaagatagcagtcagagagagtacattgatgctttatatcgttctttaatatctattcaaaatgctgcaggagttatgggttatgacgaattaaaagtatatgctgaaaggacagcagggcttgttgctcaaggaagagattctggtattgatttttctctgatgctagacatcttaactcaagaagtagctattgttgacgacatgattgcagttattttagctggggacggtattacccaattatcttcttcaccaattgagcaaaaagaagttttatcaagtcaggatggtaatactactgatactgtttccagtactcctgttgtttcagcagaacaccttacgtctttaaaaagctctagtctatcaacacaagaaagtcctggtcaaatagagtcacatgttccatctaaacctggccctgtattaaagactataagtaatgtaccaaaaaatataaaacctccttcagtaaaatcttcacaagcaaagcctgctaacgcaaatgatgctacatcagaacaaaaatcttcatcaactattcgtgtagatcatgaaaagttagatcatttaatgaatttaattggtgaacttattattaatagaaatcgttatacaatgttagcaaggcgtcttgaagaacagggaactaatgcagatgttgttgaagtagcacaagatctttcagaaactacatatgcaatggcacgtatttctgatgaactgcaagacactattatgaaggtaaggatggttcctgttgcatcagttttttctcgtttcccacgcttagtacgtgatctttcaaggaaaagtggtaaagaagtagatttagttttagaaggtgaagaaacagagttagataaaagtgtggtagaggttataggagatcctcttgttcacttgattcgtaatgctgtagatcatggtattgaaccagaaagtgaaaggattgctcagggtaagtctactaaaggaaaagtgacattacgtgcttatcataagggtaattctgttgcaattgagattgaagatgatggaaaaggtcttgatcccgataaacttcgagaggttgctattaaaaaaggtattcttagtgctgaagaagcaaagttactagatgatcgtgaggctatggaacttatctttgcaccaggtttttcatcagcagagaagattacagatatctctggccgtggcgttggtatggatgttgttcgtacaaatattaaaaatttgaaaggtagtatctctattttttctgaaataggtaaaggaacacgttttacactttctttgcctttgacattagcaattatagatgcattgatggtaaacgtagccggagaagtatttgctattccacttgatgctgtttcagaaacgacaaaacttgaagcatctaaacttaatgatattaatggccgtaaagcagtgactcttcgtggagaagtacttggccttattgagttaagtgagttactaaacttacctcaagaagagcatactgacgtactttctgttgttattatccacagtaatgaacgtcgccttggacttgtagtaaataaacttttagaaagacaagaaattgtcataaaaccattaggttcataccttggagatatcccatgcatttctggagcaacaattatgggggatggtggggtgattttaattttagatcctcatgagatttatttattaagcacttcagcagcaaagtcggtatcacagtaatgctagtaataggtaatagataaatgaactgtaagtaatatctataaacctagtataactactagaaaagtacgttttatctaaaattttattaactaactaaagattattttaaagtctattataaaacctattgacaggttagtcattataggtataaagtctccctctctgctggaagatattttaaagaagtattagcagagttgttctttgacaagtgaagagtgagagggaacaagactttgagttaagagtcacggaagtgactatatagaaattgtgaattaaactggagagtttgattctggctcagattgaacgctggcggcgtgcttaacacatgcaagtcgaacgtgaaagtccttcgggatgagtaaagtggcgcacgggtgagtaacgcgtggataatctaccttcgagacggggataacggctggaaacggtcgctaataccggataaccattatggtaaaaagttgtagtgcaaagggtagcctctgtatgtaagctatcgcttgaagatgagtccgcgtcccattagctagttggtgaggtaaatgctcaccaaggcgatgatgggtagccgatctaagaggataatcggccacactggaactggaacacggtccagactcctacgggaggcagcagtggggaatattgcgcaatgggcgaaagcctgacgcagcgacgccgcgtgagggatgaaggtctttggatcgtaaacctctgtcaggggggaagaaatggatgggctctaatagggtctatttttgacggtacccccagaggaagcaccggctaactccgtgccagcagccgcggtaatacggagggtgcaagcgttaatcggaattactgggcgtaaagcgcgcgtaggtggttatataagtcaggggtgaaagcccaccgcttaacggtggaacagcctttgatactgtataacttgagtatcggagagggtggcggaattccaggtgtaggggtgaaatccgtagatatctggaggaacaccagtggcgaaggcggccacctggacgataactgacactgaggtgcgaaagcgtggggagcaaacaggattagataccctggtagtccacgctgtaaacgatgggtgctaggtgctggggagttatcttcggtgccgtagctaacgcgttaagcaccccgcctggggagtacggtcgcaaggctgaaactcaaagaaattgacgggggcccgcacaagcggtggagtatgtggtttaattcgatgcaacgcgaagaaccttacccaggcttgacatctgagggactcttaagagattaagaggtgcctttcggggagcctcaagacaggtgctgcatggctgtcgtcagctcgtgccgtgaggtgttgggttaagtcccgcaacgagcgcaacccttatctttagttgccatcaagtaaagttgggcactctagagagactgctccggttaacggggaggaaggtggggacgacgtcaagtcatcatggcccttacgcctggggctacacacgtactacaatggtgcacacaaagggcagcaagaccgcaaggtggagccaatcccaaaaaatgcatctcagtccggattggagtctgcaactcgactccatgaagtcggaatcgctagtaatccgagatcagcatgctcgggtgaatgcgttcccgggccttgtacacaccgcccgtcacaccacgaaagttggttttacccaaagccggcgagctaacgagcaatcgaggcagtcgtctacggtagggctaatgattggggtgaagtcgtaacaaggtagccgtaggggaacctgcggctggatcacctcctttaacgaagaaaattcccattcactctttacttgcaaagagcaaagaagaaggcagtaagggcctgtagctcaggtggttagagcgcacgcctgataagcgtgaggtcgaaagttcaagtctttccaggcccaccataaggtgtgtctaaagttgaaagatactagaacaacaaggtaagacggaagaaagaggttgaaaggcgtgggggtgtagctcagttgggagagcatctgctttgcacgcagagggtcatgggttcaaatcccttcacctccaccagaagaaggaaggtcttgtctggtaagtttcgcaagatacttgtggaagtcatccaggagagacctgggaacatgataaatgttcaggctctttaacaattgaatagggaatgaaaggaagttcttaagagacaagataataagggcaacaaggtggatgccttggcgctgagaggcgaagaaagacgtggtaagctgcgataagcatcggggaggcgctaaacatcctatgatccggtgatgtctgaatggggaaacccactgggagtaatgtcccagtatcattgactgaatacataggtcaatgaagctaacccagggaagtgaaacatctcagtacctggaggaaaggaaatcaaaagagactcccgtagtagtggcgagcgaaccgggaagagcctaaaccaaacagtttcgactggttggggttgtagggccgacatacgtgattctggagtaagcaggagaagagaactggaaagttccgccatagagagtgatagcctcgtatctgaacctgaaaaagacatagtcggtacctgagtactgcgaggcacgtgtaaccttgtgggaatctggggggcccatcctccaaggctaagtactcctcagcgaccgatagtgaacaagtaccgtgagggaaaggtgaaaagaacccctgtaaggggagtgaaatagaatctgaaaccagttgcctacaagctgtgggagcatctttaagatgtgaccacatgccttttgcataatgagtcagcgagttaatctaacgtgcaaggttaagcgtaagtgtagccgtagtgaaagcgaggctgaataggccgtcagtacgttggattagacccgaaaccaggtgatctatccatgagcaggttgaagcaagggtaaagccttgtggaggaccgaaccagtaacggctgaaaacgttttggatgacttgtggataggggtgaaaggtcaatcaaacctggtgatagctggttctccccgaaatatattgaggtatagccttgggattgattaatggaggtaaagcactgaaagagctaggggtcctaccagattaccaaactctatcaaactctgaatgccatctaattgtatcccaggagtcagacggcgggtgcgaaggtccgtcgtcgagagggaaagagcccagaccaacagctaaggtctccaaatccatactcagtgggaaaggtggtggagttgtatatacagccaggacgttggcttagaagcagccatcgtttaaagaaagcgtaatagctcactggtctaatgattctgcgccgaaaatgtaacggggctaagtatggtaccgaagctttggcattgccgtaaggcaatgggtaggggagcgttctctataggctgaagcaaaatcgagaggttttgtggacagtagagaagtgattatgctgacatgagtaacgataaaataggtgaaaaacctattcgccgaaaacccgaggtttcctgggtaaaggtaatcttcccagggttagtcggtccctaaggtaagggcgaaagccgtagctgatgggaaacaggttaatattcctgtacttgatacatagcgtgatggagggacgcaggaaggtaggcaggccaggtgttggaagtcctggtgcaagcatgtagaactgtctggcaggcaaatccaccagatgtattcgagatgcgaacccgtgaacgtaagttctgaagctgttgagcctatactgccaagaaaagcttctaagcatatatgtatcaaaccgtaccgcaaaccaactcaggtgggtaggatgagaaatccaaggcgctcgagagaactctggccaaggaactcggcaaaatggccctgtaacttcggaagaaggggcgcttttgggggtgaaaataaaactattggagctcctggaagccgcagtgaattggtggtggcgactgtttactaaaaacataggtctctgcaaagtccaaaagacgacgtatagggactgacgcctgcccggtgctggaaggttaaaaggaggtgttagcgcaagcaaagcaccaaattgaagccccagtaaacggcggccgtaactataacggtcctaaggtagcgaaattccttgtcgggtaagttccgacctgcacgaatggcgtaacgatctccacactgtctcggccagagactcggtgaaattgaagtcgcggtgaaaatgccgtgtatccgcagaaagacaggaagaccctgtgcacctttactatagcttgacattggattttgggcttgtatgtgtaggataggtgggagccagtgaaacctatacgccagtataggcggaggcaaccttgaaataccacccttacacgtttaagatcctaaccctgaccagttagcctggcaggagacagtgtctggtgggtagtttgactggggcggtcgcctcctaaaatgtaacggaggcatgcaaaggttccctcagcctgatcggaaaccaggcgttgagtgcaaacacataagggagcttgactgcaagacagacatgtcgagcaggaacgaaagttggcgttagtgatccggtggtcccgaatggaagggccatcgctcattggataaaaggtacgccggggataacaggctgatcgcatccaagagttcatatcgacgatgcggtttggcacctcgatgtcggctcatcacatcctggggctgaagcaggtcccaagggtacggctgttcgccgtttaaagtggtacgcgagctgggtttaaaacgtcgtgagacagtttggtccttatcttctgtggacgaaggagaattgagagggtctttccctagtacgagaggaccgggatggacgcaccgctggtggttctgttgtcacgccagtggcatagcagagtagctatgtgtggaagggataaccgctgaaagcatctaagcgggaagcccgcctcaagattagttctcccccctcgaaagaggctaaaggacccaggtagactacctggttgataggctggaggtgtaagtacggtgacgtattcagctgaccagtactaatagtccgtgaggcttgctctattttactttcttcatcccctatacatattttgtcttggtgtccatggaggagggggtacacccgataccatcccgaactcggcagttaagccctccatcgccgatgatactgcatatttatgtgtgggaaagtaggtcgatgccaagacttttttataaaaaaggctctctatcagagagcctttccttttaacaaacacctctctacacacacacacacacacacacaacaactctctctacttatacataaatgctaacatcgttatatcgtcagattgttcagcttctcctctatgttctattattgtttgatttactgctgctattaatccctttaatgacttcttcctgttcatatcaagcgttttttcaaaacgttcagtaccataaagctcaagatttggggccattgcttcagtaactccatctgtatataggaagcatatatcatttttgtgaagttgagtttgattatttacatattcagcatgttctagaactccaacaattgggctttggtggctattatctaaagtagttataggtttatctgtagttgaattaatgatatatggtagacaatgtccacaatttacaaattctaatataccactttctggatcaaatattccaataaaaagagtaacaaacatatagcttggattattttttctaaggacttcatttatttcttttgctacttcagcaggagataagccttttcctatagcatagcgaataagagttactgtcatagacataaatagtgcagctggaataccttttcctgaaacatcaccaataacaacaacttgctttccttctggtgaagtgaaaaaatcataaaagtcaccaccaactgcttttgcaggatcaagaaaagcagaaatgtcatagtgaggaacaagtgatgctgtatcagtcgtaggtaaaatacccatttggatatctctagcagcactaatttcacctaacatacgttcttttatagtggttgtttccattagttcacggatattttgagtaagtgtttttcccatcatagagaaggctcgtgacaactgacctacttcatcagagcgttctattggtaaatcagctgttgcaagctcttcagcttctggtgaagaaaaatcaatttctgcaagagataaggctttttctgttaaggtttgtagtggagttattagcctagctgttaaaattagtgtgacaagtaaactatttaaaatagcagcaagagcaatacctacaagttgatggataagggcacgtgttggggcttcaatttctgattgtggagctgctgcaacaatataccaatttaaagatttaaagtaggctacatggagaagtagtttttcatctttcgataatgaaataacttcttctgacatacttttattacgagcttcttcaagtgttttttcagatataaaatctatttttttacctatattattacctttatgcgcaataagtgttccatcactatcaaatacagctataaagccatccttatgtagatcaaatccttctattttttctctaattgttttagcaagttgttcttcagcatcaagagcatttttagaaatatcagaaatatttatagctgttagaataatgtgttgatcttctggtgatggtaataaaaagacaaggataggatcagattttgaggaatttttattttcaaatactgtaaattctccattaattggtaattgttcataattaagtaatgattcaaatgaacgatttttagcatctttaaggttatattttgtttttaatgtggtaaataaaggatcatttactagaggctttttattagcattataaacttcaatatgaatattaagctgttgtaattgtttgatccactcttggagaaaagtagattgctcttttgatggaaatttttctaatatatttagatttgagtccaacatcatagctatcctacgaagttgatttttactttgtagagtatttgttgcttgatatgtaagaatatcaaagtagcgagcttcaagtccatctttaacaaaagatgttatacttctaaaagtttttctttctagctcaatattagacgagcgaaaatcttcataagctgaaaaaataataggaatggccgccatagaaatagaaacaatgactaataagaaaagtttcgttcgaagtgtgatacccatgacgtcacctttttgcatgatagagagactagttgtttgttactagtactatcgacaggagtgcaaaatatattagggctatttcatagtttttttgcatagtaactaattaatagttgttagaaataaaaaaatattattaattaaaaataattatgtcttttcctataaagatttggtatacccttagctaatgattataacataagttataacatagttaattctaatctgtagaaaaaaggtaaagaaatatgtaataggtagtaaataatatcaatatatttttccaacacttgggaataaatagtatttcttaaaaaatagtaaagaaattaatgcaatagaaagtatagtgtttaataaatagattggataaaataattagttagagttaggttaatcaaaaattttcaaacggagaagttttttacgtaaaccttctcttgtaatcccaagtaattctgctgccttacttttattaccattagtttgtttgagtacacgaataatcagattatattccatttgttgtaaattaagagaatcttgtctttgtgatgtttctgatggtgttgttaggttctcttgtatatcttgggtattttcttcccattctttaatgattcgttgcgagagatcagatgactcaactgtatctccgattgtaagagcagcaacacgttccatctcattattaagttcacgtacgtttccaggccaactgtaagctaaaaattttttttgcacatcatgagaaagagttaatgctggacgatgcaattgagaacaatggtagttgagaaaattttgtgctaataagaggatatcatcacctctactagctaatggtggtagtttaatttctactacattgattcggtagtaaagatcctcacgaaattttccttctttgactgattgttctaaattgacattagtagctgcaataatttttatatcaataggaataggtttagagcttcctactcgtacaacttctttctcttcaagtactcgtaatagttttgcttgatttgctaaactcatatcagctaattcatcaaggaataatgttcctttatcagcttcttctattagaccttttcggtaatttactcctgttgccacacctttttctattccaaacatttcactttcaaatagtgtgtctggtatggctgtacagtttacagcaataaagggtcctgcacttctaggagaactgtaatgaatcatttttgcaatgacttctttacctgatccagttggtcctaatatcaatgtattaataggatatcttgcaattgcttttgcaagttcaaggactttatgcatttcatcacattgtccaataattttttgtgattggtaattttcttgtatagttctacttaaatgtgtgttttgttcagcaagtattttttttgttgattcaagctctttattttgtagttgaagatcattaataagtttagcttgttgtaagttttttgcttcaactttgactaacattagaccaaaagcttctgcaagcctcataacttgtgttggggcagctccatgtttggtaagagtaaaaagtttattttcgtcaacaggtttttcccaggcaatagattcacaaagatctataagggtttcataaaatataaactcattaaagacagtttcagccattttaatgattatccttcaatcattagtgaaacatacattttaagtaatgcttcattatctataagtggctctaagtcatgttgtaaaaagttttgtatttctatttgattagattgactaagattttctttacatttttggagattagaagagaaaacagatggaataagaagtcctccatctcccgcatctgggcaaatcgcctcttctaatacagtttgaatattagagggagcataagtggcctctaaacttgtagtggttaaactagtagatgcaagtgagcgtgattggggtattgtaggttctggtgtttcttgaggtccaagaattgttccaataccaatactagcatcaagtagggaaacccttttcatgcattactccttactcagatatagttattaagtacatattgctacccatttagttatatttcaaagtttgtaattatgctattttattttaatgtactattatacccatctatgtataagttaaatttaacttatctagtatataatatagactgtagctagttactttatctagttaaatcattataggagatttttactatagatctaataataatctctttttcaataagtatattatatcttaataaattttatataatattgatttagatttcatattaccattcttatagttgttattgtatattattttcatctggttgtagtggtacatcaggatgttctttttgaaagaggaattcatcttctcttcttacagcatcgtcaacagcatcttgtacagcacccataactcttacacgattttcgacattatcaaataccataatgggaaattttcttacagcagctaacatctcttgtaaaaaaaggacttctttttcaatatcttggggatcagcttgatcaacaattttatctatagaggaaggagaaataaaattttcattttttagtgcaattagttcacgcatcatttctaaaggagttagtgtactattttcccccccacctttatgtttctctttccacctgctaagggctgtagtacattgtttatgagagctatgaagttgttgtgttttttcaatatcacccattacactttgaagatgtactttatccatacttggatcagctgattcaagctctccaccaagtgtagatagaaggaaatcaatggctctatccagatcatcatcactctcatattcttcaagaagtcttgctaacactgcatcaggtgcagctgttatagttactgttgttgtataaagatctcttaactgtgctgcactgcctatatcagtaaattcttttgaatttagagctccttttagtcctgctttaatttcatcaccaaactcattttctaatgtctccatagcatctaatacagattttaatcctgttggctgtggagattctgcaccatattcttgtgcaatttctgcaagagaagcccaagcatctgttttattagaaaattgttctaatgttttttcgagtacatcttgtgaactttgacttgcacgtaatacctgggataacatagctcttttagcattacgggtatcatcattcgtcagctctgtatattcttgaaccatttttaatagagaatcagatcctttcccttgtcttttacgatctttaattgcaaagtcgtcactgcttttagattcaagagaagttgttaattcttctgaagcattatcaatcatggactgaggtgtttttatttgtgtgagattacgaccgttcatactaccggtagctctattagtattaccagcagctgcattggtcatttgatttgttgtggaaagtaatcgtggtgcagggattccactaacattagccataactatctcctaacttatagtttttcccacagtaataacaataataaataatagaagttaacttagccacatagttctttatttaagatgatactactttttacgtgtattagttataactaaataactttattattgtatcaaaaataataataaattacacaggataattaataaaaatttttatatttcagccaggttaataaatagatgttattaagttctttaatctcagtatattatttggttagtatagaagttactaactaacctagtgtaattctacctgtatagtttatataattatgtaaccttattaaggaagttataattttaatatatttattttatattgtagtatagagccaataaaatagtatagtaataatatataatttaggtattttttaataaatgtgtagtaaaatcatattttatttttaacttattgtagttattaagaaatatttagtttaatttctctctatctaaatttaatctatctaaagtaagaagtaatttacttattagtgaagcagttattatttgttactagtattattatccaagtaattttttctatttattttaataaaaatattcttagttaagctatctctttgaaaaagaagaggtattatagtaatattattgctacttacttttttattattactacttactttttaatgtttatattataataagtcaggttgcaaatacaacaatgatgataataagtaatataaaataagtactaactatataatagttaaaataaaatgaatatattttgttcttaaaagctacttagtttattttgatttttaacattgtttttactggtggaggaaatataatgtctgattcaacaaatttatcttcttttggattccaagggaatagtatgaatgactttacaaactcagaggaaatgtcacaaccttctgaggtacaaggtaattctaaagaagttaggagtaactctgaaagaggaatacctcgaattacagtagatcctacaaagaatccaaccccaatgtttcgttatgctatgttagaattagttactgctaggaatatacgtgaatcagcaacatctctaatgaatagtatagcagatacacagcgtgaacaaaaagctgcaagtagttaccttgatcagtttcgaaagcatcaaagtgatgttagccaaggtcatggtagtggtagtcaggggaagtgggagcggatacaacagtggcaagttgattggttaaaatcccataatataaaatatccatctaaggttgatacaggtgacacatggcttaatgctgatgagtgggatctgatatgtaaaggaacccaagcttacatagataatataggctcaagtacacagcaaaaaatggttcaagctcaagatgcgctaggacagtataatgctcaagttcaaggagcaacatcaagtattactaacgatattgagttgagtagatctgtgaatactacacaacctttctaatgtaatgtattgaattgtgtagtgttagagtttgcataagctaattaattgaagaagttagttggctttttaaaaagatctatcaaaaattttttatttattattgactaaaaagtaaaggtaataaaataagcaagtaaataatatgtactatagtttctttaagaaagaataacttatctttgttattttgtagcttattaatttattgtctctatcttttgttatatgagtatctcaatcttgtcccttttattagtatatagcaacctatctgagtatacattatattagttttaaaaaatattttttatcttatttttgatatgcttaactaacttatttaagtaattcatctagcaaaattagattagatagttttttaggaattataatacacttattacttttattatttattattttattataataaggtagtattatctccaatataaaatttgaggaggtgttctatgagtataactggtgtatctggggcaactggggcaactggtgcagctgatgtaactggaacagcagcacctaaatttgcagtagatcctacaaagaatccaaccccaatgtttcgttatgctatgttagaattagttactgctaggaatatacgtgaatcagcaacatctctaatgaatagtatagcagatacacagcgtgaacaaaaagctgcaagtagttaccttgatcagtttcgaaagcatcaaagtgatgttagccaaggtcatggtagtggtagtcaggggaagtgggagcggatacaacagtggcaaattgattggttaaaatcccataatataaaatatccatctaaggttgatacaggtgacacatggcttaatgctgatgagtgggatctgatatgtaaaggaacccaagcttacatagataatataggctcaagtacacagcaaaaaatggttcaagctcaagatgcactaggacagtataactctcaagttcaaggagccacatcaagtattactaatgatattgaattaagtaggtctgtaaacactacacaacctttctaattgtttatcttattctaatgcaaatattattttatctttgttaaaaaagtaaagaaaaaattttattttttagtagaaatagtaatagagctaaagtaatcttagagaagaatcatactaataataattagaagaaattagagaggatacaacaggtatatgtagactatttatttattatttataatgtagatatccatctaaagctaatagcataaaaaataagttaacactagaaaggttaatattacaacatgttatattcctatgtaaataataaaaaatggtttggatgcaaggtgcattggaacagtatacagtaaagttcaataagtaacagtaaatattattagtattagcggacaaagtaacactaattgaatagcaatcagtctatattattagaatttaataaaaaaactgttcaagactagtaaatattaaatatagtattatactatagtaataggtagtaaaagattactaataatagactatggtatttatttttagttagttactattataacctcttaaaaacataattaacatttttataatttcttttgtattatatcatattatattagtagctattagtatatattacgtcatttttattatatactcttttatgagtaaacattgttcttttattgtttataagtgtagtaatatatctaactgtcaatttattgcatgataaaaatcgtagtatataatcaaaagtgttgatatctagttagtattgttaatctattttagtttaactattggtatactctttgctgatagatttttatactttttaacaaacataacttgatattttaatgccttaccttactgtagttaaatagtaatagtatattaaaaaaatattgtaactttagatagttatttttagttagggggaaataattatgagtggtgttgctcctgttggcgtttttccgttacctaatcctgataattataaagataaccctgtggcaatgtatgcatttgttttgctactttatgctgatagttaccgtcaggcttctatgaataaaatggacgaactagaagtacttcaaggtgaacagaaagaagctaatgatatgataggatcatttaatcaaaaacttagtgaagtagagaaagctggtggtggcggtgtcacacgtccaatgacagcagcagaaaaagcatggtgtgataaaaatggtattaacgtccctgggtatccaaatcttaatgcagagaactggactgctgtaattaaagatacccagaaggttgttgatacaaaaagtacagatattcaatctactatgaatattattaaagaggctacaggtcaatatagctcattcatgcaaggtacaagcactaatgtaactgcttctaatcaaatgttaaactctatagcaaaaaatatagcttagactttattagtctatataacagtctattttatttattctttatttattttgtctcatcagatatttttgttaatttcaacatactcaaatagagtaatagaacatatctattaatttgtgagagaggaaaggctaaaagtatctgatgaattttattttctattgttgttttaatggtgattactattatttaacatagaaaaatatgctttgtattttatttgttataatagtttagttgtttttaaactagctttaattgtcagagaggtttttataaaaatgtaatggtagggggtagaggttattttttagcgtcaacaaagtttttatttagccaaccttgttggcaattacatatgtcaatagtacgtcttaataatcaaaaaaagtataactagctgataactaatgtttggcatagtctctgcagtaaaaaagacattacgacggaggcgttgtgccggttagttcatgctaatatacatagacttagatgatacaagccggctagaacgccataatagttccaaaggtttaaatgattgttgtgaagagtatatgtttaatataagccattgtaattataacatttccataaaggagaatggttatgaaacaagagcgtcaagaaacacaggctgctacatctgaggctccagttatgggaactgataatgatatggaacgtgtagaagctattatggatgccttgtcaacaggttcatcgattggtgacatcattgggataacccaagaacagatggatgtgttatataccattgcatatggagcatatcaggcaaaaaactatcaagatgcagaaacgctcttccaagccttgtgcttatatcaacatatggatgaaagatactggatgggacttgcaggaagccgtcaaggacttgaaaactataagggagcaatagaagcctatgaaatggcaggccttgcagggtcgctaggagatcccacaccatttctctatgcgggcatatgttatatgaaattcggtgataaagagtccgcaagagttgcttttttaagcactgaagcactctgccaggagggtaatcgtaagcatgatttagtgaaagagagagcaaaagctatgttggaaattctctctggaggagtaaagcaatgacaaattttggagatataagcggaagctccgcaagaatgagtagcttgatgactggtacatccggtgaagaaggacttgaagaacttgaaggtggtgttcctaaagagcaaggtggtccaggtaaaggagatgcttcagaggctgctaaaggtcaagcagcagcagatagtattaattcagctggtggtactgaaaagcctggagaagttggtgataaggaagatgtaggggaaggtggcgaaatacctgaaggtggtgaaatacctgagggtggtgaagaagttccagaggaacccccatatgtccctcctccattggttgaaccagctaaaatcagtacagtaacagatctcagtacgttaatgggatcactacagctgacagagcaaaaaaagaatgctgaaaaaacagtaaatgaaattaaagcacagaataaagagcaacaagtaaagttccaagagcaaattaaaaagattgaggataatattgctgaatctaagaaaagtggtatacttaagtttttccaaaagttgtttgcagttattggtgctgtactaggagctattggaggtgcgctagctattgctgcaggtgctgcttcaggtaacccattattggttgctgcaggtattatggctattgtagcttcaattgatgcagcaatgtcgtcgctatcggatggtaaagtgtccatctcagcagggattagtaaggctcttgaggctatgggagtaccagcagaaacagcacaatggattgcatttggtatacagttagcaatgattgcagtgactatagctattggttttgcctctggtggtggtggagcaatggctggagtgtcaaaaatagcagatatgttttcaaagtctcaagatgtagctaagttggcacagatgattgaaaaagcttctaaaatagtacaaatcgctggttcagttaatcagtctgctataggcggtacaggtattggtacagctgtagtgcaaagcaatataaaagctaatgaatctgaacaaaaagaaattgaagctgctattgcaaaagttaaagctaagatagagacgttacaagacttctttaaaaaccaaatggaacaattcaatgctataatgaaaataataacagatattattcaagatagcgtcaatacaaaaatagctgttcaacgtggtgcacgtgagtaatacctttagtaaatacagtgactatactataatatataaattaataaattttggagaagactatcatgatttcattaaataattcatcaattcaaataccacaacaaaatatagaagaaagtacctcacaagaagtaacttcctcctctggtggacaacctgctaaagttgatggtgtatcaatccaagcccctaaggctcctgttacttctgcagctagtaacttagaaggagtacagcaaagagaagctcaagaaaatgttacaaaaatgggcttacctgagctatcagctcctaaaggtggtggttatgttcagtcaacagcagctatgtttgcagaagttacagttgatgctatgaatcagcaacgtaaagctgcgcaagacgtacaaaatagtgctcttgaaggaatggttaataagatgctggaagcagctaaagatataaaagaacaatctaaattaatgatggggttaggtatagcaagttctgttatgaccactgcaatgggatttgggggtactataggtggtgtaaaaagtatgacagctaaccctggagtaggaacaacacctcaagcacaagttacttcaaacaagcttactttaggtaaggagattgctgaaggtataagaggtggtatggatactggtaaagagagtcaagtgaaatctatagatgctgatataagaacaactcaagcagaagaaaagaaactagaagcacaaatggaactagtaaagcaatttgctgaaaattcaaagaaccttgctcagcaagctctgcagattatgtcagaagttactagggatgctaatgcaacaacacagcgtattctggcgtaataatttatagaacaactaatatgaagttattgagaaataaatatagattgtaatatataggaaatagcgtgtaattctatatagacaaagctataatagagcatgtatctaagaaggatacatgctcttttttatgtgtgatatatgtagtgacatatggaaaagataaaaagatctatttaaagagtacctcattaagaatattgctatttaataaataataataataataataataaagaaagttcaaaagtgatatatatatatattaaataatttatgattttatttatcttattatataatatagtattttattaatagtattgataatattaatattagtcatagattatcattataggaaattttatatattagatagttttttactaaaaggatgtatatagtttatttttaactctacttaattagatacataatttttaattatctagctatataaattattttttaaatatactattaataatatattaattatatcttaatttatatatttagtatagttatgtagaactatattttatatgtttataatataacaaaataaaaataagtttatctatgtatattaatatatttatttttatcatatagtattattttgtagtatttatttttttatatataatttaaattatactaactatagttacattaatatatatatatattataatagattatataaacattagtttaaaaattaaaattagtttattactaaatttatatttcatatatatatatataatagtaaaaatatattttttagtataacgtatgtttattactagttatgtattctatattaatttataaaaattaaaccatattattcataatatatctaaataattacataatatagtatatacattctataactcactatgtatataataatatattattatttttaatagatattaaatatctattaatatatttattcacataaaataatttattatttttatatttgtattcatattatataatcaaattttgacatttactatatcttatttgccatagatataaagagttataataatttttattgataaaaaatatatattatacttaaaaatcatatgttgtagttacagtagagctattatgttgtaatgtataatctgtgatccataatgttgaatatatgatttggctgtaatttgaaatattttgtcctaattactaggtggataggccaatgtggatacagtttgattattatatgaaaaatgctcttagagttattttgaaagtactcttttatatacttctatggagcattctttttatacacttagttagtgtaagcaaggctgaaacacttttttcttatttatatacacattattcagaacaagaaagtttaggtagtcttttgacagactttgcattcactcagggatatagtgctattatttcacctgctgttcgtggtaatgtcagtggtttttttaaggatgagaatccataccagtttcttgaaggtatgaggagtgcctttggtgtcatgtggtatatgttaggaaaaaccatgtacttttatacacaggcagaactgcaaagagtgtttataagtccacaagttatgactgttgaacgcttatatcatatattattaaactcttctgttatttcaccacagttacctattcaactaaatggagatatgattatcctttccggtcctccacattacattgaacaagtattacaggctgtatctatttttgaggtttctcaattatctaatattaccatgcgtgttttcccacttaaatatgcatctgcagatgatattgttattcaaagtatggataaaactgttacagttcctggtattgctagtattttacgtgcaatgcttaatggtcaacaagagacagcaacaacaatagttgaacagcctgcaactgtgaataagttaaacggagaaggacttgcttcaaagggtaaggaaaaaacagaaaaaggtaatgaggtaaaacaacaagcagctggcgttaatattatggctgatcctcgtatgaatgctgttgttattaacgatgcggcatatagaatgccttactatgaggaagttattcatgatttggataaaccattagagcttgttgaaattcatgctgccatcgtagacattgattccgaatttaagagagaccttggttttacactacaacaaggaagttctaagaagagtatgacaatgggtggtgacttttctactactcaacaatcactaccacttgagattactaaaggaactgtcgaaggcggaggtctaacatattctaccatttattcaaaaggggtagagttctttttagcacgggtacaagctcttgaaacagaaggtgaagcaagagttttagggaaaccttcagtacttactgtagataatattcaagcaacattggaaaacacaagtacatactatattcaagttcaaggttatcagactgttgatttattcaaagttgaatctggtacggttctacgtgtgacaccccatattatatataataatgatggtacaaaatctattaaacttgttgtagctatcgaagataatcaaaatgataattcaacagatcctactgtaggttctaatgttgtactaccacctattaaacagacaagaattaatactcaaggtgttgttaatactggccaaagtttacttataggtggatattactatgaacaacaaggtgttaatgataagggtatacctattctcaaggacatccctattataggatatttatttaaaacaaatacaaaaacatcaaaaaagatggaacggctaatacttattaccccaagaattataatgcctaatacagttacgcctatacctgcacatgttgatgatccttcatttcatcgtagtgcagtacaggacacatatgatgatataaaacccaaaagttctacaggaggagggtgctctagaaaaagaagggctccagttattgaagagcagaggctaggctaatgagcaaagtagatggtattggtatatatgtgttttctgggccacatgttggtgcagaaattattttaccagagggaagctatactattgggacaagtgactcttgtgatataattttgacagatatttctttagctcccagacacgctcagcttgatgttcatattggagaaagtgaaaatacaacacatttgactgttatccctttagaagggggtgtttggtctaataatcaagctgtgccagagtcaggttttcaacctaaacctggagacttttggtacttagggaatacatcctttgggtggaacttcccaggtaaaaattggcaaaataaagcagcacaacaatatgctgaaacacttagccaagcagaaaatgataataataaccttggattagaaggtggaacaacacaaactcaggaacagaaagatgatttagttaagaaagtatttggagatacacatcctcaagatgttattagtaaaattgataagttttctatgggaaaactcattggtgtatgtctccttatcctttttttaggagctattgcaatttcttatcaaagggattctgtggatgaaaaaacacaagttgcatttttacagaaagtgctagaagataatggatttagtggtgtatcagttatcccaggtgctcaacaaattattattcgtggagttgtacaaagtgatgttcaacgacaattaatttatacattggcacaaagtgtgcattctcctgtatatattgatgttggtgttcgtgatgacttagttaacgctgtaaaagctgcttttgcttctagaggtattcatatttctgtcaaagaattttcagatccaggtataattagtatctctggatatatgaaagatggttttgttgaagagtggtcaatttctgctatgagggatgacattcctataccattcaagctggaaaagcatattgtttatgctaaagaggttgctgaagttttagacaaaatatttgcagaaaataaaattggttctttaaaagtgacgtatcttgcaggagaaatagaaatagtagggagttttgatgaggaacgtactaaaaagctcgataaggcattagcagaaataaaaaaagagcttgatgtgccaatcatgtttaaaattcaacaaatcaagcctgctcctattacgtctgcacaaaagggtcaaccagttaaagatgaaagtgatgaggagtcatcagtgttaggaggatctgttataaagggggtaacattattaccaataccatttattacattaagtacaggagagcgaatttttaagggtggggtattacctagtggttatacccttgattcagtttctttagacaagttgatcttttctaaagataatcaatataaagaatatccattgagaggtgcaaattgagtgagccatttatatccttatttgatgtagtagacggagatcctgatcatacaaaacttcgtactattaaaaatgattttgctgaaatgaagagtactgtaaaagctgctatggattcaggtttacctccagatgaaatgaaagttgctaatttactttatttagggattcagaggggaatggagattcttgaaacattctaattagttattttggagggctatatggctgttgaaacaggtgttgttgctcaaagtaaactccaaaaaattcttagtgaagagagtgggttatattcacaggacccaagtggagcattgtctcagcctgcacctgaggatgttcagaattttcagaaaattctcgaagatgataatcaaccgcaattaaatgtaataagccctagttatcatacacaggctatagagccttcagtacaaacggaaaatatagtacctgtggaggaggtgcatgaagtagaacagatagatttacctacggatgtgcaggatagagaaatagctataaataattcttcacagatggtagctgatcttaatacaggggtcattacaccagtggagcttcttaggttacaaaaagttgtaggagtagttcaaacacaagcagttacaactacacaagtttctcaacaagttgaacaaaatataagtacttttcttaaagagtagaggttggtgtgtatctctatatggaaaatgtagctgattctaatataagaaagctaaaagtaatagaatggttgttttttcaaaaaaagactattgttcttttgcttgctataatattactttatggttgtaaagttgaggtgtatcaagggcttaatgagatgcaggctaatgctatgttagcaaccttacttaaacacggaattgttgctgaaaaacaaaatacagggaaagctggttatactataagagtagataaaagtcgtcttgcagaatctttagagttacttcgtgaaagcggttttcctaaagaacagtataaaagccttggctctatattctctggagaagggatgattgcttcagcatctgaagatcaagcaaggttaagttatgctctttctcaagagttagcaggtactttttctagaattagtggtgtattaagtgcacgggtacatgtagcattggcaagtggcgatcaagagttagaacaacgtacacctgcatctgcggctatttttttacttcatacacctagctctcctgttgttaatcttgttcctaaaattcgtgaactcacatcaatgtctgttccagaattatctccagataaagtatctgttgttcttgttcctgtcagagaatctattacaattcctacagttgcttctctttcttctattggcggtatgtttttttctaatgggcatgcaacatatgtgttacttattttagctggtattactgtattaatgatggtggctttattatatcttaatattattttttggaagcatgtatggacagcatatagtgaaagtaaaagtaatacagataattagttataaggaagcactgtgttatggtaacgcaaaaaagatatacagattttccttcaatattgtttattaaaagtaatatgtttttcccagcacatggagtacatattttacatgaaaaggatgtaaaagcattattaacagcaaatgattttcttgaagaaacagataaatatttaaaaaatgctactcaagagacagaaaaattttataaagaacaatatgcattaggatataatagtgggaaagaagaaggtagttttgaacatgcattaaaaatttttggaactattttttcttctataaagtttgttgaaaatatagaaacaacactagttcgtgtagtaactgaagcagttaataaaattgttggtgaagttgatacattgaaccatattaatgattggattcaaaaagacttattacaattacaaagaaaatatcagctcactttatatatatctcacaatgatgaaaaatctgttacaatttatattaatacattatgtgccaacaagccacaattaaaaaattttttacacatagtgttagatgattccattaaacctggaaactgtagggtagaaagtgagctaggtaatgttgaagcaagcataaaaacacaaatgaaagctttggagcagtcattaggtgtttcaactgaactggaggtggaataataatatgagcaatacaaaaatatcaacatactcctttggtgataagccaggatcaactattactggtggatttggtgctcaaaaaccaactagttctgatataaatttttttgaacaatctattattaagcatgatgattaccctaataactatgaagtaaaagaagataattctcaagaggaggttgaagaaaaaccaactactcagccacctaaagagcaagtgacagataaaacagaaggtaaagatgaagcctttatagaaaaagatgatgctataggtaaagataaagacaaaattccaggaaagggagaacctatagagaaagaagatggagtggataaaaaagaaccaataaaagatgacaaagttgtagcagtaaaaaatcatgaaaaagatgacgattcatcatctataaaagatgatggattagataagcagattactccaatgatgttattatcaatggtttcaggaaaagatgatgaccttaaggtagcacatgttcaacaaataaactctccaactattgatttaacagaattagtacaaagaattatggttgcagctccttcaagtagtaataatggtgaggtaagaataacattagctcaaggatttgcaggaacagacgtaatattaagaagagataaagaagggatgctattagtaaattttttggcatcaggtacagcagcatataatcaaattgcaaatgcacaagatttattgaaacgtaggcttgaagttgttgaaggtaagtcagttaatatagaaatatcagacaaacagcaggaaacagaaaaagtaactgcagtagagggtagtggaacatcaacaacaaatcaataataattagtataggatagttagaatggaattacctggttgataaaggcaggctaatggtacaaactacacaaaaattatttgagcctgcgaatcttttacctctaagtgcgcaggtctataatacagcttctatgtgtataagaccttggcagtttatgctccaagatcaattatgtactttagatttactttttcttcatgatccatttagctctgtatacacaatagtcattcattgtggagaggggagatgggttattgagtttggaaaagtgcctcctctttcattatatccatcttttaaagataaacctgaagtattatgtgttcctgaagaggtaaaacttgcagtttttgaattactgatttcaccttttttacatcaattcgaaaatatgatgggaactcctgttgagctagtttcaagtacactttctcctcccagtagagataatttttcagtagcttgttctatccctttagtgttacatgtagagggaaacgaaaatgagattccttttttggtaaaaatagaaaaagaaaatgacgcaatattgcttttatcacaattacaggagtttcctttagcttatagtgatgttgggccattatctatttctgttggtattgaagttggatatacccagttaagtacacaacagttacagcaaatagaaaaagatgatattttaattccagatcagtttttcatacaagagaagaagatccagcttcgattttcaagatttttagcaaattgtacaatccaaggagggatggcaacaattatggatgttaatgatgtaggatatccagaagaccaaggtaatggtggtgagcaatttgtagaaaatcatacagaggctcctaattcacatggtcaacaacgaacagcgagagctaattctggaaggcaatctggtcaacagtcttcaggtattgatgtatctggtctggatttaccagttgtatttgaacttgaacgtcaattcatgacagtgcaaaatataggattacttgccccagggtatacgtttgctctatcagttgatgtccaagctcctgttactttacgtgtaaatggtaaggctataggggtagggagacttgtagatctaaatggttctttgggggtacaagttgtacaagttatgctctaaataaaactaatatagttatatgatgtgtttattttaactacgttattatgataataacgggttgtaaggagtttccatgcgtgtgattagtgaagaaaataatggtgttatagttatttctcttgatgggagaatagatgcaacaacaacaacgttatttgaagatgcctgtaaaaaagcttttgaaactggagtgcctgctgttattgttaatatggaaaaagttgaatatatcagttctgctggattaagaggtgttttaacaatgctaaagctaggtaacggggcctctgtaaatttagttttttgttctttaggagagatggtcagcgaagtttttagaatttctggatttaactctgtattaacaatatatcctaccataaaagaagcattagctgcactctcagtatagcggaggggcataaatggcaacacttactatcccttcagggattgagcagcttccacatgttaatgcatttctccggaaaagtattcctatggcttttaaaaagcgcattcatttgatagaacttgcagttgaagaaattttagtaaatatttttcgatatgcctatcataatgaaaatggaaatgctgaagtgtcttgtcagtttgttaaacataatgggactccttattttgttattactattaaggattggggagagccatttgatcctttccaggttccattacctgatctcagtttagatattaataatcgaccaataggcggacttggtgttcatcttgttcgaactgctgttgacttatataaatataagcgggagagtgatataaatgtagtggagctcttttttcagtttttagcagaaggaatgggtaataacaatatctctatttaattaattcttactatgtaactttattctttaggggatagtaactttagttatgttaaggattgtcccgctaaaatatacattatttgctataattaccctatttttttgtttttttgacacaacaaatatattagctaatgaaatattaaaaaatatacaatatacaaataagatagctgagcaaacaatgttagctatgcagtatagagtaaaacaagctcgtacacctcagaaatatcatcctagtgagccaatatatgaaaatcttttagatcagatggatgtatatagtctttctcccagcgcaaaaaaaattgtattacatagaatgattccaacatatgttaaggagaaggtttttcggggggaaataaaacttccttcagattggaaagaaatcatccaagtagccagtacaaaacataacttagatcctgctcttattgcagctgtaatacaggtagagtcaggcttttctggagaagctctttctcctaagggggcaaaaggattgatgcaactaatgccagatactggtttagaacttggggctacagatctttttgatccaatgacaaatgtagatgccggtagtcgatacttacgacagcaactggatcgatttggctctgttgagctagctcttgcagcttataatgctggtccaggtgctgttataaaatatggtggtattccaccatataaagaaacacaggagtttgtaaaaaaagttttatctgctttttaaacttataaaatgaaattttcttttaagagagcatagtaataaaaagtaggttgatatactttcaagttcttttttatagagtatgtacattgttgttttatgtgataatgtatattcataagagtaaaaatttttccagacaacttgtgatagcaaaaggagtctgaaatggaaactaactcaagctatcggggttcggatgatagtagccttattcaacttgtaactttcaaaatagcaggtgaagagtttggagtagatatattaaaagttcaagaaattatccgaatgatgcctattacaaaagtaccaaatgctccactatttgtggagggagttattaatttacgaggaaaggttattcctgtaattgatatgcgtaaacgttttggtatgccttctagtgctcatgatagtcagacaagaataaaagttatggatttacaaggtcaagttgttgggtttgtagtagatgctgtatctgaagtcttacgtattaaagaatctacagtagaaccaccaccacctgttgttgctggagtaggttctgagtatatgcgtggggttggtaaactccaagatagattgttaatacttttagatttggataaattacttactgaaagtgagctagaaactttgtcagcattatagataataataaagttggcttaattaagacatcacttgattcatataaattgatttttaaaaaagagacaacaaagtactttgttgtctctttttagctctattctttattcattagggacaataataggtgttacattaacaatacgtccatctttttttacattgagaggagaatgttcttttagatagcttataacagcttctactggacttttttggatatctgtccattttatgtcttttaacattataaatccatcatgtccctcagtaggatatccattaattataacacgatatgttttattagggtccagtggctcatatttcccattatttaaatattcaatagattgaatgcgttcacctacaggtttttcagcatttaaagtgaatctgagtcctgcaacttgaagaaaagttcctgcaaaggcaaagcaatgtacttttgagactccattttctatagcttcctgaattatttttcctgtaacatctcctacataaagtttatcttcaataggtatagctgtaacaacatcaagtttttgtacaagccctataggtaaatttcctcttattaatccagtggttacaattgctatttgtgctccatttgagcggcctgcttctaatattgcatcaagaataatattagctgttaatccctcttgttttctacagtaaaagaaaggtttttcgtctagttgttcatttgaaggttgggatgtatcaaaatttggatttctaggatgagctatttctccaacttttacttcaagcttttctttaataggtataccatagctatcaagcagttctgctatggatactatagcaggatcattactaattggcttatcaagacgtataacatctccattccatttttgagggataccttgttcatcaaatgttatattaatccttccaagatattctagtttttcttttgctgttacaataagtacaggatgtccagaaggtgaatgttttactataggataaggcccataagcattagggtaggtgttagaaagcaaagtatgtgtatgacctcctacaaaaacagagacatcatcgactttactagcaagttccatatctacatttattccaagatggcttaacacaataattgtaaatacattttgtttttttatttcttgaattgcattacgtaatgcttgttcagcattagtaaaaatggcttgagagcatgctcttgatccagtggctgttgcttctgtaataagtcctatgataccaatacgttttccttcacgttctacaatggtccatggagtaattgatgattgcatttcaggatctgtaaaggtgaggtttgcaactacaacaggaaagttaagttgtcttatagcactaaaaaattcataacatccatgatcaaactcatgatttcctggtgacatagctacatatccaagtctatttaaaaactttacaaatgggagttgatctggtgtatttataaagtcagaatgaaaagctgttcctacaaattgatctcctgcatcaagaagaatagtatttggtgttgattgacgaatgtctaaaatagattgtgctaaacgtgccattccacctacgcaatctggtgtagtagatgtgaagcaaggattacctgattcttttttaattcctccaaggtgagaatgtatatcatttgtatgaagaatagtaagatcaaagctccatacatcataaggtgtaacatatgttaaaaatataagaagaagtgtgatataaaaaacatatatttttttgaacatattatttcctttttattatcattatcattatcattatattgtagtaagctttttttaagctaatagtactataggtaatatttaaagttagactagttaatcatactactgtaactatatgatgtctaattaaattagtaaacagttaggttaggttggatatgtatccttatcctgtgttcttattaggtttattcttatgtattctatgttagaaaagttacaagtcataactagatatagagtcctactggctatagttagccttattttaataatattatttggtggtattggtttttggttgtataagtcacaaaaaagctcattagactatgctgttacaaatattaataaagcacttgaagaagacaatcttgttttattaagtaattatgttgattttgattcactttcaaaaaattttgttcatagtatacttcagtattggtcaagttttcgtatagatgaatcacgtcagaaagagcttgaagataatgtacagcaaatcattctattagctctaaggcataatgataaaaatcaaggcaataatattacttctgatagtagtattacttctattcagacgatagatcaaaaaatgccttttagctttttacctaaagattttttgaaacaacttaaagaaaaaaagtttactatttatagacaagatgaagatattgctattcttaaaacatctatagttcataacgaagctgaatatcatactgagcttagtttacttgtacaacgagttgctggtaaatggcacattacaaaaattattaatgctgatgagttagtaaaattacatatggctgcattagataaaaaagaagatcagttgacacatgaagtagctgtccgtaatgactatattcgtaatgaaatgaataaatattatcatgtatcagagtgtaatgcttttgttataaaaaaagaaaacagtaatgatgaggatgtccctttaactatttctgttggtggaattaatatgggaagtgaggtattacgttcagctggaatgcggtgttttctttatgatatacataaaaatattctagctgtcttacctcttacaatggctaagaatgtgtcacctggtgatttttttgaacaggagtggtatatggaaattccagagaatgtattgggtcattcttttttattaatgaaagataatacaataagttgtgcaatagaagtaacaacagttattcttgcagatggaacatttctttatctcaccccaacaccagagaaagaaaggcttcatccataatgttattccttctccgttttattcttgctcttttattcataccactaggaataactataagctatgcaaaagataccctttctgaccactcatcttctttgtcattaccaagtaaagcccaagtagttaatgaagtatggatgttgttattacaatctagagttggtgagttagaagcaattagctatgagctttcttcattgtttaaagagttaccaaatttttctcaacaactttcaaataatatacaagagatagaaaaaaaatatcaacaatatagtgcaatggccaaagttagtcgaggactacctatagagctgtctttagtagaagagagattaaaaaggcttgataatcaattatcagtagttatgagtccattgctagatactctcaatattttaaaggtacgtttaaatgaagtttctttattagaagaagatgcaggtgtaaaaacagaaaatttgggatcaagtaaggatttagatatttttgttaaaaatcttgcagaagtggaaaataaattaggaagattagagaaaagagttaatgaaattttgaagcctgcctatatgttgaggaataatattttagcagttcaaaggcagttgttagagattattccgtcattatggaaaagttattatcttgctcctacaggaaagatttatgaacctgcaagttggttaaatatttatgaaagtttaatgagttttaaagagacgttacttgtacgtatagccgcagagttgcctgaaagcaagcaagattggggaagttctttactaagattttttgttattttaattccattagttctcttattagtggttttctatagtttttctcggcattggtcagatgagttaaaaaacgtatgggggcatataagtaaacatagtttaatacttcttgcgttaggacttgcatttcatttttctgcctgggtaccagcaggagaaaattattttttattatctatgattggcactattataatgagtattggacaagtagggcttgcatggagcttgtatacattagataaatctaacaagccaaagttttctcctttttggaaattacttattcccttctttggtggaattcttttattattatttaatttttcaggtataattcttacattgctatgggttggtatattacttgttagtttttattatgatcaaaaaaaatgtaagctagaagatagtttttctcttgtgaataacttattacaactacatatagtgattttatggattacattgataatgacaatgcttggatggacaagaatatcaattcttctttgtatgagttatgctgcacttgcaatatgtattcaacaagctgttggatttgttagattagcaaacattatttcaaagtatataccacaagaaggctttcatggactttttagtggaatgctattggcagttgctttgccagcgattcttattctagcaatatctataacaggattatggattttagcatatcctggtggagcatatttaataacacatataacaaaacttgactttagtataggtaaggtatcttttagcttagtccaaatcttatttttagtaagtgcattttatataacacgttcttttgtttctgttggtcgtatgtttattgcaaaccttcctaaacataatatgggtatggatagaacacttattggccctattcaaacaggatttacctatactctttgggcagtatttttcttttctacactatatatgctgggtgtaagtcttactagcctagctgttgttgctggtggtcttagtgtaggtattggttttggtttgcagaatattacaaacaattttattagtggactacttataatttttggacaaaccttaagagaaggggatattattgaggtaggtaataatcttactggtattgttagaaagattactattcggactacattagtagagacatttgataatgcaactatttttgttcctaatgcagaattactttctggacggctcacaaattggacacgtaatggtcgtacagtaagaaaagatatcaatattggtgttgcctatgattctgatataggtttagtcatgggtttacttaaagaaatagctgataatcattcacaagttctccgctatccagaacctatggtagttttcagtgattttgcagcaagttcattgaattttattttacgtttttgggttggagatctttctcaagcacctgatattataacagatttacgtgtaattatagcaaaaagatttactgaaaaaaatattgatattgctttcccacaactagatattcatatacgtaatgatagtgtattagcattacgtagaatttctcctatggcatctagtgaattacaacctactaaaagtatagaggaccttccaggtgttactaataataagcctatcatagctaacagttagttacttattttatttacttatatgataggaacagagatctcctctttactaacttattatttatctatttacttggtgtacttttatttattttttttcataaactataagaggttagtttttatttatggttaattgctggtattgttatagacttgaaaaaaaagaaaaaagacttattctttatagaggaataagtcagttataggctaatattaatgaataagcttcataatccttcattaagtttgtttattacattaatccactaaaataatatgatatttttattcacgttataaattgtttgaggtataattttgtatttgtattctattcgacttttatctattcaacctattgctattttgcgagctatgctcacttctggttggtttgttgatgcatttttatatttttttgaaggtaaaggtaaagtaacacgttccttcttatgtgtttgtatgttagttgttggaggaatgttttttatatttatatcaggtgctttccctgattatagaggtattgaaattcgtaaaccgttatctctaagttctttaccaataccacctcaaaaagatacacgtcccctttcaggaagtttttggaacatccgtggagcatttgtacgtcaggagattccttcagatataaatagtccaatactattttcatctcagaatatgtttcaattctttgaagatagtgtaggtttgcgtactgctaaaggggttacaccacttgttattaaagagatggacgaaactatagcagaacttttttctacaaatacaatgttaattacatcgctaggagagccattaaactttgaaggtgttccattgcgttggaatataggtagaaatttatgtgagatgacaccacaatccattgcacgtcgtaatcaatttttgaatagttggatgaaattaacaactttttcaaagtcattagtccaacaagcagggcaatacaaagagattgttgaaaaatattctaagaagtataatctttctgctgaacttatctatgcgattatttgtgtggaaagtagttttaatcctgcacaaataagtaaccgttcagcacatggacttatgcagattgtgcctgaaatggcaggtgttgaagtcaaacgttggtttggttattctggtttaccaacagcagaagaattattacatccagaaactaatataaagtatgggacatcatatttgtatttacttatgacaagacatttaaggcctattacaaattgtttatctagagaatattgtgctattgctgcttataatataggtgtaggggctatgttgaaaacatttgctgttacacctgaagaagcttttgctattattaatacatatacagcagctgaggtacaagaacatcttatgcaaaagcttcctgcaaaacagacaagagtttttttagagagagttcttacttttaaggaaagctttactgttcttctttaaacaaagtaaatatattagagtttggtgttgttaaaagaaaatatagggatactataatgccaaaattgttcatactactcttttatacactaattttttttagtggatgttgtgtaactagtaaagttggtgttatagatcctataaggttattccaagaaagtgaacctgggaaaataggaatgaaccatttgaagacaatagaagatgctatgcaatcacagattgatcttgcacaaggaatcttggagaaattccctaaaaatgaaaatgttcgtgtccgattccaaaatatttttatggaatatcagcaaaaacttaacacagaacaacaaaaagttgttgaagttatgaactcattgattcaaaaaactcttgatgagtatagagtaaaaaatggatataatgtgattataactaaagacagtttattatcatatgattcttcttcggatataaccaatgatattattaccatacttaattccacaccattaacatttgagcctgttgtacttgatagatttgatcctgaaactatagttccaccattatctaataataactaattataatttctaaggtaattctaaagatagaaatagttagaagattatataggtttattttttaagttctatactacagttaaacgtaatggctttcgagtgggaatccaagtaaagtgtacagaagggtagccaaccataaggcctgcataaatttttctatcttcaggaagagatagtcctaaatctatatcttgatttgctgctgcaacaacaaatcctgcccaacatgatcctaaattatgactatgtagtgcaagctcaaggtatgttatagctgctgtacaatcctgagctccccattttgaatctttttgtgcatgtgcaaggataactgttggtgcatggcgtaaaataggatcatatccagcatcaaatgcagcagcaattttactatattttccaggtatagtacgtgcccagtcagctactctagaacttagttcatgtagtttttctttaccttcaactaaaatccattctacctgttgactatttatagctgttggagcatagcgagcttcatctagtgattcatttaatatatcaaatgaaattgattgttctttataaaaacggattgatcgacggcttttaaaaagcattgtcctttgctgatcagataatgaaggttttgtggctttttgaagtagatctggacatattaagtcaagagttaatgctgaccgaggacagattgcaacacagtgtccacaatggagacagtgagataatctgttgttttttataatgatgtttttagaacgtcttacaaggatacttacagggcagacttttacacattgaccacattggatacaaagagtttgattaagagagagactcataaagtaattccattaattgtatggtagctacgttgaacgtttacttcttctaatagaaattttccggtaattgattgtggatcttgcataatttcctcaggcgtcccggaagcaacaatatgtccaccattttctcctcctccagggcctaaatcaataacataatctgatgcaaggataacatctttattatgctcaataactacgactgttgcttttttatctacaagttgctgaagaacagtaattaatttgcctacttcatgcatatgtaaacctgttgtaggttcatctagtatatataatgtccctggtaaggaacgcttaccaagttctcgagaaattttgattcgttgtgcttcacctcctgaaagagttgttgctggttgtcctagctgaagatagtctaaacctacttcttcaagaatagcaagtttacgttctaatataggataattagtaaagaatttacgtgcttcatggactgcaagtccgaggacttcagaaatattaagtccacgatatcgaacttctaatgtttcatgattatatcttttcccattacaaatgtcacatgtgacataaatatcaggtagaaaatgcatttctacacgaagttgaccgtctcctttacatgtttcacaacgacctccaggaacattaaaactaaatctacctggttgataccctcttttttttgcatcaggtgtcatagcaaaaatattacgtatctcatcaaaaattttagtataggtagctgggttggagcgaggtgttttacctattggagtttggtcaatggaaatagttctttccaccttttcaataccttgaataccatggattattccaggttgatctacacggataccatgggcaagggcaaggtgtttatagagtgtatcaacaactaaagagcttttaccagaacctgagacacctgttacacaggttagtgttcctaatggaaaggaacatgttatattttttaagttatgagtggtaataccctgtagtgtaagataattttttggctgtctacgtttatcaggtataggtatagttaaatctcctcgcatatatttggccgttaatgtattagattcattgataagttgacgaaatgaaccttggaagactttttctccaccatgaagtcctgagccagggccaagttctataatcatgtcagattcacgaatagttgcttcatcgtgttcaacaaccaaaacagtatttcctcttttttgaaggcttcgtaatgtagagactagtctctcattgtctcgaggatgtaatccaatagatggttcatcaaggacatatgtaactccaacaagtcctgatccaagttgtgatgcaagtcgtattcgttgtgcttcacctcctgatagtgttgtcattgttctccctaatgagaggtagtcaagacctacgtttatcataaatttgagcctatgaataagctctttaaggagtggttcagcaataattgcatgtctacctgaaaagataacctgttgtagccagttaagtgtttttgacacaggtatagtacaaagctcttgaattgatactccttgaatttgtacagcaagagcttctgtacgtaaacgtgcaccatgacaaacagggcagtccatgttttgtaggtagcgagagagaatatccctccacatatcgccatattgtaaactttgttcaaggatgggaataattccagaccagcgttgattgtctattgtcttttgtactgtttttttacttttggatagttgagagggagtatcatttatttgttctccataaaataaaatatcaagagcttcagcgttgaattctgagagtggtgttgaaagattaaatccatattttcttccaagctctttaagagatgattcatagcgatgaaaaattttcggattagcccaaggtaaaatggcttttgtattaagagaaaggcctctattaggcgcaataagtaatggctcaaagtactctatggtccctaaaccagaacagcgaggacatgcaccttgagggctgttaaaagaaaaaaattgaggagtgagtgtaggaaagctaattcgacatgatgtgcatacagattctgtagcatggatagtatctattccttttttttcatcagatatacttatttcatgaataataacatgtcctccaccataacgtagggctagttctactgagtcagcgagtcgtcctcttatatcatttttaataataagtcgatcaactaccaattcaatagtatgttttttatttttatcaagagagggagcttcatcaatagtatataatataccatcaatacgtacacgaacaaaaccatcagctttaagtttttttaacttttctatgtgtgttcctttttgaagttcaacaagaggcgaaagaagaatgatttttgttccttcaggtaatgctaaaatatccgcaataatttcatctactgaacgagcttcaataggtttgctacaacctgtacaatacattttacctagacgagcataaaatactcgaagaaagtcataaatttcagtagttgttcctactgttgatcgaggatttcgtcctgttgtttgttgttcaagtgaaatagctggtgaaagaccttctattttatcaatgtcaggtttatccatttgaggtaaaaattgtcgagcataagtagaaagagattctatgtaacgacgctgtccttcagcatacacaatatcaaacgctaaggtagattttcctgagcctgaaggtccacaaataacaacaagtttttctcttgggatatcaatagtgatatttttaaggttatgttgtctagcaccttcaatatgaatacatttgttcattatggtttatatattccttatagtatatacagcaaaaatgaaaagttattagttggattaagtataatagtagagttgctgagctgtaatgataacacatatggtttcatagataaatattatggctattactaaattttagttataataggacaaaaaacagattagaatatcttatagttaattatataaaaggtaggcttaaaaactataccatagaaattagaagaaatcgtctaatctttacagtaactttataagcaaaaagaagaagactaaagggttcagaaaaaataagagaaaagtagtaataattatagattattaagtatacttattaacttaaaatagagaggtaaataaggcagcagctaatagctattgcaataaacatagagtaagtttttgggggatgatttaattcccatggttctggagaggccaaatgttttgctataataacagtcgactgtttagatatggacataataagaatacgtgtagttgtgctcattataacttgtatatgttgtagcctagaaagaagagaaagcctatgcctagtagttgcttgaatttgtgagactgtatgaaataatcgtggaatagtatgaagcattaatgaaagagcaagtgttatttcccatgtatgttgcttaaaaaaaggacggagataccatcctgcagctagtgctatatgtcgtggtgttgtttttgaaataagacataatcctagtaagataaggacacaaagtcgtaatcccaatataactgtattagtcagtagttcataacaacttattggcatagttagactatctataataaattttatcatgcaccaactacaaacaaaaaagatagcatggtaatataatgtagattttttatatatggattgattgaagaatggattataaagacagttaagtagacaaaaagaaattatacaaagataaagaggggaaagccaccaaactgtaattccacaaactatagttaaaagaagaagtggtcggggatcattatataatttgagaagatgcattttgtatccaaaaagatggtagacgaatattccactcaggatgttcagaaatcatatgtaatgtttcttttggtgagccaaaaaagacttgttttccttcagataatatcaatatgttagttgtaatatctataatttgttcaagatcatggacgcttatgattctagtaagacctttttgaccaagttgttgtagtattttacttaactggagggtagcaggataatcaagtccagaatatggttcatctaaaagaagaagatctggtttaagcataagtgcagaagcaatattaagcttttgtttttgtccatgagaaagatgatgtacacttgaattccaatatttttcaagtgcaaacaatgaagctaactcataagctttctgcttatattcatccttaggattagaccaaggaagaagtagattttctttcactgttgagccaagaagttgtatttcaacgtcttgtaacagtaatgctgttttttttaatagtgaagattcacttccaggacaacagatttcatccattatataagttccttcacaaatatgttggacacctgctaagagttgaaggagagtggatttacctgagccattactgccacaaatacataaaaggctacctgatgaaagggagaatgtaatatcttgtactgctggagtgtgttcttgtggccattgaaaggacacagagttaagctggatcattaggaagtaatccttttttaagcaaatatttccaaatagcaaaagcaataacaagctttaatatatctccaggtaaaaatggtaatacaccagtaagaattgcttttgttggggaaaaacttagtacccacattaagcctgtggcaccacaaaaataggttaccgctagtccaaggctcataaaaaggatagttatagcttttttaggtggacaatttttgttatggccactaccaaagccagttaaataggcaagacctataaatcctatgagatatcctcctgtaggacttaaaaggactcctggtccagctttacctccagcaaacacaggaagaccaatgcagcctgcaaaaatataaagaataacacatagtgctgcccgttttccaccaatacatagtcctgtgagtgaaatagatagtgattggagagtaaaaggtattggacctagaggaaaactaataaaggcacttacagcaatgagtgcagcaaaaaaagcaatccatacaatagtattaatacgggtaaatgtagaactcatagtattatctattcatcctagtgtattttatgagtcactattggtcttctagtatattttttaaaagttcaaaggtttcagagagaccagatggatttgttcctcctgcttgtgcttgatcaggccgtcctcctcctgcgccatggataggtactacaattttttttataagttctgaggcagtgaagttatggtgaagatcttttgagacatagagcaataagtgtacttttgttccctctgttgatgcaagacagactattccagaagaaagttttgaacgaatatcatccattatatctcgtaaagctttaagactgaaattttttaaatttgcagttagtacatctatgttatttattctagtgaggttatctaaaagatgttttccttgattagatagagagctagactctaatgtgtctacagttttttgtaagtttttattttcagagagaattgatgtaactttttcaacaactttttctggttttgttttaagaatagccgcagttgtggaaagctctttttggtattctttaatataagcaagggtatttctacctgtaattgcttcaatacgacgaactcctgcagctatacctgtctcagatacaataataaaacagcctgcttgtcctgtggatgttagatgagtaccaccacaaagttcaatggaggctgtctggttttctgaaccaatagtaacaacacgtacaatgtttccatatttttcttcaaatagagccattgcacctttttcaagagctgattgttgatccataaactcaactctaagaggtaagttagccataataatagtgtttacttgtagttctatagcatgaatttcttcttcagtgaggggggctatatgtgtaaagtcaaaacgtaggcgtgttggactaacaagagagccagcttgtctaacatggtcaccaagtattttttgtaaaactgattgcagtatatgagtgcatgtatggtttcttgcagtatctagacgttcagattctgaaactactaatagtgcttcttgatcaagtaagatagttccagatgtgacagtaacaacatgtacaataagatttgttgctggttttaatgtatcaacaacttgtgttttacctgttattgtactgagtatacctatatcaccagtttgtcctcctgatgtcccataaaaaggggtcatatctgttataacatagccagaactttttgtagggagttcttcaataggaagaccatctatatcaagtaacgcaacaattcttcctgttcctgaaagattttcatatccaatgaattctgattgcataccatcttcaagaagtgtttgaaagcaagcttcaatacgtttttctccagatcctttccattggcttctagctcgttctttttgttcttgcattaagtgttgaaagttagcttcatcgacagcaaaatgtttttttgatgcaatatcgttaataatatcaagtgggaaaccataggtatcataaagtttaaatgcaatatctccaggaagttctttagtatttttttctttaagagcattaagttcagcttcaagtaatataagacctttatctaatgtaatagaaaaacgttcttcctcatcaaaaactacacgtgacataaactcagatcgactatacagttcagtatagatatctcccatgagctcaacaactttatttactgttttatataggaaaggttgattcatgcctatttgttttccaaaacgaaaagctcgtcggatgagtcttcttaatacataacctcttccttcatttgaaggtaaaattccatcagcaatcataaaagctatagctctactgtgatcagcaataacacgtaaagctatatctgtttcttcatgttttttatagtgaacgccagcaatagatgccatatattgaataataggttggaaaaggtctgtatcataattagaagatttttgttggcaaatggctacaattctttcaagccccattcctgtatcaatcgaaggtttgggtagtattactctctctccggatgggagttgttcatattgcatgaaaacaagattccaaatttcaagaaatcgatcacagtcacaagaaccaattccacagttatcaccacaacaaaatgtttcaccttggtcaaagtgaatttcagaacaaggtccacaaggtcctgtatcacccatagaccaaaaattatccttttctcccattctataaatacgactaggctctacaccaatcgtgtttacccagatgtcatatgcatcatcgtcatctttatagatagtaatataaagaaattcttttgaaagattgagttcttctgttataaatgcccaggcaaattgaatagcttcttttttaaaatagtctccaaaagaaaagttaccaagcatttcaaaaaaagtatgatggcgagctgtacgtccaacattttctagatcattatgttttcccccaactcttaaacatttttgagctgttgtcgcacgtaggtaatttcttgtttcttgaccagtaaagacttttttgaattgtaccatccctgcatttgtaaaaagaagcgatgggtcatcacgtggaataagagaagaagatggaatttcctgatgattatagtttttaaaatatcctaaaaatttttggcgaatatcattaactgtgagcatatcttgttcctaattaaaagtgattaaggaattagatatcatagttatcttcaagttcatcgcttacaggacaaaggagtttttcagggttcattcctaagtgttccatgagcgctgtttcaatagaactttttagactagtattttcatcaagtagagctctgactttttctttaccttgaccaagcttttcagaaccaaatgcaaaccatgatccgcttttatcaatgataccagcttcgacaccaagatcaatgagttctccggagcgagaaatacctgttccccaaatgatatcaaattttgcttcacggaatggaggagccattttatttttgacaacttttactcgtgtaagtgaaccataagattcttctttatctttaagggtttgtatctttcgtatatccattctcacagagctatagaactttagtgcattacctcctgttgttgtttctggacttccataaccaactacaccaattttcatacgaatttgattaataaaaataactgcagtatgtgatttatggatagtaccagtaagcttacgtagtgcatgagacataagtcgtgcatgtccaccaacctgagtttctcccatagaaccttcaagttctgtttgaggtataagagcagcaacagagtcaacaacaacaagatctacagcacctgatcgtactaacatatcagcaatttcaagtgcttgttccccatgatctggttgggaaataataagttcgtctgtttttacgccaaggcgtttagcgtaggctatatctaatgcatgttctgcatcaatgaaagcagctgtaccacctaatttttgacattcagctataatatgtagtgttaatgttgtcttaccggaagactctggtccataaatttctgtgacacgaccacgagggatacctccaataccaagagctaagtctagcccaatagagccagtaggaattacagctacttttacatgtacatcatctgagagcttcattacagcaccctggccaaattttcgttcgatagtatctagtgctgttttaagggcttctcggcgggaatcttcaggagaaatagatttttttgccatggtaactccaaggtcttattataaatagtaagtaatatatgaatataatataagctgtactagatgtatagtttatattttagctaaagtttttgggaagttatgaaacaatacttccagtaggtacaggggactctacggttactaaagaaagtccactaggtgtttttgcaaagagaatcataccttgagattcaattcctctaatttttttaggagcaaggtttgtgacaacacatacttgtttgccaagcattgactctggagtatattgttgagcaatacctgaaagaatttgtcgaggcttgttttctcctatatcgatagaaaaacatagaagattatctgcatttggatgttttgatgcctctactatagtgcctatacgtatttcaactttttgcaagtcattaaaagatatttcttcttgttcatatattgatggttgtgacccgttggattggaaagacattttattttccttatcacttatttcttcttttagctctattctagggaataaatttgatgttggtgcaagcatagttcctgttgttaactgctcccaagcatgaatatcattatttatacatgtggtaggtatattcccatatttttttgatttagatgttgagattcctaactgttttaacatagtaatggttatttctggcatgattggccataagctaatggctacttttctcatacactctaatgtaagtcgaatgaccgttttcagacgatcagtttgtccttctttaaataatttccatggtgcttgagtgtctatatatttgtttagtgcacgaataagttcccataaagcttcaactgcttgagaaagacgcatatttttcatgagttgtatatagttatattgtgcattctcagtaagttgacgtaattgcatatcaggttctgtgtactctttagcttcaggtaataagcttttaaaatatttagttgacattgaaagaacacggttaaataaattcccaagatcattcgcaagatcagaattaatacgatgtttaagcgattcttcagagaagttagcatcagagccaaaattcatctctcgtataaggaagtaacgaaaagcatcaaggccatattgctgaataagagtaataggatctatagcattatttaaagactttgacatcttagtatcacgattcaaccagtatccatgtacatttaaatgcttatacattggaagaccagcggacttaagcatagtgggccaaaagacagcatgaggttttaatatgtctttagcaataagatgttctccaggccaaaatgttttatagtattcaccagttggccagtttaatgcagaaatatagcttataagggcatcaaaccaaacatagcatacatagtttgtatcaaagggcaattcaataccccatggaagtcgagtttttggacgtgatatacataaatcttctaatgctccactttctagtagagagagaacttcatttttatatctctctggtcgaataagatttggatgttgttgaagatactctataagccatgagagatatttagacattttgaaaaagtagttctgttcttcaataaactctggttttgttttgtgttgaggacaaaaaccatcttctagttctttttctgtataaaaacgttcacatcctaaacaataataccctccaaactctccaaaatagatgtcaccagcatcatagatatgttgaagaaatttttgaactgcttctttatgttgtaaatctgtagttctgataaatgcatcatatgtgatattgagttgaggccagagattttgaaattgtctacttatagagtctacaaactcttgtgttgaatatcctgcagcttctgctgcttgaataattttttctccatgttcatctgtacctgtaagaaagaaagttttttctcctaagatagaataaaaacgttgtaatacatcagcaacaattgttgaatatgcatgaccaagatgaggacgtgcatttacatagtaaataggtgttgagatataataagtagaagacacacatactcctttttcagtgttacataaatgtctattttttctcttgttaggtttagttatttttttctaatagcatagttatcttttagtgtatagaagataaaagttttttctatttatagacctagtattactaactttctgtaagaatagtatcaagagagttatcgtctattttattggtatcatgatctgataaaagtgttagaaaatcagaagagggatgtgaagttttattttggtgaggtatattttgtttaattgtttgaggagtagtatgtgtgggatgaagtttatcccattcttcaagtgtgtattcaatttcttcattagacatgttaagtacagtaatagtatttttgaacagatttgttcggatgacttttaaactaccttgatctgtttggtaacgtttaccaatttttggactttgtttgttaaatatttgataattttcttgttcatagctaaggcaacaaagaagtttaccacagcttcctgagatttttgagggatttagaaatacgttttgttcttttgccatttttatagagacaggtgaaaagtcttttaaaaatcgtcggcaacaacagactctgccgcaattgccaatagcaccagtaagttgtgtttcatgacgttcaccaatttggcgaagttctattttagcatgatattctcttataagatcttttataaggtcacggaaatcaatgcggttaggtgcagtaaaataaaagatgtatttgctctgatccaaggtaatttctacatcaacaagtttcattgggagttgatgttcatgaatgcatgatttacaaaatgcaaaagcattttttgaaaactctttatttttattaacttgttctaaatctttctgtgttgctttacgaatgatggatggaacagttaaaggatcaatggagttaggaagactttgtaatatatctacaacttgtgtaaggcttatcccctgctctagttctacaacaactttgtctcctttcataatgaaaggatcttcacaaaaaaagatatcttttttcccatgtggtctaaaacttgtattaagtatacgtttcatggcctaaaactcatttattatatatagtaattttaagataagttttgttcttttttcggttattatcacatctgtgtcaatcatagtgtgagattagggtagtgatttgtaattaaaaattctaactgtagatagtggttagattatattataactctgtttagagaagaaaggcataaaaatattttctatactgaaaagtgaagttttagagatcctatattatgtgtaatatatcagtttcatggggctttacttggatattaacctaaattagtaagctctacttttaagtttgactcactaagaataaaatttataataaactataaataaatatagttttatagtcattaggataagttaaactataggtaacagaataaataagtattataaaaaacacttgtcaaataaggatgaatcaggtatttagtccacaatctttgtatggcaaggtagctcagttggttagagcatgcggttcatacccgcagggtcgggggttcaattccctcccttgctaccaattcaaaatgactatattcattatcaactatatttattaaattagatgaattagttaaggatgatagtctcttttatctattataacattaaattttgatagttataggtagttaagaggaggtgttgcaatactaagctgtagttctcctgagaggaggataaatgctttccagatatataagaaacataagccattgtttaacacctctaactagtttgatattaatactttttattaagttatctactagataattaaggtttagaggtttaaatttttatttattaattataactcatatgtaaattttattagtttattatagttacatctatacttattctagtataaaatcactaccaactttatgggtagttaatatttttttgctacctttggtgataaagttttttagctttgaaaagcaatctttagcagcacattatatatacattgtagaataatcaaaaaggaacagttttttatcctatatttgaagtatagttgtttttttagtcagactttttttgtctcattttttttcgggctactcttcgttgccatacaataaagtgaatagtagccatagttccatgtcctaaaaggtagagggctaaaagggtagcactgactttatgtacttctttaaaaaagtgtgcataaagtccatctgtttgccatccaataaaccaaattattcctgctaattctgtaagaagtaaagctcctaatccaagtccttgaacaacagcagctaaaccaccacttgttgggggtataagtttaaaagataagcttacttttaaatcttttataagttgtttagtatcaccccatagataaggataaaagtgccttatacctctatggaaaagacatgcaggtatgaagagtaatgttaatagtgtaagaaggataccaatagaaatatggacccagaggagactactacatattatatatgtatctggattttttgtagaacataaaaagccatatccaagaataaggttaataactataagtaatgtaataacaatatgaagtattcttacaactggtggttggaaataactcatgaacttccaaagtaaagcagtctgattagaaaagaatttggctatagacatatatacgctaccccctttttcttatcactactacatttactatatagcttatgttatttatctataaataataagtaatataaaaatgttaatgtttcttatcataaaattttatgataagaaaatatattctttaaattatattctatctatagaatatagttacatatttagattaattccaaatagtaagctcttttcataagctaagctttagtatacaacacaataaagatatagaagaagaggttactctttaggaatagtatgattgcatatcttgaaggatatattgcagagtttggagaaacaagctgtgttgttgctacctctagtggtattgggtatgaagtttttttaactacacctacacgttcaacattacctaataaaggagaacaagtacgtttttatatttgtcatattgtacgggaagatatacaagaactgtttggctttgaaacatgggatgagcgacaaacgtttattgttttaacatctatatctaaagtcggtgcacgtacagcacttaacatgctttcaacttttcgaccaaatgatctaagacaatgtgttatagaagaagatatttttgctcttactcgtgtatctggaattggaaagaagacagcacaacatatttttcttgaacttaaatataaacttcaaattgatggaaatagtactacatcttcttccccttctattggtcaaagtcttttttatgatatattaacaggtcttcaaggactaggatatactaaagaagaaagttctgtagttataaagtccgttttgcaacatgaaccagatttagatgttggtagtgctcttagaagatgtctgaaacagctggtaaaggggtaacaatgcctgaaataatgcagtcttcttaccctgatgagacactttatagagaaaaagatgatagtattcgcccttctcgactcgatgattttattggtcaagaagagttacgtgaaaatcttaaagtgtttttaaatgctgctcgtgatcgtggtcaggctatggatcatacattattttatggaaatccagggcttggaaaaacaaccctagctcaaattattgcagcagaactaggggtaaaccttatttgtacttctggtcctgtccttgagcgtagtggagatcttgcagcaatactaacaaatctttcaaagcatgatatactatttgttgatgaaattcatagaatgcccattacagtggaagaaattttatatcctgcacttgaagattataaactggatttagttattggacaaggaccagctgctcgtacagtaaaaattgaattggaaccttttacccttgtaggagctacaacacgtattggtcttatatcttctcctttgcgtgatcgttttggaattattagccgacttgaattttatacacctgaagagttatcacaaattattttgcgtacaagtcgtattcttaatgttcctattactaaaaaaggcgctatagaaattggtcgacgctctagaggtacgccgagaatagctaaccgtttattaagacgtgttagagattttgcagctgtttttggctcagcaactgtagatgaagagcttgtaaatcatgcattacagaaacttgatgtggatgaaaaaggtttagatcagatggatcgaaaacttcttactgtccttattgagctttttgctggaggtcctgtaggaataaaaacattagcagttgcatgttctgaagaggttcgtacaattgaagatatttatgaaccttatcttattcagtgtggttttatgaagcgtaccccccgtggtcgtatggctacggtgaaggcttataagcatttaaatttaacggattaatcttattggagcatatatgcctggagttacccctagggttgaattattatcctatacaccagaaccgttgtcagttatttatgcatcatttagacagtgttatcatgctggatttgttggagatatgtggaagaaacttcttgatggagaaataccaaaagagaaacaagctagttttatccattcattaattgaatcaggccatacaagtcctattgaacatgtaagttttacgtttgctattagtggtgtttcaagagcacttacacatcaactgatccgtcatagactggcttcctactctcagcagagtcaacggtatgtggatggatcaaagtttgaatatattgttcctccttctatagctaaggatcctaaagcacttgaaaaatttacagaacttatggagagaataggagaggactatagagagctgaaggctttgcttgaatctggtaaaagaacagcttcttctattgaagatgctcggtttgttttaccacaagcagctgcaacaaatattgttatgacaatgaattgtcgtgcattattaaacttttttgagcatagatgttgttttcgagctcaatgggaaattagaaatgtagcatacatgatgctcaaacattgccgaatgattatacctgctatttttgatcctgcaggagcaaagtgtgaaagacttcaatattgccctgaaggagaaaaatatacatgtggactatatccagtgcgttaatataatttatataacaagatattataaataagctcttatataaaagtataagagcttatttttttttttaataacttttaaaagtataatagtagtagtagtagtagtagtagtagtagatggctaatat

SEQ ID NO: 8740 - protein, 348 aa, Lawsonia intracellularis
MIILLGTVFLIVLISALCSMMEAAIYSIPITYIEHLREQGSKKGEKLYYLHSNIDQPITAVLILNTIANTAGAALAGAIATTTLHESTMPFFAAILTLLILAFGEIIPKTLGVAYSKRIAIILLNPLCILIVTLKPLIMLSSYLTRLVSPRKRPTVTEDDIRALTSLSRESGRIKPYEEHVIKNILSLDLKYAHEIMTPRTMVFSLHENLTVSEAYSNPKIWNYSRIPTYGENNEDITGIIQRYEIGRYMTNGETEKKLLEIMQPAKFVLESQTVDHLLLAFLEERQHLFIVLDEYGGLSGVVSLEDVLETMLGREIVDESDTTPDLRALAKKRHSALIQNNKNTLLK

SEQ ID NO: 8741 - DNA, 1189 bp, Lawsonia intracellularis
caagctataataacttacgctatgttagcagcacttctaattagagcaatttattaggacaataatcatgataatccttttaggaactgtttttcttattgttcttatctctgcattatgctcaatgatggaagctgctatatactctatccctattacttatattgaacaccttcgtgaacagggaagcaaaaaaggagaaaaactttattatttacatagtaatattgatcagcctattacagccgtattaatattgaatactatagcaaatactgctggagctgcccttgctggagcaattgctacaacaacacttcatgaatctactatgcctttctttgcagcaatcctcaccttgcttattttagcttttggggaaattatacctaaaacactaggtgttgcttactctaaacgtattgctataattctccttaatcctctctgtattcttatagttactttaaaaccccttattatgctttcaagctacttaacacgacttgtttcacctcgaaaacgtcctacagttacagaagatgacatccgtgcacttacaagtctttccagagagtctggtcgtattaagccatatgaagaacatgtcataaaaaatatccttagtcttgatttaaaatatgctcatgaaattatgactcccagaactatggtcttttcacttcatgaaaaccttactgtctctgaagcttatagcaaccccaaaatatggaactatagtcgcatccctacttatggagaaaataacgaagacattactggcattatccaacgatatgaaattggacgatatatgaccaatggagaaacagaaaaaaaacttttagaaattatgcaaccagcaaaatttgtccttgaaagtcaaactgtagatcatttacttcttgcatttttagaagaaagacaacatctttttattgtacttgatgagtatgggggattatctggtgttgtttccttagaagatgtattagaaactatgcttggaagagaaattgttgatgaaagtgatacaacacctgatcttagagcacttgcaaaaaaaagacatagtgcattaatccaaaataataaaaatactcttttaaaataacagaaatatacctttactctctaataagtattaatataacttaaagtgtaagctgaaacacctttcaaaataaag

SEQ ID NO: 8742 - protein, 251 aa, Lawsonia intracellularis
MAKHKVRADELVFLQGLAESREQAKRLIMAGKVTLTNNSTTIPLRLEKPGHKYPLESICSLIGVERFVSRGAYKLLTALDFFKIDVKSCICLDAGASTGGFTDCLLQHGASKVYAIDVGKGQLHEKLYTNEQVINIEGVNLRTASKDLIPEEVDILTIDVSFISLTLILPSCIRWLKASGIIIALIKPQFELYPDKIKKGVVKETSLQYEAVEKIIHFCQSELGLIFIGVVPSVIKGPKGNQEYLIYLKKR

SEQ ID NO: 8743 - DNA, 894 bp, Lawsonia intracellularis
tatgactagcaagctaatatttatgtgttatattatcactatatatttttataaataataagatgagaagaaagaatggccaaacataaagtacgtgctgatgaacttgtttttttacaagggttagcagaaagtcgtgaacaagctaaacgacttattatggcaggtaaggttacattaactaataattctacaactataccattacgtttggaaaaaccaggacataaatatccattagaaagtatctgcagtttaataggggtagaacgttttgtgagtagaggagcatataagctattaactgctctagatttttttaaaattgatgtaaaaagttgtatttgtcttgatgcaggcgcatctactggtgggtttacagattgtcttttacaacatggagcatctaaagtatatgcgattgatgtaggcaaaggtcaattacatgagaaactgtatactaatgaacaagttataaatattgagggagtgaatttacgtacagcatctaaagatcttattcctgaagaagtagatattttaactattgatgtttcttttatatcgcttactttgattttaccgtcatgtatacgttggctaaaggcttccggaattattattgccttaataaagcctcaatttgaattatatccagataaaataaaaaaaggtgtagtaaaagaaactagcttgcaatatgaagcagtagaaaaaattattcatttttgtcaatcagaacttggacttatatttattggtgttgttccgtcggtaataaaaggtccaaaaggaaatcaagaatatcttatttacttgaaaaaacgttaataatacttattataatttgtattctatattatgtaggtatataaatataaagaggtatgatta

SEQ ID NO: 8744 - DNA, 1080 bp, Lawsonia intracellularis
ttggctattagaaaacgtaatcttaaaagtaagaatgctatatcttatcaagtatattggaataatccatatacaggtctacgtgaagcaaaaacgtttccaacgttatttgaagctagtgcgtttgaatcattaattaagcataggttaaaatatgaaaagacattttttaagcctaaagaaaatactacgttagaacctgtaaccttatatgatgctgtgttatgttatcttcaaaagaaaaaatttactccccaatatacaaaaataatcagttgtagcttgcagtctatattaacatcctatggtgatgtaaaactttctgagcttaaaacagatttttttgttcatttgaaaaattatcttgaaacaaaaacgaaaaagaatggtgaatgtttttcacgatcatatatacatatccaactatctcgtctaagaacaattttgaattgggcatatgaacaaggtatgcttgttatgcttcctaaaatgaaattaggagatccttattatactcggactatccctcctacgtttgatgaaattacaaggcttatagcagtatcaccaccccatttagttaggataattatccttggtgcagcctttggtctaagagtaggaccaagtgaattgttttctttaacatgggataaaatagatttgaaaagtggtgtagtaaggataagcacaagtaaaaaaaatcctcgattcccttggcgtgaggtccctataaaagatgagttgaaaccttttttttctacttggtttgaagaagatactaaaaatggattgtcatatgttattacatataaaggtaaacccattcgttctatacatagttcttggtcaaaagcattaaaaaatgccggaataactcgtcggatacggccttatgatttacgtcatagttttgctagtgaacttatttcatctggtgtagatgtgggaactgttgcacaattattgaatcattcttctccaaatatgctgtttaaatattaccaatatgtggagactaaacagaagaaaagagctattgaactgcttccttcagtttcatgtgacattactatgtga

SEQ ID NO: 8745 - DNA, 357 bp, Lawsonia intracellularis
atgttagcccttactccaatgggattaaaaatatgccgtgggaatcccctttatcctgatcacgttgtatatcttggggcaatcactgcagaaatacagcctaatgaaaaaataagtgttactatagcacgatttgaatctcaatataatataacaccaaaatttcttatagccccagataaaggtatttttatagctccaaacatcacgccaggagaattatcaatgattgaggctatagcacagatgacagtgcgtgtcccggataatacaactctacgtcaattagaacaaaaagatatccatatattagcccactgggatgtagaaactaaacgtaagtctttggataactaa

SEQ ID NO: 8746 - DNA, 351 bp, Lawsonia intracellularis
atgattgatgctattatccattctattcttccagatggacatactcatctagcaaaaaaactccatggtctatcttggataatggttccttatataaaaccagggttatctttaagtcattatttatcagaacaagtatcttctacaaaaacaaatatatttttattacagaatcatggaataattcttactggagatagtcatcaacatattatttcattattaaatgaaataacaaaacgtcttcatttacctgtaaaaccattaattcaaccaaatatatttcatcttataaagattaacgatagcaactggactattccagttaatactctatactacatatgttag

SEQ ID NO: 8747 - DNA, 330 bp, Lawsonia intracellularis
ttgagaaagagaagatatcggaagcatggtttactttattatgtatgtgatgttgtcgtgtttatttttatagataaaggaagaatccaagctataaatgtagggaatactataaaagtaaataacatgagatctgtaaagtatgagctcactaaaaagggagcaagcatggagatggatataaatttacaaatagggtctaaaaagagacaaaagaattctccaatatgtctccatgtacctattttatatcttgagttttttggtgtaaaaaaggatataaagagatatttatgcatggtaaaagtttttcttcttcctcaagagtaa

SEQ ID NO: 8748 - DNA, 1962 bp, Lawsonia intracellularis
atgaaaataaaccgtatcttttctttatgtattcactttccatcatactgtcttatcttcttttctttttttacaatatactatcatatttttttattttgtagagctacatttatacaattttgttatctaggttttcctttatctattttttctactctaatttatttttgttattataaatttaataatatttttatacaaataaaacaacatacagatactactaataattttattcaagatgaaaataaatacatatctataatgattagtatagcatgtattatcatgtttatatactttttcagtaaaagctatctcttgacatggatattatgtgttatttttttacttgtaagtctattttacaaaaaacaacaagaaaaaaatatccctgtatctactttaaaaataaaaatagtctggaaagatctttttgctatctttttactatcttttttatatgcattattaacaatttgtattaaaagaacagatgctgatgatgcactttttgttgctatagcagttcacttaataaacttaccacatgaacagctttttcagacagatccattatttcacgatataccatttaaaatttggccttatcagtttgaatcatttaatgttctttctgctgtattgtctactttaacaaacttacaacctgctaaagtctctcattacatccttgcaacaatatcttccatactatatccgttagcttggtcacgtttcttccttcactttggaataacaccacgagtaatattctttccttttttactactcagtttcttattagctgaaagtcatgcatctttcggaaactttacctttgtaagatttttccagggaaaggctatatttgtaagtataattgtacctcttatctatagttctatttgggattttattaacgataaaaagaagaaagacattttaaatgtctttcttctttctgttgctgcatttggatgtacttcttcagcaatctttattgtcccacagattattggttttagtttaatatgtgcttattcttttatttctatacgtaacatgtgttaccttatttctcctataatgtgttattatggattttggattataaccttttttataactattatttctcctataaaaaacagttatgttattccagtagtaactgaagatactgttcaatttgtatttggtactatacaaaaatttatactattattttttattttaacaagctggttatatataaaaaatcaaaagaaaaaatattatttcttattacttaccttattgtattttttaataccactaaatccttattgtatgcagatattaaaaataggagtaactccttatatttgttggagagaattatggacaatcccaatatggggtattgcatgtatagggctatatggtctgacattacttagtgcaacatatattgtatctatctttaaacagggaaataaaaactttatacagtgtattttgttatgtttttttactattagtatgctgtcgctttcaaacttaagatcctcaaattttgagagaatgggttttgacagactatggtacccacatatttatgaaaaagtactttcaactattgataaaaatctcacttcaggtcaaacaattatagccccttatgatctttcatgttggttaacgacatttaagaaaagatatcatgtccttacaaatagatacttagttgcactagatgaatacattaagttatacgatcctaatattgctgcttttcttaatttagaaaatcctacaaaagaagaacagatcttctttataaattgggtaaaagatgtctcacctaatgctatagtaataaaaaactctcaaagactttataacaacttaactttgctaggatatgaacgtatcctaatagatcctacaggagatttatttttaaaaattaaatag

SEQ ID NO: 8749 - DNA, 660 bp, Lawsonia intracellularis
atgataacttgctccttaagctggccctacttgcaaaatatttaccctaatttaccacaatatattaaaaatacccttccaatagaagaagtaactaaatatgacactcaagcaaattatttttatcaaataagaacttatattgatccattaggtaaagaggtatataaagatattattcgtacaatactaaaaaatgattggatgtctatatgttataggtatcccatgggaatacttcattatagtttatccccactttatttatattacaatttcaaaggcactaaagaacaaggattttctgacatacctctttcatggttttatagaatacaagattggacatatactagaatggagatgtatgcaaaaaacacaactttatattattggcaaatagcttggtgtatctttatactttctttactcatactatcttttcttttgttaaaaagaaaaaacatatttttgcaaaaagaatctgctatattttttgctatcacaccgctatcaacagcaataattttttcatgtaataatcctatatttatccacttacgatatacagttacttggtatacttctttttttatcttattaatgtgtttagttataccgaatatttatagcaaaaataattctgaaatagaaaaataa

SEQ ID NO: 8750 - DNA, 405 bp, Lawsonia intracellularis
atggtaaaaataattagaaaaaaatcctttaaaatatatattcaaatttttttctctattctttttatattacaattggtaatatctataaaatggataagtaacaactggggtcttattccctcctatggggattcagaagattatatcttacgaagtaatccattagtcatacataatattcgaccatttactttacctttattaatttgtttttctcaagaaataggaggtaaaacatattttcctcctattttgtttagtattcaaacaactcttactttcataagtatatggtttatttctggtgcattattaccaaatgtttcaaaaaaaagtcgtggaattattactatcttagtaggaacaaacccacttatcatgcattttaatcattctattgta

SEQ ID NO: 8751 - DNA, 981 bp, Lawsonia intracellularis
atgattattacacgtacaccattacgaattagttttgctgggggaggtagtgatctccctgcatactatctcaaacatggtggtgctgttgttagcacaagtattaataaatatgtatatctttccatatacccatatttccatcaaaatggatatttacttaaatatacacgtaatgaacatgtctcaactattaaagaaatccaacaccctatcctgcatcaagtttttaaagattttaatgtaaagggagtagattttaactcatgtgctgatatcccatcaggaactggactaggctcttcttcagcatttactgttggtcttgctcttctttgtaatacttatacagaaggacgatatattagtcgtgaaggattagcagcatatgcctgtgatgttgaaatcaataaactaggagatcctattggaaaacaagaccaatatgcttgtgctgttggtggtcttaattttattcaatttcatccagatgaatctgttactgtagaaaaactttgtttatgtagagaaggaaaagaacgactacaaaaaaatcttttacttttttacacaggaaccactcgtgcagcaatggaaattcttgctgagcaaaaagacaataccgtgaataaagtacaaattagtaagattctttcccagatggttaaccttgcttttgaattacgtaaagcactattaaacaataatatcaatatgatgggagaaattcttcatgaaaattgggagcttaaacggcaactggcttcaggagtaacaaatgaaaaaatagataattggtataaaaaagctcttgatgcaggcgctattggagggaagctccttggtgctggaggtggcggatttcttcttttctatgttcaagaagaaaatcataatcgtgtaagacgagcattatctgagttgcgtgaaatagagtttacttttgaacaagttggaacgactatagtttaccagcaatga

SEQ ID NO: 8752 - DNA, 1287 bp, Lawsonia intracellularis
atggactgtgtaatcattgctggtggtaatgctactcgtttaggggtaccaactattcctaaatcaatgattcctattaatggagtccctctcttagaacgtcagattttttttgctaaacaatatggtataaaaaaattttttattctttctggtagactttcatgtcatatccaagaatattttggtgatggtagtcgttttgacgttgacattacacatataaaagagccatttccactaggaacatctggaagtgttaaactagcacaaccttttttacaaagtcgatttctagttttttatggagatatcgtcatgaactttaatctccataaattaataaaatttgatgaaacacacccttctttatatggcacaattgtcgttcatcctaatgatcatcctcatgatagtgatattattaaagtagatttaaataatactattataggatttttccctaaacctcatccaaaaaattttttctatcaaaatattgttaatgcaggggtatatatccttgatcctctcatttttaatcatatcccttcagattcatattcagattttggtaaagatatatttccatatattgttcaacaagaaagcggtaacttattttctgcctataagactgcagaatatattaaagatatgggaacaaaagaacgtttaaagcaagtttcttatgatgttatatgtggaaaagttacaaaattacaccaagataatgctcgtcctgctatttttttagatagagatggtgttgtttgtactaatatgaacaatagtattgataaaacacaatttatgttactccctggtgttacaaaatctattaggaaaattaatcaaagtggtaagttggctatcatcattactaaccaaccaggtattgcaaaaggtttttttagtgaagaagctcttgaagctctacatgcatatatggaaacattattaggtaatgagggagcatacttagatgcaattttctactgtcctcattatcctgagaaaggttttgtaggagaacgtcaagaattaaaaacagtatgtaactgtaggaaaccacaaccaggtttattttttagtgctatgaaacaatttaatattaatatggaacaatcttggatgataggagacaacatagtcgatatgatagcaggtaaagctgctaagtgtaacacagcatttattggtgctgtttcaacttctatcccttcatatcagtataacctacaagcagactctttatcagaagctattgatattattttaaaatag

SEQ ID NO: 8753 - DNA, 1020 bp, Lawsonia intracellularis
atggaaattagtgttattattcctgtttataaatctcaggatattgctcgttgcctagattcatttctatcacaaacatataaaaattttgaaatcatttgtgtcggagataatgtcaaagatgaatgtcataatgtaataaaagaatatgtaaatcgttatccagaacaaatacaatttgttcttcaaaaaggtcgtggacaaggaggagcaagaaaccttggtatttccctatcaaaagggaattatattatgttttgtgacgcagatgattatgtagaacaaaatattttacaaatcatgcttagttcgttgattaaatttgatgctgactttatttgttgtgggtttgaccgtatttcagtatcagggcatatcttttcaaaagaaatgatgaaattcagtcaaacaatttttcaagtaacccctcaaaatataaatacattagcttatatattccctgccccttggggaaaaatttttaaacgatcaataataggtgattctcgattccctgaaaatcctatatctgcctatgaagattgtattttctttttatctttggctccaaaaattaaacgatatgttattctcccacaaatactttatcattatgttactcatgaacattctgctgtaacaaacgcctctataaaaaaaactataacctttaggaatgatcttataaacttaaaaaaagattttgaacaagctgggatacttcctatctatgaaccattattaactttagccgcgtttatacatgtagggatagcagatgttcatcgtatagcagaaacaactatccctctaaaacaatttattagcgaagtaaaacaatttttagatacatcgtttagtggttggaggaatatttcatatcgacaaggaaaaaaaattacaattcgtagcttgggagtgtattgtctaaaatggctttatatatttaattcttttaatatgttcatatctatatataatggattaataaaaagacttcgtatagatataaaatggtag

SEQ ID NO: 8754 - DNA, 453 bp, Lawsonia intracellularis
atgaaaaatatcgatatccaatcagatgatactaaaaaatatgaatatattattcatactaaaaattataaaaaaaatatattgttgactaagtataatcaaattattgaatatatagactcaaattttactgtgacaagtaatatgtcttttttagagattggttttaatgatggtttactttttaaaagcttgcaaaaaaaatatcctaaggcaaagtttataggcgttgaagttagacagtcatgtgttgataatatggttaaacaagggtttgactgtagacttattactaatgaactttttcctatagatgaaaaatttgatgtaatatatggtgcatctgtattacatcatatttcaaaaccatttgattttattaaacatttatttaatgctttaaattacaataagataaccagagggggggggggggatacttatttttgttag

SEQ ID NO: 8755 - DNA, 711 bp, Lawsonia intracellularis
atgaagaatattgaaattcaatctcaggaagatgcaacatatgaatgtcttttaaaaaatagacaatataaagcaaatatatttgctgataaagtcagacaagttagtacatatatagatagtggaataacatcatcagaaaataagacttttttagaaatcggttttaatgatggtttactttttaaaagtttacaaaaaaaatatcctaaagcaaagtttataggcgttgaagttagacaatcatgtgttgataatatggttaaacaagggtttgactgccgacttattactgatgagtttttttctatagatgaaaaatttgatgtaatatatggtacatctgtattacatcatatttcaagaccctttgattttataacatatttatataatgatcttctaaagccttctaatgggggggagggggacaaaattattacatttgttaatgaagctcataggtatgatttagtcagtatattacatacaactcttgtaagaacctggaagtatgaaaaacaattatttaagatatctaaaaataaaataaaaaatgcattacaagcattaacaaacgaatatgttattgattctaatcctcctgtttgtataacagggtttaagtctcttgataatatatatcgtaaaatgaaattacatcatatttcttttctaggaaatttatcttttatgataaaaaaagtgtaa

SEQ ID NO: 8756 - DNA, 759 bp, Lawsonia intracellularis
atgaatatgacgattacagattataataaaaatttttatgaaacaaagtggacagaaggtgctatccattatctaacacatagttttatgttcaggtatcatacggatagaattgtaagtatattacaaaaatactgtaatcatatatatatatatgaaatagcagactatggatgtggaataggtatccacacagtaacactagcaaatttttttcctaatgcttatgtccatggttttgatttagcagagaatggaatagaagtggctaataaggtacataacaaaaaaaatctaacatttcgtgttggagatataacaaaagataattttggaatgtttgatcttatttctgcttttgaagtgttagaacatgtagatgattggcaaagtttgctaacctctttagttgcaaaaacaaataagtaccttttactttcttttcctacaggtaagatgagaagttatgaaaaacttattggacatgttcgcaactttaagaaaaaagaagtagaatcttttttagaaactcttggtgttaaacctattacaacattgtatgctggattccctctcatttctcctctttatagagatatttgtaaatggtttcctgtggcatataataatgctcaaaaaaatgtcatgagtactaggatgaaaatacttcatcaagttgcttatttttttgtacgttactttactacaaaaaaatattttggagatcatttctatggcctttttcaaaaagaaatataa

SEQ ID NO: 8757 - DNA, 831 bp, Lawsonia intracellularis
ttgttatatttgtttataaataattacttaaactttattaaatatgtaatccttgattcaggaaatagaaaggtcaaagaaatgattgataataagatgatatatgctgaaagatggaaaccagaaactctacaatatatgaaaaaaagttttatacaccgttatcaatcattccttataaattacatattaacacactataagaatgctttgaatatatatatatatagaatagctgactgtgggtgtggtttaggtttacatacagtaacactcgcaaagtgtttccccaatgctcaagtttatgggtttgatttttctgagcaagggatagcgattgctaataaatataataaaagaagtaatcttagttttcatactaaagatgtaactaatgaagattttggaacttttgatcttattagtgcatttgaagtattagaacatattgaagactggaaactactccttgaaaaatttgttaacaactcaaggaagtatttattgttttcctttcctgtagggagaatgagaaagtatgaaaaaatgggaggacatttacgtaatttcaaaagaaaagaagtagaatcctttttagaaactcttggtgttaaacccctattagttttatatgctggattcccatttttttcacctatttatcgagaagcatgtggatggctttcaaatacatatgaaaaagcgtattataatattatgagtagaaaagtagaacttcttcaccatgttatgtattttcttgcatcctgttgttcaacaaaaaaatattttggagatcaatttattggtctttttgaaaaggctaactaa

SEQ ID NO: 8758 - DNA, 1131 bp, Lawsonia intracellularis
atgaagccttattcaaatttaatttttgaagttaccccacgttgtaatgcaatatgttattattgtcctacaggtagagcaaatctttttcatgaaccttcaaatcaaacgcctcttacaccagagtttctgcataaaactttaacatatatgcttaatgaaggaattataaataaaaatacaatagttgatctttttaataaaggtgaaccatttttgcatcctaatcttagtgacatttttgatgtaatgaattctttaggtttacattatacacttagttcaaatggatctgtaagagcttcctttaacgatactacattattaaaaaatcttgatagaattatattttctatgccagggttttctgatgaatgctataaagcagcacatggatttagttttgagaagacaaaacagaatattgtccggctactgacagagttaagaagatgtggttttgtcggagaagcccttcttgtatttcatatatatatatataactttgagcagcttaaggacgcagaagcctttgctaatgaacatggaatgattttacatgattacttagcatatgttgtagattatagagtttttaaagattttctttcaggtaaaattgatctaaatacaaaggaaaggatttcaaaagatctttttcttcatgatgaaaaacagttaaataaaattcttaattcttctccttcaaattattggtgtgaacatgaacgagttcttatgctcgatgaaaatgcaaatgttgttgtttgctgtgtggttaatcaatttgttgaacatgcattattaggatcaatatttgattattctttaaaggatctcatagaattaaagaaaaaaccaaaagcctgtattgaatgtaaacaatataagatggattatttttattctgttattaataaatatcgtgcttcggatattaacagattatatggtgaaaaaatcctttcgtattggccatattcaaaaagtttatctcgtaagattgaacgtcttattgttagagcatacctttttgctataagtaaatggggatattttggttattatgcgaataaccttattgacttaaagagggtatatagatctcttgtccaaaaaaatagaaaataa

SEQ ID NO: 8759 - DNA, 774 bp, Lawsonia intracellularis
atgttaaaagaagattgtcccaataataaccaaaaaatatataattcattttattctcaacattcatgggataaaagagatagccttgctgctaggtatattttataccttttaaaaaaattgttatgtaattttgatgtgtcccaaatcaaaagtattgttgatgttggttgtggtgatgggtcaaagacatacaatttaataaaaatttttcctaatgctaaaataaagggtgttgatttttcaaaagaaggtattaattatgcctcccgtttgtatgggaggggggggggggaagatcctgagcaagtaacatttgaatattgtgacattaatagtagttattatctaacaacaccatatgacctacttgtttctttttatgttcttgagcatatacaagtatgggagtctgttatagattattgggttcaatctaatataaaatatatcattatatttgtaccaatagggaaaatgtataaaaatgatttaagagaacattttagacattttaaaaaatatgaaataaaagaatatatgttagcttctggatataaactactcaatgctttttattggggattcccattttattatcctattacaaaaatagcaattgagttacaacgtggaacaatccataatactatggcaaaaaagccttctttctttttaaaaagagtatacgatataatgtattttttttatacaaaatgttgttcaaaaaaaattggtggtgactttattggattttttgaaaaaatttcttaa

SEQ ID NO: 8760 - DNA, 1464 bp, Lawsonia intracellularis
gtgaaaatcttttttttaaatcctccgtttaaaggtcggttttctcgtacatcacgtagtccagctataacaaaagggggaacactttattatccattttggttagcatatgctgtcggtgtagcagagcaaaatgggcatgatgtaagatttatagatgctcctgctgataatttagaattacaagatatttttactttactagaagattttatcccagatatagctgtattggatactagtactgcttctatttatagtgatgttaaagtaggagatgaaatcaaaagacgtttccctcattgttttgttattcttgttgggacacatccttcagcactgccagaggatacacttaatctttcgaaaagtattgatgcagtaactattggagagtatgattttacaattcgtgatatagcacatgctttagaacaaaagttgtctttacataatgtccctggtctagtttttcgtcataatgaagaatatataaaaacagctgaaagagaaaagattgaagatcttgattcccttccttttgttacgtctgtttataaaaaatatttaaattacaaaaattatttttttgcagctgcaaaataccctatggttatgattatcacaggtaggggctgtccatttaaatgcttcttttgtttataccctcaagtatttcacagtcgacgttatcgacctcgttctcctgaaaatattgtagctgaatttaaatatattaaagaaaatttccctgatcttaaagagattggaattgaagatgattgttttactgttaatactgcaagagtaaggaaaatttgtcagttacttattgaagaaaaacttaatatgacatggtattgtaatgtccgtggagatgtagattatgaaacactttttcttatgaaaaaggcaggttgtcgtttagtaactgttggttttgaaagtggagttcagtctgcacttgatcaaatgcataaaaacgaaaagatcaaaaattattaccagtttgctaaagatgcccaaaaagcaggaattatggtacatggttgcattatggctggaacaccaggagattccctagaagtacaaaaagaaaattatcgttttgctcttaaaattaactgtgattctatgcaattttatccactatatgtttatccagggacagaagcatatacttgggcaaaagaaaatggttatttgaagacagaggatttttctcaatggcttacagaagatggtagtcataattgtgtgatagatactgatatatttacaggtcaagaattggttgatttatgtaatcagaatctgcgtaaatatcatttacgaccagcatatattttgatgaaacttaaacaagcaatccatgaccctgaagaaggattacgtagtataaagtcaggaattatctttataaaaaagatactaagtttaaaaagaaagagagataaatgttaa

SEQ ID NO: 8761 - DNA, 354 bp, Lawsonia intracellularis
atgatgaatataaatataaaattatatctactacttaatgggattattgcagcaactggtacacttttgatgagatatggaggaaaaaatttagactttacacaggggatttgctatatagtaaccagcggttacttatggattttagggatgattctaagttggatagcaggtgtattttttgctttattattaacaaaatatggtattactgaaagtttttctttatacgttcctttagtatatttaatgattattggtggcggattattttttttacatgaaacactatcaattactagaggagttggagttctttttgtttttattggtcttatttttcttttaaaatag

SEQ ID NO: 8762 - DNA, 582 bp, Lawsonia intracellularis
atgcaaatatcatggaataattatgttcaaagaatatcaaagcttttgacttctgtagaagtgagtatttctggaggtaactccctttcattagaagatggttttatacattgggtacaaaaaacagaagaattacgtaatactaacaggacagtcttttttataggcaatggcgcttctgcgtctatggctagtcatttttcagctgatttaactaagaatgctcaaataaatacaaaagtttttacagacttatcgcttttaacagctattggaaatgatttagggttcgaatatgttttttcagtgccttttgcacgagatgtttgttctggggatatgcttgttgtaattagttgttctggtgaatcacctaatgttgttaatacaatccgtctagcacaatctatgcaagaaaaacaaattttttgtgtaagtttaactggtaaacattttagtaatactgttcgacaactcggagatttaaatttttatgttccaacaaatgcatatggagaatgtgagtcttgtcatgcaattattcttcatcattggatggattctatccaggtcaaatcttag

SEQ ID NO: 8763 - DNA, 375 bp, Lawsonia intracellularis
atgccactattacatataactattgttttccttttaggaattatatttttctttacgttattttcgttaattaaaaatggtatgttacgtgaacgttacgcattattatggttctgtataacaataagtattttttgtattccttttctttataatattgcggaatggttatggatacatatttcttttccctccccaacagttactttaataatgtttactctttttttatttatgcttatttgtcttcagctttctgtaagtgtttcccatggttggagacataaaaagcttcttatgcaagaagttacttttttaaaattgcgtattcaagaacttgaggattctttaaaaagaaaagatgaacatgtgtaa

SEQ ID NO: 8764 - DNA, 333 bp, Lawsonia intracellularis
atgtcttttatcctttttatttgtatgttttttgttttcttatgttccattgctatacgaaaaaactatacatcattattatcttattttatgatgatattgtctttgttaggaatgttttttgtggtagagcctgaagtaacaactgttgttgctaaagctgttggtattggacgtggtacagacttattattatacttttttgttataataaattttttattactattattaattcatgcaaagttttctagatatgatgttatcattactgaactagtaagacgacaaagcagtatattaataaataataagtatagcaaaaatatataa

SEQ ID NO: 8765 - DNA, 507 bp, Lawsonia intracellularis
atgaatttaggtcaaggtgcagcattacagacaggatttaactttgctttaaaagagggtgcagatattgttattacttttgatgcggatggacaacatcgaattgaagatgcattaaaaatggttgaagttattgctgctgaccaagctgatatagtttgtggaagtagatttttaggtactaaatcttttaatatgccattgtcgaaaaaaatatggctacgattagcaacaatatttgttaggatgactacaggggtaaaagttacagatgcacataatggactaagagcactatcaaaaaaagcattaaaagtgatttcaataaagcaaaacagaatgtctcatgcctctgaaattattaataatataaagaaacatcgtcttagatataaagaaattcctgtaactattttatatacagaatatgccatttcaaaggggcaaaagttaaaaaattcttttaatatagtaaaagaactttttatatggagtcttaacaaatga

SEQ ID NO: 8766 - DNA, 1020 bp, Lawsonia intracellularis
atgaaaaaaattcttgttactggtggactaggctacttaggaagccatatggttattgagcttatttataacggatatacggtggtatgcgttgataatctccataatagtagtgaagatatagtatattttattgaaagtattgtaaaagaaaaaatagagtttgtaaaagcaaatgtagaagatacttcaatgatggaagtacttttttcaaagtatacttttgatgctgttattcattttgctgggtataaatctatagctgaatctctaaagatcccattagagtattatcaaaataattataattctacattaactatcttacggctatgccttaaatataatagtacatttatattcagctcgtctgcaacagtatatggtattcctcaatatttaccattaacagaagaacatccactagctgctatcaatccttatggaaaaacaaaactacatattgagcaaattatttttgatgtagcaaatgcttatcccatgtttaatgcatttattttgcgttactttaacccagtaggaggtggtggaaaaggatttattttaggtgagcattctaaaaatgcaccaacgaatgtaatgcctataatttgccaggttgctgctggcatacagaaagaaatatatatttttggtgatgattatgagacaatagatggaacaggtgttcgtgattatattcatgtgactgatcttattgctggccatatggctgcgttaaaaaaggcagaagaaaataaaacaggttgtcatatctataatcttggaacaggtaaaggtataagcgtattagaacttattcatacttttgaaaaagtgaataatatttctgtcccctattgtgttgttgctcgtcggtcaggagatgtagcaagttgttatgcagacccaacaaaagcattcagagagcttaattggaaggcacaaaaaggtcttgaagatatggtgtatgatagttggctttggcaaaaaaatttactatctaaatatattgtgtaa

SEQ ID NO: 8767 - DNA, 759 bp, Lawsonia intracellularis
atggaagctatagatatacaaagtctctcaaataatatatatctatatgaaattataagagaaacgcttgtcattatcccagcatataaagaagaaaaacatattggatgtattgttagaaaattacgtaagttaggctttgatgtcttagttgtaaatgatgcttcgcctgatgcaacagcaaaaaaagcagaagaggcaaaagctatagtattaagtcatccctttaatatgggagtagctgttgcattacaaacaggttataagtatgcactgttgaatgggtataaatatattatcaatcttgatggtgatggtcaacataacccagatgatagtatacttttattgcatactcttgttacaaataatgccgatattgtgattggtagtcgatttctcaatgttggggactatacgatgcaaccatttagacttattggtaaaaattttttttcttttctaataaaaatattaacaggacaaaaaattactgatcctacaagtggttatagagctctttcgcatcatgcactttctttatgggcatcagaaaaatttgcggatgaatacccagatgcagatatgcttattttatcttatcgaaatagttgtaagattatagaagttggtgtagctatgtatcaaaatactacagatcaaagtattcattcaggtgttatccggcctatatactatattatccgaatgtgtataggagtagttatggcatttataggtggtactaagatatcataa

SEQ ID NO: 8768 - DNA, 333 bp, Lawsonia intracellularis
atgtcgaataatgcttttgatgttttattaacatccgaagctgaagatgatctttttgaaatttttctttatattatgcatacagactccttagaacaagcaaaaatagcaaggataaagttagaaaaaaaaattgtatcattgtcctcgatgcctgaacgagggaaatatacaccagagttattacagttaggtataagtacaattagagagcttaatgttcatccttggcgtattttttataggataaaagatgatcatgttgaagtagctgctatttttgatggacgaagaaatttagaagatatcttattaaataggctagttatgtga

SEQ ID NO: 8769 - DNA, 279 bp, Lawsonia intracellularis
atgaaattaagtcaagatataaaacctattagttatataaaagctaatagtgctaaggtgttagagcaggtaaatatttcaggtcctatgattattacacaaaatggagaggcctctgctgttcttatggggattaaagattatgaacaattaaaaaataatatagtattgcttaaagtcttgttgttgcgatttaaaagtgctgatgaaggtaatcttaaaccagttaaggaagtatttaaagatcttgataaaaggatagcagactatgtcgaataa

SEQ ID NO: 8770 - DNA, 1050 bp, Lawsonia intracellularis
atgaatgctaacatagaattaacacctgaagaagaaaaagagttagcatgtattaatcctcaattactagaagagctaaaaagtggtagccctattggtaaagcatggattgctagtatacgtagaggaatggaattaggtgaagaagctcaaaaacaagctacagccatccgaaaagaagttactagttcagcaccagagcaaaatagtttaatgacatggtgtgggtatcctacagatttaacacgatgtagcccttttttccctatgaatcccaaagaattaggaaatcgtgagttccttcgagattttattatcacttctgccaactggggagaaattacatatactggaccaaaactttctacatacgaagaagacacattaatggccttattggcaatattaaatggtgtaagtcatcatagaaagcctacagaagtggagggaaagaaaacatatacatataaagggcctgcattacctttattaaaactattaggatatacaaaacctagtaaaaaagattacaataggcttattcgaggattaaagttacttacagtagctggtgttgaactaactcttgcaggaggtaaaacaaaagcaggaaaacgacgtgaacccaaaaagcgatatatgacatctatgctttcagctgttttttgggatgatgataaaaaagaattagcagtaacagttaatccatttttttatgaagcatattatgcaaaaacaataacaatgattgatgttttaaaacgtgtaggacttaaaggaagtattgctaaagcgttatatagatttgttcaaagtcataaaaaagatcttgtttttacaggacattttttaacacttgcagatgcattgaatatggatagagagcaaccactatggaaaacacgccaaatgttaaagcttgcattagctgagcttattaaacatcagttattaactaaaaaaagtcgttttgttgaacaagatattattttaattgagcgagagcagacaacatttccagaaaaacaaaaatatattatagaagaataa

SEQ ID NO: 8771 - DNA, 1401 bp, Lawsonia intracellularis
atgtttacttataattgtaaaattttttcatcccctacaaaattttttatattaaactttttcttttggggagtcatttttctttttcttataccaccattccaagcacctgatgaacaggtacacttccctagagtatttgagttatcatgtggtaaaattttattatctaaaggtgaaaaagttggtggctctaaccttccaacatctattcaagcgtttacttcaataaggggtgatatccctttccataaagagcataaatttgactataaaacattatatcatcatcttacaacacctattaatgaaagagaaacgacttttatcacctttagtacacaactctattcaccattccaatatcttcctcaagtattaggagtaagagtaggtaaaatattcaatatttctatctgtattttatactacttaggaagactttttagcttatgtattattggagtgctcctttatttatctataaaatatatgccatttaataagtgggcattagtgatgctttgtttatcacctatgtcactatttttagctgtatcccactcctctgatcctatgatatttgcatgttcatttttattgatagctattgttcttcgtagtatgtatgacacctcttttcgattgagtgtttccattactgggttacttttattatgtattgctacacttgcaacttcaaagtttggaagttattttcctattcttttaatagtattattaatgcctactatagtattttcagataaaagagttggctatatatttaaactaatgctgtttgctataggcattgcattagcattgttttggaatctaaaaacaaaatttatttttgatgagttatcagatagtaacgctatttttactaataatattcatatgttatgttcttatgaatatattcagcttgttttacgcacatttataatactggctcatcgattatacctatctttttttaccctaggctggcttgataccccactacctaatattatgtgttattgttggggggttttgcttatcttactcacagttttttctagctcatcgatatctgcatatattcctttacttactagaatacttttcttttttatttcattagtaatatcaataggcattgttacaagtatgtatttggggtgtggaactacaggagagaatgttattaatggaattcaaggaagatattttttccctatttctatgcttgttcttctcacattttcaaatcttttccttattactgagcataaggtttttcaaaaaataaaatatactatttttgatagatggtacgtagtacagttattcttaatagtatttttgatgacaacagtatatgtcgtttttcaaagatattatgttagctag

SEQ ID NO: 8772 - DNA, 759 bp, Lawsonia intracellularis
atggctaaaataatagcaataagtaaccacaaaggtggggtaggtaaaacgacatctactgttaacattggtgctggtattagtaatggtaaaaaaggaaaacgagttcttttaattgacttagacccacaggcaaatttaagtcaaagtcttggggtccagcatgctgaaatgactatttatggttctcttaaaggtagctatcctttaacaccaatagaaataacgcaaaagctttttttgattccatcgacacttgatctttctggtgctgagatagagttaagctcagaagcaggtcgagaatttcttttacaagatctcatagaaccattacatgatcagtatgattttatttttattgattgtcctccatcattggggcttcttacaatcaatgctcttacagcatctgatgaagtgtatatccctctccaaactcaatatttagcattacatggtcttacaaagcttttagaagtaatagaaaagatacaaaaaaggttaaataaaaatttaaaattaggaggtgttatccttacacaattcgatgcacgtaagacattagatagagatgttgcaaacactatacaagaacattttgaggataaagtgtttaaaacaaaaattaggaatactgttgttctagcagaagcaccaagtcaaggcttagatgtttttcgatatagtccaaaaagtatgggcgctgaagattatttactgctatgtaaagaaattttaacaaaatctaaaaagtaa

SEQ ID NO: 8773 - DNA, 288 bp, Lawsonia intracellularis
gtgaaaactttgtctaatacaacttctgttaaacttgaagactcagtaaaaacacggattaaaaatcttgctgctattcgtaaacggacaccacactcaatcatggtggaggctattgaagaatatattgataaagctgaaaaacgtgaagcttttagacaagaaggtattaatgtttataatgactatcttaataatgggttacacttacctgtagaagaagctatagcttggcttaatgagcttgcaaatggtaattatgtggagccacctaagtgtcatctataa

SEQ ID NO: 8774 - DNA, 282 bp, Lawsonia intracellularis
atggctaaaaaattttttaagtctataggactagtcatacgtaactataggaaaacagctaaattgactcaagctagattaggagaaaagcttggtgttaaaggaaattatattggagaaattgaaaggggtgaagaacatccatcagttgaaatgttagtaaaattttctctacatatgaaagtaaggcctggtgaattgttagatactatagttgaacaagaagtagagagtgggaatgaagatttcccatggattactctttataatgaaatagattaa

SEQ ID NO: 8775 - DNA, 1038 bp, Lawsonia intracellularis
gtgaatcttgatattgaattaacaccagaagaagaagaagaacttgccacaattaatccaaaattattggaagaacttaaaacgggaagtcctattggtaaagcatggcttgctagtatacaaagaagccgtgaattaaatgagttagcgttagaacaagcaaaagagatacgtgaagaagtcgctaaagccgctccagaacaaaatagtttaatgacttggtgtggttatccaacagacataacaagatgtagtccatttttccctatggggccaaaagaaatatcgcacagaccatatcttgaaaactttattataacttctgcgaactggggagaaattacctatacaggaccaaaactctcaacatacgaagaagatgctcttatggctttattagccattcttaatagtgtcagcgaataccgtcagacaacagaagtagaaggatctaaaacatacacctataaaggacctatgcttccattattaaaactgttgggccatgaacgaccaggaaaagcaaactataaccatcttcttcttgcattacaaaggcttatgtcggcagtagtaaagctttctatatccgtggggaaaacaaaatcaggaaaaagaaaagagcctaaaaaaatagacatgactacaatgttagctcatgtccactgggatgaagaaaagaaagaattatcagcaactattaatcctttcttttatgaatcttattatgctggaacagtcacaatgattgatgttcttaagcgagcaggacttaaagggagtatagctaaggcattatatagatttgtacaaagccatcgtaaaaatcctgtatttacaggacattttttgacacttgcagatgcccttaatatggatagagaccaaccatcaaaaaaaactcgtcagctattaaaaacagctatcctagaacttataaaacattctattttaagtcctgaaagtcgtttcatagatcaagatattgttaaacttgaacgtgtacaagtaatggtttgtgataaattaaaagtatag

SEQ ID NO: 8776 - DNA, 2820 bp, Lawsonia intracellularis
atgtataatataattaataagcatcaaatcataaaaattttattattttccttatgtgttttcttttttacacttacagaaaaacaaaaaatttatgctgcagacgtcttttttgagggcagaaccgaaaccttaatcaatgtaaacaaaccatttgattctttttttggaggttctgactctacaataggaacccttgaaacaggacctactaatcttaccttcacaacagtaggagccttccgcaattctgttttcagaattattggtggtggtaggtctagttttaacaacccaaatacagttaaaggcaatgttactctaactgtttataatactgatgtagaaagaataattggtgcaggtatcagcaatagaggacttgtaaccgttactggctcagtaaatatgaagctagaaaatgtttctgttactagaggaatttatggtggtgtctatactcaaaatggacatgtactaggctctatcaacatgcatttgaaaaacgtccaaactccactattaataggttctggagtaagcaatggacctaatcgtattactgtaaatggagacataaacattgatgttgaagactctaggattcaatatgtaaacattacaggagaagtagatgcagggataaaaggaaatgctactctaactgtaaaaaaatctactgttgagcttataaactctggtagaggtaatatcttaggtaatctcaaaatatctatagcagattcaaatataagggggttatcaccagtagactttggttcttcagtatatggggacacatctataaatgtaattaattctcagattaatgatattactcttataccaagggctggtggaatgcttgtaggtcctgttaccctagatatcacaagcagtactatacaaaatatacaatgtgggcctgtcagtcaaaataatcaacttaacacactaaatgtaactgttaatactagtaacattactaacttaaaccttggtagtgtcgaaggtcatacaatatcaactacagcaactgttactgatagtaatattactaaccttaatgtcggaaccttcaatggacttggagtaactgagaatgcctctgtaatcattaatagtggcaatattactaaccttaatgtcggaactaatgtaatagctgcagccacaactattaattcctctgcgaccatacacgacggacttattgcaaaccttaccttaggctcacaaggtaatggtcgtactatgatagctacagcaaatgttaatggtggaactattggattattaactatgggttcagaaaacttcataccaggcacaagaccaattactgaattagcaatactaaacatgtctggtggattaattgaaagaattatcgtaggtaatgccaactcttcaaccataaactttactcctgggaagagatcaattgtaaaaacaataaatggtccagaacttccatatttagttaacatacaaaaaggtgctatgacacaatggggcactaaaaatatgccctttttattggatacaagaaatttaatcttgtccggaactctgattacctcaaatattcaactagctgatttatctataaccaatctatttgttgctaatggcggtacactagtacctagaaaattaatacctgggaaccaacctgttatacagtttcttggaggtcctcaatcactcttagttatccatcaaccattaaaagtaaatttaagcttatcaccaaaacttattggaagtagcatggtgccacttgcttttgtctctcaatctttttcatcaccagatctttttgttaaacaaactagaagtggtctcatttggagtgatcttgagtttgatccaacaacatctatttggtatgttaataatatccaagcatctcaagatttttactctttctctattgctcgtgagactactaactggctaagacaacaacatatatggactctacaaaaccgttcaagtaaacttttagacaacgaacattatggactatggataaatgttcaaggtggacatgaaagtcttgatacttctattggtagcaaagcaaaaatgccatggataatggcaacagcaggatatgactatcttcaacaactaccaaggttagatatgaaagccctttatggtcttgcttttggtgcttctaaaggtaaaagtaaatggtctagcgtcaactctacaaaaaatgatgctgagctaggtatggttagtggttatgtaggtcttatccataacaaaactgggctctatagtacattgaccttacaacttgcgtctagtaaattacatactaattctacagggttctatagaaattttaaatggacagaaacaactccaacagaagcacttgaacttggatggaaatacactttcaacaacggtattaaaatgaatcctcgtggacaacttatttttgaacaaacatctaaacaccattttgatttaggaattcaaaatgataaggctatattagataaaagccagttaataacaagttctcttggtattaccgttgaatataagctaccagttaccacacctattaatctttatgctggtattgaaaggataaaaggtcagtctggaaactttgcaattagttcccagagccttcaaatgaagttcaagcatgacaatgatacaagtgtagttagagcaacaataggtacaaatatattattgggagaacattttaatattcactgtgatatatttggagataaaggaaatgataaaggcattggtgggcaagcaggatttacatacaaattttaa

SEQ ID NO: 8777 - DNA, 1005 bp, Lawsonia intracellularis
ttgggaactgttaccatacagacagtatggggggaatgtacttttgaacaccctattttaaaaaaaattatagaacacaatacactccaacggttaaagtatgttgatcaatctggaccaataacatattttggatatatgccttacttcaataggtatgaacatagcataggagtattagctttattacaaaaagcaaatgctcccttgaatgaacaagttgcagggttacttcatgatgtatcacatactgttttttcacatattgctgatcacttactttataaaagtaatttagaaaaatcttatcaagatacaatacatttaaaatttttaaaaacaatgcacgttcaaaaagtaacagaaccttatgggatatttcttaaagatcttgatcctgacaatccttcttacagtgctctagaacaacctttacctaacctttgtgctgatcgtatccaatatctcctgcatactggtgttattgtagaaaaaatatcctgcaatcaagctaaaatggttatagataatttaaaatttcaagatggtatttggttctttttaaataaaaaacctgcaaaaattataggaatgctatctttagaatttactcaagaactttatggagctccatggaattttgctttttatgaatatttcactgaaatcttgaaagaagctttaaaaataaagcttattacactatcagagataaaatatggtactgataaaaatgtattacatttgttagaatctagtaataataaatttatcaataaaggaatgaaacatctaaaagatgtacacaatatttttaaagaatacccttttggccaaggggagctaaatataaaaccaaaatttagaggagttgatcctcttataaaagtaggggaaaattttgtacgcttatctgctattgatccaaattttaaagaaaaatttgaagaagtaaaaaagtggtgtaatacaggttatgggatacgctttgttattactaaataa

SEQ ID NO: 8778 - DNA, 2172 bp, Lawsonia intracellularis
atgatagtaaataagctgtcaatctttatctataactatactactaaagtacgacattatattaattgtatctaccatacttgtgtatcttatagtcaaatttttcgaagttggctttggtatcgtcgacaattaagaataggattacttttctttttatatttagttagtgtttatggcttatcattttcgaaaagtcctgaagaaaatgaagaagaagctaaaggacgtcaacgggtacaagcaatggaacttagctttcataatgcagcaattagtcaagaagtaaatgagactgtatcttcaatggaagccgaacttgaagaagaatcagcatatgctacagaattagagatccttgtagatgaaacagtaaaaacattttttgaaactactgatatagtaactgatgatgtggtatcagttatgttgcaaggtattgatgaaacggcttctgatttagaaaattcagaagtaagagctagaaaaaatttagaaaaacttaaacagcttacagagcacaaaaaatttttgattggtcaaaataagctaagactttctaatcattgttgtcgattacaggaagttatactagaaaattctgatattactcatctagaagatgctgttaaaaggaatagacaaaggctagctcaccaagaagtcatgctaaaacaactagaagaaatatgtagtagaactcaagagaagcagctttttcaggaggagagaaataatagtattatggctgaggttgcttcattagaagatcttttttatacacagtgctctggagaggaagatcatgatgaaaatactgcttctactgagggtaattatactcaggagggaagttttgatgatatgccacctttagaaggagaggaagatgaggatattactgatcaacctcaacctctaagtcttcaggagaatcaagggaaccaaagcagtactatacaagaggatcaagaaggtaatagttcacaaggagggtctgtatcaggaccacattttatgtcaagctcgggttctaataattcccaagggggagctagtggtggaacatctacattaattcctggctataatgtacatagtcaaatgagctcactacagggattacaatgtgtccttttatctgctgttgaacaagtagcagagaatttaaaagtattaatattaaaagcaataaatgtatcaaaagaaaataagttcaatgtagcaagttttaactacagaacgtctaagaaaaatacttcttctcagaaacatttttctgcaaatgttccagcaaataaacaaggagtagatagtaggatagtttcctctttagacaagtttcatgtatttgctgttatggatagctatttaatgaatttagaaagtaaagttcgttcaggccaattaggtattatcacaaatattttttcagatttatctataggcttggcttatgctcataacaatagctcatctaaagaacatattggggcaatgtttggttcagttatagggtcagcaaaagcaaagatgaatactaatgcactttcagccattttcatatggaacactaataagacaggtttttctggttgtatttcaagttattatggctgggggcagatgaaaaatgctagacaatatttgcatactgaagaaatcataagttctaaagggtctcctgatattatgttaggagggggacttatccaattaggatataattgttttatttcaaaatcagtaatgattactccctatattgaatatctttttataacaacaggctggaaagaatataatgaaattacaggtactttgccttctcatataagcagtactaaggagcagttgattagtaagaacattggtattagaagtcgtataaatcttatgggaaattctcaacttcaaacatgggttacaggtgcttttggacaacgtaagctaggtacgattactgctcaaccattgaaatcgaccaactctatatataaagctatggtccaaaaagctaaaaataaatatgttcaaggggaaggaggtctctcatatgaaattatagttacaaataattgtaaaattggcctaagtggagatgtccagtttgaaaagaatagaccattgaagaacggtaatgtgagatgtttttttcaccttacatactaa

SEQ ID NO: 8779 - DNA, 1881 bp, Lawsonia intracellularis
atgtgtggagtttgtggcataatttgtttagatggagacaaaccttcaaaagaagtattaagtcatatgctcgatgctattagacatcgtggcccagacaaggcaaatgttgtagttgatggatgtatagcacttgggcactgtcggctcgcaattcttgatctaacggacgctgcagcacaaccaatgtctacttcagataaactttttactatagtatataatggtgaaatttataactttgaagaaatccgacgagagctaataaaattaggacatacatttattagccgtagtgacacagaagtcattcttcatgcttatattcagtggggagcgcaatgtgtaacaaaatttaatggaatgtttgtctttgttatatacgatgttattcgaaaacaaatatttatagctcgtgatcgttatggtataaaaccattatactatactatcatccaaaataactttttatttagttcagaggcaaaagccttcttacgttatccacaattctgtacgaaattagattatgaagccctactagaatattttacttttcaaaatattctaacagataaaacattactgcataatgtctatatattccctcctgggcactatgctattttacctttaaatacaggccaacttactttttcacaatattgggattattgctttgatgaaagtaagaatatccattctgataaagagtatgaagaagaattaacatatcttattcagcaggctgtacagcgtcagctgcaaagtgatgttgagctaggtacttatttatctggaggaatggattcaggttcaattacagctttagcttctaaacgtttcccatatattaaatcatttacttgtggctttgatctccattccatttcagggttagaacttgcttttgatgaacgtaatgcagcagaagcaatgtcttatctattcaaaacagaacactatgaaatggtcctaaaatctggagatatggaacgagtatttcctcgtttagcttggcatatagaagaaccacggacaggacaaagttatcccaatttttgtatagcacacctggtctcaaaatttgttaaagttgttctagctggtactggtagtgatgaactttttggtggatatccttggcgttattatagagctcttggagaaaaaggagaaaatagttttgaaaagtatattgatcgttattatttattctggcaacgacttatacctaatcgatatctactaagcatgttcaaacctattgaaactcatgttcgtcatgtacggacacgtgatatttttcgtaatatatttggtgataataattctcctgtaaccagtcatgaagaaagtattaatcgttccctctattttgaagctaaaactttcttacatggattactagttgtagaagataaactttctatggcacacagtttggaaacacgccttccatttcttgataatgaccttgttgattttgctatgcgtttacctgtaaggtgtaaaattcatagactcaatgaaacattaagaatcaacgaaaatgaatcagctaaagctagccgctattataaaaaaacaaatgatggtaaatggctccttcgcagagcaatggaacgatatgtcccaactcacattattgaggctgttaaacaaggattttcagcaccagatgcttcttggttcaggggcgaaagtatagactttgtccatcgatatttattttcacaaaatgtacgcctttatgagtactttgatcgtaaagtagtccatgagcttgtaactgaacatctggaaggaaatgccaataggcgtctttttatatggtcacttttaagctttgaagaatggcttcatcaatatttaccataa

SEQ ID NO: 8780 - DNA, 792 bp, Lawsonia intracellularis
atgctaactgattgttttggtaatcccatacaaacgcaaaatgcaattgcaatcacttttgatacagactgggcaccagattggtgtattgcattatgttttgaactctgtttacaatttgacattacagctactttttttgttacaaatacaagtcctatcttaaaaaaaatagcatctaatgatcgctttgaactcggtattcatccaaactttttagttaatcataatataaaaaaagataatacacttttttatcaaaatatattaaaatcatatcttcaaattgttccagaagctaagtctatacgttctcatagtctttatcgtgatagtagactttttgtttatattgaagaacaagttccatctatttgtaatgaagtttctacttttttaccaggacatatagggttacaacctgtacctattcgattttctcctcatggacgttcattactacacttctcttgcatatgggaagacgatattgctattcttgaacctcaaagatggttaacacccctatttaatagcgccttacctggtgtatatatttttaactttcatcctattcatattgcacttaatagttgtagtcctgaacaatatagtaatttacgaaaattttataatatacctgatgttactcctgaagattgtaacaaatttgctaataaaaccctctttggagttaaagattattttgagcgtcttatagaatcagtaataaattcattcccccccttcccctcttttaggactattaattctattagccaaaattattaa

SEQ ID NO: 8781 - DNA, 1017 bp, Lawsonia intracellularis
atgtctttgatatcattgcctgaatggtttaaaaaaaataccggttgttttttaaaaaatgatatacttcttagtgctgatagacaaaaaaaatatattatggacgatggagtgtggaaatcaacaactaattctaatagtaacaaacaacttcaaacaagtaatatatttagttataaatggaaccaagagaaaacatacacttcaccagcattgctaaaaaaaacacaagaatggttaaaaagccgttatgactatatatatatatatttaaaggctatccaagaccaccctatatttttagatgctggttgtggagcagcattttctacattagaacttttgggagattgttttcatcaattaaattatattggtgtcgatatctctgatgctattacaatagcacgtagacgcatacaggatgcaggctatgatggtatattcttacaagaaaatttaatggatcttccctttaaacctgaaagtatagatatcatcttttcagaaggagtgttacatcatacagattctacaaaagaagccataacaaaattaactcctcttttacgtaatggaggcttatttcttttttatgtttatgctaaaaaaagtcctattcgagagttttcagatgattatttaagagaacaattacataaactgtctcctaaacaggcatgggatgctttaaaaccattaacagaattagggattcaacttggagaatctaatatggaacttaatcttcctaatgggatagaattattagatgtcccagctggtaaaataaaacttcaagaatttttttattggtacattttaaaagcattctatgcaaaagagctagattttgatgcaatgcaacatattaactttgactggtatgccccacaaaatgctcatcggcagacaccagagcaaatttctcaatggtgtgatgaacttaacctgaatattctttctatgaagacagaattatcaggcattacagttgttgcaaagagacaatgctaa

SEQ ID NO: 8782 - DNA, 1125 bp, Lawsonia intracellularis
atgttccgaataccattaatgaaaccttatataccaaactcatccaaaaaaaatgttttagatgttcttaattcaggggtgttaacagaagggatctacacacaacgattagaaaaagcttttactcaatatatagggacatcgtatgctataggagttacttcttgcacaacaggacttgaacttgttctccgtgctctacatattggacctggggatgaagtcattgttcctgactatacctatcctgctacagcatttgcacctatgttacttggtgcaactgctgttattgtcgatatatctccaaatactatgttaatagactataatgccataaaacaagctattacagccaagactaaagctatcatccctgtctccctttttgggaatcctcttaactgggatgaattactttgtataaaaaaagaataccccaatataaatatcatagaggatgcagcttgttctttaggttcacagtttcgtaatatcaaaaccggagcttggggagatgctgctgtatttagtatgcatcctagaaaaaatattacgactggtgaaggtggaatgataacaactaataataaagagttagctgaatctatccagtcgattaaacattttggtatggatatctcaaaaaagctaaaaggagaaactatttttatacaacttggcacaaattataaactttctaatatacaatctgcaataggagaaggacaaatacaacttattgactccatcctcaaacaacgggctacacaagttcaattatacaaagaactgttaaagtcacttcctatagagatcccagaaacaaccagtcatagcactcatgcttggcaaagcttttgtattattactcctcaaagagatcaacttttagatcacatgcggaaagcaggaatagaaatccaaattggaacttatgcacttcatctacaaccagtctttcaacaacatccactttgtaaaataaaaggagaaatgaatggtagtcagaaagcttttacacattgttgtacgttacctttattccatacaatgacagtagctgagcaaaaagaagttatatctatactggctgaaaatttatctagtagtaacctaatgtaa

SEQ ID NO: 8783 - DNA, 900 bp, Lawsonia intracellularis
ttgaatttgtcttctttcccatccagaatcacattagaattaacaaattattgtaatctatcctgtaaattttgtccacgccatcatatggaacaagaatttgggattatggatgtagcactagctcatgagttgattaaagaaatggctagttataaacctgtaacagtagttcctttctttcgtggtgaaagtttaatgcaccctcaatgggatattatactacaatacctgatggaatataatgttggacctatccaattaacaacaaatgctacattattaacacatgaaaatacagaaaaacttcttaatgttggtctagattttttgtctttttcaatagatacaatagatccaaaatgctatcaagaaattcgtggtatggattataatattatcctaaataatatcctgtatttccttcaacgacaagaagaacgacaggtacctatagtagtacaagtatctgctgtaaaaacagaaaagaatgcttctgacatacaaaattttatagatttttggttaccaaaagtagatagagtaaggatttatgaagaacattcaaaggatggtaaaataggaagtcttaaacaaccaactaaaatagctcgcaaagcttgccataaagtttttgaagacatggtaatctattggaatggtgatgtcgcattatgcaatcatgactggacacgacgcgttactggacagcatatagcaaatgtccgaaataaaggtatagctgtttgttggaatagtccaacatataatagtatacgacaagcgcatgaaaatattaatctttctggtgtaatgccttgtgaaagttgcgaccattgggttgtctcttatctacctgaaaaccatataggacaaatattttacaaacaaccaaaatga

SEQ ID NO: 8784 - DNA, 651 bp, Lawsonia intracellularis
atggataaaactattattattttaggtgctagaggaaatagtatagatattcttgatactattaaagatatcaatattagaaatagtaatctatcttgtgtaggatttttagatgattctagtatgttacagtctacaaaagtccataatcttcctatattaggaaaattaaaagatgctataaaatttcagcataccttttttgttaatagtataggaagtccaaaaaattatacacaaaaacaaaatattatacgttcttcaggattaaaagatcatcaatttttatctattattagtccatacgcttatgttgcacgctctgcaataattggacatgggagtacagctcttgttggttctgtgatagctgcagaaacaaccattgggaaccatgttttgatactacaaaataccattataaatcataatacaataatagaggattttgtatctttagctgcaggagttagtatagctggagattgttatataaaacaaggagcttatattggaacaaatgcctgcattcgaggaggaataacaattggagaatatgctttaattggtatgggcgctgttgtcacaaaagatgttaaaccaggagcaactgtagtcggcaatccagcaaaaatattacataaaatataa

SEQ ID NO: 8785 - DNA, 1230 bp, Lawsonia intracellularis
atgtttccatcacgtaaaatttttataggactagaagatatagcttctataatcgaaaattatacacttggatttaattctcttggatttgatgtgttttctgttgttaatagtcaagcttcaatatgtgcaagcccttgtgatatagtattaaaagatcatctcccaccactaagacgtagaatgactatgcgacaaaaacaagaatatatacaaaaacgaataaaccttattagaaaagtttttgaaaaagcaataaaagagtgtgatatatttctttttatttggtccagcttttcccctgattattctgatcttccaatattaaaagcattaggtaaaaaaattatttttgtttttgtaggttcagactgtcgatggaggactgcctataatcaagatatgttacaacatggattagatattttacctcctggatttaatgatggtgaacaacaacttaaagagattacgttaagattgattatggcagaaaagtatgcagatgcactttttaatactccaagtcaggcaggactagccttaagaccttactataattatttacaatatccgcttaatgcaaaaaaatatgagtctaataatcctcaaaataaaattccagttatactacatgctccaagtgatagattcaaaaaaggctctgatatgatagaggctatttttttacagcttcaaaaagatggcctccaatttactccacgtgttgttcaaggtgttccacacaataaagctatagagatatataaagaagtagatatccttgcaggacaacttggtactgttacaggaggaaaacaagaaagggaattaatggcatgtagaaaagttgttgtttcagggttaaaaccagaagattatccacaattattgtctcctgattgtcctaatgtccgaagccattcattaagagatatgtacatggcacttaaaatgttaatccctaatgtttctcttcgagaaaaaatagcatcttgtggaccaagttatgtccgtacatatcatgacccttctactgcatgtgctaaatatcttgatgcaattaatggtactacttcacctgattttattccacgttttttgcgagatacgtttgtaccagaaaagaaatatttacctgtttataatacaagaataaagcttgtacaggactgtccttggtataaagagtatatagaaccaggaactagattaggcctagttttttaa

SEQ ID NO: 8786 - DNA, 831 bp, Lawsonia intracellularis
gtgcttggattttccccacacactctcccaggtcatgaggataatgctatatggaataatacaaaattaggacaattagctcaaagaaaatattcaactactgcttgggagactgactttcttgagcaattgttaccttctttaataacctcccataacttatgtatagatataccatttatagacgtgggctgtggtgatgggaggataacatatttacttcatcgggttggctttaataaacttgtgggaatagacttagatgaaataaatgtaaggaatgctgcttctcaaactcctagctcatctttaaataacattgtctttatgacaggtgatgcactatctttgcctttcaaacataatacattacaacaaatatttattagtgggctaccctctctttcaaacgtatttttgaatatatatccttttttaacagatagctctatgggggggggggggatactcctttgtcttacagcaaccgcattagaagcagctcttatttatgctcttactagaggagattggaaagaatttatccatattatagaaacacaaactcgtgctgcttcttgggaaaacaaaaatattcgctatcctattacaatagtagaaaatgttattaatgaagccaaacaagctggattctctttagaagctaagtatggcatccctatttttgctagtcttgtctttggtgcattatgtcaacaacaaactcttaatgaagatgataaagaactattatataatatattatatacaattccttccataaatctacattttatgagacaatcccttcttatctttagaaaacaataa

SEQ ID NO: 8787 - DNA, 888 bp, Lawsonia intracellularis
atgtatagcactctaacttggttaaaagaaaacactgacactacattttcttattatacaaaaagtaaagaaggtgcttggatttctccatatactcttccagggcatgaggataatgctatatggaataatacaacactagggaaatcagttttaaacaaatattcaaccacttcttgggaaactgactttcttgaacaattattaccttctttaataacttcacataaactatgtagtgatacgccattaatagacctaggttgtggtaatggaagagtcacatatttgcttcatcgagttggttttaataagcttgttggaatagacctagatgaaatgaatgtaaattatgctgcttctcaaattcctgcttcatctttagatgacattatttttatgatgggaaatacattacatttaccttttaaacaacaatcattatcacaaatttttatcagtgcattaccatttttaacgactgttttctcatctataaaaccattaattaaacaaaacgggaaattactttaccttacatctacttcattagaagcagctcttacttatgctttagttaggaatgattgggaagaattcgtccgtattatggaaacacaaacccgtgctgctgcttgggaaaataaaagtattcgttacactacacccatagcagaagcaattataatgtatgctgaagaggctggcttctctttagaagctcagtatggcattcctatctttgccagccttatctttggtgcattatgtcaacaacaaactcttaatgaagataaaaaagaattcttatataataaattgcatgaacttgcctctataagcaaccgatttgtacgtcaacatttacttatctttcaaaaagaataa

SEQ ID NO: 8788 - DNA, 1053 bp, Lawsonia intracellularis
gtgattactcattcaaaaaccagtctctctactgacgatatcaccaatgttttagcaacattattatcaggggatattagcgataataaggaacgtaaaaattttgaaaaagcaatggctaaatatgtaggaaatgcttattcagtagcaacaagtagtggaacattagcacttcagttagcattacgtcttatgaaaataggggggggggacgaaatattggtccctacatttgtttgtgatgatattttatctgctgtacatcaagtaggggcaaaagctattcctgtagatatagatacaacaacttttaacataaacccagaggatgcagtatcacgtattacaaaaaaaacaaaagctattatccttgttcacatgtttggattaccaaatgaaatggaaaaatttcaaaatttccctgtaccaatcatagaagattgtgctcatagtttaggagctacatggaataaaaagtttgtaggaacttttggccatatttctacattttcctttcatgggctaaaactactaacatgtggggaaggaggaatgcttatgacaaattcacaaaaaattattcaacatcataaagaaatattagaaccaaattttatgactggtggttataagttagattatcatcttagtgacatcctagcaaaacttggtttaagccagttacaatctttcccttcagttttaaaattaagacaagaaatggccattaggtatacaaaaacattaacaaatttatctcaaacatttcttcctataattaaaacaaaaaatcaaatatctagttgtttccgatatgtcttacgacataaaacattacaattttcaactcttgaaaaaatgtttataaatcgtggtattattataaggaggccagtaaaaaatttacttcataggcttttaggattaaaagataataactatcctatagcttcagaatattttgaacatatcttttctattcctttttatccttcactaactaaactagaagaaaaaactgttttacatgagacaaaaacaattcttggctga

SEQ ID NO: 8789 - DNA, 1068 bp, Lawsonia intracellularis
atggcaaatatcttacttacatctgttggaaatgatggtgcacaagctattataaaagcattaagaattccagaagggaataatgatatagacactctcattggtatagatagtaatcctcatgcctatggtctttatatgacagattatagttatattgtctctcaaagatctaatgctacttctttactagaagaattacaccatattattaatatacaccatattaatcttgttttaccattatcgacagaagatcaatctttttatgcacactatgcctctaaaatagagcaatggggctgtaaagtacaacattctcctgaaaagtctatcacaatagctaataataaacatctactacttccttttctacaagaacatggtttagaagtaccatattttcgtatagctcataactgtactgagctagaaaatcttttatatgaatttgatgctaaacataatcctattgtaataaaacgagcatttagtactggagcatgtggtgtaaaaattgttatcccatcaactgatacactagaaagaatgtttgatagaactaatatttatatttcaatcgatgaattactcttttggatggataaaattaatgatacaatgccaatattacaaatatctgaatttctacctgacacaaaatatagtgtagatgtttttcttcacaatggtaaagcgattgaagcatgtgtccgcacagaagaaaagcgtatttatggcacatcattatatggtgttacaattgaagatgaagaattatatgaaattggtttacaagctgcatcttctctattgttagaagggactgttaatatagagttagggaaagatagaaataaaagagctaaaattatagaaattaatccacgatttcctgcaagtattgatcatacagtaaccgctggttgtaatatgccactctgggtcgtacaagcagcattagggaaaccttttaaagttaataagccttattataatgtgccttattttcgtcattggacatttttatctaataaaaatataccattaaaaattggtaggaaatag

SEQ ID NO: 8790 - DNA, 1272 bp, Lawsonia intracellularis
ttgcaaaagaatgctacattttctcataagtcaggggtctatatatttccttttacaaaaaagaataactttttaaatccatcagaacaacacaatatctttcttctttgttacctattaaaagaatctatttatgatgagcttattatagatagtaaaatctacacagaacatattgaaattgcactatttttaatagaatgttgcaacttatataacaaaaaatgtcgtattgtagataaagaactgcctaatattgtatccgatacaaatgatacaaaacaagttcaaaaaatgttaatgcttccatctgaaatagctatattaccactaactgggacctgtaatgtaaagtgtcgcttttgtgaacaagcttatacaaaaattccataccggaaaatggattttgatatattttgtcaaacaattaatgccatcccagataaaatgttcataaaagtaggtctgacaccttttcaagaacctctttctacaaaagtttttaatcgttatcttgaatatgcactaaaaatacgtccagaagctaatatatcatttaatactaatggaacatttcttactaaggaggtaagccaatggctagtagatattggtctgaaaactattgtaatctctcttaatatgcctgatcctgtaagttaccaaaattttataggtaaaaatctttttaacaaagttgtttctaatatagaaacattatgctgtattaaaaaacaacaaaatagtcgttatcctaaagtaattgtacaatatttgaagctacctccagttcttgggcaagaatctgtattacaacaacgatggggaaatatagctgatactgtttggtttcgtaatgtagctgctcctacaagtgatcctcaaaaattagcagcatttaaaaaaattaatccacaattaccagaaaccagccttctaggagaagaagctctaccctgtatgagtactatggtcacctgcgctattgatatgtttggctattatcttccttgttgcacaacgcttatcgaaagatgtaattcaggcaaaagaaaatttaaatttttagaatttggtcatgttacaaacatggatgtacaaactgcatggagtagcaaaaaactacaacaaatacgggcctggcaattagctggtcttattggctcatgcaatcgttgtacaagtaatcaatcaaatttagtacaactctattcattaaaaaacggtattatacaaaattgttatttacgtaatataaaaaaatacaaatag

SEQ ID NO: 8791 - DNA, 639 bp, Lawsonia intracellularis
atgagaaattttgagttactaagtaagatgaaacctagcaatatgtatgtgcagttagggctcattgcttgtaaggaagtgttagatgatatttatccgttaatagatgttgcaagttattatggctttaacgctgtaagaataggtttttatataccacctgtccataagtttgattatacactaccagatgattcatggtgtgatattacaaaggtaatagatttaaaaaaattgttatcatatgcaaaaacaaaaaatattgaattacagtatatttctaaaaataatagtaatgctagtatttgctttcatccatatatatatatatggttacacttagactcaaaagggaaaagatgtataacatattgctgttatggtgaaccaaacatttccatagctgaagaagaattatgggaccttgataagatttggcataatgaacgtgtaacattaatacgtaatacaataaataataggtttgaactctataaaaacaaaatgtgtttaggctgtagattagtaactaggacattaccacagcaagaacgtaatgatgcattacaatcgttaggtctggatacctctacaacatatttatatggagtagggtttcctcctttgcatttggaataa

SEQ ID NO: 8792 - DNA, 1167 bp, Lawsonia intracellularis
atgtttcgtaagatgccttttattatggcaataatgattatatttatagttttactaagccctattatccctttatatataaagcaacttttatattctattagcttaagtataaagtctattatattgtttatacttcctttcattatatttagtttattatttaaagcatctgttattctatctagaaatgcgactaaagttataggaataatagttgtttttgtgtgttgctctaattttttatcaacctttattagtcattatattgggatatggatatatagttctgatttagctaagttacaatttcataatatagataatcttactacattatggttattacatttaccaaatattatttcgaatagtgatgcaatgattactggtgttatactaggtatctttgcatctacatttttcccaaagaaagcagaacaacttgcagtgactattgaaatatatatagaaagctttttaaataattttatattttttgttccattatttgttgtaggatttgttataaaaatgcagcatgatggtatattagaactacttactaaagaatatgctttaattttttctttgattgctatcagtcagtttacatatattattatctgttatctattattaaataagttttcttttataagggtttttaataatattaaaagagtctttcctgctgtgataagtggttttagtactatgtctagtgctgcaagtatgccacttttgattatgggattagaaagtaatacaaagaataaagatgttgttcgtgctgtagttccagcaacaattaacattcaccttattggtgattgttttgcaatacctattttagcttatgctatattaaaaggttttggtatagaggagccgtctttagtaacttatatagtttttattttttattttatccttgcaaagttttctgttgtagccgtcccaggaggtggaatcattgttatgcttccactgcttgaaagttatttaggttttaattcagaaatgttatcattaattacagctctttatattttatttgatccagtgattactgcagcaaatgttttaggtaatggagcttttgcaaaattaattgataaaatgttatcttatatgcaaaaaacaaaatatcaattaagtatctag

SEQ ID NO: 8793 - DNA, 333 bp, Lawsonia intracellularis
atggatgaaaaaacaggaacaatgtggtctaaagttaagtatggattagggaaagtgttcataggtctttctgtctatttagttgtttctgtagtcacagcattattcaccaatctcatcttattaaatcgtatggatgaacgtgttcaagctatagagtattcttataagcaacaggacaaaaattttgcaagtgatttacggagttatgagtcttggttgaaagcaattacacaaaaggtagatgtattacaaccacgtgtgatccaagtagaagctagagttgagtatacacaacactgtcttgaagaattaaaaaagaggttgaattga

SEQ ID NO: 8794 - DNA, 2805 bp, Lawsonia intracellularis
atgattcatctatttaaagatattaataaacatttttttacaattagtttaatatacacatatatatatataagcataattatacataatataaaaagtatagttaatatagctatattatctatgttttctattcttatatgttatacaaatgctttttgtataaataatacaaaagaatctggtggattaattaagcataatgtacgagcccaaatagcagaagaaagaaaaaaggcaaaagcagaaggacgacttgaagaattcgaaaaaaatttgaaagcaaaaagagccgaagaacaaaaacaaagagtcgcagcttggaaagcaaaaaaaagggaagaaaaaaaattatcacaaacagaagaagaaagaaaaaaaagcgaagcacatagaaaaggacaattaaaacgcattgaaagaaggcaagaagttaacaaacggatagaaatagccatcagagaagggaacgaagatgaagttcggagaacaatttctcaagaagaaatacaaatcaaaaaagaaagagatttaaaatataaagaagaaaaaaaagctaaaatattgataaaaaatcctccactaacagaatttgaaaaactacgtagagtagctattagtgaaactcaaactgaacgtcatgcaaatgataaaatattagctaaaaaagaagaggaattaataaaaattgagtcagctgatattgttaaagaaaaaatcaaaagagaaaagttacaacgtattaaacaaaatagagcaagatggagttcaaaaaatagagaaactaaaagagcagaactatctgaagaggagagaaaaaaatcagaagcacgtagtcagggacaaaaagaacgccaacagcaacataaagaaataaagaaaaagcttcaaaaagcattgaaagaaggaaagttagaggaggtaaaaaaggaaatagagcttagtaagttagaaagaaaaaaatttttaaaaaacagacaattaatacgtaatgcgacaaaacatgcagaaaaacaaatggcaatgtggttatctttaccagaagatgaaaaaaatcgtaggatgaaaattagtcaacggtgctcagaatatcattcttccatgaaaaaaataaggaaaaagtctaaatctgctgaagagtcagggtgtatggaacaatttttagaagcttttagtgaagaattacaacttaaggaggagacagttaaaaggaaaaagaaaatacaaaaagaacaaaaaaagaaaaagaaaaaagaaaagcagtcaaaaaaacaaaatatagatacaggtcaagaaccagagcctccattaatggaggatgagtattgttttcttttaggtgatcttcaaccatcttttttaccatctgaagaaatactcttagagccagatcaaacttttctattagatttagaaacaattgatccatcaagcttagatctacaaatttttcaggaagaaagtactagtacatatagggaaatcgcttttagtaatagtaattctgagggtgataactctaataatataccttctctaaaagacaatgcattacaacaatcagaagaaatacaatgtacagagacagctatttctgaatgtaataatactattaaagagttagatttgatagaaggagattctatatcttctcagcaacctaaggggaaacagtcttcattaacagcaagtattgtaataaatcaaactcatagtaacgaattacaaatattatcttatattgatgggtataataaaaaatcacaactatcttctttaaaaagtttacaaaatcttttttatagtcctaaggaacaaatgttagctaggctaaaaacttttgttttacagagtagctttatgccaagtgatgttaactattatgaatatgatagtgaagatagtaccaatacaatgctacaatatccaactatgctttctaacatagttaaaaatagctgttcaaatctcaaacagtataatttttttggttatagtaaaaataatagtaaaaacttagaacttaaaccatatagttatcaaataggtattattacaaatataaaatcaggtttatctctctcattggcttacaatcgagataaagataaaatttcttctttttcacatatgataatggagtcattttgtagtcctgcacagtcaactataagttcagattgtctctcaagcctttttatatgggatcccagctattcaggatttaagggatatatagttagtgcttatgggtgggggcaaatgaaaaatatacgctatgcaatacataataaaaaagaaatttgcacaaaaggggagactaccgttaccatatatggctctctttatcggttaggatataccttccctttgggaaagagtataatgtttacaccatatatagagaacagttttgtgcagatagcatgggaaagttataatgaacattttggtgttcttccttgtaaaattagtagttataaagagaaaatgtatgaaaggaacataggggtacatatttcttggacagataacgactgttctttattacaagcatggactgtaataaataataaaaggcatatatcaagtaagatagaagcaattccacttagttcacctaagtcttttttttatttatctcagatcccaaaaaataaaaaagaatatactcaaaaagaaattgggatatcctataaaaggaaaattatagaggaaatggctattacttttgacagtaaatttttctatgcaaaacataataatggaaaagaagtggaatgtagtattcattatatcttttaa

SEQ ID NO: 8795 - DNA, 1152 bp, Lawsonia intracellularis
atgccaaaaataacaagacataaaacaagatatccaggagtttattatatctttcaacgacgtttagataagcatggcgttgagaaaacgttttatattctttatagacgatgtggagaaaaaaaacttattgaagaacctgtaggccgtgaatcatctggaatgactgcagcaacagcaaataatattcgtggacttcgggctattgggaaagaactttctaatgttgaaaaaagaaaaaaagaaaaagaaaaacaacaaaatcaaaaagttacattgcaaactatttgggataaatatcaactaatttactcagaaaaaaaatccttaaaacaggatataagtagagtaaaatacttatctgatttaatgcataaaagtcctgatatccttacaacaaatgatattgatacgctgagaaaaaaattaacattaacaaaaagttctaaagggggagcaagcttatcaccagcttcaataaaacatattttagtattacttaaaaggttgatcaactttggtattcaaagaaatttatgtataaaaccacaaaatttatatattgatatgccaaaggttgataatcaaaaaacagaaattctttctaagaatcaattaaaaaatcttctacttgcgcttgatgctgaacccaaccagtcagatgttgcctttattcgtttagcactagttacaggaatgagaaaaagtgcattattagctcttaaatggtctgactgtgactttgaaaataatatcattacactttctgggaattatgcaaaaaaagggaaaacagattatattcctatgaataactctgcaaagtcaattttattatctatcccaaaaggaaatagtgattttatttttgcaacacgtaatggaacaaaaagaacaacttataatcagcggttaataaaaagaataaaagaaaaagcaaaattaccaaaagactttagaccgcttcatgggttacgtcataattttgcctctaggttagcttcaagtggaaaagtagatttgtatactattcaacgactactaactcatgaaacacctgctatgacacaacgatatgcacatctacataatgatgcattaaaaaaagctgctgctattattgatgatgaatttacggaaacattaagttag

SEQ ID NO: 8796 - DNA, 756 bp, Lawsonia intracellularis
gtgaaagaaatcatagcaattattaatcaaaaaggtggcgtagggaaaagcaccacagcattagcattaggagctggcttaattaatagaggatatagcgtacttttcattgacctagatgcacaagggaatttaacacatacactagggattcaatctacaaacttaacttctgtagatctattagcaaaacgaatgagtataaaagaagtcctacaagatacaaaaaaaggtactgtaataccagcaagtccaacattagcaggtgcagatactgtaataactgatgtaggaaaagaatatagactaaaagaagcattaagtgatgtattaaacgactatgactatgctgtaatagatacgcctcctgcattaggagtattaacaataaatgcccttacagcatgttcaagtatagtcattcctgcacaagctgatatttatagcttacaaggtattcatcaactccatcagacgatcagcacagtaaaacaatattgtaattcaggactaaaagtaaaaggaattttacttacacgttacaatactagatctatattaagtagagaccttactgaaattatagaacaaactgcacaaaaactagatacaaagctgtttacttctactattcgagaagcaattgctataaaagaaagtcaagttcatcaacaagacatatatacatatgctcctaaaagtaacgtggctttagattatgaaaattttgtagaagaatttttgagaaggaattag

SEQ ID NO: 8797 - DNA, 1086 bp, Lawsonia intracellularis
atgaaaaattatttttcttcagatacacaaggaaagcttattgggcagatttcatcagatgtacctttgttacataccttacaagaagtggaacaaacttggagtcctcttagtataaaaagaatattagtacatttcagatctagtcgacaatatgaacgtgttattgattatattaacattcaagaagacttattacctaatgagcgtgttattttattctttttacatgcagtctatgatgattcttttgctactatggaattatatgcacggtatattactgatcttataaattatgtccaaaaagactttcatcatattacttcacaagatgtagacgcatttattcgttacagacaacttaatggatcaaagcctgctacaattaatactattataggcgcattaaaaagtttttttcgtcatttagtagatgcaggtattttaacattgaatcccactgcctttttaaagaaaaggcgtaatgatactaaacaaaatttaccaggacatctatctcatagtttaagtgaatcagagttacaacgtctttttgacgggatgatagaacaaggcgcatcattacgtgatcaagcattaatgcaagtgttgtttcttacaggaattcgtgcagaagaagctgtacgtttaaaatggagtcatatagtaacatggcaatcaagatggtatttggatgtatttgggaaaggaagtaaaagacgtagagtgtatttacctatacaagcacttacagttattcaagagtatggcaaactattgggcattgaattaggattagcaagtaactcaaaacccctctttgctcatttacggagacctaatgaacatattagtcggcatggactctatgtattagtaaaaaaatggtgcaagagactgttaggtagaacggacgtttctccacattggttccgtcatagttgctttacccaacttgctcataagggtgctagtcttgagagcattaaagctcttgcaggtcatgagtctgttgagacaactatgcaatataatgaagctgcacaattaatgcagcctgctggtattctatttgaaaaataa

SEQ ID NO: 8798 - DNA, 924 bp, Lawsonia intracellularis
atgaaaatattgactcatgcacagctagaagatgaaggatttttctttgactctggttttcgtggttggatttcttctcatcatacccttctaaatacaaaaggagaaccagatcacacagataaacatacactagagaatttagaaattctttgttcttatatgaatcaagaagtaccaaatattcttacagaaatacaaggtgttcggagcatattcccagaggtaaaaaaaagctgtcttgaggccaaacaacataactttggtgtttctgttcgatatggtgatcctcaatttatgagtgctggaggtacattatcttcaagagtacatttcatatatgaagtacaacaacaagttgctaaaggaatctacgactatatcaatgaaatatacctttttggtattggaggaagaaaaatatatggattattaaattatcctacactatttcaacccattgcaccacttcctacaggagaaaattcgtctcctttgtggtccaaaaaagatgtagaacaatggtataaagatattgatgaattatataagacacttcaacgtcaaacctttaatcatgtaacgcttgaaactcctacagttctttgcatttcagctcagttagatacttatttaggtcaaaaacataccaaaaaattgttacaacagatggtaaatgaaacatatccacgtttacaatttgtaactattgatggcttatccatatctgggataggtgaatctatgttgcttattgcaaaagaattacacggtaaaaaaacaggagaatttgtgtatagtgaaagattaagaacatatcctgttatccctgggaaagaagaactaacacaaaaatggtcggcaagtacctatggttgtgtgattcatattcctgaagctatagcttatatgagaggactctaa

SEQ ID NO: 8799 - DNA, 1119 bp, Lawsonia intracellularis
atgtcgccacgaaaattacatgtgcttcatataacatcaagagctgactttggtggtggaccagagcatgtctatcagattttacgacacagtccaggacagtggaacaattttgttgcttgtcctttagatagaccatatgctgaacgatataaaaatctattaggaataaatggcatttgttttattcctcatagaaagttttcagtaaaaaccctatgggatcttagacaattcatcaaaaaaaatgcaatagatcttattcattcccacggtaaaggtgcaggtgtttattctcgcttattacatgtattaacaaatattccttgtgtgcatacgtatcatggttcaaatataaactcatattcagcagtaaagtctaaactttatagactctatgaacagcttatgggtaatgttacacaacgtgctattgttgtttcgccaagtgaacaggaatatgtgttacaagaaaaattaattcccacagaacggcttacttatattccaaatggtgttgtttttcctgaaaaaatagatacagaggaaaaacatgagcgttttcaaattatttctattacacggtttgataaatataaaaatacagaatttgtcattcctattctacatagattaaaagaagaacaacaaatacatcaagtccaactagtgttaattggtgatggacctgagaggaaagtacttgaagaacgattaaaatcagaggatctttcacaatatgttatctttacagggaatgtactctcttcagctccctatctgcaaaaagcaaatgtatatttaagtacgtcatgctgggaaggtatgccattaggtgtgttagaagctatgtcttatggtttacctgtggttgcttcagatgttaaaggtaattgtgatgctgtagaacatgaagaaacaggattcctctatccttacaataatgcctatgaagcatctaaggccttaatttgtttaatgaattctcccaaaatggtaaaacagttcagtcaagctgctagagaacgtgttcgaaaattttactctatacaacaaatgattgcttctcttatgcttctttatgatgatattgcaaaacaacaatatctttctttataa

SEQ ID NO: 8800 - DNA, 543 bp, Lawsonia intracellularis
atggaagtggaaaagacgtctttagaaggcgtattactgattaaaccaaaagtatgggaagacagccgaggatactttctagagacatggaataaacaacgctatattgaaattggactacaactaccctttgttcaggacaatcattcttcttcaacgcttcatacacttagaggtcttcactttcaacaacagtatcctcaagggaaacttgtaagtgtctcattaggagaagtttttgacgttgctgtagatcttcgtataaattctcctacctttggatcatggtttggtgtgattctttcagagaagaatcattatcaaatgtggattccaccaggcttagctcatggtttctgtgttctttcagaacgtgcccattttcactataaatgtacggaatactattatccacaagatgaaagctgtatttgctggaatgatccagacattggtattgattggcctgtacagcatccaaatctttcacacaaagataaaatagctcaatcttgggcagattatgttgcttctataacatag

SEQ ID NO: 8801 - DNA, 804 bp, Lawsonia intracellularis
atggtaaatattttttattacctctggcatcaacgtagaaatgtcttaagacttgttataggagattttacacaaaattatctttcctcttaccttggctttatttgggcatttttaggaccattggtaacactttctgttttagctattgtatttcaagtaggctttagagttcctcctattgatgtaagtggtgtcccttttgttgtatggctagcctgtgggatggtcccttggctttatattgctgatggactaacagttggtgctagttctgttacctcttattccttccttgtgcggaaagttggcagatttcgtctggctattcttcctattattcgtttagctgcttctggtatcatccactgtgtgcttgttctttttttacttatccttttattttattataatataagcccatctctttattggttgcaattccctgtatatcttttttttctctatctattgcttttaggtgtagcactatttacttctgctatttctgtttttattccagatattctcaatttgctaagtattattatcaaccttggattttggggaacacctattctgtggcatgcttctatgttgccctcttcttggcattggatctttcttgttaatcctgcttactatatagttcaaggttatagagatacgtttcttgaacaacaatggatttgggaacgtccactagaagagcatatattttttgggctttggttagctatactctttcttattggtatatatacatttaaaagacttcgcccacactttgcagacgtcctttaa

SEQ ID NO: 8802 - DNA, 888 bp, Lawsonia intracellularis
atgactcaatacgtatctattatcactacaagctataactatgcagcgtatctagctgacactattgaatctgttattgctcaaacctatccatattgggaactcattattgtagacgacggctctacggatacgtctcttgagattataaaacaatatactgaaaaagactcacgaattcatcttatacaacatccagatggtaagaattatggactgccaacaacggtctatcttggtatccttcatgcacaatatgactatatagcttttcttgaatctgatgatatgtggacaccagatagtcttcaagagcgattagttgtaatgaataaaacacaagcagatgttgtttttaaccagtgtaaacccattggcgatgtgacatctgtatctagagatgttcatggatatttatcacttattcatgaaacaatgtctcaacttaccccacctttttctttatttacatgttatctaaccacaactaatttaattcctaccttctcttgtgttcttctaaaaaaagcacctctacttcaatgtacttttacaccaccacgaccatcttggttagattattggctctggtctcaactttctattggttcaacctttgcttattctcctaaaccccttaccctttggcgtattcatccatcaagttataatacacaaaatgatcagctttttaaaaaatgttggatgccattctatctatctgtgtgttggaatatgacaaaacaagcgtttaaacaatatccatatcagatccataggtatataataccttttctatatatggtaaaaacctggtctgtacattctccatttatttcttggttaaagccaatactccaacgttttagaaaacgttatagtatgtag

SEQ ID NO: 8803 - DNA, 2370 bp, Lawsonia intracellularis
atgaagtatatacgtcttataaaaaaattttttattatatataaaaaatatgggttccaagcagcagctataaaaactagacaatattttcgtaaatttctaccaagttatgctgtttcttatttcttacctacgattccttatgaacctccatatcctatagatccaaaagttactacagatatcaagcttattgcttactatttaccccaatttcatcaatttcctgaaaatgatgaatggtggggaaaaggatttacagaatggacaaatgtctgtcgttcaaaacctatgtttgaagggcatattcaacctaattatcctcatcctgacataggtttctatgacctttcaaatatagaagtgctacgtaaacaagtagcaatggcaaaacaacatggtatttacggattttgttttcatcattactggtttgctggtaagcgattaatggaaaagcctgtagatatgctccttaagcattcagaattggatatccccttttgtctgaattgggctaatgaaaattggacaagacgttgggatggtgaagatcaaaaagtattaattgctcaaacacattcaccagaagatgatattgcgttcatgaaagatttgttaagatattttaaagatcctcgatatatccgtattaacaatcgacctgtattacaactatatcatgcatcattgcttccagatcttaaggcaactgtaaaacgttgggaagctgtatgtaaagagcatggcgaagaaaagccctatcttatgcttgtacaaagctttcgaaacatagacccacaagactatgactttgatgctgctgtgcaatttcctccccatttaccatcttggaattttcctattgatattgggttaaagggtcttcataaacgttttaaaggaagaatacgacactatagtatgtttgctgaggctgttgtaaaagattatactacaaaatatacattgtatccttgtgtttttcctgggtgggataatacacctcggcgtctttatttttcaagtatttttgcatgctcaacacctcaagcataccgtcaatggttaactgatgcatgtacatttgcttccacaacacatgaaaaagacaatcgttttgtatttattaatgcttggaatgaatgggcagaaggagcacatcttgaaccaaacaaagcttatgggtatgcatatcttaatgcaacgtcacgtgttgtggaaaattttgcagtacctccttctacagcagaaaacaatcctcataaagtattagtagtaggacatgatgcatttcttgctggtgcacaacgattattacttgaaacattacagtggattaaaagaaatacaaatatagattgtaggcttcttttacttggtgatggtgttttattagatgaatatatgcagtctgtacctgtgatgctatgttcagcagatacattgcagttatcaaagctagaagatttttgtggagggattccagattgtattttaggtaatacagctgtttcagctcaagtatataacatgctttcttcatggaatgttcctattgtttcatttgttcatgaacttgaagcagctcttcaacgttttgcaggtgagcaaaatattgcttctatgttgaaatattcaagttattttattacagcatctgaaccagtacgacaaaatcttatttctactcatggagtgaatccacaagattgtataacaatacctgcgtttcttgagccacgtctctatccactatctcaaaaaaagaagaaacaattacgtgagtcattgaatcttccacaaaatggttgtctttttatgggatgtggaaccagagattggagaaaaggttttgatctctttattgaagtagctataactacattaaaaaatacatctcatgagcttcctattttttgttgggtaggaaaacaagaagtaccacttctccactcttctcctttatacaaacagttaaaaaaagatatccataataatcttatttttatagatgaagttgaaaatccaggaccatactttcaagcttctgatgtatttttactgccttctcgtgaagatccctttccacttgtagcacttatggctgcattatgtcagaatcctattatttgttttgctgatgcaggaggaattccttcatttgtttcaaataactctgggattgttgttccttatggggatagtagcgccatgtcaaaggcatgtatccaattgataaaaaataaacaattatgtgaacaacttggaatacctggaagaaaaaaagtattattgcattatacaacagaagttgcagtgccacgtataattactgtgttacaacaggctataaaaatttgtagataa

SEQ ID NO: 8804 - DNA, 732 bp, Lawsonia intracellularis
atgtctagtaatacatcaaaaaaatggcctaaagtaattccacctcttacacctgaacaagaagctattagccttgatttttaccattattggttagagttacttgcttcaaaatacaatatgctagaaaaatttaatcatggttatgtagttaaagctgcaacccctggtttttgtcatactcttgaaattggggctggtattggggaacatttgtattatgaaaatctttctgaggaacaaacaaaaaattatgttgcagtagatgtacgtgaaagttttattgaaaagattcgtaatattcatccacagataaaagttttatgtggagactgccaagataggttgccttttgaagatggacattttgatcgaattattgctattcatgttcttgaacatttacctaatctccctgcagctatccgtgaaatacatagactttgtaataaacaatctggctctttttctatagtgataccatgtgagggaagtttagcatattcttttgcaagaatgatttccacaaagcgtatttttaaaaaaagatataatcagtcatatgattggtttattaaacgtgaacatataaatacaccaagtgaaatttttgaagaaattgctccttattttaaaaaagagtcaacaaactatttcccattatttgtaccattagctttttgtaatcttataattggagctacgttttctccaattattcataacaattag

SEQ ID NO: 8805 - DNA, 3270 bp, Lawsonia intracellularis
atgacagcatactataaaaaaatagtgaaactctttccattacctaataatagaaatgatcttttttgtctttaccttactgcagttacattaagtttatatattatccttagagtatttaaagtacagtcttttgaactcagttcttttgtaggacgtatttatggcttggctatttctgaaggtatagatacctgcaaaagacaatcactatattttattttattacttatctttacactctcattttctggtattgtttcagtactttctaatattttctctaccttttctaaacgattcactcatgatgtcattacctttgaaaaggctgctctaattggcatagcctcaatgatgtgtgttacagaaatcctttttttgatgtatccatcctatcggctacaattttatacatttgtagaactcacattatctatctgtgggatcctactcatacgatggttttttgtattaacacatcaaaaaaaactttctaccttgctaacacttaaaccctctgcgtttggattttattttctatcactaagtgtctatctaactatacaattcctcttattatcacatcataaaattaatacacctgtatatattcactggccacttcatacaacacctttttttattctaggatggcttatatctatcttagacaaaaaacatctttttcttaagtgtggtgcgccattactaatacttcctatagccattattattacaggagaagcacaatatttaatgctccttaatgattggcaggtttgttcaaaaatactatttctctatcttttagttcctcttcttctactgtgttattgtatttatcaacataccactattcacaagaagttgattagacaaaatactcttatgaaatattggtatttccctatatgtcttactactctgacagccatgctcttttggcattttcagtggacatcaagagacttactacatcctgctaatagtattacacctgctcatggtcttatagcttttggacaaattccttttattgatatctggcctacaagaggactttgggattacttcttcccaacactatttatgctttttggaggacaagagcaggcaacaagtagctttatctggaatgtaatgcctaataaagtcattgctaaccttataatatatgctgtttttacaagatttgtccgtccagggtatgcattacttttagtcttattattatacccatttagcctatttaccacttatgattcattatactatgctatgggtttattacctgcactctttctaccttgggttataaaaaacttcacttttaaacgtattgtaaccttatgggccattactgcattcacatttttttggatgccctcaataggtaaagctacaatccttggaacatggattgtacttattatagcttctcttcgtagacctcaacacattatacgtattgttttaccttcatttcttcttatctttggtacattaagtattatctatgctgtattagtaagcctccatggaggaaatgtttttgataatattgaatggatacgaggatttgctttatgtgaatttatgaatcaaggaaggatagcatttgttgactctattactccattgactatatggtattatgttgcacgacctttacttcttattggtatttgtatcctcttttcatggaggattctttcacatcaacatatcaagcctaagcaatggatcattcttggcatttctgtttctatgcttttcttacttacacgatctttaggaagacatacattagccgcaggctatatgccactatatagttttcttatccttgggcttgttccttttttagctccttggaaaatacgcttttatctacctgcatggattctttttcttgggattatacttaacatctttcaaggagaacgtaccacagctataccaaatcatttaggccttcctacaatgaattggaaaaaacctgtacctgaacgacttacttatactgatacattcaaaccattgataaatatattatattcggagcttagtgggaatgaaacattcttagattttctgaatggccatggcctttatgctgcttcaggaaaaaggaatcctttatacttatctattctatccttatataactctgataaagggcaaaaaagccttgtaaaacaattagatcaattatttaaaaaaggagaacttcctttagttattatggaaggtcctgcatcagatagtcgtatagactatctcccactaaactcacaactgtatcgtgttacagaatttacataccaaaactatgaacctagtgtaaatataggtggatttgaattatgggctgcaaaagatagttgcctttcaacaatgttacctgtttgtgatacagtcgattatctacatatacctattgttaatgttcatgactatattacacaaaacgcatctataacagttagagataatgtattaaaaatagttggtggtccatatgatccatttgtatataatcttatgtcagcagcaaaaatacagcctatttctgtttgtttaaataagtggtgtttattctctattgatataacaaattctcatatgggtacgtttcaactcttttttaactttgatgacaaaggatataacgagaataattctgtaacattccgaattcctgcttttgaaaaaccaatgactttccaagcaatgttacctattcctcatgatgcacaaactttaacagatcttcgtcttgattgtcctgataatacacatatggaagttcactcaatgaaaattgctatgttagatcgtccaaatataccacttactgtttctcaaatattcgaaacaagacaaataccctatttgtgggctcaatataataaaaaacatgcaataacaaatcaaagactcataacattagcaagaaatattacattacaaaaaaatattacatatgatgtcccattaccaaaatatacaagtgattctatagcacaatatttagatttctccattacttctccagtaggaggaactataaccctttatataaaagatactaatgataatgtaggacagttttcgtttaacctaaaggtaagcaataaacctgttgaatatcttgtacgaataagtacactttatgcatggatacataaaaaaacactgtctattagtgttaatacagaagtacctattactatacatcatgtcgatgtacttatggctgattag

SEQ ID NO: 8806 - DNA, 705 bp, Lawsonia intracellularis
atgttacctgtagtcattcttgctggtggacttgctactcgtatgcatccacacacaaaaacattacccaaagcacttttatctatacatggtcagccatttattgaacaccaactatgtttacttgctgagaagggtatccaagatatcgtcttgtgcctaggacacttaggggaacaagttatagaatatgttgaaaaaaaaaataaatatggactcaatatccaatggtctatggatgggcctcacctattaggtacagggggagctatttataatgcattacctttactcagtgaacagtttatggtcctatatggagatagttatcttgatatagactacaaagtaatagctgatgcataccaaaaaagctctcaaccagccttactcaccatttataaaaataacaatcagtttgatacaagtaatattcaatatgaaaatggttgtatcatagactataataaaacacataaaacagacaaaatgcagtatatagactatggattatcatgtctccacaaaaaaatctttactgattggaagaatactacatttgatctctctgatgtatatacatttcttgtaaagaatcgagctattgttggatatgaagttacacaacgcttttatgaaataggttctcctcatggactagcagcgcttgaaacatatctttcacaaaaaacatgttttatttag

SEQ ID NO: 8807 - DNA, 981 bp, Lawsonia intracellularis
atgattattgcacgtagtccattaagaataagtcttggaggaggaggaacagatcttccttcttactatcgtgaacatgaaggatttcttatagctggagctatcaataaatatgtttatgtaaccattatgtatccgtttatagaaggaatctctctcaagtattcagatattgaacattgctctaaagcagaagaaattaatcaccgaattattcgcgaagtccttcttatgcaggaactcaaaactccacaaatagaaatcacaacattagctgacatccccgcaggaacaggacttggttcttctggaagctttactacagcattacttaaagctatttatatgcatagaagaaaactccttttaccacacgatttagctgaacttgcctgccatatagaaattgatcgtcttggagaaccaattggaaaacaagatcaatatattgctgcctttggtgggttaacgtgtttcactttccataaagatgacactgttagtgcatatcctctacaaatacctattgaagcacaatttgaacttgaagaacgtttacttctcttttttacaggtttttctagaagtgcaagtaacattttagcagatcaacatgttcgctctcaaaagggcgataaagaaatgatagataatcttcactatgttaaagatcttggctatcgtagcaaagcttgccttgaagcaggagatatcaatggttttggaacaattatgaatgaacattggcaacataaaaagcaacgttcaggtggtatgtcaaactctcaaatagatgaatggtatctattaggcatgaataatggagctataggtggcaaacttgttggggctggaggtggaggatttcttctatttgttgccgaggataaagtacgattatgcaaagctatgagtcaagcaggattatctagagtccgttttcaatttgattatgaaggaacaaaggtggtattatcctaa

SEQ ID NO: 8808 - DNA, 990 bp, Lawsonia intracellularis
atgaagataggtattattggatgtggccttattgggcataaacgagcgcaatccattggggatactcaccaacttattgcttgttcagatctctattttgaacgtgctgaaaaacttgcatctatgtatcctcattgccatgcttacgtctcttggcaagaggtcattgctaacccttctatagatatcattatcatatcaacacttcatgatagtctatcaaatcttacagtagaagcattacaagcaggtaaacatgtccttgtagaaaaacctgctggtcgtaatctccaagaactattgagtattcaacaagccgccaaagctagcggaaagcttgtacgagtagggtttaatcatagatatcataaagctgtacttaaagcacatgaacttgttcaagctggttatacaggagaattaatgtttatccgtgctcggtatggacatggcggaagaattggctatgaaaaagaatggcgagcagatccacatcgctctggaggaggagagcttcttgatcaaggtccacatcttattgatcttgctcggtggtttttaggagactttacttcaatctctggttctgtccaaacatgctattgggacatgcctgtagatgacaatgcctttatgttactacaaacaaatacaaaaaaaacagcatttttacatgttagttgttctgaatggaaaaatcttttctcgtttgaaatctatggccgtcaagcaaaaatagatatctctggattaggaggtagctatggagtagaaaaagttactctttaccaaatgctccctgaaatgggccctccagaaacaacaacatgggaatatcctatgttagataaatcatgggctacagaactccaagagttttatgaagatattcaacataatcgaacgccagcagccggtatacctgaagctattgctgtacatgaagttgttgaaaaactgtataaacaatctggatatacatttttataa

SEQ ID NO: 8809 - DNA, 882 bp, Lawsonia intracellularis
atggaaggaaaacttacagaacagtctgctattattacaggtggtaatcaaggattaggcttagctattgcaaaagcttttgtacaagaaggagccaatatatgtatttgtgcccgcaacaaacaacaacttgtagtagctgtcgatgaacttaaaacacttagaatctctgataaacaacaaataataagccttgcaatagatgtctctattcctgcagaagttgaatcacttatacaacaagctattaaaaaatttaagcaagtccatattttagtgaataatgctggtatttatggtcctatgggtccaattgatactgttgattgggaacaatggaaaaaaactatagaaattaatctttatggttctgtattaccttgtcgtatgttgttacctcactttcgtcagcacaaatatggtaaaattatccaaatatctggagggggagcgacaaatcctatgccacgaattgaagcctatgcagcaagcaaaagtgctgttgtacgtacaatggaatcaattgctcaagagtgtatagccgataatatcaccgttaactgtgtagcaccaggattgctaaatactcgactattagatgaagttcttgctaatggacctgaacgtgcaggcgaacaattttatcaacaaatgctcaaagcaaaagaaacaaataaaacaacatcatttgattttgctacagaactttgtatatttttagcttctaaagcttctaatggcattacaggacgtttaataagtgctgtatgggataactattatgcatggccagaccatatagaagaacttcaacaaagcgatctttatacattacgacgaatcactggtagagaacgtagtataacttggggagacaaatga

SEQ ID NO: 8810 - DNA, 1305 bp, Lawsonia intracellularis
atgaatatagcaataataggcttatggcatcttggatgtgtttatgcgtctggttgtgcagcagtaggtcatacagtaactgcatgggatcctgatgaaaaaacacttgaacaactatctcaaggtattcctcctattttagaagaaggcttagaagaacagatcaagcaagggatatctaccggaaaactttgtttcaaatcaacatatgaagaagctgttcaaaatgctgatgttgtatggataacatttgatacgcctgttgatgcagatgataatgctgactgtacatttgttactacacatatcaccaaacttctgccagtttgtaagcaagatgctgttgttttaatctcatcacaacttccagtaggcagcattaaacaacttgagcaaacagcaaatgaccttcaacgacaagatctacattttgcatgttctcctgaaaatctccgtctaggacaagcagtaaaactttttgctaatcctgatcgagtgatatgtggtgtacgctcacctaaagtacaaacaatcctttctactctttgggaacccatcacatctcgaatagagtggatgggagtagaatctgcagaaatgacaaaacatgctatcaatacttttttagcaacctccattgcatttgcaaatgagcttgctgtgttatgtgaacacactggcgctgatgcaaaagaagttgaacgtggtttaaaaacagatattcgtatcggcgaaaaagcttatttaggtcctggaatggcgttctctggtggaacattagccagagatcttcaatttttatcttcaatttataaaaataaaaaacaagaagaggtttcttctgtacttactggtgtccaaaagtctaataatcatcacaaactgtgggttattcataaactaaacgaactacttgggagagttaaagataaacatattgcattatggggtttaacatacaaacctggcacagatacactccgacgctcaatagctcttgagtatgcgacacaccttattcaagcaggagcaaaagtgtctgcgcatgatcctgctgtaagtgtattgccagacatatatatatataatcgccatatatctctcaaaccttcaccacaggaagttattgagaatacagatgctttagttgtatgtacttgttgggatttttataaagaacaggtaactcctggtttcttttcctctatgaagacaccgttagttattgatcctacaagatttttacaccccattcttaaaaaggatacatctatccgctatgttgccatagggctatcttcttga

SEQ ID NO: 8811 - DNA, 984 bp, Lawsonia intracellularis
atgcagcaaatttctctatctaagagacaatattcgtttttagctaaagttactgtttggcttataagcattctttgctttatttatgcgatttataatgtaaacattggacagatgtggacagcaataaagcaatattcaatgacgtctattgttttattatttcttttttcaatcattatttgtattgttaatggacttcggaaatattttttatttaacaaacaactctctctttctcaatctatccagtcagccttttttggtcttggtggaaataatatttttccagctaaagctggcgaatttatccatgctttttatatcgcacgagtaacaggtaaaccaagcacagaagttttccctgttatttttatggaacgttttgcagatattaatctgttagccatcctcagtttattcatgctctctatctttgaaccatctaaatggacaattttacttacatgtagtgcaattgcttttatctggttaggcatactacttttatcttataaatcttcatggattttctttatgttgagatatattccatgggaatatcctcgtaatattgctaatcatctttgcagtgcattacatagtaacctcttacttcattggatgatacgtttatttataacaactatccttgtatgggtaataagcattggatattactactttgcttttacaatagttgcaaagttagatctcactatcattaatactatgtgtgcttcttttatcttatgctttggagctattattccttcatctccaggctctcttggcgtatttgaagcaagtgcagtatttgctcttggtctttttggtgttcctcattctgaggctttagccattgggcttgtttgtcacttttttatgttttttgtccctgtagctggtatggttataattatgagtatcaacaaacaagttaaacaaattgtccttacagcagaacaagaattaaaaacataa

SEQ ID NO: 8812 - DNA, 720 bp, Lawsonia intracellularis
atgcctcaagcaatggatttacaagtaaaactctttatggatggagcaaatatagacaaaatgagggatgccttagagaataaccctcttatcaaaggtttcaccacaaacccaactctaatgcgtaaagctggcgtaactgactatgtttcctttgccaaaaaagcacttactgttgttcaaggattaccaatttcctttgaggttttttctgatgaccttgaatctatggagcgtgaagcacgtattattgctggatggggtaaaaatgcaaatgttaagattccaataacaaatacaaaaggggaaagttgttgtcctcttattcaaaaattatctagtgaaggtatcattgtaaacataacagctgtaatgaaccttaaacaggtacaagcagttgcagatgtccttacaccagatgttccagctattgtttctgtttttgctggacgtattgctgatactggccgtaatcctattccttacatggaggctagtttaaaaattcttaaagatcttcctgaagcaaagcttttatgggcaagtcctcgagaagtcttaaatatctatcaagctgccgaaattggttgccatattattacagctactcctgagttaattgataagctatctttagcaaataaagacttagaacaatattctcttgaaaccgttgaaatgttttataaagacgcacatgcagcaaatttctctatctaa

SEQ ID NO: 8813 - DNA, 606 bp, Lawsonia intracellularis
gtgggaatccgtcaagtaaaacctgctgtattttttgatcgtgatggggtactcacagcaaatgtgtattatcctcaatgggatgaatgggaagcaccaatgcatgtagaagatattaccattcttcctggagtgattgaagcattatcccttttaaaagaagcaaatattcctttttttcttatttcaaatcaaggagcatatgcaaaaggaaaaacatctcttgaaaacttactagctgtaaaaaatacctttaataactatctgttagaacatgggattacctttatggaaagtttttattcatatacccatccaaaaggtattacccctggcttttcaggcccgtctttagaaagaaaacctggtacatattttttacatttagcagcagcaacatattctattgatttatcacaatcatggataataggtgatcgagatacagatatcctttgtggacaacatgcaggactaaaaacaattcttatagcagattcatctcttgacaaaaaagataaatcgctcaaccctaaccatgtagtttctgtagtgaaagatgctgtaacgtatatactcaaccaaatggaattttctgtattataa

SEQ ID NO: 8814 - DNA, 600 bp, Lawsonia intracellularis
atgaaaacatatagttcaacttatcttcaacaaactatagatatcgcctcccaattagatccagctcacattgaagatattgcaacaaaattacgccaaatccgtgatggtggaggacgtttattttttataggtgttggaggaggcgctggccatgcaagccacgcagtaaatgactttcgtaaaatctgtggatttgaagcatatgctcctacagacaacatttcagaattaacagcaagaatcaatgatgatggatggtcttcttcatttgcatcttggttaagaggttcacgtctacgtagtggagatgctctttttgtcttttctgttggtggcgggaataaagaaaaaaatattagtgcaaatatcgtagctgcactagaacttgctaaagaagttggagcttctatttttggcatagttggtagagacggagggtatacagctatggttgctgatgcttgcgtcatcatacccatagtaggagaaaatgaagtaactcaacatacagaagcctttcaagcagttgtttggcacttacttgtaggacatccattacttaaagcacaggaaatgaagtgggaatccgtcaagtaa

SEQ ID NO: 8815 - DNA, 3285 bp, Lawsonia intracellularis
atgccgtcatcctatttaagtggactgtcaaaatttttccctttccctgaaaaaagaaatgattccttttgtgtctttatcacagcgattgcaatagctctactaagtacttttttattctatacatcacaatcttttgagcttatggcctttccagatcgcattcatggaggaggtattttcaatgggcataatgcatttaaacgtcctactctttattttaccttattaggcattttttttattatctttagttgtattgtttctcttttgtctatcataatacaacagtttactgacttatataaacgtgatgtcatcctttttgaaaaacatacgcttatttctgtatcttccatattaatcatatcaataccaatggttcttataaatgaacctctctatgaaatacaatatgatctttttaaagcattaacgcttggcgtatttcttattgtaacattacgttggcttttatgtataaatgaaagatatacaatttctgaaaaactacgattaacaccagcagcatttggattcttttttctattttctggaatatatctttcttctaaagcattacggtaccctctagatggacttcttaatacacgtatggggtatcttcataatatcttatatttctttctattaggatggattgtatctattctggacaaaaaacatcgttttcttaaaagctgtacaccacttcttctcctccccttaacttttattattgctagtgaaacacaatatatacttctgactcatggttatgaagtctcactacaatcaattcttttttattttacaattgtcctatgcgctattactgtttttctttttttaacaacaaagaaacatatatctattagctataataaggtgatgaagtattggtatttccccttatgtattattacgctaacagtttttatgttgtggcaaccatcactaaatatagacgatgacttgcttcatccagctaattcatttgagccagcacaacaacttattcagtttggcaaaataccatttgtagatacatggattacaagaggacttcgtgatagtctaccatgtacactcttcatgctgttagctggcgaacagcatacagtagatagttttatttggttccaggtattctcataccttacatatctcatcattctttattgtacatttacaaaaattgttcgtcctgcctatgctttttttcttaccttcttttttgctcaagtattagttgaatactctggctggtataatagtttaatgttattgccattgatatttttaccatgggcaatgcgtaatataacttttatacgatcagcttgtatttggctcttagctgctacagtttttatatggatgccatctgctggtaaatctacaattttaggtttatggcttgtttttttcatcaaaggattacaggacataaaagttatatttcgtaaagtaattccagcattttttactgtttttggaatgttaggagtcatttacataagctttcttttacttaaagacggaaacgttcttgatagaattacagaaatacatggagttacctgtttagaatatggagcccatgcttatgaggctattacaaaaccctcactaactgttgtctggtattatattgttacaccattattttttgctagcatctgctggttgtttatatggcgtagtctatcattacaatccatttcttcaatccactggatgtatttaggaatggcaaccagtatgctttttctttttacacgatccattggtagacattgtttattagaaaatgcttacttaatggtatttacattcattttaataggccttcttcctcttattcgtccatttaagcaacgaatctatttaccagcctggctatttattcctgctattatcatcttacttacttataataattttgtatttatctctcctgaagcattaaaaattccccttgtatcatggaataaagagacattagaacgagttacttatactgataactataaacctgtgatacaattcttacagcaaaaacttaaagagaaagaaacttttatagaacttcttaatggtcatggactttatacctatacacataaaaaaaatcctttttatctaccaaatatctcattatacgccacagataacgcacaaaaagtacttgtaaaaaatttagaacaacaatttaatgaaggtaaaattccactagctattgttgcttctccattttggggaggatgtatagatggcatgccttcaacagctaatcactatcgtatagcagagtttatttataaacattatgttccctatagaaatatccttggatttgaaatatgggctgcaaagggaagtcgttttgaaaaagaggctctcccaatattacagtcacctgctgaagtaatgattcccattaatgctaaaggaacatactatgggaaaaactctaatataacagttacagacaatattcttagtattaattatggtccatatcttccaatggttagtccatctgtcataaatatgatgacagcaacaaatatggatcctatagatatatcttcctataaagtttgtacttttgaactagaattaactaatgttgtcccagggtggctgcaaatctttttctcttttgataaccaaccatacacagaaagatattcttgtaagatgttaataccaacatatactgaaaaaacgacagttacattagatcatgtgctacctaataatgtaaaaaaattaactgatattcagcttatatttccagactatacatttataaatctttcttcctttaagcttcaattattcaaagagtatcttattcaaccattatgtgtaagccaaactcataacgtaaaatgtggagctcacttatgggcaaattatgatccctatcatgctgcttataacaaatcattagtaacattattaaataatgtaacacttaaaccaaacgaaacacactatgtttcaattcctcaatataaaactgatcagcatgcagaatatctatcgttccgtattacttctccttctggaggtcagataaaaggaaccataaaagataaaaacaatcattcaggaatatttttctttacacttaaaaaaaatacagaacctgaagattaccttatacgagttagtaaccaatatgcatggaaaaacaaaaaagacttttcttttacatcacattctcaagaagatattcatatagaatatataaacatccttgaaggtgattaa

SEQ ID NO: 8816 - DNA, 1470 bp, Lawsonia intracellularis
ttggtttatattttttttcctacactagtacttcttccactcattcgtccttttaaacaaaaaatatttttccctacatggcttactatacctattgttactgttatacttctctctggtgactttgtaatacttcttccggaagcattaaaaattccacttgtaaattggaaaactaaaaatcttcaacgggttcactatatagcagagtatcgacctatagtggaattcttacaatcccaattaaaaaacaatgaaacgtttgttgatgttactaatggccatgggttgtatgcatacactaacaaagaaaatccattatttttgtcactagttaatgtttatgttactgataaggttcaaaaaatacttgtacaacaacttcaggaacaatttgataaaggtaaatttccattagcaattgtaagtagtccattttggggaagcaacattgatggacttaatacaacaatgttgtattaccatgtagcagaatttatatatcaacattatgtaccttataaaaatatccatggatttgaagtttgggctgctaaagaaagccgatttagtcaagagacttcacaagtagaagtagaagaacaagttacagtagatgttcctattgtaacacaaggccaatactttggtcataatgctaatgtaacaacaaataataatactatacatattgattatggaccatatctaccaatggtcaaaccttctattataaacttaatgactgcaaccaatatgtctccaatagaaatagctccatataaaacatgtaaatgtgagttggagattacaaatgtattacaaggaacgttacaactttcattttcatttgatcatcaaccatatactagtgaatcttcatgctatatttttattccagcctataaagaaaagacaaaagtgcagctaacaaaaattcttccagaaggagcaaaagcaataacagatattcgtattactgcaccagaccatacctatatggatatctattctttttcaatgaccctattaaacacctatccatgtactctacttatagttacacaaatagatcaacacaactatggaccatacttatgggcaaattatgatccatatcatggattatctaacaatactgtattagcaacatttactaaagatataaaaatacatccatcagaaacttatcatatagtcataccttcttatataaaagatgacatagcagagtatttacattttcgtatactatctcctaacggtggatatttagtaggcaatgttcaagatatagacaatcattcaggagaatttagatttgcattaaaagagagtacagaacctattgactatttgttacgcatcagtagtcaatatgcatggaagaataaacaacaattttctcttacatcacattcaatatatcctatacatatagaaagtatttgtgcaataaaaggagattag

SEQ ID NO: 8817 - DNA, 798 bp, Lawsonia intracellularis
atgatttttgcaggagaaaattatgctgtatccagtcttatatggtttgatatactttggtccataacttatatcatcttactatatgctatatttacaaaagttgtgcgtcctatttatgcatgtttacttactttacttttctcgcaactgacttttaataatatggcttgttataattctcttattttactacctcctctttttttaccatgggcaatgcaacaactaaccttttatcgtattgcatggatatggtttttaagtgctagtgtatttttatggatgccatctgctgggaaagcatctattttgggattatggcttgtcttttgtattagaggactacagaatataaaaattttactgtataaagtaatcccagcattcattgctgtatttggaatactaggagtaagctactttcttttagtgttcttaagagggtggaacatttttgacagaatttctgaaatagaagcatttacctttttagaatttggagcacatacacttagtactattgcaccaaaaatttctatagaagcgctttcttactatgttattatgccacttttttttgcagggatatgttatatttttgcttggcgaaaactctcttttaaaactattcctttagttcactggatgtatcttggaatagcttcaagtatgctttttcttgttacacgtactatgggtagacattgtttagttcaaagcatgcttaatacatgtataggacaatacgaattacttaataatcaacgttggtttatattttttttcctacactag

SEQ ID NO: 8818 - DNA, 609 bp, Lawsonia intracellularis
atggtaaaacattttttagagaactatcaaagtgatacaatcctttttgaaaaacatgctctcactgctttatcattaatagagatcctttctatcttttttatattaataaataaaccatgctatgaagtacaatatcatgtttttaatggattattctttggtatactttttattttaatgtttcgttggttattatctacaataggttattcttcttttgtcattagatgtaaactaacaccagttacatttggttttttctttctattaacagcaatacaccttttcctaaaggtatataaatatccactagatacacctattgatatacgtataggttatcctcatgggataatgattacctttattctaggatggatcatttctctttttgataaaagacatcaattagttaagattggtgcacctcttcttcttttacctttaactatccttattgccagcgagactcagtatataggtctgctaagaggataccaatggtctctaaaaacattattatttttgtttacaggtagtttgttaggatttgtaatatatatatatactacagctcttacagaggaaaagaaaattaacttataa

SEQ ID NO: 8819 - DNA, 966 bp, Lawsonia intracellularis
atgcactacattattacaggtgtagccggatttattggtagtactctagcagagaaacttttatctataggtcatcaggtaacaggaattgataatttctctacaggaaaacatacatttcttaataaggcaaaacaacatgaacgctttacactaatagaaggagatcttcttgatactaaagcattgtcaaaagcttttgcaacaggcgagcaagtgatacatctttcagcaaatgcagatgttcgatttggagtagaacatccatcgaaagatcttgaacaaaatgctattgccacacacaatgtgcttgaagccatgcgtttacataatattaaacggatagcctttgcttctacagggtctgtatatggtgaagcttctattatacctaccccagaagatgctccatttcctatacaaacatctttatatgcagcatcgaagttgtcaggagagggattcattgaggcctattgtgaatctttcgactttattggacatatctttcgttttgtttctattcttggacctcgctacacacacggacatgtttttgatttttgtaatcaattaagaaaagatccttcaaaacttactgttcttggaaatggtacacaacgaaaatcctatcttcatgtagatgattgtattgatgcaatgttgctagcaatagaaaaagcacctacagatacaaaggttcatatctataacctaggtgttgatagttattgtacagtaaaggattctattggatggatttgctcttcattaggagtaacaccaactgttcaatttggcgagggtgatcgtggttggataggagataatccttttatttatcttgcaacagaaaaaattcgttctctaggttggacgcctaagtataccatagaagaaagtgtaaaaacaactgtcagttggcttatggaaaacacatgggtttttgataataaagaaaaataa

SEQ ID NO: 8820 - DNA, 735 bp, Lawsonia intracellularis
atggaaaaactaagtatcattatgcctgcgtatgaagaagcagcaactattcaagaagtcattgatggtgtccttaagcttcctttagttaatttaaaaaaagaacttattattgttgagagcaattcaacagatggaacaagagaagttgtcctacagtataaggaacatcctcaagtaaaagttatcctagaagaacaagcaaaaggcaaaggacatgctgtaagaaaaggactacaagttgcaacaggagactatattcttattcaagatgcagatacagagtatgatcttgatgactatccaaaactcttacagctactgatagacaaaaaagcagattttgtgttgggttcaagacacagccaagaacgccgcagttggaaaatacgtcgatttgccaaaagagaacgattttcccaatattattttaactttggacatctattatttacatttctttttaacattacttaccaacagaaattaaaagatccttttacaatgtataaagtgtttcgacgctcttgcattcaaggtttgacttttacagcaaataggtttgattttgattgggaaattgtaggtaaattatgccgtaagggttataggccattagagattcctgttcattatcattcaagatctctcaatgaagggaaaaaagttcatatttttaaagatcccttgttatggattattgcttgttttaaatatcgtttttgtaagttatga

SEQ ID NO: 8821 - DNA, 540 bp, Lawsonia intracellularis
atggaaaccgtatatcaatatgattatcaaggcttttttgttagtgaaacatatgcctatcaaggattacctcataattgtaccaaagtgaaacctaaaatacagtctaactttattcctcaatggaatggtagtacatggaaacaagtagaagatcatagacagaaaaaggatgggcgtgatcgtattattgaaggaacagggacaccatactggttgcctggtgatacatggaaacctgaaccatgttatatgactgagccaggacctcttcctaaaaatgcaatacttacacgtcctgagccagatcctgctatactattaaaggaagcaaaagaacaagtatttcttgatatagatacagcctataatgaaacattgatgaatgttattcttgctcctacaccagaatctagtggtaaatcaatagaagaaatacgaactattctttctactcaaagagctgagtttgaacttcagcttcaacaagcaacaacagttgaagaagtaaaatctattcatatagtatattctttataa

SEQ ID NO: 8822 - DNA, 846 bp, Lawsonia intracellularis
atgtttcgtattgataccccagatgctacaccaaataatcgattcacagaaggcgatcctactatacctatagaagcaacaactgtttctgctgattggctcaatagcgtacaagaagaacttattgctgttcttgagcatgctgaaattgaacctaataaacaatctacaattcaactacgtgatgccatagataaacttattgaacagcgtctatccattgcaacatcaatgaaaccagggttagttcaaccagacggcgaacctgttcaaataacagatgaaggtgtgatatctatcataccaacattaagcgaatttaaagatttttttgaaaaaacaccacctaagggttgggctgtccgagatgggtccatacttccagatgccgacactgcttatcctgatctatggaattatttaagaaaagaaaaaaatacttggaaatgtaaatctcaagcagattggacagcactatcaacagctgctggtggtattggtggtgttcctttttttgtattagacgaagcagcaaagactataaaactcccagatacaagaacagatcatatttatggaaatgtaggtgactctattgggaaatgggaaaatgatgctatgcgaaatattacagcttggttttataataatattatcgatttttcaaattgtggcgggatattttatgccagtggacatggtaccgtcatacaaacttttaatcctagtggctatgcaaatcaccaaattaacttagatgcttcacgcgcagttcctactgctgcacaatttcgtccacgtcgaattggtttacttccttgtgtctatgtaggaggaatacactaa

SEQ ID NO: 8823 - DNA, 1623 bp, Lawsonia intracellularis
atgaatatactatatggttgtgttagttttctttttattacgtttttatctttaccgtttttgctaacagtttgtggtattcagataagaggaatggataatagagaaaatagagtattagtagaaaaaccagcacttaataaaacgtctttacaaaaatggccatcagtacttgatccttggtttcaagatggtcttgcttttcgtagtcattgtgttggactttatttaacaatatgggaagaatggctttcagctcctgttaaatctgctgccacaggtaagaatggagaattattccctatcctttctacagcacctgtccttcaatactatcttggtctaaagccaattgatcctcatgaatatatacattttcaacttgcccatgcaggtatgtatattttcttaaagtctaaggggataccctatttccttgtaactattccggataaaccaacattatatccagaataccttccattttggacacgttggtgtaaaggagaaagtgtacacaaacaaaaagtaaaagctattcaagaaataggtatcccttggatagatttacttcctattcttcatgaaaaaaaatacgaacatgctctttataataaaaagtttgatcctggccacatgaatggttatggaatggaaatatgccatcagtatcttatagaagcactgggcaaatattttcctgctcttctatcaacggctagtaaaccagcctatagagtatatgaaacgaaaaggtataatacagctttttctagtgaatggctttcaagtatagagttattacaaatagaacgatttcaatcaaaagagatacctaatcttattaaaaaagaacctcaaacctggtttgaacctcagcttattattaataatcgtcctctatcaccattggatatagtattctctggtgattcttattttttatgttcatgtcaatatgctccatctcaccgtatatggccaggagatctccctcttttagcatattattcaaaacaatttttaaagatgaatatccaatatcttacaattccctttctcaaacaactttttgatactgggtataaaccagatgttgttatagaagcccttgcagaaagaaatattggtactccatctcgagcaaggaaagattctctactccgtacctttggagatatttatttaaaaacacccatctattttctaactccagaatatattaagaatataacaaataaagaagattctaatgatattactatatatatatataacaatactatttttcttaaggcatcagcgaatccatacatagagttaccttctttagttacagatgctaatggacgtgctgcagttgttgctaatatattttctcctatccaaacatactttggtgtgtattatacaccaaaagatataggatttgttcaagaatcatctattaactgggtaaaagtagaaccaggagaaaatttagtacatctatatattagtactcatccgtatcaagaaatatctatccgttttcatttaggctttgatcataatgagtatcgtattcttcctataccagatgaaataaaacagatgcaaaaatttgtatctgatagcatttaa

SEQ ID NO: 8824 - DNA, 1224 bp, Lawsonia intracellularis
atgcaagttattcaatcaatctttatttttattttccttcttttttcaacaatgcccttttgcttatctcttcttgatctttctccaaaaactgtaactctcagagaaaatagagtattaacagaaaacccttcacttaaggacacaccctttcaaaaatggccaaaggttcttgatccaaggtttcaagactgtcttgcttttcgaagtcattatgttgctctctatcttaaaatctgggaagaatggctttcagcccctgtgggagaatatgctacaggctatgagaatgatgtattctatgttacttctcttaaaaactatctaggtgtaactccaattactccagagaaatatgcatattttaaacttgctcatgcagggctttatgcttttttcaaaacaaaaaacattccttatgtttttataaccattccagataaaacatcattatatccagaacttctgcctttttgggcacattggtgtaaaggagaaagttggtacgatcagttcacaaaagctattaaggaaattggtattccatggatagacttatttcctatttttaaagaaaagaaagctacatataaagtatacaataaaaattatgatactatgcatatgaatgcatatggcgttgaaacatgttatcaggaaataggaaaaagactacaattccctgagctcatgccaacatcaagaaatgaattttatacagtttcttgggataaaattgttatttctaaatttataaaagaaaatgtaccagtctttcaattattacatacagatcgctttcaacctatagaaattcctggattagtaaattttgaagcaaactattggcacaaaccaagacttaataataataagcccctttcacctcttactgtatggcttgttacagattcttattttttgctatcaggtcatcaagaaagagaatatcctgtatttaggggagatatacctttattagcctatcatacaaaaaatctttttactacacatgttcaatattttctttcacctttctttcaagaactcttaaaaaaaggtccctatcctgatattctgatagaaactcttgttgaaaggaattggactaccatggatagggcaaaggaagatccatttatacgaatagctggagacatttacttacacacaccaggctatttacttaccccaccccttatagacaattatatatatatataa

SEQ ID NO: 8825 - DNA, 1614 bp, Lawsonia intracellularis
atgaaaattctccaatcgtgtttcactcttttattcctactttttttatctattccatttacactaacaatttgtgattgtgctccagaacctattgataatcaagaaaatcgagtattagcttggcctcctaagttgaaacaaaattcacttcgaaattggcctaaaagacttgacccttggtttaaagattatttagcctttcgaacacactttctttgtctttatcattggatatggggaagattcttaggctctaatctacaagactatgctataacctttaatggtgaattatttcctactttaaatggtgcaacagttttacaaaattatttgggtttatatccatatacaaaagaacaaattacaaattttaagttgttacatgcaggaatatatgctcgttttaagtcagaaggtattccctatattgttgtccctgttcctgacaaaactaatgtatatccagaatatttacccttttgggcttcttgggctaaagggttaagttattatgatgaacttatacaggctattcaagaaatacgtataccatatatagatatgctatctattcttgaatcaagaaagtctgaacatcaactctacaataaaagatttgatactgctcactggaatggctgggcacttgaaattgcatatcaagccatggggaatttccttacaaatattgacacagggtttgagccaaggccatcaggtgaaatttatgaaatttattttggtagaccatatcctcgtctatacactcgagaacgtgtaccattaatgaacgtatactctcataatctccatgtagaacatttacctgaactatctaaagaaaatccttgctgggcagatcctcaacttattgtaaatgacaaagcaaagttaccttataccttatggtttgtttcagattcatactttctatttgcatttgataactaccaaccttggataggtggtatttctccattagcacaccatacaaaaaaattcttaagaatgcatttcaatacatttacccaaccatttattgaaaaatcatttggaacatcatactctccagatattgttattagaacatttgtagaaagacttcctagagatttaatgcaagatattgatccagtattaaaaatttatggagatattcatttaggaacctctggatatattttaacaccaaataatcttcataaggtagtagctgaatcaaattgttgtataactaaagaaatagatcaagaagaacaaggaataatcattattgattcttcttcagacatacctctttttaccttagccccagttatagcaggtaaagatggacgtgttatgtttgcaacatatttgaaatctcctattaaaactacagcacgactatattatacaccaaaaagtataggtaccttaaataaagaggactttgtatctatagagctcgaggaaggggaaaatattatctatatgtcatttgatacagagcctggacaagaaatggttctttattttgaacctggatgtcatccaggagcgtataaagttctccctatgccaaaaggaatccaacatgttcaacatacatattctagagagtcataa

SEQ ID NO: 8826 - DNA, 1377 bp, Lawsonia intracellularis
atgctttggtgtaatacgtttttattaatagcaagtattatcttttatgcttggggcgagccaaaatttgtcatctggcttattgtatcaatgatatttaacttccatatggcacttctcattgcacctacaaatagtagatccatgagaatttttggactatctaccgggttaattcttaaccttttgttacttggttactttaaatatttaaccttttttatggaaagtggttttgctctactagaaattttctttgaaccatcaattaattcatcacaactaaaaactattgcacttcctttaggaatcagtttttatacattccaagcaatgagctatcttattgatgtatatagaaatgaagtccctgtatctcgcaatatcattaattttggatgttacctcacaatgtttccacaacttgtagcaggacctattgtacgatacatttctatacaaaaagaacttgaacatagagaactttctccacaacgcatatcaagtggtattggtcgatttattataggtctttctaaaaaacttcttattgcagatactcttggaagagtatcagaacaagcttttgcaattcctacagatcatttatctccacttgctgcatgggctggaattatttgttatactctacagatttattatgattttagcggatactccgatatggctataggattaggacatatttttggttttacttttcctgaaaactttaattatccatacatttcaaaaagtattaaagaattctggcgtcgttggcatataactctttctacatggtttagagattatctttatattcctctaggaggcaatagacatggattaggtcgaactgtcattaatcttcttattgtcttcacattatgtggattatggcatggatctaattgggtctttattgtttgggggttatatcatggttgtttccttgtttttgaacgttttttccctaaattccctagtatattcccaacattcttacaacatgtatatgcagttcttgttgttacattaggatggatttttttcaaagcaacttcacttacacatgctaaagaatatttttatgctctcatttcaggaaatcctccaggaattcaagcaaaccatgtatggttacaactctttagtacagacgtataccttgcacttatcattggtatattaggctctatacccatctttccatttttaaaaaataaatgggaacacttgcttataaaacaaaaaacgtctattgctatttcattagaagggttacgtttttttatgctatttctattattttttctatgtatcatgcctctttttggctctacctataatccatttatttacttcagattttaa

SEQ ID NO: 8827 - DNA, 282 bp, Lawsonia intracellularis
atggatagagaattaataaaaaaagtactagggcttattataaagaacttcagagaagaacaagggctaagtcggtatatagtagcaaaagaaagtggtttggattcttcttggttacgaagattagaagatggaaaatctggaattcgaactgaaacactcattttaattgcacgtggattaaaacttcctgcagcaactattattacaaaaatcgaacaagcacttgaaaatccagatgcatggctagctaactatagaacaactagtgacagtatatag

SEQ ID NO: 8828 - DNA, 981 bp, Lawsonia intracellularis
ttgcaagcttggcttcaaaaaacagttttaaatcttggctcagcagatgattctatggatgtcctttatataggtaccatccttcattatgattcagtccttgcacgcacattgacgaaatctttatggcaaaaaaaagtatttaaagccattcttcaatggcctgaccgtatggatttatgggatcagtgggaagttattctttctgaacaaggagaaaaagaagcctggcgtttttgggaggtacatcaagaagaaatgcttcagggttccaaagtaagttggccaagtatgcgtccattgtatttactcatgaagcgtagagcagaagatcatgctgcatttgattctgaataccaaaatgatcctttatgtggtgatgatgcaccatttgcacagtgtatttactattggtcgaccccttcggatagttggactttttttggagtttgtgatccttcattaggtaaacatggtgctggaagggatccatctgctttacttgttggaggattttgtcaaaaatctatgacacttcatgtgatagaagcatctattaggaaacgtcatccagataggattattgaagatattattgctttacatagacaatacaaacctgttttatggggagtagaagccgtgcagtttcaagagttttttgcacatgttcttgttcaacgggcagagaaaagcggattagctttaccagttaaagcaattacacataattcagataaattgttacgtattgaatcattacaacctcatatggttcaaaaacatattcttttgcacccatcacaacaagaacttatccatcaacttcgccatttcccaaaagctgatcatgatgatggtcctgatgcattagaaatgttatgggaaattgcttgttcttctgtatctatcaaagatggatttatacctgtttcttcatcaagttactctgaacaaactatgtatgactcctggaggtaa

SEQ ID NO: 8829 - DNA, 831 bp, Lawsonia intracellularis
gtgaaactttcagaaaaagcattttctaatgctataggctcacttgcaaatacccttgcacgacagattgaaacaacctgtcatgagtttgaaataacgactaatgccacaaaaaaaaggatagaacgtgttcagtatgatttttctttttttagaaaaacctactttcctcattatgtacacagaatacaacctactcaaaatagacaacccatatcatcagtagagcaaaacaagatattccaaaataccatttcttcagatagtagcttagagtcattaggtattattaaacagaatgtacaggtaatagataaacaattatctgttgtttcagtagataatattccacatagattggataatatatgccctatttcaattaatagtggttctactacaaatcatcatagacaactattcatggatcatgattcagtccttcatcgttggcttgatgagaccttaccaggtattcttaataaccctaaaggacaatggttagctattgcagcacctcgtggtgaggcaaagtctacaatggtatctttattttttgttatatgggctataataacctataaaaaacactatatcttacttatagcagatactattgaacaaagtgtttctttactagaagctataaaagttgaacttacttctaatcctcgattacaacaagattttcctgaaagtacaggagagggcagtgtttggaatgaaggaacaattattacatgttctaatgtcaaagttcaggccctaagtgcaggaaagcgtatgagaggacttaggcatggagcacatcgacctgatttttattcttga

SEQ ID NO: 8830 - DNA, 507 bp, Lawsonia intracellularis
atgtctgcatatgctcctgaaacaaaggaagccatacgcaatgagtatattacatcccgaaaaactcttgcagaagttgcgtcttcatttaatgtagctctgtccacagcagcacgttggaagggagaggcaaaaaaactttctgatgattgggatatcctacgagaacatttttttcttgtaggaagcggtatggaaaatattacacgtcaaatgtttattgagtatgttttacagcataaaaaaatcttggaagagatccaagaagatatggatatttctacatctactaaagtacacatgttagcaaaattgagctctagtttatcaaaaactgttgaagcaagccgtcatgcattaccaaaaacagatagacttgctactgcccttgatgtcatgagaaaacttgtacaattcacacagcatcgttatcctcaacatgctttatatcttttagaaatcttagaaccatttgggaatattcttattacagagtatggtcagtga

SEQ ID NO: 8831 - DNA, 705 bp, Lawsonia intracellularis
gtgattattggcctaataggtctattcatttctggatacgaacggggaaagtcaataacaactaataaatataaagcaattgttgctaagttggaatctgaatatgctaaaaatgatcaagctcgttatcaagctattgcagaagcagaacaacaagcacgtatacgtcttcaacagcaaacagaacatatacgttctcttatgaaagaattaggagaagtacgtaaaactctcaccaaagaacgtaatgagtttaaaggaaagattaatgaggtatctaaaagggctgattcttactgtcttggtttaccttctgagtgggtgtctacctacaaccaggtccttgggctcaccagttccagtaataacaccagaggtaaaaacgctcataccaggggttctgcttcagataccggaaccgccggaaccactaatgccaggatacagcaaaaccaattagcatattcgtcttcacttatacaacaacatactagcaagcagaataaccagtccaatgtattagaaaaagagtcgtttataaaacaatcgtctaataatactttaccagcatcttcttcacaaactaatgagtctatagtcacaccaaaagatttattatcacacatacaggattatggactatattgtcgtagaattgaaacacaactacatgctattggagaacttctggaggcacaacagtga

SEQ ID NO: 8832 - DNA, 618 bp, Lawsonia intracellularis
atgttaaaagtatgttgtattattctattattgttatgtggctccaaagagtgtcttggagaaattccttatgcagcacagcgtcatcgaaatgtgcttattagggtagctcgtgaagtttggggaatggatgcacctgttgcgctctttgcagctcagattcacactgaatccttatggcatgaaaatgcagtaagtcctgttggtgcacagggattagctcagtttatgccagaaacagctgcttggttgccaactgttgctccagaaacaggtgagcctctaccttttaatcctgcatggagtttacgtgcattggttacatatgatctatggctttgggagcgagtagatgccatttatcaatgtgaccaaatggcgtttatgctctcagcatacaatggcggacttggatgggttcaaaaagataaacgtatggcaaaagataatggacttgatccaaatcgttattgggattgtgttgaacgcataaatgcaggtcgtagaaaatcagcctttcaagaaaataggaagtatccaaaagttattctgcatacctatcaaaaaaagtatgaagatgcaggatggggtagaggggttgagtgtgattatcggtaa

SEQ ID NO: 8833 - DNA, 4824 bp, Lawsonia intracellularis
atgaaaataaaaaataaaattatttttatttctatagttattattagtatgtcaattatgttacttatattgagtaaatacagcattactaaattatatagtatagatagctatataacaaaaaatgaatatactaagttatattattttttagataaaaaatttttttatgatgcagaatatgtaaaaaaacaggctaacgataataagctattaaaaaaaatgtataaaggtggagatgataggtctatactctctaaaaaatatattgcattacttgagacacatgaatcaaccttcgagcaagatataaactcacaggttaattcagtatacatgtgcccactgaagaaaaatttaaatgaaacaccttgtagtttacccacagcagaaataggcaacaaaaaaaacgattctgaagagaatcatcctacagtagaacaaatagatgatatattacaagaaacagaaatagaacaaacaaatgatacattatccaaggcatcacctgctacaaatccaaaatttgctacacaaaaacaacaagtagtaagcatattaccttcaaaacatatctcactattaaaaaaaattataaaaccatcacagcattcatctaaaaatcgtccttcttctgttgcaaaggctataataggtatccctggcctacctttatatgcagtaaatctatatgggcaaagaggagatgcaccatcaggaggtgataaaaaaccatctggaactgaaggaaacaatagttcctctgatgatgaagaaaaagaagaaaaaaatcattctcattatgactctgagataaatgaacaggataaacatacagataaaggggaaaaatcagatttagttggagctgtgggaggtacatctgataattttacaaatctagatggtaataaaagtgatggctctaatggctttgaagttcttgatctcccttctcataaccattctgaaccatggcaaaaacttattgttgttgacgatgaatcatcacatgaatcacatactgaaaacagtacacaaaaaaatgaaagtgataacaatgcggaacctaagccacttaaagatctgtatgaacttggagagcactatccccctatgtttaaccaaccaaaacaagatatgagtatggggattataggacctggagatgaccttatacgtccattaataaatttttgtgagccacagtttcaacattataagtatatacatcatcaccaccatagtcatcaccaacatcgttaccaccaccaacaacaacaacatcatcatcatccactacatcatcattataaaataggaatccctctattatcacctaacaaaaataagcctggtccacttatgaatgaactaccaggaagacatcttcaaacaaaaaatccctctatagataatggtggcaataataatgaacaacaaaaatttgatccatacaaaaggccatctaacaattctattgaagactccaaaaaagaaaacagtcaccactctaattcatcaaaacaatcatcacttggcctttcatgggaaaaagactttggacaatcaagtaatagaggaaaaaataagcacttagaagaacaaaatgatggagaacatagtaatagtagtaatgttagtattgcaccattgatgtcacattcatcatcaactggacaacaaaatacatctgttgaaaataatcaacattcaaatggtgagcaaaatcctccatcagtaggatgtgaacatagaggaccaatgtcaacctcaaaccattcgtctagctgttttgtgcaattaaacaaaagtggatctgactttaataacgaatctaatcagccatctggtccaaaaaaagaaatagtacaaagtataaattcatcacctgaatctgaacatactccatctaataactcgtcaaattctagcttcgaaaaatacttacacctttgttatagtagtgtaggaaatgaagcctctcatagtagtggtgagtcatctaaaaataatggaaacacgcaagaagaacacactttaatgccccataataacagtcccccagtatcacaatccttttatcctaaaaatgataatgaatcagaaaatgaagctagtagtgaatacagtagtagtgagtttagttttgaaaaagaaagaaattttgatcacttttcatcagaaaatggaaattctttagatggttttgaagttgttgaacatggtcctgggaatagcgcagaagtgtcaccatttaaaccaactgtacaaactggattcaaaggaactcctagtcctacaagaactggactacttttgcctccttcatcaagtgatgacagtaaatctttagaaggctcactaaaaagtggtggtgacagtaataatgatgaatcatctgactggagctcttctaacagttttgacctaacttcagaaaataaaaagatatttcttgtacaaaccggaggtcatcctcaccgtcctccaaaaaaaaacgatacaaaacaacctcactctgaaccctcagaaaatccaaatggtgaagatggtggcattcagcaaaatgaaccctcctatggagaaaacgtcttatgttttactaaaagtagtggatctaaccattcacatccatcacatagagatcactacaatgagcatgaacaaaatcctccagatgaaactgaagatcattcagcccatcatcaatcgcaatcttctttaaatgataaaagtaaatcttcttcaaaatctcgttcatcaagcattggaagtaatagtggtagtagtattattcttcttaatggcagtagttctggtgacagtttacttgaatatcctggaccagaggatgatgaaggtgactgtttaggtcgtgaatgtaaacgtaaacgtaatagtgacagtaatagtgaatctgattacagttgtagctttgaaaggctaggaaatagttcagctagttggatactacgaaatcatggtggaagccactctagcacaaaaagcaattctagttcaagtagttctattataattctagaagaaagtagcagtgaacattataataataatagagacagttcatatactgattctaatcaaggtaataacttcaacagctatgaagaagatactggtcatcaatctgaagatggaggaaacaaatcatcctcttctagcagcatacaaattctctctacaagtaatgatagtatagattggcctaattctaggaataactctgagtctgaatacgatggtgtcaatgatgggatagcttggcctggatctgctaataattctggagatgaacataatagtgatgatgggatagactggcctaatcctaggaataactctgagcctgaacacgatgacagcgatgatgggatagcttggcctgggtctgctaataattctgaagatgaacataatagtgatgatgagatagactggcctaatcctaggaataactctgagtctgaacacgatggtagcgatgatgggatagcttggcctgggtctgctaataattctgaaaatggtgatgatggaagcaaatctgattcagacagtcatccagaaggtgaatctaataacaatgatactgatggtggtaatcgtagtggtaatgacgagttatctgatggttactcaaattctagtggctcaaatggggagaacagttctctacagtatagacgtcctgtaatgttaggagctatgcccccagcacgagctacaccaagaagaggaaacccttcaggagctaacgtaaggcaagttctatctaaaacacctaaaaatctacaagcgacccaggccaaacgtccgccaatatctagtttagatagttatcgcaatgcatgtaaagcacttactcaagctattcatgctattgcacaaagttctcaacaagctatgcgttcactagctcttgctacaacgactgggtatccagatacaacaaaacgttttcgtatttttggttcagcaagcacaaaaaaaccttatcctaaaaaacatcaaccttatgctgtgactgttggtgttattgcaaatcctttctcagcaattaatcttggagtggcatatacctatacgcaacatacaactaaagatttccatatttccaacactgacgcactttttgaaggttctgcagcagggaaattacaaacaaatcacatctcactcattacagcttggaatcctgaaggatatggcttaacaggctttttagaatatgcatatggtactggagatgctacacttattcgtaaatttgcatatgataatcttgcattcactgcaaaagggaaaacacgtacacatactgatggaggaacagcaagaattggatatagatttaaagtaacagaaactattgctgtcacaccatatggagaacttgcagctgttcgtgctcgatggaataactactcagaaaataaagggaaattcccagctaacataagtagtacaaaagaacttgtacgtgaggaacgcctaggaatagaaactcgatggcaaatagtagataactgtcaaatttatgcttggggagcatatatttctagtaaaaagaaaaatggtgtaggaattgaagcccttcttacaattgatgatcatactgaaaatatgactgtttcaaaatattcaagaaagcagtccatgggtgaaattggggcagctattgcaatcaaacctactgaacattttggtataagttttaatacaagtatacgaacaaaatcaaattcaaaagtcggcttagactcacaatatataggcacaagtatatggtatgcattttag

SEQ ID NO: 8834 - DNA, 1143 bp, Lawsonia intracellularis
ttggtatataaggatcaacacatgcatctactttttgtcacgcatgatattgatagtggaggagctgcaagaagtttatctatattagtacaacagcttgtaaaacgacataaaatcagtatcataacatttatttcacctgaaccagaaaaaccaacagctttgttatatcaacagctaggagtatctttatatcttttcccatggggatggcttccagtttcttttattggatgtgaacccaatattgaacatcatcaagaactatgcagtagacaacgtaagtatctcccagaggtaaaacatattggagaaacagcagacgttatttgttttaatagttatgcaccaacaagtttagctccttactttcctggaaagcgaaaagtccttattgctagggaaataattgatacgtcagactatcataattataaaaaatgtacctctatgctaaagcaatatattaattttgctattgctatagggccacaagagtctagtcaattacaatcaatgggtatccctcactctattgtttataatagcagttcacatataccatattttgaacctttttcttcatttcctcctacccgttttggaatgtttgctcaatttatccctacaaaaggacttgatatcctacttttagcttatgctgaccaagccgttatattaaaagaacgaaatgtacatttgcatctttttggcattaatttaaatatgccatcaaagagtacccaagctatcagtgattttattcaatcttataaacttacagacttcattcatcttgagggatgggttaataatgtagaacagcatatggcagctatgcactgcatgatacgacctgatcgaacaggttcaccttggggaagagatatcattgaagctatgtctataggtagacctacaatcgcatctggagaagaagatgtttttgtaaagaatggtagaacaggttatctctttccaccaaagaacgttaaaatccttggcaaaatacttgcacttctttcagaagaacctactgtcttagaaataatgggtaaaaatgcatttgaatttgcaaaagatcattttaatccagaaataaatagcacacacattgaacatattcttttagaggaaatatag

SEQ ID NO: 8835 - DNA, 2067 bp, Lawsonia intracellularis
atgtatattttttatatgtataaaaataaggtttttttacaaaataaagtcatacatagatgggatactattactaattcttttactgtagggatactattatgttttttttgtatgtatactcaacaggtagcatgtgctgaggatccagatctatatgcagagccagaagatttaatgacagaagagctattagcacaacatgccttggcagcagcagctattgttcaagggaatcaaaatgaaaatccagaagtagagcaagaagagttttcattactagaagatttattagttgcattacctaatttagatagtactttagatgatagcctagcttctggaggacatccaaccagttctggagaggatgttggtgaaggagcttcaggagggattttttctcaagaagaaggggcaactggtggctctcacttactaggtctactatgggacgattatgaaaaagggccaagtcaagagtggccagaacatgtgcaaacaacaacaaatgaggtaacatctttattacaaaagtcattagaaagtttaaataatgtacatcagtcaacagtgagaaatagaaccttatctagaatgagtgtagctgctggaaatatttggcttacaacagtgataagttcattgcaaacggaactttctgaccttatggcaacatctcgtcctttaaggggaatatttatacagaaaagactagttgaaattcaggagcaaaaagttaatcaagaaaaattattagaagagctacatgaagtattagaagaacatccacaagcacagagagttattcaagcacaagagatatttttacaacatttagctaagctactagagaaattagaagcattacttgaaataattgaacctagtgattcatctgtggagcaaggtaggcctcctggaagcccaccaccacctggaggtggtgctataggatttagctttcccatacagacaagatttttactaagttataacattcaaggggaaatatcttcgctgcaagggatgcaatgtcttttgtcagatacatctgagcaagtttctactatattaaggatgcttgtcttaagatcgaaatcgtttaatgctccagctgcatatcctaagaaaagagcaaaacaaatctataagaataaaagttatttgtcattgcaaaataactctaaaagtagtctttcttcaacgacatatagaagtcaattaccattattaaagtcattttatgtaagtacacaatgggatagttatacatcaaacttagaatatacattacgagcagctaatgtcggatttttagtaactcctacagatatgcttaatgttggtcttacatatcaacataacaaacatatttcaaaagagtattatgggatgcaaaaaggttggtcttttggtgcagctaaagcaataaccagtacagatagtcttgcagctgttgttgcttggaatacaggggctgtaggattcactggatatctttcaggatgttgtggctggggaaatatgaaaaatacaagaatggttactcatgctggaattaaaacatattctaaagggagtccaaaaattacattacatggtggacttattcgacttgggtacaattttcaaatagtagatggaatgttacttacgccatatgttgaaagtatgtttgtgtcatcaggatggagtccttatgaagagataactggcttattccctgcaaaaataagtggtaataacgaaaaagtagtagaaaaggttatgggactaagccattcttgggctattactgataatatgcatgtccaaacatgggtagtaagaagcataaaaaaacacagaatgaaagaattacgctctcaagtaggtattagtcgtcaatataccttatctattcctaaaagacataatcagtatattcggagtgaggttggattatcctatgaaaataagttattagaaacattttctatacgtttagatagcctatggcgctttgatcaaaagaataaatgtaaagaacagcaaacaggttttttctttcaatatagtgtgtag

SEQ ID NO: 8836 - DNA, 1788 bp, Lawsonia intracellularis
atggaacaaatattaaaattctttttatatttttatatattattttctaaattcatatatgaagttagaaatatatatatatatgacttacaaaaaatagtacttatacaatttttttattgtaaaaaatatactactatattttataaaacttttattattgtatttatttgttcttgtgtatacatttttattatttataaatatacatttgcaactgatagtacttattctaataacacatatgaatctcaagatgagatattatcagagatgtcaatgcaactagagttaagtgctttagaatatgtagagcaacaatacatacaacaacaagaacaagaattaattcaacaacagctattacaacaattaatgtctttatatggacaattaggagatttggaaaatcaagctatgagtttaaaagttcaacaacaacagttaagtgaacaatatagaactcttttacatattcctatagttgaacaatcagctgaaactatagagcaagctcttagtattacacaccagcaagaacaactagaagaacaagtaaatagtacacaaagtcaaatagaagtgctgcaagagcaaatacttcaaactttgtatcaactagggatgatagcaccaccaggaggcaatgcaggtcaagaagaggatggttttaatatacaaggcccaggaggagcaggtgggatagctacttttactcatggttatggatatttagaccagtttagatcattacaaggattacagtatgtcctttttgatacatcatctcatgtatcacatgcattaagagacatagtttcaaagattcaaatgagttctaatttttcaaaggtaaacactatatatttacctcaagatttgaggagacataaaaagtttcatagaaatacaaaagttgtagaaaaaaaagaaaagctacactattttttatatccaataactttttcctgtaacctatttacttcattagaagagtacaatatatatttagataaacaacatagtacacaagttggaatagttgtaaatccaataccaaatgtaactatgggtttttcatataattataaagatttatctaataagtacaagatagtagagacagatacatctattaataaagtaaatacaaaatctaatattacaaaatttttagctactgtagcttggaatacggatggacaaggttttacaggatttttttctagttgttatggttggggtcatataaaaacaatacgttcttttaatccttcaggaacttcttttaaaggtaactctgaagctacaatctatggtgcattagtacgattaggttataatgttagaatagtggaagacatactacttactccttatgtggaaggtgtaatgagtattgttgaaagaaaaccctatgaagaacagagaggatatttattatctaagataaacaacaataaggaagtgcagctagaaagaggaataggaattacttctttttggaaatgtacatacaattcagctttacagacatggcttggttttggcttgaatacttgcaagataaacaagctgacgtctagactgtcatatggccctttttatctttgttccttgtctgttccaagcgttagaaaaacatccttttggaaagaaataggaatgtcttatgatatacaactctcagacagaacacatatcaatattagtgggaatcatcggttggaagcagataaacaacctgggaacagtagtataagaatgcaccttcaatataacttttga

SEQ ID NO: 8837 - DNA, 2499 bp, Lawsonia intracellularis
atggatttatcacatcaatataacattatacataatatatatgaacatactcataactatttatcattattccctaaaaaatgtaaaaactactgtataataatattactatgtatgtgttacattttatttaattatgagtattctttttcagtaaaacctacacgccaactatctacaaattcagatagttcagtagaacaacagtcagaagaaagttcctcttcttctgaggaagaggaaggaaatcctggtagtgatagtcgtaatcaatttttattactatgggaacaagagacatcaaatgtaaaagagcaggtgtttcctcttcaagaggaaagtagttcttctaaagaatttatagataaggcagtacaaactggtgaagactcatcacaatcatctagccaaagttctgagtctagtacatcttctacaagtgcagcattaggtacatcagagatgttttttctttcggaaagtgaagaggtacaggaagttataataacatcctctgaagaacaaatgcaacaagaggttattagcaatttgaaaaaaaaagttaaaaagttaaaagaaaaattacagcaagaaagaaaaagacatcaacagcagatggataaattaaaaacttgtgcagtacgtcaagttcaatttttacaaagcatggtgaagatggctcaacatcagattcagaaagtagaaattgaaaagctagaagcccaacaagttgcagctttatttcaagaagccttactgggtcaggaagcacaatcacagtcatcaacaagtcgtagctctgtaattatatctcctcctcatggagaggaaaataaaagtccttgttcaccattaagtagagaggacgaaggttcagatgattctatgccgcctcttgagggagaagagggtgacatatggagagatgagtatgtatcccaagagcaacgttctcaatttttcttacagcaacaacaacaacaatcatcttctttaagtgaagtttcccaaacaggtgtagttggttctagtagagggttacccacaattcaagaagaggacgaggatggaagcagttgttcttctattgaaggatacttatcaagcccaacaccatctgttcttattgcagaagaaggttcaggttctgatttagaagagtcagtaaaatctccatcagagcatccatcaggagtagatagtgatacgctagaagaaggagaggtgataggcgaagaagttcagggtcctttaactactaaacggcctgctccaagttcgtcttcagatagctcagatgatgagtcattatcgccagtagttaagcgtctaaagcaaagttcttcttcaccacctaaatctccaggtagtccatcttccaggggtgatatgtcatcgatgcttataccaggctataatcatgagtcacaatatggctctttaaaaggattacaatgtgtcttgtttggagcagtggagcaaatgtcagctaatttaaagacacttgttttaaaaacaagtttatatcaggctgaaacaaaggataaaaaaacaagctcactaattgcaaaagaaagtaaaaaagcgtgtatgtccttatgtggaaaagaaaggtctgttaaaaaggttatgagtgattcaagtaacctattatcgtttttaaatacttgtcatttttttggatatacagatagctatcttgctaatcaggagaataaagtatcctcaggaaaagtcggtctattaatgaaccctatatcaaatgttagtattggtttgacatacaatcgtcataagaaccatggtaaagaatatcatggagcacaattaggtacgtcttttggatcagcaaaagctaatatggaactagatggattttctgcagttgtagcttggaactctgaagaaaaaggacttacaggatatctttcaggttgtcataattggggtcaaatgaaaaatactcgtcaggttatgcaggctggaaaagaaatgaggacaaaagggagtcctgatgtccagttaagtggagttttaggtcagcttggatatacctttcctctttcaaagaaagttagttgtgtcccatatattgaagccacacatatagttgtaaaatggaatcaatatagggaagattcaggctctttaccatgtgtgattagtggttacacagagaagtttcaggaaaaaactataggtctgcgaacttctatgaaaattacagataaagctatattacaaacatgggttgcaggtggtactgtccagcataccacaagtaatattacatctatgccattagcatctccattactgctttataagacatctgttccaggaaataagaagaaatctttctatagcgaatgtggtacattatatgaaatgaatgtgacagatttttgtaaggtagacttacatggaagtttacgattcaaaaaagatcaaaaattagatgctggtcaaatgagacttcattttcagtatttattctaa

SEQ ID NO: 8838 - DNA, 2076 bp, Lawsonia intracellularis
atgtctactactatgtcaattttaaaaaattgtatactgtattttttacatacatcaaataaaatttttttatatagatatatacataaaaagtattatatattttttttagcacagttattatctatgttatatacttgtagtagtatagcaaaggttaatgagaagagtgtatctagcactagaataacacatcaagaacaacaaaatatagctagtgaatttatacaagcacaacaagaatatataaatataaaaaacttattaaatatgaattttctatattttgacgaattacaaacatcatatttagaaagtttaactacgcaaaatagtatgatagatctttacttaaatacaataagtagagagggagaagattcatttaactatgaagaaatacaacgtatgaaggtgaaccaacaaagattaacaggacaattaacatacatcttacaatcaataacaagtagaatgcaagagttgcaagcaaatattgtagcaatagaagaaatgcagttaatagtaggtcaacaagaaggaatatcagaaattatagcattaaataatgaccatcttcaacgtatactaaatagtcaacagtttatatataatagtattttcaatgagcaccttatgttaagatttcgtataatgcttgtggagaagattgaacaagctcgacaacaagggcatcctctaccaccattccctaataaagaaataagaatgggaaattctatactacaagaagtaatattaaaggatccacccaaaaaaagagagtctagtttgcgtaagcgttgtttagaaacagatttaagtagttcttctgacgaagaagcaaagctatctcctcaacaattagtacaaagacagataggacaatcatcggactatgatgcatcaagtgaagcttctgatgaagagtcacagccataccctcaaagttcaaggtctgtatatttgttcccacgtaatattcagtcatcgaaggatagaacatcttctttagttgctatctataaaaaagttttacaattggaacctctattgggagtacaatatgtttttcatgatatgttagctcgatttccaatagagcttaagcagttagcaacaacaataacaaataatctatctgataaattatctaaccatatagatgagaagttttttaatactcttgaaagaacaagtacaggacgcataaaaaaagataagggggttacagtaatcccaaacatacccttaagtgataagaggatgcagtctatgcttggaatgatgaaggattgtcctttctgtatatcaacaagaccacaaactagaaagagaagttatgtttcaaatacaatttcaaacataactcttggtttagggtatgatcataacaagtataattctaaaatacacaatggtatactttcatctatagcagcaaaagtacagataaaaggactgcttgctacactttcttggggtaaaaataagtgtggtctaacaggttgtgtcatgggtgctcattactgggggcaaatgcataccatacaatcaatgccatttaatataaccaagaaaaaaagtataccagtcaggtttagtggagtattagctcagttagggtacaagatacctttaggatctgaacattctctaatgccatatattggctcatcatatgtagtaggaacatcaaatagttactataaagaattaagtccgtttttctatctatcagataaacataaagaaagtgtatatgatcatgttataggtctttgtctttacagtaaaattaaagatttttcttcaattcagttttggtttgaaaaaaattatagacaacagaacctaaatatattaaatatatcatcgctgctacaatctaaacctctgtataaatcatatctacaaggttacaaaaaaaacgatatctatagtgaaactggtatctcttttgagtacactattaatgatgtgctcactatacatgcaaggaattgttttacattacataatatgaaaaatattttttatatacaaacacagtgtaactttttgtacacgttttaa

SEQ ID NO: 8839 - DNA, 1989 bp, Lawsonia intracellularis
gtgtatacatacatacatactataaatagtaaatttttttctattaaaaagaactattttagattaattacaattatttttatacttttatttttatgttattataaaaattcgtattctgaagatataggtaaaagagatacatatgatgaatttaattggtgtatgaaacaattacaatctatttcaacatcactaaataatttaatacaatatatgtatgaagctcatataagagtagatacatcagatgcaatattaagaatgactgaaagctatatagaaacatttactatagtacagaacgatatatttaatatgttaattaatgagtctagtatggtaagaagattattacaaacagcaactaacgatattaagaatggaatagatgtttcaaaacatattcatagtttaaataatttattaagtaatacttataaatatgaagtaaaaataaatcaaattaaacaaaaccaacagaaatatatccatgatagacataatgtaataacaaatttacttgcgcttgaagagtctgttacagaaaagttgcagtccacacaacaacttattctatccatggtaatgacaatacctcaatatgttagaataccttatttattagaggcaatacaacaaagattaagtaatgcacaacatcaaataccacaattagaagctgctcttgatgatttgaaaagtaaaatttcctcttgtgcaggagggcatataaaaaatgtagaattagtgcaggagttgcaaagtaatttagaaaaggcattgatgttactattagaatcagaaaatggactacgttcagttatattaaaaggaaaagaccaaggacctaaaccaccaccgccttcaggaggtgcttcagcttcaatggcgaattttagtctaggggaagggagtgcagcttttgtttcaggttacgatatattgggtaatgttagttctctccaggagttacaatgtatctttgggaatgcaattacacaagtctcgagtattttaaaaatgtggtctttgagaaataccttttgcatacatgaaacaaaatgtaatatacctcatttttttcatagtgatatttttagaaaaaaagaaaagaagatatctgatttatcattaccacagttgtcattattatctcacttatctgctccttatcatatgttttcttcagttgaaggttattataaaaatttagagtataagccacatgcaatccaggcaggggttattgtttttcctgtaacagggttacagcttggagtatcatatgattttttagaaaatagaatgcttaaagtacgacataactcttttggttcagctaaggcaaaaacaacaacaaatattctttctttggctgcttcatggaatgcagagcagacaggattgatgggacaagctataggttgttatggttgggggtatatgcccaatacacgatatgttccttttgtaggagagaaaatcagtgttaatagtaagccagatattgaattgaatgggggactttttcaattaggatataatatacagatttcatcacctattagacttactccttatgtggaaggtatgcttgttactttgggatggaaaaattataaggaacattatggagtagtgtctagtaatattagtaattataaagaagcgttatgggaaagaagtgttggattacgtggatattggaatataaatccacaatctaacatacaagcttggatttcaaaaatttttggtcgttcaaatacaactaagctgaaagcaacatcattacttttttctatccctgtgtataaaatgactttaccagtattagaaaagcggttcataaaaaatgaacttggtatgtcttattcaatgaaactttctgataaaatgtgtatgagtttaaatagtatattcaactatactaataatacattacatactcaaaatatccaatgttcttttcaatatgtctattaa

SEQ ID NO: 8840 - DNA, 972 bp, Lawsonia intracellularis
atgctatcattaaaaactatggctatatctttaaagcaaaattatgctgaaagagagcttaatactattgttacttctcctaagctgcgcttttgtaagacagctattgagcagcctgtttcatcatctcagccatctttagatgtgtttattccattccagggatttagttcaacagataaatatagttcaaatggtgaggacaaactttgctcagcacaaataggatttgttatgtgtcctacagaaaagtttactatgggagtaggttatgactatgttcatgaaatccctaggaaatataaagaagattctactctagtaacaaagacacgttcaacaatacatattttttcttctatttttagttggaatacaaatggcgtgggatttacaggacacattacaggatgttgtggatggggagatataaataatacacgttatttcatacatggtaggggaaaagctagttctaaagggatgcctagaattaatcttagtggtgggcttttacaaataggatataatttcccaatatcaaatgtaatgacgattactccctatattgaaggaatgcttacaacagttgcttggaatgcatatcatgagtcaataggccctgtccgttgtaaagttagtgactatagagaaacttcttgtgagaaaagtgtaggtttacgacatagctatactccttctagtaagacacaacttcaactatggattgcaggtgttttaggtcaatataatataggtaaactgcattctgatactttattttctgattatagttatcatactactgtaccactaaagagaaaaaattatgaacatgcggaattaggtattaattatgaagtgtatgtatcagacttatgtactattggactttatagtattataattttttcgcatattcaaaaacctacagataaaactatgagagtttctttacaatatatgtattaa

SEQ ID NO: 8841 - DNA, 765 bp, Lawsonia intracellularis
atgaaatatcaaaaatttcttaaaatgaagaatttactagaatcttctaatcagcaagcacaagaaatattgtcaattcaggaatctttaagtgcacgaatggatgatgatttaaagggactgggagaaacatctcgtcaatgcacagaaacattaagaagattagaagagcagactacagaaatacaaggaatacggtcaactatactaagtgcacgtcagatgaaacctaaagatttagacaagatactacaatcagcatataaaacaattcttaaagtttattcccagggaaaagatagagcaaggatacataggcagattctattacaattgcaacgagttaattttcatcaatttcaagtgagagatagcgaacacttggcagtagatcagctagaacttataggcagtactttagaacgggtagaagaagaaactttaaactttagcatacaaccacctcaaccatatactaatagtgtgctacaacaacaagtgacattgataaatcagaagtcagtagcagtatggaatggtatagaaaaaagaaagagacttcgttcttgcttacaggctttgtatactgttgttgagaacaaggctagccaggttgaagagaaaaacaagcaactggaagagattgtagctgaatgctatcttattgttacaggaaatagtagtcatcaaacttcacgtcccccgtcaccaccaccatcatctccaggggggggggggttggctcacttgaagggtcttctttag

SEQ ID NO: 8842 - DNA, 2391 bp, Lawsonia intracellularis
atgtataaatttattatattttatattatatgtatatatgaaacaatagccatatatttactcttaggtagttttatatcctattttaatagagtctttcttaaaaaagaagtaaaaatattagatactactaaagtaaaaaagtatgctagaataggaacatttatttttttgtatgtaataataagttctcaagtatcgttatctcataatgctcgtataggctatgaagataaaaatagtgataggaagagtaaactgattttacataacaaattacaagtaaatgagtttgatgagcttcgttcagatattgtagttacaatgacaccattaaatatatatacttctactcaggaaaataaaattacaactatagaagccaaccttttaagattagaggtgatacagcgaacacaacctgtgcttttagtagatgtcgaaagcagtcttcgtgacatatatcttctactggacgaagctgaagggtgtaatagagaagtagaaagatgtcttaaaatatgggaaacagctagtgaacatacaaaagtactgcatcgtcagactagggagcgtttatctaatgcagtaatagagtgtcaaccagggttacctactaataatgagggtaaagtagtaagtgtaccagaagaaattgtggcttccattgaaaataaggtgttacatacagcaaatcaacaaagaactgcacgaaaaatggaagtagctatatcacgacataaaaataaaaatattttcttggggaataaacaaaaactacttaggtatcgaattgaagtactgaaagcgcgtgtagaaggtaatcctgatcctcctatacctatacttacaccacaagtgcttgaattaccacttttacctgatccaccaccatcaccaccaccattgccacagcagacttttcaattcccagattttggagatcctcttccggaaccattgtctcctttaggagatgatcctccccaaaatgtactaaatcaagagcctcagccaggaccatcttctgagattgtctcaactttacagccttcaccttcagtagaggatctatctagttcaggagtgactttagaatgtcaagaagagctttctagcagtgatgaggagatattagatgatgagtgtttaacctctggcgatgaatcttcaacatcagatggtgagtctcaaaggtcatcaccgccaacaaaacgtaggaagctaactcatactccaccaccttctgatagaggctctcctccagggagttcttctatgcttatgccatattacacatatggacaagtcagttctcttcaaggattacaaagtacgttaatgagtttagaggatcagttagcaacacaattacgactatctattattagatccattaatgttttaggtgtttgttgtaaggacgacaatcagttacaacctcatacttttcaaagtaaaaaacagactaaaattaaaggaggaataggaagaagtcactcaacagataatgaaatacgtccaacttctgtgaataattcattatttttttcgcagcaatggcatgttattgcatctatggatagtcgtatatctaatttagagactactatttcttcaagacaagcaggggtttttacaacacctatcgatggactctgtttatctttattgtatagtaataacaaaaagaaaactcaaaatttctatggagttgtactagactcagtagatggttctgcaaaagctcagatagaaacagataacattttagcaacagtgacatggaataaagaacatcaaggtttttcaggtcatttagcaggttgttatgggtgggggaaaataacaaatattcgtacaatacatttttttgataacgaaagtgtttctaaaggtatttcaagtatacatatgagtggtggatttattcagctaggatataacgttttactaggaaaaaattattttcttattccatatgttgaatatatgagattagcagtagcatgggatccatatgaagaacatacaggtcttattccttgtaaagtgagtggacataaagttcatgtttgtgagaaaagtataggtttgcgtaatcaatggaaaattacagataattcccagctacagttttggggttctcatatttttacaaatcataatacaggtgaaatagcttctaaaccacttagtttatctgactataggaataaaatatctattcctggttataagaagcaatatatccatagggaggcagggatttcttatgagtcaaatgtaatggatacattatctatggagctttatagtaagttaagggtaactaaaagcataaaagatgttactagttatacaagttttacaataagatacgtttattaa

SEQ ID NO: 8843 - DNA, 2526 bp, Lawsonia intracellularis
atgatatatatatatatcactatatgttattcttatactttaacagtcctatttctttttcaaaaaaaattattgaagacgtactacatttttgtagcaggggtctttatttttttatgcacagctaagcatgatcatgctattgctatggataggctaagtggcatacctcaaagggatcaagtagaaactgactcttcatcttcagaaggtgaagaagaagagcaaggtgctactggtattgatatgggtttctacaataccctagactccattgagtttgctgctgaggttacgggtagaaatcatagtgaagaatgtaactatagatatgaaaatagacgctatcgaaagaagaaggaaagagaagaggaaatacaagaagagaaaaaacgatgtgaaatgatagaaaaacaatgtagagaagttactcattatcagaatgtaaaacagaaagttgaaagttttatagcctatccttctcttgttgctgagcagaaatgttggatggatacatataaagaggaagctcttgatcgactaaataacgttagtcaggagcgacatgaaaaagaaagatctatagaggaaaaacaacaacaaatattgaggagtcaagaaataaatcaacgacttatagcagaaggacaaagtgaatctttttttaatatctttgaacaaagtgaatctagaattctacgtccggtgtttaggactcgttttcaactacgagttaggagagaagaacttaacgcatattttaatagaatgatggattttctatatggaagtgatgcattcctacaagaaattatagacgaagaggaagaggcagaatgtttggaaagagaagagagagtagcattagatgccttagaacagctacgagtagaattagagcataatttagtacaacaacaccaggagatgcaaagaagaattccagataacatattgaatcatcgcgaagagttaatactacaagaactaacatggagctatacagaagtattgtcaaatgccttcatagcatatgatactcactgtcaaaccctctctgctcaacaaagcagaccaccctttttcccttatctagaagaggctatgaggcaaaagagaagcaaagcagaaatagtagcaagtgtagatatggctctcctctctttggatgatagtagagaagatagtgagtcttctgaacgaggggaaatacatgatgtaagttggtttggtggaaatgcattactagatgaaactcttggagaagtagaagaaattgagcactctgaatcctcaaaaagtgatgttagtcaaaaatcaacagcatgtactgaaggggagagcgaagaagcttcttctactcaacaatctgaacagtctatatctttagagcaacgctatcttttacagggcgctcgaccaaggcaaccttcaaaaggtggggcatcagatagttctttgtcatttatcccaggctttagttttggaggacaaataagctctcttcaaagtatgcagtacattttatgtgatgtttctgaaaaagtttcaacagagttaaaatcacttgtgcaacatgcacgacaacaacagtatgataaagacaatgaatgttgccttacaaatttaatatcaagaaagagatacagctctgttcctcagtatgacactgttcaacatacctataacataagtagtccatatagagtgtttggaggagtagactcttacagtaaaaatttagaacataaaattcgttcaagccaagcaggagtaatgtttactcctcataacggatatacagtgaagttgttgtatgatcgtcataaaaaagatgttcaagaacatagtggactacagcttggaacagcaataggttctgttaaaagttatatagatacagatggactttctactatttttagttggtatccttgtggttcaggctttacagggcatcttgctggttattatggatggggacagttaaagaatactcgattttttactcatgcagacaatcaagcatgttctaaaggctctacagacatacacctaaatggtggaatgatccaaattggatatattttccttttatcaaaaaagttagccattattccttatattgaaagcatattatcaagagtaggttggcattcatataaagaaactataggtgtacttccttgtactattagtagtcataaagaagtctgtttagaaaaaagtattggtctattttgtcagtggaacatttctgcatctactcagctacagtgttggggaataaggacatcaggaacatcaaatgtagataaagttacttctcaaccgactagaggtccaaatacatatactattgtagttccaaactataagaaaaagtatatgagaactgagctagggttatcatactcttcaaaacttactgatttttttactattgttttgaatagtaacgcccaatttaatagtaataaacgccatatacaaaatgcaacagttcatctaaggtatacatattga

SEQ ID NO: 8844 - DNA, 2178 bp, Lawsonia intracellularis
atgtatgatagaaagtttaagaatgttaaatacgtattacaggagcctatttatcaacataaagatgaataccctaaagtatcaaaacagttacaggaaaaagaagaagagctaaaagtttatgatgcagaactagaaaaaatgtatggagcaagtgttaaagttcttcaaaaaaaattgtcagaaattcaaaatgtaggaggtgaactagatagagaaatgctttgtttgttacaaaaattaggggatcgtgatgtaattacacaggaaaagacagaactccagagtcgtcttagtataatgaagattgacgtaagccctaatgagttcaaaatagatttaatagatgatgcaagcattcgttctcctgaaatctatcgtccctttactctatatactaaaaagaacgcacaagattgggtacaggaaaagtctagagaacgcaatataaaagaagcagcagaaatagagcgtaactgtagattagtattggagaaaagggggtatgttgaagagggtgtaaaaaaagagacagtagctaaggtatcattagaagaatgtgaattttctgatgttgacattgatgatagtgaagatgaaagcgagagtgaagaacaaccaataattagtagtcgagtaactcaaattgataataggtatcttacaaggattcatcatcaccctactcctttaagagatgatagtttacgaccatggaatgatagtacaccttctagtacaacaggtcagaaagaagaagaaacaacagctactactagtgaagcagggtctcattctttacctgataatgttttggatcaaagtggtgagggttcctctcaagctacagcatctgatcaagagcaggaggtaactcatcaagagtcaccaggagaggttggtccccaagaagattcacaacaacaacaacaacaacaacaagtacagcaaactccaggtaatcaagcacaaacctcacaatcaggagagacacaacctcaggcagaggggggagattcacatgactattctacagaaggagcacgtccaaaattgagagggaaagatacatctaggggtggaccaggaggtaaagcaacatttatcccagggtatagtctagaaggacatataagctctctctatggtatgcaagctattttacttgatgtatctgagcaagttgcctttactctgaaagggttagcactaaaagtacagaacaatgctatggtgaaagatgatgttcttcagctgaatgatagtagtgcttctataaaaaagaagaaacagataggtatgcaagcattacagcaggagagtgcttttcaagagttaatgccataccaagtgattgggtttactgacactaaagatacaaatctggaatgtaaactaggttcaagtcaggtaggacttcttgtaacccctaaggatggattaagtgttggattagcctataatcgatataaagatacaggcaaggaatatcaaggaatatcctttagtgcaggaagtggttctgcaaaaagtaaggctgagctagatggactaagtatgttggttgcatggaatcctagaggacaaggatttacaggtcatgtagtagggtactatggatggggagagttaaagaacgaacgttcattcacccatgatggagcacaagtaacatcaaaaggtactccagggatcagtttaagtggagggcttatccaacttggttacactattccaataacaaaacaagtgtcatttactccatatgttgaatgtatggtttcaaatgtaacctggaatggatataaggaaaactcaggacctttgccttgtgaagtgagtagtaatagagaaaaggtgtttgagaaaagtataggattgcgcagtcgctgggatgtaactgaaagaagttgtattcaatcctgggtagcaggtgtatctagctatcgaagtaccaacaaggtacatgtaaaaccactgatagcagcctatgattctaagtatgaagcctctattccatcccatggaaggcaaagtacaaaagcagaattaggaatgtcttataaatcaaaggtaacacgaaatgttgagataggccttcaaggaaaagcacaacttgataagtctaacaagaggcctcaacatcaagtaaatgtacatttccagtatatgttttaa

SEQ ID NO: 8845 - DNA, 690 bp, Lawsonia intracellularis
atgtataaattagtgtctactatttattttaatacacaaatacaaaacattatacatagatataataaatttttaaactttctaaaaagattaggacaatgtcattataagtatacagcaatattttttttattaagctgggttatgtattttaatcctacagcatttgccatgaatggacaggacaaacctaatccatcaaaaaagagtataaagaagtctcaacaggaatcttctccaagcagtgatgaagagaagttacaaggtgctacaggaagtataaaagacagagcatttgttaggccaaaaagttggtttgataaaattaaagatagagactttgctaactttttacagtcgttagatatggggggagaattagaagaggaaaaacttaaaagaagagaggaagaagcaataagagaagcatggttagaacgagaagagtatagaagggaacaagtaagagcagaggttcaagaagaagaaagaaggctaagagaaggagaaagaagattaagagaagaacgtagacgaaatgatcaagtaagacagttaaaattagttagagagaggtgggttaatgggcacaataataggaacaaggcagcattaagtggtgaaaaaatgtcacctaagcaggcgtttatggaggagaaaaagaggatgaagattttaataaacaattaa

SEQ ID NO: 8846 - DNA, 2066 bp, Lawsonia intracellularis
atgatagtatttcttctgtttcaaaattgtattttttctcatcaaatatattcactttcgtctttctatcttttcttttgtcatattataaaaagtaagcggtgtcatgtcgtctttactttttttgttttgtttttgcatatgttaagcagcaatgttttttctatgaacagagatggaagtgtaagctcaaattcatcagagaatattccattatatgtccggttttatggtgatcctgatttattacgaggtaggacaagtagaccacctgacactgtagatgccattcaatacgggccaatggaagactgtagtatatgttatcaaagtaccttctgtggtttttttggtgggatggctataggttctatcgttggtagttctgtaggtgctgtcggaggtggtgttgctggagcttctgcaggatgtgttcttggtgctggtgttggttctactattggtgcagcttatggttgtatgatgggtgcttctacagctagagatagtgagtgttcagcaagggcagagaataatatagccgcagtggttactcaacaaccaaaacctttgtttaaagaagtttatgatcaaagtagaatgaatggaagaagtgtcacaagttctacaagtagtctgacagaagtatcttctttaaaaagtacatgtagtagtagcagtagtagtattagtagtgatactagtagcaacagtagtttccagaaatacctaaagctttgttttgttagtagtagtagtagtagtagtgaagaagagatagaagaggaagaggaagaggtatggatcccaagaggagagtgtcttctttccgaatctgagtgtcatggtaaaagtgaaagtcataacccacaagggagtgataagggtactgcagggaataaacaagattcaagtggtaatagtcagtcagaccagcaaaaaactaagggaagtccttcaggggggagtggggatgtgtttttggttccagaaagagagacatgcttttttatccctggttatagccatgaaggtcaagtaaattcacttttaggattgcaaggagtattactaggttccgctgagaaagtaataactacactacgattattagcattacaacatacgaataaacatactactggacagtcattagaaatagattctagaccaagaagtcagattgcatcttctgacataataagttcatatgtacaattacagaatccatgttctttaagatatttttccatagttgcagataattatgaatcaaatttagaatgtaaaagtcgttcagctcaattaggcttaactatgaatcctactccatatgttcatgtagggttgatgtatcatcgtcaaaataaatatttttctttttctaaagaagtacagttagattcagcgtgtggcatagctaaagcaaagacaaaagtagaagggcttgcaggtattgttaccttgaatccagataaagcaggatttacaggacagtttgcaagttattatggctggggtaatacaaagaaccatcgctctataggctacataggaagagaattagaagcaaaagggcgttctaagattcatttaagtggtgggcttgtccagcttggatataatttgccattagctaacaattggtttttaacaccttatattgagaatattttttctgttgtaacatggaatggatacaaagaagtaccaagtccttttgcatgtagtataagtaaaaataaagaacaattatggcaaaatagtatagggatgagagctattgggaaaataggaaataattctcaactgcaaatgtggactgcttatagtactggttatcataaaatagccgagttaacatctatgtttctgtgtgctccaatgaagaagtatcaggcagttgtacctggtatagatagaaagtctgcacaagttgaggttggcatttctcatcaagcaaaaattacaactacgttaataagttacttgaatgtaattgcaaagattggcaagaaaaagttggataattctcacttgacgttatctttagcctaccattatta

SEQ ID NO: 8847 - DNA, 2037 bp, Lawsonia intracellularis
atgcttctaaaatatagaataattataaaaatatattgtataattatttattacattaaatatatttatttattagaaaataaatataaaaaatatagtctaatatataagaatacttatcagtattataatatatattataataaaaaatatcttacattagttatttattgtttatttttatttatttttcttagagatattcatgccatgaatagagaaaatgaagaatttaatttgtaccatagaacactaggtaacaccgaacaacatagtgaagaagaaactccttgcacagtagtagatattaaaggagtatctatatctgcagatgtatatgaagactatataaaaaaacatagtttagttgttatagatgaggcaaataaaagtattaacgattattgtccatgttgtaaaacctgttgtaaaaataaacaaacatatgcagttgcagcagcccaaggaggatgttgtggagctataagtatagctgttggttatggggtaggaaaactaatagaattatgtactccaactgttgctcctacagagatgatatttacggtccctactccactagcaactgctatgactagtgggcatacgttaactactgttgcatcctctatagaaggaataacacaaacaaccgcaataacaatgggttgttgtggccttacttgttgtttattgggtagtatatttggctacttaactaataaagtagaagaaaaaaatgaacgtattcatacagctcaacaaagattagaatatatggtattaaatagacaatttttatcagatgaagatgaaggatatgaactagttgacttttctcatagacaacaagttgtaactaaccaaccacaacgtattaattctccagtaaacaacaatagtgaacagggagaaggatccagtcggagatcttctgaaggaacagtatatgaagagatcttttttcttccaggatataatcgtggaggccaaattagctctttattaagtatgcagtatatcttagcaggtccatctgcacaggtttctagtactttaaagatgttagcccttaaagcacatagaataccatctgatgcagcagcatctctacaattagggaaaaaatctcaaaagttgcaaggtccaaatagggtacttaaagcagatcttcagtttcaaaacaacccacaaggaatatctatttgtcgaatgtttgcctttacggataagtatgagtgcaatttagagaagaagatacgatcaggccgagcaggattagtagcagaacttttccctggaatgacagctggattagcctatacacgtcataatgaaggtaggaagtcctttgaaggtattcagctaggtacaggaagtggttctgtgacaagtaaaacagagtctgaagcactctcagcagtaatagcgttaaattcagaaggtggaggagtgactggtcacatagcaagttatcatggatggggtaagatgaagacgtctcgttcctttatccatgcaggtagtaaaataagtgctaaaggaaagccaaatatctacttaaatggaggactgatccaagttggttataacatctctttgtcaaagaccacaatactgaccccatacatagaagggatgatgtctatggtcaattgggatgcctatactgagcgttcaggattgttaccatgtaagataagtagaagtgaagagtatgtagcagaaaggagtgtaggattatgccatcattggaagccaacaagtggatttcagatccaaagctggatagcttgtatttctggtgaacgtaggacagatggtgtatcttgtagacctctagtaatgcctattaagaagtatgaatcctatatttcggtacaagaaagaaagtatgttcatatagaatttggagcatcatacagtatgtcagttacagatactctgcagttaggcattgatggaatgatacatttagataaggttcataaaataaaagaaaaaagtatgagtctttctttaatgtatttacactaa

SEQ ID NO: 8848 - DNA, 2055 bp, Lawsonia intracellularis
atgaataacatcatttcattatgtaatattatatatatatatgttacaataagttgtattatagtctgctatttattagcaagtaagttgcataaaaagtatatatgttacgataaacagcaaaaaagagcatattataaaaaagttttgacaggtgtattcagctcttttttattttttagtgtgttggcagagccatttgctatgaataatggtgaaggtggtgaacagattcctttaagtgaaatttccctaagtggtggacaatcacttgaaggtggagctacaggtggtgatggtgtgactagtgtctcaccagagtctatccctgacgcattatattgtatgtttttagatgaacatgggaatcaagatatcgtaactactaactcctcatctattcagtctaattgctgtagaaatatttgttctataggaatgactcgttgtttgattacaaacctaattgcaggtgcttgtggtggccttggagttggattaggtggtgtgatagcagaatttacagacccatctatgatgttagccgctactagtgggggagggttagcttgttattttttttctatgcttgctgcttattattatggtggtattatagtaagtaaagagaagcgtgagaatttagaagcaatagataggcgaatgcaaagcctaatagaagaaagtattagccgtggaagaaggcgttctatacttgtaggtcatcaagggcaaccagttactactcaaccttcagtagcagcaggaccttcagcacacttaagaggcgtaatagtgacagaacagccagtagcagtgggtgcttcagctagtgtaggagcttccagtactagaggcagtattttaagaagtagtcaaagaggtgaccaaggaacagagggattacaaaatagatcaagatggggagagcaagatactgatccaatatatgaagatgtctggacttacgcagttgaattaataccagggtatagctacgaggggcaagtagggtcacttttgggtatgcaatgcgttttgacaggcgtttctatacaagtcccccaaaagttgcgaagactggcgttaaaagcttatgaaaaaattccacaaatgtacttgtctcttcaaggtaataaagtatcctcaccatctattgccaattatggaaaactattaaaagcaacaaaaaattttgctaaccagaagcaaaaacacattccttactatgtatttgcatttacagatgattataaggcaaatctggaacgtaaagtacgttcaggtcaagctggtataattgctgagttatgcaatggagtacactttggtttgacatatagtcgtcacaatgatgaaaaaaaagaatatacagggatgcaactaggtaaaggtagaggttctgttaaagcaaagtcagagatagaaagtatagcagcagttgttacatttaatgcagatcgtccaggaattacaggacattttgcaagttgctatggatggggaacagtaaagaataagcgattttttacccatgcaggtagagaaacatcctcaagtggaagtccagctataagtatagctggagggttggttcaaattggttataatttatatatatcaaagagttgttcagtaacgccatatgttgaaggagtgttatcgatagcaaagtggaagccttacaatgaaaaaagaggagatcttccatgtaaactgagcgaaagcagtgagagtatatttgagaaaagtataggattgcgaagtgactggagggtttcagagagttctattttgcaaacatggatatcaggcatctcagggtctcaaacatcatcgaatgtaagtttacaaccgcttgtagcacctatgaagaggtatgaagtttctgtcccaatgagaaataagaactacctaagagcagagtgtggagcaacctacgtatcaaagattacagatagtctttttacgggagcaacaatgttgttttcttttgtaaaaagacaaaagctacataatcaacaaataaatacatatgtacagtatgtattttaa

SEQ ID NO: 8849 - DNA, 2109 bp, Lawsonia intracellularis
gtgatatatatatatattaaatgtatcttttatttctttattagaaaaagtcagcaaagaaatacaggctataataagcaactaaggaataatttttataaaaaggtttttacaggagtatttagcttttttttcttttttagtgtgctgggagagccatttgctatgaataatggtgaaaatgatggtagacagcattcgttaaggagaaatagcttaggccaaccttatgatagtgaatgttcaggaaatggaagtggtggagaagagcctacttctgatcctcaatctgaggccctatttgctgcatttttgaatgcacacggaggagataccctggcagatgtatcttcaagttttagttgtccttgttttggtcctactaagcgttgttgcaagtctgtatttgagaaatggtgctgtatgtttacttgcatatcatcatcaataggtagtttagttggaggaggagtaggttgttgtatagaactagtatcaaaactaggtaatatcgccccaactgctatccctactactattactactactggtttttcagtatcagcagctcctattgcttatggtctggctggctgtatagtttgtggtcctctgggttgtatttgtggttactgtactagacaagggaataccttagataggatcgagaataggatggttagacttagagtattaagtgctattagaagtaacatcagggaagaacagggaccatatgtagcatttaatgtaagaagtcagtctgttactactcaaccaaggcctgtgggatcttctgatagtacaggtagtcctgttgttaccagtcaaccaccacgaggaagtatgtctagtgtaggaggcagttatacccctgtagaacagcaaagaggagaggagggcagttcttcagaagggtctgacgaagaaagtggtgatgagcatatatatgagacaataggtggtggtactggtggtggcggtggtgatgaagaacctatatatgaggagataggtttttatacgactaatcttattccagggtatagctacgaaggacaagtaagttcacttttgggtatgcaatgcgttttgacaggtgtttctatacagtttcctcaaaagctacgaagacttgcgctgaaagcttatgaaaaaataccagaaatgtacctgtctactcgaggtaataaagcatcttcatcatctgttcccagttatggacagttattaaaagtagtaaaagatcctgctaaacagaagcaaagtcatattccttaccatgtatttgcatttacagatgattataaggcaaatctggaatgtaaagtacgttcaagccaaacaggtgtaattgctgagttatgtactggagtacactttggtttgatatatagtcgtcacaatgatgaaaagaaagaatatacagggatgcaactagatgtaggtagaggttctgtcaaagcaaagtcagagatagaaagtatagcagcagttgttacatttaatgcagatcgtccaggaattacaggacattttgcaagttgctatggatggggaacagtaaagaataagcgattttttacccatgcaggtagagaaacatcctcaagtggaagtccagctataagtataactggagggttggttcaaattggttataatttatatatatcaaagagttgtttagtaacgccatatgttgaaggtgtgttatcagtggcaacatgtgaaccttataatgaaaaaagaggggttcttccatgtaaactgagtgaaagtaatgagagtatatttgggaaaagtataggattgcgaagtaattggaagctctcagaggatactgtcttacaaatgtggatctcaggaatttcagggactcaaacatcatcgaatataagtttacaaccgcttgtagcacctatgaagaggtatgaagtttctgtcccgatgagaaatgagaattacttaagaacagagtgtggggcgacatacatattaaagattacagatagtctttctactggagcaacaatgttatgttcttttacaaaagaacaaaaattatataatcaacaactaagtgcatgtatacaatatgtatattaa

SEQ ID NO: 8850 - DNA, 1833 bp, Lawsonia intracellularis
atgtattataatagttactatatttttatttttattttttgtagcacttatgaagtagttgcaatgcataatagtgaaaaaggtctttctaatacaccatctttatctattagttcttttttaaaaagaaattgggaaaaagctaaagtaacatgtggtggtgtgttaggaagttctgtaggaataacaacacttactacaggttttactctaagcgcaataggtgcagtcagtagagggttaggaacaagcagtcgtgtagcttgtttatctttaggtcttgctacagcaggtagttgtgtgttgggaatactcagtaaaaaagaagaactacaaaagataaagctggaaaggcagaaagaaaaacaaagaggagatcaggcatgggtaaacttacaaaatgtaaagatgatacagttgcttgatgatattgaaaaaagaaaggatgaagatcctaatagagatagagagcaaatagaaagaatacagcttgttgctgcggagcttaggaatgcttctttttttataagagagagtggatttgacttaggtatttgggatgaaaatgatgaagattggtatatacaaggtggagtttataaaatggttcctcctccaggaaagttttgggatccctatgagtaccctgacgtttttgaagaggaaagtgctacatcacaggaggagtatactggtgggaagtacacttcagaggttgtaccacaactaaaacctgtacggatagtttcatgccctgcttctatcccaggatatagtgaggcaagccatatgagttctcttataggaatacaacaggcattatttagtacttctgaacaaatttcaactatgctaaaattattaggattaaaggcacaggagaatgtttgtacaccagagactcagctagaggggagtttttactcaaagatacagaagtttcaaggtccagtaaaacacattcaagaagagactcaaataaaaacattaggtttgagtatttttaatatttttgccaatattgatagctataaaacaaacctagaacacaaagttcgttcaggccaagctggagtgttgattgatgtaatatctggtcttagttgtggtcttacatatgattgtcataagggtgatacaagagaatataaaggcattcttttagaaaaaggatcaggagaggtaaagacaaagacagatacagaagctctatcagcagtcattgttgcaaatacaaataatgcaggctttacaggtcagctaattagttcttatggttggggtaaggttaagaatatacgttcattcacccatgctaatagagaagtaaatactaaaggattacctaatatacgctttgctggtgaactaatacaggtaggatacaatgtgttagtttcaaagcatgtagtaattacatcttacgtagagacagtgttctcattggtgaaatgggtcccttataaagaagtatcaggaccactcccctgtaaactgagtgagaacaaggaacaagtaatagagaaaagtataggtttaagaagtcattggcaagcaacaagtatgtctcaaatacagatttggatagcaggcgtgtcaggatatattgaaacaaatagcataaaatgtgagccaatacagaaacatgcctcaagatataaagtatcagtgcctaaaaatgaaagtagttacaaaaggacagagttagggatatcatatacagcaaatttaacaaataatctggagtttggtataaatagtgtgatacgttttgaaaattccaaaaaatttggaggccaacagatgattctttccttacggtatgtatattaa

SEQ ID NO: 8851 - DNA, 1860 bp, Lawsonia intracellularis
atgaatactatcttatttaatttatataatttcatatatattaaaatagttcatagtataaaatgtatgttacgagcctataatagtcatcctttattgtttttacaaataatgtttcaagttatacaaaaaataaaaggtaattataggaagatagctgtcaatgctattattccattttgtatatttttttgtgttactgaagcagtcggtatgaataacaataatgaacatagcccttctccagttaatgaaagaacaccactactacagtcatcacatagtgttcaaagagttggagtgaaccctagaggggaagggtgttgtgctaggatgaagcgtagatgtggaagatgttcagaagggatgtgtagttgtgctattattgctgcagagagtgctatttgtggagctgcatcaggtgttactagttgtattgctacaaaaaagttagagagtgaactatattgggcattaaaaattacatgtacacagttgccttcaccaacatatgcaggtttagtaggttgtggagctgggtgtacgttagcagcagcagtttctgctacatctattggatgtatgaagtgttatcaaactacctgtaatcatagaacagaaaatacagatggagagcagagctcagatagtgaagatgaaaatgaaactagttctcagatagcattacgtgtaattacaactcaaccaagctctataggtatttcaaatcctgctgtaataacaagacaaccagactctagagatacagcttcttcttactatagtgggtttctttcggagtttaatcctaaaagccatatacgttcattactagggatgcagtctgcattattggatatatctgaacagacagcaagtgctttaaggcaagtggtgttaaaaacacatgaacatatgcttatgtcggaaatgatgtaccaacaagaaggatatgtttattcaaaaggtcaaaagtttcaatatccgtcatgtgtagctaaagtaactgatagtctattcttaaaaagatatgttcatcattttgttacatttgatagttatgagactaattttgagcatagattaggttctggtcaagcagggatagttgtggatatgacatcaggtgtatatctaggattagtgtataggcgccataataatcatggggaaatgtatagtggtatcccaaataattcttggacagagatgataaaagttaggacaaatacagagagcttatcaactggcctagcttttaatatagggagaacaggtattacaggacatcttgtaagttgttatggatggggtaaagcaaagaatatacgttcatttatgcatggcactatggaagtatgttcaaaaggctctccagatatacgtatagcaggagggttagtacaattggggtataacctttctgtatcaaaacaagtaagatttactccatatatagagacaacatgttcagttgtacagtgtggcccttataaagaatcattaagtcttttttcttgtgaactgactaaaaataaagaacaagtaatagaaaaaagtataggtatatgtagttactggaaaccatcagatatgttacaggtacaattatggatagctgctgtttcaggctatcgtgatgtgaagaggttaagctgtaacatagttaactcacgtctaaaacaagagatttcagtccctttaaaacagacaagatataaaaaaacagatgttggattatcatatttaataaatattacacctaggttttgtttggaaatgaatggtatgatgtcttttgaaaatataaaaaagagtaaagaaaaacagctaaaactcttttttacttataattactaa

SEQ ID NO: 8852 - DNA, 1794 bp, Lawsonia intracellularis
atgataaaggaatattttatatatacatataaaattatatatatatataacatgcttaaagaaggtatagaaaggttaatgggtaactataggtatatatttaaacaacaagagttttataataaatgtataataaaaaatatattacggaaaagtgttgcagtaacaattcttccgttttttttattagtaacatcagttaacgcatttgctatgcctggtttttctagaaataatggttttaatcctttgactaattctgatagtgaaagttctactccttcgattagttctagttcaatgtttaggaatatgtgtagacggggaaatccttgcccttatcttacagtagggtgtattataggtggagtgttaggtactgtcgcaggtgttttatttagtaatatgtttactttccctcattcaagtgagcgagtaggtgctgtagttacaggtactataggtggttgttttgttggtttttgtgccggattaggtatatattattgttctaagagatcttcatgtgtacatgagaatccaactccagaggacggaataccattttatattaccttaggtgataatacgagggaagctaatttatgcgaatgttcaggatcatgtgaatgtcctttgttagctccatcccaaagaccttttggttctcaccaaactgatagccatagaggtagtggtaatagaacttcatcatgttttttaccaggatataatagagatggacaaacaagttcgttactaggtatgcagtgtattttagctagttcgtctgaacatgttttgatgaatctgaaagcgttaacactgaaagcacatgaatattcccaagaatctatgggcaacatggaagataattattttcctttacagaagaagtggctctctggaccatcaaggggttttataagtacttttaagaattataagcctagctttatttcttacagggtatttgcatctatggataattatcagtcaaacttggaatttaaggtacgttcagggtctgcaggagtagttactgaactatttcctggtataagtgttggcttagcatataaccgtcatactgacacacgtaaggagtatggagggattcagttaaatacaggctcaggtattgtgcagtctaggtcaaagactgaagcattatctgcagtcgtagctttaaatcctgaaacaaaaggttttactggtcatattgctagttattatggttgggggaaaatgcaaaataatcgttctgttacacatggctatagtgaaacaacatctaaaggtaaaccagatatgagtttaacagggctggtaggtcaagtaggctataatatccctatagcaaaatctgtgacacttactccttacgtagagtatatgtatactatggttaagtgggatgcatatcaagaattatcagggattctcccatgtgaaataagtggtaataaagaacaaataatagaaaaaagtataggtttacgtagtcactgggaagtaacaagtggctcacaactgcaaacatgggtagctgggatttcaggttctcataaaaagagtggactacatagtagaccattagcgacttctatgccatcttacaaggcagctgttcctgtaaataagaaacaatatacaaggactgaagtggggttatcttacgtagtcaatatcacagatatgttagaaatcggatgtaatggtatacttcgttttaagcaagctaaaaagattgatagccaatatcttgcacttcaggcacaatataggtattaa

SEQ ID NO: 8853 - DNA, 2103 bp, Lawsonia intracellularis
ttgaaaaaattaatgcaacaaacgatatgtatacaacaagtaatgaaagttttttttctctttctttacattttattagttgatagcgttgaaatatcattagctatgcataagcaggttggtttagacttaaggtttagaagtagttttagtagtaatcaatgttgctggttatctatccctaatatgtatagtattctaaggaatagtgtagaaaaagacttacaaatctgggaagaagaaagacaatgttgtaaggcaaatatgaagtggttaaggagtcaaataaattttttccataaagaaattttaattttagaaagtcagattacttactggagagagcaacaacgttattggaatagctcttcaggaagagcatggcgtaattcttttttgttttggcaggatagagctcatcatggggacaaatataagagaaggttctataaagaacgttgtaccttttctgaggattgcagaaaaaatacttggatagccagtggtttttgttggcattgtgaaattgatgcaaaagcagaagtaaaaaaactacaaaaatccattgaacaaacacaaaaaaagatagtaatgttagagagttgtcgtcagcaacttaataataatgctttaaaagggtatcttgaaagaaagaaaacatggaaacaaaggttttgtttatggacagctgcagaccaaagagcattaggtatgtttcaacaacaatctgatgatgaagatgatttaactcatgtagatagttcaagtgatgaggatagtaatagcagtagcgatgagtatgaaagttgtgatgaagaattttttgatgcagttgaagatctgtcaacagcaggtttacaagatgaatctgaagcaccagccagaggtatagtcttatctactcaaggaaataaagaaggagctaaggatagtacaactgatggtggtcagcagtcatcagaagtgaagtattcatctttgaagctgatggggcaatcagcatgtaaagttaaagcagattttattcctgggtataatttaggtggccatataagttcattgattggtatgcagggaatcctgctagatatttccgaccaagtatctatcatactaaaaacattacccttgaaagcatatgagttttctgatgatgagatagataatttctctcttaatagaaagaatgcgttagtgtttttgacaggtaggaagcggttgcataggttgtatccaacatttagtaaaaaagaaaaagtacattttcctttgtatcgtacattttttactgtagaaggatataagacaaacttagaatataaaacacgtttaggtcaggccggaatcattatagatagctgttcagacatgtgtattggattatcatactatcatcaggctaatgaaatgaagaaatatggtgaagtaaggctaggctcagggataggttcttcaaaagctaaaacagaattagaagctatttcagcaatgatggtttggaatccaaataaaaaaggtattactggtcatatagttagcttttatggatggggaagtataaagaatacacgttcgtttacccatatggatggtgagttgcatgttaaaggtaacccagaagcatatttgatgggaggattgttacaggtaggatatactatttttcaaagcaataccttatccgtcacgccatatatagaacttatggcttcaactgttggttggaatgcatttaaagaattttcaggattgctgccatgtgaagtaagtaggaatactgaacgtaaggtggaaaaaaggatagggatacgtagtcattggaagacaacaaacacttctcagctacaaacatggatgtcagctgttttaggaacacagcatacaaatagtataagtagtaagccaattatagctctaacggataaatataaagcatctgtcccagggtataaaagaaactatacaagatttgaatgtggttttgtgtattcaatgaagttgtctgaaaggctggagatgaatctatctggcttaactcatatcatgaatacaaaaagatacacagaacagaatataaaccttcaatggacttatttttattaa

SEQ ID NO: 8854 - DNA, 3153 bp, Lawsonia intracellularis
atgttaacgatatttatatactttattcttatttttttattcttttgtagaagatatactcatatgtatatgtatgaaacttattgtattaagagtttaacatgggatatgtatggattttatagttggctagttcaatatagcataaaagttttttctagaaataaagtgtttatcattttttcctcttttttatgtgtatatttgacagctggagaagccttctctatttctagtattaaaaggggttataattctccctccccaccccctccatcattagtagatttatcgttaggagattctcaggatcttggctcagactcttcatcatcaggttcattgttaggaagttttcaggatcttagttcagaatcaagttttgatgatggccataatccttccccaccccctccatcattagtagatttatcgttaggagattctcaggatcttggctcagactcttcatcatcaggttcattgttaggaagttttcaggatcttagttcagaatcaagttttgatgatggccataatccttccccaccccctccatcattagtagatttatcgttaggagattctcaggatcttggttcagactcttcatcatcaggttcattgttaggaagttttcaggatcttagttcagaatcaagttttgatgatggccataatccttccccaccccctccatcattagtagatttatcgttaggagattctcaggatcttggctcagactcttcatcatcaggttcattgttaggaagttttcaggatcttagttcagaatcaagttttgatgatggccataatccttccccaccccctccatcattagtagatttatcgttaggagattctcaggatcttggctcagactcttcatcatcaggttcattgttaggaagttttcaggatcttagttcagaatcaagttttgatgatggccataatccttccccaccccctccatcattagtagatttatcgttaggagattctcaggatcttggctcagactcttcatcatcaggttcattgttaggaagttttcaggatcttagttcagaatcaagttttgatgatggccataatccttccccaccccctccatcattagtagatttatcgttaggagattctcaggatcttggttcagactcttcatcatcaggttcattgttaggaagttttcaggatcttagttcagaatcaagttttgatgatggccataatccttccccaccccctccatcattagtagatttatcgttaggagattctcaggatcttggctcagactcttcatcatcaggttcattgttaggaagttttcaggatcttagttcagaatcaagttttgatgatggccataatccttccccaccccctccatcattagtagatttatcgttaggagattctcaggatcttggttcagatttatcgttaggggattctcagtatcttggttcagactctccatcgtcagatttatcgttaggggattctcagtatcttggttcagactctccatatagtagcgattctggtgaggaagataattcctctttttcttatactcatgatgggataagccgtcgtccttgtatattatcagagtttgatggagtaaatagtagtacaagtagtatagatacagtggtagttactcagccaaaaggattttctgaaaatcatgcatgtttagatacagtaaaagcagtttgtgttggggcaacagctggaggagccattggttgtggtattgattggatttgtagttgtcttggaataagttcaaatgtgggtttatacagtgcttgcgggacttgtggctgcagtgttggagcaggtgttgggtgtgttatttgttgtgtaggccattattggaaggaactctataaaaaggataggttgtgtttagcctcgcctaattctgtgctaggcaaatgcgatagtcatacagatagtagatcaagtgagggatcatcaagtgaaaagaatcattctactataacacagacacaacaatgtagtaacacagaaaaaaataagttgcttggtgtagataaaactacagcatttttgcttccaggatataactataagggacaagtttgttctttatttggaatacaacatatgttgctagatacgtctaaacgtatttccactacagtaaaaatgttaggcatgaaagcatgtagttctaatataacagctaatgagcatactagatttgggtcacattttcggcgtttagcttctaaaaagtcaaagcatattttttctggaataactaataacatcccttatagaataactacatcattagatagttactgttcaaatatggaatataaagcagcctcagggcagatgggagttctttttgatctttggcctacactgactgctggatttatttatggtcgtcataacgatagagtccagaagacaaatgggatgcagggagatttaaagagtagctcagtgagcacaagaaagaagttagacagtctttcagcagttgttgcatggaacacaaagaaaaatggttttataggacatattgtaacatactatggttggggtactgtaacaaatatacgctctgttccccatgctgattgtatggtcaagactaaaggtacatcagagatacaatcaatagcaggacttattcaactagggtataatctacaactttcatcagaaatagtatgtattccttatgttgagtatatgttttcatctattagatgtgcaggttatcaagagtatacagggatattaccttcgaagtttactagaaataatgaacaaacacaggaaaaaagtattggtttacgtagtcagtacaaagtaagtcaaaattctcaactacaaggatggatttcatatgtatctggacagtatcattttgcagaatttaaatctacacttttaggaatacctaatattagatatagtgtttctatcccttcttataagaaagagtatagtggaactgaaattggaatgattcatgagtcaaagcttacctctagatgtactataggagcacatatgattatacatttatatcataatagtgtttataatatgtatacaggagcacagatacgttatcattattga

SEQ ID NO: 8855 - DNA, 1728 bp, Lawsonia intracellularis
atgctttttaagttattttggattactataagtaatgtaaaaaaaataatacaatgcttttcttttatattgtatatatgtttttgtgttgaagatgtttttgctatgtataataatgaagaatgtggtgtatcaaatgcacaaagtgtgttagaaaatccagcagttgctcatcctaatacaagtccagagttttttataataacagaagattttgagaaaacagaagaagaggaaaatacaggatgttgtcctacgatatctagtgagatgtattctgaaagttgtcctaatccattttgtcaccctttagaattttatgggacaatgagaagtttcttttcagaagggtgtcatgctcaatgttctagttttgaaacagttcttacatcaggatgtatagtatttcaatgggttgggaatctaatttcttcattattttcagaagaagattcttcaactggagaatgtcaaagagagaaatcatgttatgaggaaggtaactttgttagtactcctgtgataacccctcctaatccattaggccaacagggaagttcttcacgttgttcaagtggaagtaaaattttttcttcatcatctggtcctattaaagaaagtgtttttattagttcaggctataattatcaagatcaacgtaatgcattagccagtatgcgacatgtacttttagatgtgtctacacaactatctatgacattaagggacttagttttaaaaggatatcaggagagacttaatacaggtgaagcatatgccctaacatacaataggggtgcacgtcttacaagaaagccagtaaagcagatgaagtatttcagtacttctggaagtagcatgcgacattttaatgtttttcaagcattaaaattgtatcaagccaatggtagtatagatagtcagaagtatagtattgaagataagatatctccagaacaagtaggttgtatagtagatattacttctaatgtatcgttaggaattgtgtatggtcatcaaaaagggaaagttaaagagtataaaggaaacgtttcgtcagcattaggaatattaggtactacattagatgtagatagtttctccacgatggtgatgtttgatttagataaagtaggtattatgggaagtctttcaacttgctatggttggggtaaggcaaagaatatacgaagattttcacgtggaggaaaagaagtacatacaaaaggatcgtcaagtattagttctgtaggtggacttatccacataggatatcctatagacatacgacatggtgtatctatgacgccatatattgaatatatggtttcaatggtacaaagaggtggctatcaagaaaagctaggattattaccatgttcatttactgatgatatgaagattattcatgaaaaacgtattggcttatgtagtaattggaagccgactcctttaacgtgtcttcaaatatggattgcaggtacttctggaatgcaaaagacaaaaggagtgtattctactctatcagttatacctaaccaatatatgtatacggtatcttttcctgtccaaaaggaacagtatctacaggcagagtttggattatcctatcaaactgctttaacagagactgcccatttttatgtaaatggaacatcatatattaaaaaagtacaaaaaaactatggggggcaacatgttttttttcaattacgctatacattttaa

SEQ ID NO: 8856 - DNA, 1860 bp, Lawsonia intracellularis
atgaaaaactactcactaactatgtggaatatatataaaataatatatatttatacagtagttattagcaaactatatttttattttaaaagtaactatcagtatggcaaacgtttatttttatactttcctatacagctgttaagcacagttaaaaggtttcttattgtagcgacattagtatgtttttgtattcttttttatagtaatgaatctttttctatgaatggaagtgaagaagagcgtcaacctttattaagttcaacgtcaacaacaagttcttcctcaacaagttcttcttcctctggagctaatggctattattcttacccatcatattcacaaccacaatctacatatcctgaagtaagtgcagcagaggcaggaactgcatgtggttgtggtagtggtgcaatagggtattctatgctggcagttatgaacccaagtatgagttcattatgtggaccagctgggtgggtcttaagttctgtaggtggtgcatgtgttggtgctggagtttcattagcatgttatttgtgtggttataacagatggatggggtgggaggatcatagtactagtaactctataaggactggaggagagggaagtacaacaatgtatggttctactggaactcatcaacatagagagccagagtccccagatgaaggtccttctgtaagtttccctcctgtaactgttcatcaaccagcaagtccaggtagtccagttgttagtcaaccaggaggtagaggtcgaagctcaagctatctaactgcagaagcatcattattaggacaaatgagctcattacatagcatgcagtgtttattgagtaatggttctgaacaagtattgactacattacggatgttgcttttaaaaaattattctgatagctctaaatcccaggacttctctttttttaaaaagaattatatcaataaagacaaggggaaagtagtatctgtcaaaagaaaaagaggttcactatctacaacaatagatgtgccatcctttttaccctatcgttttttttcatctataaaacctcaggatatacataaaagaaaagtatgctctggccagataggtgttcttttagacttctctccaggtttaacttgtggttttgcttatgactccaataaaaaagaatcaaaagaatataaagggatacaactaggttcaacaataggttcagtgaagtctaaaatggaaacagaaggcctttctgctattgttgctttgaacccagcaaatgcaggggtaacaggtcatttagtaagttcttataattgggggaaagtaaagaatactcgaaagattattcataaggggcaagagattattactaaaggctctcctaaggttaatcttctgggtggattagtacaactaggatataatttttttttattgaatcaagtgacattggttccttatgttgaatgtatgttttctagtgtcagttggagttcatataaagagcagtattctccaggtgcttgtaagtttgggaaaaataaagagcagatattagaaaaaagtataggcctacggagtgacataggggtatcaatgaattcttcaatgcaactttgggttgcaggtatatctggatatagtaaaacaaatagtttgatatcttcttcatacttgtcttcttattacagacataacctttctacctatgctaagaagtaccagtatattagaacagagctgggagtctcttatgatggtacattttcagataatgtaagcgttagtctgagtgggctttttcgtcttaataaatggagtaaagttgataatcagaatatagtcgctcaagtacaatatacgtattga

SEQ ID NO: 8857 - DNA, 543 bp, Lawsonia intracellularis
ttgactactatccctttagcatatttatcatatatccataacccatctttttcaacgaatattgctactagcttgtgttcactacaagaaagacaggcacaacttttaatttttaaacaggatataacgactataaaaaagtgtttggaaaccgtaactgttggtaaccctcttactattgaattaccaggttttcctgaagaaaaaaatgaagatgaagagcgtcaaaaaagaaggatagaaaaggagcaaataagggaggaaataaatagaagagaagaagagagtaaagagatggaagataaaaataaagaatatcaagagaacaacataagaatagagcagccaatggtagaagtagataacgtgcaaaaagaacatagacaacacgaaggagaatatcttcatattcgaagacaaaactatttaaggttatgcaatgttgatttggaatatttgattcatcaagtagagagtaaacaaaggcaaaaaacacttttatatgatatacatgatgaattacaatattctattttacaatag

SEQ ID NO: 8858 - DNA, 1359 bp, Lawsonia intracellularis
gtgaggttagagatggcaaaaaaagaggaatctcctctagcattacaaaagaagagtactaaaaatagtcaacagattagcgcatcttcactacatctttcccaagtagagcttgaagcattacgatcatataatactattttggctgttcaatatgaatcttgtcaggagcaccatacagagctccctccactacttgaagctgttattcgtaactggaaggcttcaggatgtcctacattagcagatataggtagaacaccagttgaagcacctcaatctatgttatcagtagcagaagctcaggggagagaaaccaccaaagctgttgcgactattgttaaaaaaacaccccctgaacaaggaaatctcttagtttggtgtggatatcctacaagtatttctcgtgtttctccttttttccctatgaataataaagaaaaaggacgaagagatattattgtaaagaatttaaaggcatctattcaggataagtcaaaaattgtagagtcatcttgctatctcattaatgagcttgtttcttcaggtccatggggtgaaatcatatatacagggccaaagttgagtatagaagaagaggatgctcttatggctctattagctattattgagatgggaaagttagatcggacaccaactcgtaaaactcaaagacaaaatgatgatgatatggagcagcttgtggatgatctcccaccagctaaactttcgccagaacaaacagcaacattgattggtaatagtaagaatacacttcctctttcatttacatatagaggtcctgttcttcctattttacgtcttatgggtcataagcggccaggagcaaatcattatgagaagcttattaccagcttaaagagtttagccttaggatcgatgcagctttttgtacgtgaaaaaggtgaagacctccaatatgatctttctcaaattatttctaacttacgtcttcgaccaaaagatagagaaatttctgtcactgtaaatccttttttctatcaaatgtatttggcgaatagtcttacatggatcaatattacaaagcgtttccaaattaggggtagtattgctaaggcaatgtatcgtttttgtcagtctcatagagataatcctgtctttcgtggtaatattatgacattagctttagcgttgaatatggatcctcatgttcctttaaaagagacacgtcgacagattcgagaggctattgcagagcttgttgaaaaaaaggttcttgaatctacaagtcttctttcacgtacaaaccttgtattattaaatagaacagcagaagcattaccttctaagaagagaatatcatcacaacacaagtaa

SEQ ID NO: 8859 - DNA, 825 bp, Lawsonia intracellularis
atgctcgctaaagttattgcctttgcaaatcataagggtggtgttggtaaaacagcaagtgctgtaaatgttgcttactgtcttacaaaacgtaaacgtcgtgtccttgttgtagactgtgatcctcagggaaatgcatcacttacactaggaacaatctcaccctatgaacaaccacgaactgtggctaacctttttacaggtctttctttctctacagctgcagtaagctcaaaatatgaaaatttagatattatccctgcaaatcttaacgtatatgcaacagtaggaacgctatctaattctatcaaacgattttttggctttcgacaagcattggatgaagcagcacttaaagaatacgactatattatccttgactgcccaccaactattgaggggacacttctcacaaatgcacttgttatcaccgactatgtgatcattcctgtaggtgtcgaagacacatatgcattatctggtgtaagccatcttattaaagtagctgagacacttcgtgcagatacagaatcaaatcttgcaattatgggtgtcttactaacaatgtttgatggacgaaataatgctgcaaaaactatcagaagtgttgcaattggaacatttggcgaagatatggtttttcaaacaacaattccccgaaatacaacactaaacaaagctgtcatgagtaatcgagcagtatgtgactatgatgacagttgctcatcatgcagaagctacagagaattgacacaagaaattgaagttcgactaaaaaatccacatgccctcattacagacacacatccattagaatcagagtag

SEQ ID NO: 8860 - DNA, 1497 bp, Lawsonia intracellularis
atggcaaaaaatcaactggatgactttgcagcaacacttaccgcacaattaaaagatgctgctgaacaaatgcgtaatatgaggactcctccagagcatccacaaaatgaacaaatagactctacaacaactaaaaaaaatcgctctattcctaaaaaacataaaaataccatacaactagtaacagatacgaaacaattgacaaaaaaagtatctaacaaaaaagaacaaacgcaacagacttcccaaaagcagcctgcaaaaccaaaagatggccaaatagctcctactcaaaaagagccatctatcaatgtatccatatcaatttctccggaagaacaatcaaccaacagtatagatcaaactgtactatacagccatcaactgtcatcaattgacactactgattctagtcagctgctacagtctaaaaacaatcaacaaaaatatagtaataatctattagcagatccagaaagtgttgatataccctctactaaactatcaacaacagtcatcgatcagtcatcagacagtcatcaacaaacattagtagacaacaataatttaatggcagctaatgacagcccattatctgtactcccatctgaatccctacaatatacccagccttcaaagagcatgctttttgaaacggatatattacaagaaaatatatctcatcaagatattccttcacctgaagacaaccatatcaatacttcttttataggtacacctactacatctactcagccattaatagataatgatagtttaaaacagacaatgacagcttgtgacacaaaaaaacaatcacaatctatcccttggggtcatttttcttctgatgcactcagtactgttcaaattaataccgcaactattggtggagcaagacaaattgtattagatgcccttacacaactaaagcaagaattttctcatgtaacaataaaccttaaacgtcttgccactgttcttggactctcttatgggacagtgcgaaataccattagcagacttgtaagagaaggagttatttatacaactcaaatccgtactggtgatgcacatggtgtatatatagaatttgctgatgggtcttctttattaccgtcagtgacagtcactcaaccaacctatgcacaacatataccttctcatcaaccttctacttctcaacagacatcaacaatacacacaaatcctatttgggatgttgattctgatatgcttagtatgctctggccatatgcttttgcagcaggattaaaacgcatccacttagaacatcttaggaaagcatttcaaattcaacagtttgatgatgcacatgttgcatgttaccttcgttatcttaactggaagatagaaaaagaagctcaagatgaaaatcaagcaacagccatccttcagcaatggatacaaaccatgcagcaacagggcaaatatccacgtccaacagattacgatgaaccagaaggcttagaatag

SEQ ID NO: 8861 - DNA, 3420 bp, Lawsonia intracellularis
atgaaaaaccttatatcacaatatattatgaacttatcagatacctttcaacagctgataagaaacatatgtatatataaggcccaaacatttaatacaatattacatacagtatatgataaaaaaatacataaaatttttagaataccaaaacatataaagctaaccaaaacacttttacaacaaacaatagctatattactattaccttttttttgcttattttgtggaagcagtgaactcctagctatgaacaatggtaatggtaaatcacctaaacccctatgccttaaacttggtcctgatggtggtactcatcactcaggaggaagctctggtggctcttcaccaattacaagtcagccacaatcttcaggctttggttcatctagtccatcagtaagttctgggagtagttccgtagaagttacaagaggactttctagtcctcaagaatgttgtcctccctgtgataaaaatagtcttgacgcctgcctgaaaggagcatgtattggtgctggtcttggtattggagcagggatgattccatttggtgcaatgacaagctgtgcttgtcctgcgacagggtctgtgggagctggaacttgtcttggtggttctgttgctggcgcagcattaggaacagcatgttcactttgtaaaacacatggatgtcaacaagattctccctatgttacatgtgataaagacatggttaaagttacaggtttagggatttcagctggtggactccttggcgctggagttggtcttgtcactagtgcagcaacaggtgctccctgcccagacatggctgcagcatgtggaattggagctggaattggggctgcaataggtggtccattaagttcatgtttatatgctacttcagcaatgtgttgccaatcatcaagcagaataacaagcaatattagcgaacatcagtcaagtcgattagctcaacaccatttgacctcaagtacatcacacctcccaatcacaacacaacctcaatcattttctggacaagctactgatccacatatgacaaatgaagatattgatagaggaacttgtccttccccatgttgtactatgacagactatactgttagggtttgcacgtatccagatccatgtgatcattttgcagggtgggcaacttttggatcatgtcttggtacactctttggctcactgggcgcttatctccttggtgctgatgtttcaacaactgctagctttgtttcctcagggagtttatgtacatgtggtctcttaggtatgggttattattgtaaaaaatatgggaatcaacacttaagggaagatggacatacaacaagggaaataaatgatacagaagaatgtaagacatgctgtaaaagtatatgtgaaaaaatggcattaggagctgctgttggtacaggggctggttgtattgcaggcacttgtgcaggaggcattatgtctcactgggaccttagtaaaatgatagaaagtgctgctgcaggtgcaggttcaggttgttgtactggtagtctttgtggatttttatggtggttccttggcgaattagaaagagatggctttttggactgctgtttaaaaaaacatggcataaaatcaaaaaaagagggacaaccaatcacagaacaaccacaacgacaaccacaagtttcatcagaattttcaacagaagataaacaatgcattaaagaagtatgttgtggtgccacaagtagtggtttatgtaattgttgtataggaggagctagtagtgctatggcacatggttgtggctcatcagcagcagtaaccgctataacaagtggtgctactggctgtgccacaggtgcagcttgtgctcttcttacacactgtttaaaaaaacaccatcctaaaaaatgggcaaaaatacaacaagctatgcattctcttgtaacatgtgtggcagcgcctgtaacctcccaaccacagccaagagaggaaaatgataatgatgacgaaagacctggaccatcatcaggaggccatggcttaggatttggtccagaagattatccactattatcagcaaatcaacagaataatagtgatactgatagtgatgatgataatgatgacaagagacaacagaatagtggtagttcatctcaacatgatggaggtagtaatgatggtccctcagatgatgaacaaagtaaaaaaagtaaaggaaaaggcaaaggtaaggggaaaggcaaaggacaaaaaaatggagagcaacaacagcagccaacagctctaacaagaggacctttaggtggcatgggtggaagacatgggtacaaatgttatgacacatttataccaggatataatcgtgctggacaaataagctctcttcaaagtatgcaaagtatattgttaggctcttcagaacaagttctatattcattacggctacttgcactaaaagcatatacaaatacctcatatgaagatgatagccttcaacttatgacaaggttcacatcaaaacgtcatatactttcaggtcctcatcagaaaaacacacaaaatacacttacatcagcattcaaatcatatgctatgtttggttttatagataactatacagcaaacttagaacgcaaatgtcgtggaggtcgaattggtattataacaaaccttatgccaaatgtacgactcggattggcttataatcgtaataaagaagtagcaaaagaacatataggtatgcgctttggaacagcaagtggttctgtaaaagcacaaacaacaacagatagtctttcagctgttattagttggaatacagacaaatttggcttcacaggacatcttgcaagttgttatggatggggtaaagtaaaaacaaatcgttactttacacacggagactcagaggtcggggctaaaggaaaaccagatatcagtttaggtggaggccttttccaattaggctataaccttcctattacaaaacgcttctcctttacaccatacatagagtacatgatctcaacagtatcatggagttcttatagcgaaaaaactggtccgcttccttgcaaaatcagtcaaaataaagaatatgttatggaacaaagtattggtcttcgtaatcaatggaaagtaacaacaaacagtcaacttcaatcatgggtttccgctatctctgggaaacgtactttagaaggtatccattcaaaaccattaattgcacaaattgataggtataaggcatccattcctacatataaaaaacgttatgtaagaacagagttgggtctttcttatgaagcaaacattatagatactattaatattggtataaacacatccgtacgtcttgaaaaaacaaaacgttttgaaggacagcaaataaatacatatatccaatatacatactag

SEQ ID NO: 8862 - DNA, 1140 bp, Lawsonia intracellularis
atgaacaggacattagtttctctaatggctgaagttccagtggattccatagaagacgagcagggtttaatacatgtgtttcctttgggaagctttacagctcgtgatggacctcctgggacattaggcgtgccagcaacgtcatggcagcttactttgtctggagcacaggaggttatacgacgttgggagacacgtaagacacctcttgtgattgattatgaacaccaaacatatgaaacaaaaggaaacggtcaaccagcacctgctgctggttggataacacgtttacttcttcgtgagaatggaatgtttgcaggtgtagaatggacctcaagggctaaagaatacatacgagcaggggaatataaatatatttctcccacatttctttttgatgcaacaacaggagaagtattagagctttgtagtgcagcactgacaaatatgcctgctttagatggaatggaacctgtaaaagctaaaacacatactacaatacaacttcctaagaagaaatattcacatactgggtctaaccctctacaggaaaaaggtggagctcttcacttagcaatggaattttgtgaaaagggagaaaccgatctgtttaaagagaatgtttcttctttagaagcttctgcaacagcatttcttgaagagataaaaaaaacccagggacaacaaaaacgttctaaaaagaatagaagtgtttctaccaaatctaatatacagcaagaggcttcaagtgatcgtttctcagagcttatgggactataccatgaagcacaaaaagaagttgtatcattaaaagaacgtatcaaagaatacgaatgtaaggaagaatcactaaagctagaacaatgtatagagaaagcattgtctgatggtagactacagcatagttgtgaagcttgggctcgtgcgtgtgcggtgagttatcctgaagtgttacgtgcttttcttgaagcatctacttctatggctgcgcttgtgtctatgcagacacgtcaggggtctcatataagtcaaagtgggtatggacaatctgctttgttatccacagaggaggagcatgttcggtcacaactgggcatgagtgtggaaacgtttattaaacataagaaggagtgccaataa

SEQ ID NO: 8863 - DNA, 864 bp, Lawsonia intracellularis
ttggcagcaacacatgttcctagctctagtgcttccaatacatatggctggcttggacagttccctaaacttaaagagtggatagggaatagggtctttcaagatattgctgaacatgaatacacagttgcaaataagctttatgaagccacagtaagtatccctcttacagctattgaagatgatgaacttggtgtatataaaccactctatttagaaatgggatatgcagcagctgttcatcctgatgagcttgtatttaaacttcttgctgaaggacatacaacaaaatgttctgatggtcataatttttttgatacagcacatgtcatctatgaaaatgaagatggttctggtgctgaaacaactgtttctaatagtttatcacctacagttagtggagttaaaaatgttgttgttgttgttgaccctgttgctccttggtttttgttggacgtgtctcgtccattgcgtcctttgttatttcaagagcgtagtctcccagaactccaagtaattacaaatcctgaaaatgaacatgtttttacaaccgatagcattccttttggtgttcgctatcgttgtaatgctggatacggtttttggcaaatggctgttcgttcaacagaacctttgaatgcagaatcctttgagcgggcattaatgactatccgtagttttacagctgatggaggacgtcctcttggtcttggtcgtggagggaaagaaggtcttgtattggttgttccatctgttcatttatcaagtgcacgtaaggttattgtagctgaaagattagataatggctcttcaaatatctggtatgactctgcaacaatcattgattgtccttggttgggataa

SEQ ID NO: 8864 - DNA, 450 bp, Lawsonia intracellularis
atgtacgtccaatataaagatcttcagacacagtttggcgaagcagaaatgcttgccttatgtggtgatgaagatgggaatatagatatgcctcgtctcacagaggttatcaatcaagcaagttcagaagcagattcatatctgggtaaacgttatattgtgccagttgagccagtaccacctgttcttcgatttatagtaggagatatggtccgttatcggttgaccagtgcagaagctttggagacgtcgttgattgttcaacgatatcagcaagccatagcatggcttataaaggtttctcaaggggagattgtactgcctttacctacagtgaatagtgaagagcaaatggtcgtcattgacgctggtacaaggctttggaaggtcacaggagcacggtataagaaagctcaagagacaccattaccagcaagattgactatatga

SEQ ID NO: 8865 - DNA, 645 bp, Lawsonia intracellularis
atgttgtcacagatagaagatgcaatgattacttgtatcaccaaggcacagttaccatatttgcgatttgtgggttcatatggtggcgagtttgatggagaagttcctcatgttgtgcgctcacttccaggtatatggctagctttcaaaggagagagtgcaccagttgctgtagatgtaacgcatgagcgatacaaagtagaagcacggttattgttgcttgtagcagctcgaggcatccgtaatgaggcagatagccgtcatagtacaaagatccatgtaggaacatatcaaatgttggcagatatgcggtcaatctttgcatttagagatcttgggattaattcagtagaatgtttagtcccaggagaaacaacaagtctctttaatgggaagacaaaacaacagggcctatctgtttttgctcaagagtggattgtaccatatggtttttacgttcgtgaacctgggaagcgccaattagatgaaccatattcaggctatcttatgccagaagggacaatgataggcaatactcaggttccatacttgcctcccctgcaaagattgaaactttgctattatataggtggagaagaggaagcatgtgatcaggctcttcttgaaaaaggacgtactttataa

SEQ ID NO: 8866 - DNA, 1416 bp, Lawsonia intracellularis
atggcaagtccaaatattcaatttgacgctattcctgtcaacatacgtaaaccaggaaagtattttgagtttaatacacgactggctgtacggaccctcccaggtaatcctcagtctttacttattattgcacagcaaaccggaacagagccatgcgagccaagacggatttttgatgcagatactgcagggttattatttggttttggttcacaaatccattcaatggttttggctgccatgcatgcaaatccatatcttgatcttaccgtgttgccattagcagatcctgaaagtggtttagctgcaacagcagtagtaacacctagtggagaagcacaaagtgctggcgttgtaagtattactattgctggaaagacagtttctatggctcttgctaaagatgatacaccttcagactgcgctgtgacacttgcccaagctgtaaatcttgttgaagaactccctgtagttgcttctgtaacagagtcaggggtattaacacttacggctaagaataaagggacatgtggcaatggtattacagtgtctgtgcagtcttctgtccctgggatgaaatgcacattgacacctatgagtggtggacaaggtgaacctgattttcaagcagcattagctaaagtcttttcaggagattatacaatttattgtgttgggacaacacaatcagaacatcttaaagcattgagcgatcatttagcatctatgggtgctcctttagaacaacgaggggctataggtgtgtacgcttttgcagggacactagaggatgctattacattagctgaatctacgaatagcggacgtctcacaggtgctgtattaccagggaccccatcgttatcatatgaggtggcagcttcttatgctgcaacaattgcttcagaagaagatccagctcgtccgttaaatggattaacccttaaaggtattattccatccccaataagtcagcgtctttcacgcacacagcaagaagtagctttgaaaagtggtgttacacctcttgaagtaggtactggtgaagttgtttctattgtccgagctattagtacatataccaagaatagtgaaggttctcctgatagtgcactacttgatattacaaccattcggacattggattatttacgtaaagctatacgtgaacgtatgagtctaagattcccaagagaaaaactttctacacggacattaccaaaagttcgtagtgaagttttggatgtcttgcggaagatggaagagttagaaattcttgaagaagtagccagtaatgcagagggtgttattgttgaaagggatattgaagatccaaatcgtttaaatgcccgtattcctgctgatgtagtcaatggtttacacatttttgcaggcagaattgatttaatactataa

SEQ ID NO: 8867 - DNA, 390 bp, Lawsonia intracellularis
atggcattacagcaatatgtgggagcaattatacttgaagtggatggccaagaggttgaatgtaccgctttttctccaacaattacaacaggtcgtattcctgtacgtacaatgaatagaaatggtaagattgctggttatgcttctggcgtcatggaatatgagttaaaggtagaagttcctgttgtatctgacaatcagattcgttgggatggagttactggtgcaaaattagttatttatccagcaaaggatgtaacaaatgctgctggacaaggacgtattgcttatacagggtgtgtcgttacatctgttggtgaagcatataaagttgaaggagaggcaagacggacaatttctttgttcgcaacagatatgattgaggaataa

SEQ ID NO: 8868 - DNA, 324 bp, Lawsonia intracellularis
atggaaataagcggtcagttggaaattggataccaagatgatcaaggatgttttcataaaacctttactatgcgattagctacacttgaagatattgaaaaggctattgaagcagcaggaataggtgcatcgacagcacgaatccgtcgttatgaatgggcaagaacgttaacacaacttggttcatttaaggatgaggcaattactcctgaaatgttagctactcttgcttcgacagagtttggtatccttgaggatgcacaggaaacactaaggggaaagctaaaagccgtgagcaatgcctcaaagaatacagagtgttag

SEQ ID NO: 8869 - DNA, 870 bp, Lawsonia intracellularis
atgaagaatactaatgcgttagacactattactcttatggatgaaaaccaaaaagaagatgccaagttacatccaggttctgcattggatatagagagagtcgttgctaaacaatatttcccattacctatagaagattatagtgatgtcccttttgagagaatagagaatacacagccctcagattttggagatgcaacaatacataataaatataataagcaagtaaaagaagcatctttcattaatacagaaacctatagcagggtgagttctctttcttcagaaccattgagaaatgttgtcccacgtttttcttttgacttttctacatctatggatggtagtggttatataaaagagagcaggttatctccatataaagaatatccacaattagcaccaacaccattattgtataatgaggtatctatggtgcaggccacaacagagaatactactaactcacaacatccattatttactgaacaacaatgccagctcccgcaggtaactactagtccacagatagcgttagttatgcctcatgaagaacttgactatgttcccataagtaagaactcctcaatgattggtaataatatagattacactacattaaagagttcttttttttcacaggaagatagaatagttgataaatatactagtgatagagacaaagagaattttattccttttttatctcaaacacaaaatacaaataccttgtttgaagatatagaacaatcatctaatacagatgcattggaacagcaaatacatttaatgacaactatagaaattgatggacaagtattaggtgaattttttgaacgctatatctctaaccaatcattacgaacctag

SEQ ID NO: 8870 - DNA, 1266 bp, Lawsonia intracellularis
atgggttggaatacagatttacttgatgcacaatttagaggcattcctttttatgtacaatcaattacagataaaggtagtaagtctttagttgtgcatgaatatccatatcgttcaggtggagccgtggaagatatgggcagttcagcaagaactatccctattcgtgctattttttggggagagaattatcttagcaatctccaaaagcttattgaagcactagaacaaccaggaccaggagagcttatacatccagtttttgggagtgtaactgttgttattaaaacatggcagattgatcatacagcacaacatcctgattatgcagaagttgtatttgaagctattgtttcagcattagatacaaatttttttacacatactacacaaagaacacaggcagaacaatcgtctcttactgctaaaaatgctgctacagtcttattagagcattcatctcaacatgtaactaggcatatccaaacaaactttacatcacctagagtacaatctcagacaatgcaactattaatggacatattagatttttatgatccatcgggtgatgtgccacgttcaactactatttttgttttgcatccagaagcatatcttgctgaacttcttgctgttcaaaaggctatcttagaacatatcccagtgtcatcagtaatgaaaggatttccttattggtctgattgtttcccaaaaattacaccaagttgtggaatgaaaacgtttgaatacaatgaaaagtatcctacaggagtaggtaattgcagtgttcaatggacgtctaatggaagtccaggagtacatcctcaagtgccttctttagctattcctcctaatagtactatagagaaatacgttgttcaggatgaaatagcctcagggtgcgatgtaagtatgtcttctcaacatatcatagctataggtattatattacacgtgatactgagtcagacagctttagctattcttacagcaagtcaattgtttttggatgagtgtactacccccacccttacacctcttcaacttgatacaattgtaggtaatattcgtgcacgtattcaagattgtcttgttgcagtcagaaagaatgttccaacacaagatgtccatgggttttcagaaccattaagaacagctgcagaagctattcagtcacttgggacaatagctctcaatatacgtccaccattgatcacatatactgttcagcatgaggagagccttcatttatttattagcacatag

SEQ ID NO: 8871 - DNA, 1032 bp, Lawsonia intracellularis
atgaatacagtaacaactattcgtgatgtttgtcctaccttgtgtgttgctggtcatatgcatagagactggttacgatattcagtggattcaggtttctttactcctgctgatggatggagtgtaagtcttggtcttccagatggtaaactcccttcatggcttgcattatgggctgaagtagaacttgcttttgatggaattgttgcattaacaggacgtattgatcatatccgtcatagtgtgaacactaaaggacactctttggaacttgctggacgtgataaagcagggatactcctagattgttcagcgcctatttttgttacacaacagataacgcttcctgagttgattgctactgttgtaagaccgttagggattgatactatcgatgttgatacactttcaactttattgtttcagaaaagtacagtagagccaggaatgacagcatgggaagctattcaggatgctgcatcagctaatggattatggccatggtttactccagatggaacgctaaagattgctcgtccagattattcaaaagcacctgtcgcttgtttaaaccttagatgttcaggcgtaggtaataatgtccttgaattaagtgtaacctatgatatcagtaagcaatactctactgtaactgctctttctcaatctcaagggaatgaaatttcacaggcaatacctatccttaaatctgttgctacagattcagacacaccatctcgtccattagttctcaggaaaggacatattgataatacacagtttttaacaaacatagcagagaatattattcatgaagggaaactttgtagtgttacagtgatggcaaaagttcaggggcattttgttgagcctggagtattatgggaaccaggacaacgagttactatttttagtgaacctcatgaaatagatgaaacgttttttcttacaaagagaacatttataggtggtcgctttggaacgtttacactgttgaagttacagcaagacaatgtatggttgagtacatag

SEQ ID NO: 8872 - DNA, 597 bp, Lawsonia intracellularis
atgtctttttatgatgcagtgaacaagcaaattaataaagcacttgttgctgtaagacttccatttcgtgcccgtttgacaaaacttcagacaaaaacaccattgcaacttgtacagggagaaggtctttcacaagaacaactacaatctgtagaacttctgcaacagtttgggtttacgtcaggtgtccccatagactctcaattaattgttcttccaatagggggaaagactgttcattcagttatcattgcaacagaaaatacagcatttcgtgtccatgttgaacatggtgaaacagctatttacaatcaatggggagcaaaggttgttcttaaaaaagaaaagattgttgaaatcgactgtgaacaacttcaaattaaggcaacaaaaggtatcacaatgcagacagagtcattttctctctctgcgtctgaagcaaagatgaagacaaatcttcatgttgaaggagatgtctctctatcaggtaagctagaatcagatggcgatcaggttgctgcagggatttctcttttacagcatacacatggtggtgtggagtcaggaggctcaaatactcaacctccctctaagtaa

SEQ ID NO: 8873 - DNA, 696 bp, Lawsonia intracellularis
atgacaaaagcagaaaaagtatacactggtctttgtggattgttttctatccttattgttctaagtaaccttacctatcaaaaatttgttgcattacctattttgccattccatacatttgaaatttcggtaggtgccatactctatccattaacattccttcttacagaccttatcactgagttttatagtaaagagcgagctaatttttgtgtaaagtttgccatcataattaatattgttgttgctggtatccttatgtttatggattctcttactgctactgaatggtcaaagcttgataatgatacattccataatgtctttggattttatagtgtagcttttattggttcaattctagcttgttatatctcccaagcttttgatattatcttttatttatggatacgtaaaataacaaaaggtaaatatctgtggttaagaagtagtggtagtacgtctatatcccttctaattgatacatctattgttatcagtgtgatgtcgctatttgggattctacctccagaacagattcttccacttattggtaacagctattcctggaaactcttttttacagtttctatgatccctgttttttatggacttgttggtattatgagatttactcttactggaaaaaagatacgtatacaaacagacccaatatcaacgacaacaagtatctga

SEQ ID NO: 8874 - DNA, 387 bp, Lawsonia intracellularis
atgattaatgctatttcagctattactcctgtacggcctatagatccatatccacaaaatattctaacaaacgagtgtatctatctctgtgaattaccaagagatccatcaacaaatactatccctgaaacaattgaagagcaaacccaacaagtcatgaaaaatatagaggcttcactagcagcctctggccttggcttccatcatgtaacaaaagtaagtattactcttgttaacccatcaaactacaaacttgttaaacgcatatacgatcacttcttcttaggatacaaccctgagtgtagatttcatgctgctagtatgctccgtgagcactctcaaattgaagttgaagttgttgctgttaaaacaaatgatcccatgtaa

SEQ ID NO: 8875 - DNA, 993 bp, Lawsonia intracellularis
atgtgtataatctactttgttattccccgacatcatcaagctaaatggtcaaaccagctcaaaaaagcagcaaaaggtgaatgctctatagaggagattgctccagaacttacaagtggtgtagatgtatggcttttacaaacatggattattctctctcatttatctgatacaaaaggatatacatttaaaattgtagaacatggaatgcctgacgctatatccattttccattacgatcatgcaaaaccgtgttatggtctttttaattgttatcctattgttgtccaagcagatagaccaaaagtcccttattccggaatacgtattatacaaaatcctgccatccctcaaacacaacgtgtccattatatcccactatggatacaaccaggcctcataccaagaaatcctcttagaggaacaacaatcgaacgaatatctattcctggtagtgcacaatatttaccccctgctatccattctccagcttttatccaaagattaaaagatatcaatatcaaactgcatgtaatgaatgcaggcaattggatggattactccaatacagatcttattcttgcttggcggcctaaagtttctaaatatgtattgaatacaaaacctccttcaaaattatttaatgcttggcatgcaaatactcctgcgcttcttggagcagaacctgcctatcaagcattacgaaaacatcccgatgactactttgaggttcaatcaacaaacgatattattcaatacattcaaagaatgaaacaacatcctgaagaatatacacgcattcttaatcattataaaatacaagcaaatacttttacaagacaacatattatagataaatggttttctctttttaatatagcccaacaagctaagcagatatcaacaaaagcgactctaaagaaactctctagttatgcctatcgcaaaacatataatcaactattgaaacatataaaaatttgggatgattaa

SEQ ID NO: 8876 - DNA, 942 bp, Lawsonia intracellularis
atgaaaaaaaatgcttgtatttatattgccggacatcgtggtttagtaggaagtgcgcttgtccaaacattacaatctgctggatataccaatcttattacacgtacaaaagaagaacttgatttacgaaatcaagcagctgtagaatccttttttgcaacagaacgtcctgaatatgtctttttttctgccgctaaagttggaggcattcaggcaaataatatttatccagcaacatttatctctgataatctccaaatacaaacaaatgttatccaaacagcatatacatatggtgtaaaaaaatttttatttttaggttcatcttgtatctatccacgagactgtcctcaaccaattaaagaagaatacttacttactggtcctcttgaacccaccaatgaatggtatgctattgccaaaattgcagggataaaactctgtcaggcatatagaaaacaatatggttttgatgccatcagtattatgcctacaaacctttatggacctcgagacaacttccatcttacagaaagtcatgttttacctgctcttttaagacgcttccatgaagccatggttaataatttaccatatgtaactatttggggaactggcactccacgaagagaatttttatatgtagaagacgtagcttctgcctgtctactcttaatggagaaatactcagaactagagcctatcaatgtaggctatggggaagattgtactatctatagtctttcaaaaactattgcagatgttgtaggatttaagggagaaattgtaaccgatccatcaaaaccagatggcactcctcaaaaatggttagatatttcaaaaattaaaagccttggttggaaaccaacaatatctctctatgaaggaatcaaaaaaacatataattggtatttacaacatataataaataacaatatataa

SEQ ID NO: 8877 - DNA, 1359 bp, Lawsonia intracellularis
atggctaaaacaaaggaacgtcttcaaaaagctacacaagatcttacactacgtgttcctccacatagccttgaagcagaacaagccgttcttgcaggactattattacgtaaatctatagcaccacaaatggctatcgacttacaagcagaagatttttatttccctcagcatcaaattcttttctttacagccattactttatatagccagaaccaacctatagatctagtaacattagctcaaaagctccgtgataaaaatcaacttgaagctataggtggagcatcatatctaagtgaacttgttcaattaggtgttagtgctgccaatgctgaattttatgcaaaaattgttcatgaaaaagctatacaacgtagtcttattgaagctggctcaagtattgttacgtcaggatttgatacaactcaagaactttcaacccttttagataaagcagaacaatccatcatgaatgtatctgctagaaaaaatgtaggtgtctttaagcctgtacattcacttattaatgatctccttaatacagccatgcaaccagcaacacatggcgtcacagggctccctaccggatacaaagctcttgatcaaattacaagaggtttacagccttcagatctcattattattgcagccagacctgcaatggggaagacagctctagcactaaaccttgctatgcgagcagcaatcacacaaaaagcaactgtaggtattttttcccttgaaatgtcagataaacaacttatacaacgcatggccagcttatgggggaaaattccatatgataacctttgcagtggacgcttgagtccagaagaaggagagcgtctattccaaaccacagaattgcttaataacgcacctctttatatcaatgaaacaccagcactcactatgttagaacttcgctcacaagcacgtagacttaaaatagaacataaccttgatcttatagttgtagactaccttcaactgctacgttctccacgaaaagcagactcacgggaacttgaaatctctgatatttctcgttctcttaaagctctagcaaaagagttaaatattcctgttgtcgccctctcacaacttaatagaagacttgaagaacgtgcagataaaagacctttactttcagatttacgagaatctggagctatagaacaagactctgatcttgttatgtttatctatcgagatgaagtgtataataaaaaagaagataatcctaaaaaaggtattgctgaactcattattggaaaacaccgtaatggtcggacaggtacagtcgaactttccttccttcctcgatatactgcctttgaagaactttcaaaataa

SEQ ID NO: 8878 - DNA, 1161 bp, Lawsonia intracellularis
atggtaggttactttatgaagcgtgcacttattacaggaataacaggtcaggatggggcatatcttgcagaattccttatccgtaaaggatatgaagttcatggtattaagcgtcgctcgtccctttttaatacagatcgtattgatcatctttatcaagatcctcaggtagagaataggaagttaatccttcactatggtgatcttacagatgctacaaatcttatccgtgttattcaagaagtccaaccagatgagttatataatttagcagctcaaagtcatgtaaaagtttcttttgaatctccagaatatacagctaatgtggatggccttggtgctttgaggcttcttgaagccattcgtattttgaatcttatagataaaactcgttattatcaggcttcgacatcagaattgtatgggcttgctcaagagatacctcagacagagaagacgcctttttatccacgttctccatatgcatgtgcaaaactctatgcttattggataacagtcaattatcgtgaagcatatggaatgtatgcttgtaatggtattttgtttaatcatgagtctccattacgtggggagacatttgttacacgtaagattacccgaggattagcaagaattgcacttggacttatgtcaacattgtatcttggaaaccttgatgcattaagagactggggacattctcgagattatatacaaatgcagtggcttatgttgcagcaggataaaccagaagactatgttattgcaacaggacgtcagatatcagtaagagagtttgtaaatattgctgctaacgagttaggtattacactttcttggaaaggatcaggggtagatgagcaggctattattgaaactattgatgctacaaagcttgctcaaatgcttagacgtcctgtgtcagaagcgccattaaaagttggacaggttattataaaaattgatcctcgtcagtttaggccaacagaagtagactctttaattggagatgcttcaaaagcacagcaaaagcttggatggaagccaatgatttcttttgaatcaatggtgacagaaatgctccaagaagatatatcactagctacccgcgatgccgtttgtaagattgctggctttaaggcatttaatcatgatgagtaa

SEQ ID NO: 8879 - DNA, 327 bp, Lawsonia intracellularis
atgaataataatttttctaaaaatttaggccttattattagagctattagaactaaacataaagatgaaatagtattagatagacttgcagaactctcaggattaacaaaacgttatatccagatgattgaaagaggagaacgaaatataactgttataaatcttttcccattagcaaacgctttggatataccaattatacaacttatagaatatcttaattatacattagaacatggtagtttaccagactttcttcttgaagtactaccaattaagaaagttggacggcctaaaaagaataaaatacgtaatacaatgtcttaa

SEQ ID NO: 8880 - DNA, 375 bp, Lawsonia intracellularis
atgcattgtaacgtaaagtttgttaataaagtatgtagtgctagaagatggtttagtatatgtgttatccttacggtgttattatttttagctttagttattttttcaccaaggcaactacctgttatccattataaatttgcattatgtcttttagctggtttggctggttattggcttgatcgtgtactttttccttttgctaatcctagtggctatctatgtgaagattggaaagaacatattaatgggtgtcaaactggacgtgctgattacccaatagtgatagaatatcaaaaaagtttttgtacggctatgttacgtcaagcagctattgttgtaggaacaatgttagctgtaagtttaggattataa

SEQ ID NO: 8881 - DNA, 966 bp, Lawsonia intracellularis
atgagccctacttcgccaataatatccattattatacctacctataatatggagccatggattacggacactattcatagtgtgttaaagcaatccttctctaattttgagtgtatcattattgatgatggctctactgataatactgtacctactattcaacaaatacatgatccaagattgcatattcttcaacagacaaatcaaggtgtctctgctgctaggaatacaggtcttagtcatgcaaaaggacaatatattgcatttcttgatggagatgatctttgggactcccaatttctccaaataatgcttaatgcacttcaaacatcaccagggtctaagcttagttggtgtaatactgtcatgttcatggacgtaacctacaaaaaaaaaccacaaccttggggggatatccataaaacaggaaatatatggtgggactttcttcaacatacctatttcacaatgggagcatttcttgttgaaacacagcttataaaacatattggagtatttgatacgacacttcttgtaggagaagatagagattttatcttaagaatccttgcatatctttattcaaagtcatcatcttttacacaagttattcatatcccaatcccattaaaatattatcgtattcatacaagaaattctgtaaaaaagtatgcctcccaagcgctccaagatgaatggtattatatgaaaaaacacatagaacatcctactattcctgaacatatcaaaaaaaagagctactcaaatcttgcatttaaacttgctgttattgctgcttttggaacaaaaaatatttctagtgccttatcttggtatggcaaagcaataaagattcatccatggaaccttaacctttatcttcttcctcttaaaaaatgtcttctttctcttatgcctcaactaaaagtaaatatccctggatctctcaaaaactacttacaataa

SEQ ID NO: 8882 - DNA, 1062 bp, Lawsonia intracellularis
atgacatattcatcttcaccagaaatcagtattattgtcctcacatacaatcaacatgcatcatatacaatcccctgtatagaaagcctactgcaaacaacaccaaacaattgtgaaattattctagtagataatggttcaactgatgggacagtggaatggatgcaacagttatcatatccacatctcacagttatagataataaaaaaaatctaggatatgcagctggaaataatgttggacttaaaaaagcaaaaggagaatttatcatcctgcttaataatgatacattacttcctccagggtggttagaacctcttattgaacctcttaaacataataaaaaacttggtcttattgggcctgtaacaaatcgtattggtagtcctcaacagattgtacttcctgggtaccttaataatactaataatagatcatctaaaaaacctattaaacccaatgattcatgggaagaggctgctattgcctatatgaaccaccagaaaggcacattaacttatacaacaatgctttgctttttctgtgtagctattagtaggcaatgcattgaaactgttggcttgcttgatgagcaattccagaaaggaaactttgaagatgacgattattgtataagagttaagcaacatggatttcagattgcttatacagatgcttcatttgtatggcattatggagaaggaacactttctcaacttccatcaagagaattatcatcaatatggttcaaaaaccaaaaatactttaaagaaaaacatggttatctttcacttattgcagatcgtgccaataactgcttaaatagcattcaaaaagcattggaagaattaaacacagaaacacactttgatcacataattattgaacgttgtttagcacacttaccgtatcttcatgacattcttacacaacttgagcgtcttgaaaaagaatcacgtactattaaaggaacgctattacgaatggcaaaacatgttgatgctgcctattttggatcatttttcaaatcaatgctctataattttcaaaccaaacaatga

SEQ ID NO: 8883 - DNA, 351 bp, Lawsonia intracellularis
atggatgcagaacttgacgttagaacaggtgattacacgtcacatcaaatcaatacccttgcaaatgcggtatatattcgattgatgacccctcttgggacttggtggcaggacataactcttggctcacgattgcatgaacttgagcgtgagaaagatgttcaacgtgtacgaatacttgctaagcaatatgctgaagaagctctagcacctttattaaaagagaaaagagctaaacatattgttgtgtcagcagaaataccgactgctgggcaatgtacattatatataaatgttgaagatgctactggccgtccttacacattcagccatactatgagagtttcctga

SEQ ID NO: 8884 - DNA, 717 bp, Lawsonia intracellularis
gtgcttacatcagaaacagctagtcatggtgagcaattacaagttatgcaagttgttgcatgtcaagctcaaaaaccaggtcttattccttcatgtcaagatgttttagcaaaacttgttgcccctcctataggtattgatacaaatgtgcttcttactattacaggtggtagtaatgtagaaacagatgcttctctattagcaagacttcttgactatatgcgcgatccaccaggaggaggaacagctcttgattataaacgttgggctatggaggttcctggtgttagcaaggcctatgtatatcctcttcgaagagggataggtactgtggatattgttattacaggtgaaaatggtacaccttctacagaggtgattactatggctcaatcacatattgatacaatgaggcctgttacagcacgatcagctgttgtttttgctgcaacaccatttattgtaaatatggaaattggattaacattaagtggctctgaaacacttcaaacaatattaccagttgttaaagatgcattacaacacgtgtataatgattatgagccaggaagtggtgtagtcttatctcatttaatagctgcactaaccagcgttcctggtgtttctgatgctgttattatttctcctgaaagtaatataactgctaaccctgttaaaatacctattttaggtgaagttaggctaagggggttatag

SEQ ID NO: 8885 - DNA, 567 bp, Lawsonia intracellularis
atgtcctatacagaattgctttcaaagttacttcctataaagagttataatccattagaaaaacgtcttgctctttctttacatgttgaagggaggattcttgatcaagcttttgctgattgtacatctgtggttggtggattggaacctttcaaaaatcagcagtggatagcaaattgggaacgtatttatgcgttacctggaaaatattttaataaaaaaatgatgtatcaagaacgtattcaacttttagtgttggcgtttcaagagcggtcaggtatttctcgtgattggcttaaacgcatagctttacttgttggatatcctataactattagtgaatatcgaccttttagagcaggctcacaagtaggagaaaaattaacaaatacagattggttatatgcttttactgtacatgcatcagggaatatttctaaacgttttcgttcaggatgttcaaaaactggtgagcagctttctgtttggggaaatgaactattagaatctgttattgaaaagtataaaccagcacacagtgttgctttttttgcttatactgattga

SEQ ID NO: 8886 - DNA, 1443 bp, Lawsonia intracellularis
atgtcttcttccatatccaaatatttccccccagcttttaaactcattttttttgtagaactatgggaacgttttgggttttatggtattcaagctatttttgtcctcttcatgattcaagacttacgtatgtctgatgctactgctgaaaatctatttagtgcctttattggtcttgcatatacttttatgttcattggcggatggattggagacaaaattattggaacccaacgtacgcttttagcaggagctattactctactatgtggttatctaatcctttttataggtacaaatggaaccatcacaatggcacttagtattattatcgcagggaatacactttttaaagcaaacccttcaacattaatagcaaaaatattcccttatgaacatccaaaggccgaaagcgcattcacattatattatatgtctattaatttaggctcgtttatttccatgcttattgtgccatatctttatacagcatttggattccatatggcttttggaagcagcgtcatagggctcactcttgctatcttagcctttataattaaacgaaaatggcttgtaggtcttgattcacctccaggatttgaaccactatccctaggtgatattgttgttcttctcagtatagtaataggtatcagtggtatttccatggttttacttagtcacctttatattgcctataccatgttatactgtgctgcaattatagtattacttatgatctttcgagaaatcaaactttccaatagtcaagaaagaaaaaaacttattgtttgcctttttcttattgtcgaagctgttggtttttatattctctatcaacaaatgccaacctcccttaatctctttgttatccgttgcacagaccatatgattttagactttcctatagaacctgcagccttccaaagtctcaatcctgtatggattattgctgcaagccctatcatggcatatatttttagccactcagcaaaatacgtctctttaccttctaaatttgctgcaggaatgttctgttgtgctcttgcctttttatcgttaggtgttgctgcaagttatacacaatcatgcgaaggtattatctctggaaactgggttgttattacatactttttccttagtattggagaattattaatcagtggcctaggacttgctatgatagcaaaacttgctcctcaaagaagtacaggattcatgatgggtgcttggtttatttcacaagcacttgctacaatttttggaggatttatagcagctcaagttggtatccatccagaaatgaatattcctacttcacaactaaccaataattatgcagcgcttttccttgctcttggaagtgcttcactgtttggaactctttgtatggctgctattgcaccaacgctcactaaaaaacttagcttaaaaaaatga

SEQ ID NO: 8887 - DNA, 26241 bp, Lawsonia intracellularis
atgtccatttatattactaaatacgtcattaatacttttttaagtaagtggagagctatagtagctttgttcctatgtatatgtattattttaaatagtgtaactgttactatttctgctgataaagattctgaaaaaaatataaattcttcaaaagaaaatattgcagcaccattaggggaaagtggtaatactgaagattttcaacaggctgaaacatcaagtaatacacaacaacctcaagtacctaccagtccttcagggatgccagttacttctggttcacaagttgttttagatcttttttctcctcctcctcctcctcctccttcttctacaattttctctccttcctttttatgtgccccattaacactttatggtcctcctgccatgagttatattcctattccaaatatgggagttagaagaagttacagctccccagatattaattgtaattttgaaagaaagaatgagcatgagaaaagtggatcattaagtgttccagtcctgttagaaaaatgtatatatgataaaaatagtgagtctaagagatgtacaaatatttgtttaactatagagtctataattagaggacatgaagaaacagttaaacagaaagagaaaaagaaaaaaagtaaaaaatacgataaaaggaatataaaggaacaacaaagaagaattgaaaagaggcaacaagaagagaaagtagcactattaaagcaatatgaagaaaagttgcaagcattacagagtcaacaagcgtcacagcgtttagaagcattaaacaatggtactgatatgtatacattgtttagccaacaatataacgaagagcaagattgccatagggaaaaagaaaaaaaattagaagaattgttaatgttgcataaacaagagcgtgatattttttttatacctgtaagtgattctacagaaaaagggacagtagaaggtagacaagaagattatagtgatattaacaaagatagacgacattcaacgccttctatccctgtaacagcattaaatatttttatagaagatagttcaaaaagcacaccagggaggttagaacatcaagactcatatagcaatatatcaaatgagcctaaaagcttatcgtctgatttagatgtatataataacagagacgttgtaagtagtatccctttatcattaataaatccagatgaagaagcaactgttgaggtctcagcaagtgaaagtttaacagagacaagtattcaagtaggacctttcccaagtaaaacatcattacttaaatattttaatagagtcatgaatgaagaaggatttggctctatacaaaaatattatagagatgatttgtatcttcctggttgtgctgtttatcagacagctaaaaaagaacacaaaagaaaacattctggtattcgactcccatggctcaagagatttaatctttcttctaaaacaaaaactgatcttcaagatgagagtttacaagaaagttcgcctccaaaatcgttaagagaggatggaatatatccaccgcttcttcagcataaacgtcctagtgtatattatactaaagaagtaggggcaggggatgatacaccacactcccttaagcatgtaaagtatcgtaaaaaacgtgtaggaggaatactacaatcgccagaaatccctgatttttgtaaaattgaaaagatttttagaagcctaccttctagtgaagaagagcaggaaagcgaattatgtccatcaggccctcaagggaaaatatatctttttacacttgggacacaaggctctgaacctggatattgtattatgagagatcctttcgaatccacttcatgttactatccttctggctctgacgcaaagagtgaaagtagtgaacaaggcttttattcttctaacctcgaaacagagaacaatacttttttgtttaatagagtatctcctccagaggagttacaatatggcaagaaaaaatctacgttaccacttcagaaaagaacatcctgtaaaaagaataaaaagtggaagtcttcatatgttgttgacgataaacaacgagctcaaagtaaaatggagctacagaagcatcaatattatataactgactgtcttcttcgattagagaagttgcataagcaccaatatgaagtagcaaaaaaaacaggagatgacctttgttctttagaaaagaagcaagcaaaagataaagagaggctccaagcaacacttaatgaacaatatttagaccttttaacaaaacatcaacagttaatagcaagaaatactcatcctagtgaagagagtttatcagaaatttctgaagggaatattgaagatgctgaaagtagtgagtctgacttagaaaggaagcatcaggctaaaaagaaacggttaaataaaaagcttaaaaaactattagttgaaaattatacaattggtcggaatcaccgacaatcagttgaagaaactactaccaaaatagataaacgtcatgctcaagaaagatgtcattggactactaaaaaaggccctttttcacaatgtttgatgctacaaactgaggagttatgggcattttataatgaaaaagaaaaagaaagagaaaaaatagaagcagaaaaaaaagaaaatcttaagaaatataagcaggaaaaagcagccaagcaaagttacttggggtggctatttggatggaaaaaagcagcgtctgaatcagaaaaagagaaaagttctagtgaggactttaaaacatcttcagatagtgaactagagataaaagaggttgttagtctttctgataaagaacattcagagtttgatcatagtgataattatgaatacgataagagtaagcctaaatgttatataagtacaaaagaaagaaataaaagacataagaagagtctacaaagagatagtaggcttactgctgggttatcattaggtgctccaagacaaattatgtaccaggacaaaaaagatgaaaaatcagatgatgataaaaaggtatctcaaggtaacgaatctcctcaagtaacaaaagaatctacagtagatggtaaaaaagaagtatctgcgtttgaagagaaccttaaatcagatgaaggtctatctgtaggcgatataacatttgagctttcagtattaagtggtgcaacaggaggagatgaagaccctcttggtaaagataaaggtagtcatgagcaggagaaggaacagaagaaggatcaaaagaaatggtctgataagaaaaaaaagaaatggttaacgtttaaagctgaccaaaagaaatgtccaattttaactaaagaaaaatattggtctatttgttgtgataacttgttagaattacataatcgtcatgaaaaggaatataaagaagcagagaaaaacgcatctaatatagagttattattagagaagcagtctcaagagcaagaatgtcttcgttctgaactcgaagagttatggaagcaaacaagagaagcacaggcctcttctagtagtgaaagtagtgggagtatagtttcatcagatatacgttcaagaggtgggtatgatatagaatctgatgtagatcaagaaacaagcaataagagagctagagataaacaaataagtaaacttcaaaagaagcaacaaagggaaagaaaaacattattggcaatgcagaggacaaaacaagagcaattggatgaaattcaggaggaaagaagaaggaaagctaagaggttagggatgtctcttgtagagttaaacctaatgcagcaagaacagaaagaaatgttgcataaccagcaacaacagcaagttaatagattggtagaaagacaacgtcagcaaatgaatgaactgttagcttcattacatcagccaactatgtctgaaagtactatgtatacaagttgttatagtggaatttttggatatttatttggttggggttcacaaaaagtttctagtgggaaagaggaaaatgatgttgaacaaactccagaaaaaatcactgaagagaaggtgaaagctgttgctgggattggaactttaggaagtgatgcagagttagaagaaggtatattttctgatggagcggatttcagtagtactattcttcaagttatgtctgattcagagttgagtaatgatatagaacaagtaacagagcaggtagaatataaaggtgtagtaagtagaggttctgaatgtgatgagataggagagcccatggatgaaagtcatgttcctgaaaagattatgcgactttttgagcgggcaacatttgtagataaagatagttctagtggaaaggaaggagatttttcttcagaagaaagaaaatctagttcttacagaaatcgttattacggagttgaaaaacgaagaaaactacggaagatacatttaaaggagaaggcacaattagagaaacaattaaaagaaccagaagaaaagataagattacaattagaacaaagacagcaagagcggcgtagaaaaaatcttatgtttggttatcatatcagtgaagattttttagataaactggaggaagatgaatataaaacatcatttgaaccatttaataagttacgtgcagagttggagcagaagcaagcacaagaaaggttgtctcttcaagctgcattaaaaaaagagtttgaggagagctgtcaacaagacagcgaagatatttctgatccagaggttaaacagaaaaagaaagaagagcgagatcttcttgtagcacttattgaagaagccgcaggtgatatacaagatgtagaagaatcagaggaagaatacattattgaatggaaaaagaatgaaagagcaagacgtgctgccttattagcttctgcaagagagtctggaaaacctttatgctttcaatttacagcacaatcttcttctgcaaatgcagcctcatcaatgcatggtagtcaccctgaaacacaagagggacagtctagtgataaagctagtgccacaacagttgaaccttctaatataacttgtccaggagacactacttctacagcccttactaaagaaacatcatcagttctgctacaatcgtcttcttcaagcatagtaacatcacaagatccagaagaaatacaacatactgatgaaaataaacaagatacatctctttttgatggtgagaataggaaaaaagagcaagagaaggatagtacacctctaggcactggagtgagtggtggatatcatgatgcctcagatcattatgggcaagggagagctggtgaaggcggaggaggaaataatgatcctccagtcccctctgattctacacagccttcttcatctacatcttctactggcgttcaaacatgccaatcttcattgatagaaaatgctcaggacagtagtcttcaatcttcattgttaggatatctattaccatccagtataactgataaaaatatctccactaaaaagagtacgcttaaaacagaaggcgtagatcaatcagttagctcaagtcgttgtcctgaggctctaactgcaagtgtaacttctttattttctagttcatatttgaaagttttatttagtggctggggggtaacaaacgttgaagccgctgtaacttctgatcctaatgaatccaaaaataaaaattctaaggatatagatattctcggagagaatagtggaaatacatcaatagaaggaaatcaagattctctaagtgattcagatggatctggtcaaagtcctagtggtgctacagggggaggttcaggtgaaagtcttggagagccagatgatgataaggataaaaaggagtcatctggacataaaaagaaaaaaaagaagaaacataaaagaaaaaagaaagaacaggggactagtactgaaactcagacacaagagcaacaaaataaagaaagtcaaacaagttcgtctcatcaatgtgaacaaataacatctgaagatagtcaagaggaaaaggaaccactagtcaagaaaggaggccaagatggtaaacatgacaaagataataatacagtaagtgatagtgaagaaggtgcttggaaacatcatacaataattgtcaaaggagatagaaagcctgaaggcaattatgctccacctccatggcttacacatcctttaagtttattgactggctcgccagtattagaagggattccattgtctcttgaagatgagcttgaatgtggatttgctattgatgctatgaaacttttggatgaagggttggaagaatctgccagtagttcagatatttttttagaaggtgtaatagagggagcaataggaagttctaaaaaggctcaacatatatctaaccagtatagcatattgaaacagagacaatctgaagccgttaaagctctgggaagaaaacataaacagcagctagaagagttaagagaaagtcagttacagaaaaagaataaaacacttagaaaaaatattaaggattacaaaaagaaaaagaaagagttacaacaaaaatttcaagaagaaatggaaaatgctgaccaagaaacaaaagagaagttagaaactatctgtaaagaggaggtaaacaaactttaccttacatgtaaggaagacagtgaggctcaagcttgtagcctttaccgtaaagatggagatcaagtagaagtgcttattcttcaacagaaggaagaatatgaaaagttgttacaacaacagaaagaagaaagaaaacaatatagaggaaataaacgagcattattacagtctatctcttcaaccatagggttacaacaagcagttgtccaacaacatgagggtacagcagcagtaccacaagatacatttgatagtcaaagccaaggaactacaaatagtagctggatgtttcttagattagatttctctgataacggagaaggaacagataatatgttcccatttgatccattaccaagggaggtacaaggagcatcctttacagatgctacaagtgaagaccaagatgttgatgaaatagcccaagaagctgatgaagatttagatagtaatggcaacagtagtgaaagtggtgatctgtttgatttctcagatggtgattatgaagatgataaagatgatgatttgataccaagttggtttcctctccatgatgtaggaatatcttatggtgatgcaaaagggaaaggggaagaagaggtaataggacaaccaagtagcactacagatattattacaggtgctataggaggtgcagatgtagttagtgttatagcaagttctactgcaagttgtggaggaggagaagaagaggtagtagttaaatccaaagaaaaagagaagaagaaaaaaaggaaaaaaaggaaaaaaagaactactgaagaatatgatgcatttgtagaaaaacaaaggcagtatatagaggattgtaaaagaaaatacaatgcagcttatgagtgtttaaaagcaatttgtaaagaagagcataacaatgcaacatcattagaggaacaacaggaactagcaaaacaacatgaaagaaaatttggggcactttctcatatgggaatggctcaacatttatttttgcaagaaaaacttgggaaaaagaaaaaacgttggttaaaaggagaggatgtttcatctgaagaagaatgttcactttggtgtaattttgtgtttgaaccacgtggagatgattcagatacaatatcttcagaagatgaaaccaatgtagcagttgaagtaatcgttgatgctggtacaaacactgaaactgatactaaaggacaacctaaagaggtcagaacaggaggagagaatgatcctttagaaggtgaatctagcggtacagtgtcttctaaaagtaaagagctgcaagaaaagcatgagtgtgagatacagtgtttttgggaagaatataaagaacaactagttacattgcatgataatcaagaacaacgtcttcaaaagtggataaatgatggtaagccagagcatgatttaaaaaatacttttggagaagaagaagcagcattacatcaaacacaaggatgttttttaaaaagtttacaagaaaagcataaaagagaagaggaagaagagcgtagacaaaaaggacaagaggatagtggaactagtttagagcagcctacaagcaaatctaaaagtaaggttttgcaagaaaagcatgcaagtgagatgcagtgtttttgggtaggatataaagaaaagttaactattttacgagaaaagcaaaaacagcatcatcaagagtgggtagagagtggtaaaccagaagatgagttaaaggatacttttgaaaaggaagaagaagcattacatcaaatgcaaaaatgtcttttagcaagtatacaagaaaagcacaaaagagaagaggaagaggaacgtaaacaaaaagaacaaaaagataaggatagtgagtctagtataatacaaggcccattagaagagcagaatgaagaaacaccagcctctagggactctataacatctagccaaggagatactcctcatagggaaaacacttcattagtgacttttaaagagttaggtgttgaatcaggtgaagaagagataaacaaagaagataaaaaagattcatctgaagaacagacaagtgaatctaaaagttctaatggattattgcaaaaagtaatatcctttttccagtctgtcggaagtagcttcaataaagaagaaggagctgttgggggaattgttacagagagttgttatgtaaaaagtaaagaacttcaagaaaagcatgaaagtgaaatagaatgtttttggggtgaatatggtatacagtgtagattattacgagatttccaagatgctcaacgccaaagtaaaggcttaagaaatactgctgaagcattggaaaatcaattagataaagaacgtgaggattttcgtaaaaagaagaaaaaagaatggcagaatttacaagaaaaacataagcaagaagaggaagaagaaagaagacggcaggaagaaggacaaccttcaaaagggggtatatcaggagcaaaagaaaaagagagtgatgagttaggagatgagacagacggagaaaaagttttttcacttactttttttggtcctcccacacaatttgatgataataatgccccaccacctttcccatatgatcctcctcaagattccccacaaaatggagaggattctagcgagattaatccaaatccagaaggttcttctcagcaggaatctccctccgaaagttcaacagaagatacatcttcatcatctgaagatgaagacatagttacattgctttcaggtaatataaagcaagctcgtcctatagggcaatcaacaataacaacaactactactcttgttacttctgtagaaggagctgaaggattatttccaattgaagaagagacagaacaaaatttagaggatgtacagggttcaggcgctactcaaggaatggtaggattatctacgattgaagaagaagtggaggaggctcctggagcttctgaagatttagactctaatcaaggagcaacaggagaggtctcatctccaggaagtaaagaggaagttgtttatttatcatcaagtggagaaagagcaatacataaatggcttgaatccagtatatctatgccagtgactatggaagaagggtcgttatcacaaggtggaggaaaaactagtactctttattctctaatggtttcatctggcattctatcttttggtggtgacggtaatggagaaaaggctagttcttcaaataaacaaagtaaaagatctccagaggaatgtaaggcttttgaagaaaaacaagttcaacaacggcataatttattacagagtattgaagagaaaaagaaagaattacttttaacctttgagaaacaatgtcctcctgggcttccttcatataaaaaagacaagttagtaaaagaacaaaaagtaacaatggaggatttcctctgtgtaagttgttaccaatatgaaacattagaacaaaagcaaaacgagcaaagaagacgttgggaagaaggtgaggacgttgctgaagaagaagatcttattttgttatgggacacactagataatgaggcagaagaagggactaaagaagagcatgcagaggttaaagtagagggagtagaaggagaagtttttgatggaatatctgaagaagataagccaaaaaaggatgataaagaagaacaggaacaaaaagcaacattaggagattcatctggtgaaaccatagaagaaagtcaacagccgcagcaagaagaagaagaaaaaaaagaaaatagtcctagtgggtctaatgaaagtccttcaccacagcaggaagaagaaagtgtagatgaaacttctagtgttgttacttcttcaccattgttatctataaatgaagttaagcaaacagaagacaaaagtgcaaagaagaagagatcagaaaaagagcttgatgattttaacagaaaacaagctgaacagaaggattgttttttaggacaggttcagcaagcaaaaaatgaattagaagaaaagtatggcgaagcttgttgttctgcttcattggatgaactgctagaactagaaaaaaaatttataaagcaaaatcagaaattagattctactagtgaagcccagtttaagaagttggaacgtcgtcaagaagacaagagaaatagatgggaagaaggtgaagatgtttcttcagatgaagagatatgtttcatatggtcttcagatgagtcatatgagaaaagtgatagacttcatgaaaagcatactcaagaactagctgacttttggcgtaattataagaaaaaattgtcgacactaaaagagattcagcaagaacgtcgtgatcagagcagtgaggatagcaaagagaaacaagcaatggaagagatgtttcttgcagaacaagaagctatgtataaaagccagatgaacacttttgctgagttaaaacaacaacaaaagaaagaagaggaactagaagagttaggttggacattggaaaatatgcaaggagctgttggaggtgtagagccagaggatgaagataaaattgaatctcctcttgatagaaaacatcaacaagaaaggaagagtttttgggaaaaatgtagggttgatagtaagtttattgaacaagaacaaagtgaaagacgagatcggtggagaaaacaggggaaaccaatagcctcattagaagagatttttattgaggagcaacaagcagtttttgaaacaaaaatgcttttttgggaatcattgcaagagcgacaaaagaaagaaagagaagagaaagaaaggagagaagaacagaaaaggatagcagaattagaaaaacagttatctccattttggaaggcttttaaagatgatcaagctcgaatgagagaaaatcatgatatgcgtcgtaaagaatgggaagaatctggaaaatctctagtagtgttagagcaactattggctgaagaagaagaaatattttttcaagataagatgcagatgttagaggagttagaaagaaaaaaatactttgaagaaaaacaaagctcaaggcaaaaagaacggcaaggtaggttttctacaaaagatgatagtgatgaagacgaagatgatataaggtatcatacagtatttgtccaaggggagggagaacccccagggaatgaggcaccaccacctctcccatttccccctcctgttttaggtgatagtggtgaaatgcaaagtggggatactggtggtgcaggtcctccttctgaagagctttctcttgggaatattttgtcgtcttcagatgaagatgataatatcatagtctcttctactgaaagtagtagcagtagtagtagtagtagtgatgaatcagatgtatctagttttgaaacatcttcagatgaaggtccagattgtgttgatggtgtctatggtgctgtcggaggtgaagaacctgagaaaaagaaaggcaacggctatcataagaaaaaatttaagaaggttaagaaaaaactccataacgttgcattaaatcaaaagcttaagaagctaaaagataagttgcaacaacttgaaaaggagtaccataaatcaattgcagactgtcaaaacaggtatcaagacgttaagtgtaacctattgatggctcaagcagaagaattgattggtaaatctagagaagagcaagatactctttgtaaaaagaatagtgagaaaataaaaaaaattgaagatggatatcgtcgtcaatatgaacaattaacagaaagttattacacaaagaaacaggtagtattgaataagttgtctgcagtgatggaaaagaaggcactgcttaagcaaaagatacaagaatatgattctgttgacggtaaacatagagtttctaaagggtataagaaaaaagctagtaagttaaaaaaagagagtaaaaagttagaaaaagagttggaagcacttaaggagcaacaaactaaagaattacaagattttgatcagaagagtgacgcatgtagacagcaaattttattttttcaaaaagaagaagtgaacagtataaaagatgcaggaggagacctttgtgctcttcaaaacaagcatacagaagaggactgtaaagttgaagagttgtttactagtcaaaaggaattattaatcaaagaacatgaatcccagagaaatgagaaagaaaaaagaaagaaagagttagagaaacaacaacaagctactagagaaaaggatacccctacatgttatgagcatggcatagataatatagttaagcttttagaggaagagatcgaaagtttagaaaaagagttggaagaacttgaggaaaaacaagaggaagagtggaaagcatttgagttacaaactgaagcttgtagaaagcaagtcctatttttgcaaaaagctaaacccaaagatagtgccagagaaggtggggaagaagatcgcagagcctttgaaagtatggttgctagtcagcaggaattgttacttaaagaacaagaaagacagagaacagaaaagttaattagattaacagaggcaaaggaaaaaagaaaacagcataaaaagaaacagcaacagaagcaagaagaaaaagaaagagaaaagcagaaaaagaaacaggagcaagtaaaaagggaaaaagaaagagaattagagagacaaaaacagcagcttaaaaaagaacatgtacaagatagaaaatgttttgttacaacttttaatttttgtaaagaacaactgcaaaggttacatcaagaaaaccttaaagttgtgcatgaaaagggtagcgatgatacatccttgatgcaggaatatgaaaaagaaaaagagtgttttttaacagctcaaaaaagtcagtatgaaaagttgttacatcaacaacgtcaagagatgaagaccttaattcaaggttcacatggagctgatgtttcttcttctcaaaaagaacatgaaaaaagccatgctaagacattagaaaaacttctgcaaagacaagaatcatgtcttaaacaattagaagatgcacaaaaacaagaacgtcaagaagcagaaaaattaggtaaagatctttcaaaactagatgaaaagcatagaaaagagaaagaagacttttttgaccatcataaaggaatattagaacaatgtttactccaaaatttatctgagactgtttgtcttttaggtagagatgaaagttctagtgatgaaggctcgtttgatcttgaaggtttttattctccagatagatgtatgggacgagtaggtgaacccatatttacatttgttggaagtgattttgttagatcccaagaagcttctggtatttatccattggaacaacaagtagaagcatttgatgaagtagatactggtcgaaaaaaagaagaagatagctatacagataaagagaagaaaaaaaagaaaaagagtaaaaaagaacgtaagttagagagtgaactagaaaaattaaaaaaagagcaagcaaaagcaaaaagtgagtttgaagttaaagtaacttcttgtagagaagaacttttcaaatcacagcgagatgagtttgttactgcagagaataaaaaacaagatttaaaagcattagaaaagaagcatgaggatgaaaatgtacagtttacatcaatgtgtgaagagcagtttcagattttgtgtaagaatcaagaagaagaaaaagtaagaaaagagcaagaattacaaaaagcaaaggaagatcataagaaaaagaaagaaaagaaaaaggagaagaaagaaaagaagaaagaaaaagaaataagtaagctacagcaacaacacattaaagctagagagcaatttttacagagttataaaaattgtaaagaaaagatggagatgttggatcaggaagaacttttaatagtagaagcctctggaggtgatgttgaagcaaaggtaaaagagctacaagcacaagcagaaattttcttcaaaattcaaaaagatcagtataagcttttattccatcgtcaagaacaagaaatgaaggctcttgaagcaagtttttatggtgatgaagttgatgctcctactggcgctcgatctatagaagaatttcttgtagatcgaatgttaaaacctcaattatctgaagatagtgaggaagaacttaaacctcttgaagacccttcaactttttataatccatctaagtatggagagggtagttttatattctttacacaattatcttctgagcaaactagagatcaatatggctcagatgatgaaaatggatttcggtatcatacagtaattgttcaaggagagggggaacctaaaggggatgaggcaccaccgcctttcccattttattcttttgtttcaggcgatagtggtgaaatgcaaagtggggatactggtggtgcaggccctccttctgaagagctttctttagggaatacttcctcttcttcagacgatgatatcataacttcttctattgaaagtagtagtagtagtagtagtagtggtgatgaagcagatgtatccagttttgaaacatctttagatgaagggtcagattgtgttgatggtgtctatggtgctgttggaggtgaagaacctgagaaaaagaaaggcaaagcagttgatgatgtagatggtggtcgaaaaaaagaagaagatagttatacagataaagagaagaaaaaaaagaaaaagagtaaaaaagaacgtaagttagagagtgaactagaaaaattaaaaaaagagcaagcaaaagcaagaagtgagtttgaagttaaagtaactttttgtaaagaagaactttttaaatcacagcgagatgagtttgttactgcagagaataaaaaacaagatttaaaagcattagaaaagaaacatgaggatgaaaatgcacaatttacatcaatgtgtgaagagcagtttcagattttgtgtaagaatcaagaagaagaaaaagtaagaaaagagcaagaattacaaaaagcaaaggaagatcataagaaaaagaaagaaaagaaaaaggagaagaaagaaaagaagaaagaaaaagaaataagtaagctacagcaacaacacattaaagctagagagcaatttttacagagttataaaaattgtaaagaaaagatggagatgttggatcaggaagaacttttaatagtagaagcctctggaggtgatgttgaagcaaaggtaaaagagctacaagcacaagcagaaattttcttcaaaattcaaaaagatcagtataagcttttattccatcgtcaagaacaagaaatgaaggctcttgaagcaagtttttatggtgatgaagttgatgctccttctggtgctcgatctatagatgaagtcctttcatctgaagatagtgaggaagaacctaaacctcttgaagacccttcaactttttataatccatttaagtatggagagggtagttttatattctttacacaatcatcttctgagcaaaccagagatcaatatggttcagatgatgaaaatggatttcggtatcatacagtaattgttcaaggagagggggaacctaaaggggatgaagcgccaccaccaccagtgaagcttcgagtaccaccttctctaactgctgacttggaagacgttggagatggtaatactgaggttgactctagatgttttaatcagggtgtaactagctcagggatcagtagtagtcgtagtagttttactactgaggaaggatctcaaggtagtggcagtatgtcatcactagttcggcttcaagtatcatcttctctaattactgacttagaagacactgaaaatggtaataccaagacaggtacacagcaatggttaggcaatacaggtaacgataatagttgtaatgagagtactcaatacacagataattcaagtcatcatagtagtgatgatgatggaacagatggtcatagtaatgataatattaatggagctgagggcggctcaggagctgcaggaggttcaggaggggcagaaggaggttcaggagggtcagatgatgataacaatcctccagatgataatagttctaacgaagaagaagaagaagagagcattcttcttgtaagtgaaactgacttaacagatacaaaagcagaagacggggatagtgaaggagaaggaggtataaaagatcagagaaagaagaggaaacataaaaaagttagtaaaaggaagcaaagacagcatgaaagacaacttttagagaaaaaaagtcttgcacatagtcaatggaatgaaaagaaaaagcaacaggagaaacaaagaaatagagcgttattgtttagtattcaaagaaaagaggatctttcagaacaaataagaaaggaagaacgagaacagcaagagtttgaatctaatcaacatcatgaaaggatattgttagaagcaaagcataaacgacaaaatgctgagcattctacagactctgatggagaagtccatttcccatctaaaagacccaaaaagtctcataagaaaaagagtcaacaagtaggcaagcaatcttctcaggtggaacaacaagtagagaaaaaagatagtaaaaaacagagggaagaaaaggatgttccatcatgtttgttaactgatatttcttataagcgtttattaagtagttctcagcaggaggaaaagatacattgtgtaactagtcaacaaaaagagaaagaagagcttcagaaaaaacaagagaaagaaaaagaagaatataaaaaagaagcagcaaaggtacagaaatgtcttgctaaattgagttctcaacaacaaccaggtgcaagtagacaacaaaaacaagaggaagaagaaattcttcagcagcaaacgaaagaaggcaaccagtatattttaaaaagcaaggtaaagctaaataacaaacagcttgcagagaaagataagcttatacgaaaacatcaagaagagaatcttaaactgtctaagaagcatcgcaaagaaaaaacagaaaaagaaaagaagagaaagaaaaaggaagaaattaaaaagaaaaaacatacaataacaccagaagaaaaggaacttcaagaatattgttctgggcgtagaagaactttatattccatgcaaatagacgagagagaccttttagaggagaaacataaaagagagttaggtcaaattctcgatatggaagaggttgaggttttagaagagcagcatgaagaagaagtaaaagagctattcgagaaacaaagtaaggatagagggttgcttgaagagcaaataaaaatattacttcaacagcaatcctcccatactacaagtggggatgagaaaaaagaatgtgtagaatcatcagatgagtttgatagtatcccttctagctccacttattatgattctacaagctcttcttatagtactggtgatttttatagttctatgccttcaggtgagcctgaagtggaaataggtattgaaatagatgaaaattttggcgtaggcactagtgaaaatagtaataatacacaagatgaaacacatcgtcctattggtggtgcacgaaaatatcagcctaaagaatataaagatgtatctgatacatcaaaaaaacagaaaaaacttactagaagcactccaaaattaatgcttctttcaaaaaaagaaaaagaagcattgagtcataatgtaacacaaagctatcacaatatatataagaagatacgaaagaaagagatagaacttgaagatgtattacgaacagagcaggaaaaagatagaagaggagaggatgctgattatcagttaattcttcttttaaaagacgaattacaacatctattgagtctatttgaacagacccttgaagaagaacgtcaggcattagcagcagttgatgcaatggatgaacagacagaacttgaacaacaatcaatagaagagtcagaaaataagaaaaaagaagaacctaggaggaaatcaagtctattagaacgtatctttaaaaggaagcaggaaggagatgaaccatctaaaaaaggaaaagaaaatcatcatgaaaatcaaaaaaggctagaggaagaaccattagtaggattaaagaagaggcctaaaagaacatcaacaacaagtaggcttagcttaacattaacctctataggagagagcaagatcccacagtgtgaaaaaagtgatgaatctaatcttgtgggccctgttgtttcattttttaagaaggagttacgaacgcgtaaaagttctatgatacatggtgtttgttttcctcaaacaggaggagttcttcaatcactagatgttaatagccaaaagaatttagttagtagagatgatagtaaaaaacttgaatccagtggtgctccaggtggaggtgatggatcaggagatgatagtcattttaaaaaagataaaggatctaaaagagatggtagttctgattctaaaaagaaaaagaagaagcatagccacaaaagattctgtagaaaacgtttagctcatgaacgaaataaacttaggaggaaacatcaagaagaaaaagagttatataaagagcagtttacacgtggggttcaacaagtatttgctctccaggacaaagagcgtgcagaagtagcaaaaaaaggaggtgaccttgaagcattagcagaaagacacatgcaagatgaagaagagcattatgtaagaaatagaagagaggtagcagaccttcatgataaacaaaataaagaacggtgtagactataccttatatctaaaggtggaggagaatctgcaaatactacagtgacaagtgatgaaagttctgtatcagaaattttagaaagtggcagtgaagctgccgtatataaagaaccagtaactcaagaagttgaagaactgagaagacaacaacgtaaagagttggcagtgcttatgttctgttgtgaggatgaaaagactgctttacagacaatgcatgagaaaaataaagaatcgttagttggtacaatcttgttggaaacattagaaaaagttcataaacaagaagaagacgatcttgctgcagaacatcaaaagaaaaaagaggaactattaaaaaagcataaacaagaacaaaaagatcttgaaaataaacataaacgttcttcaagcaaacgtggtcctaagagaaaattacatcctaaagttaaagccgttcttttagaacacaaacaagcaaaaaatcgccaaaaaattattcatcaaaaccgtaaaactcatttggagaaaaaacaagaagaagaaaaaaggatgatatctcaagggcaagttccttctgtacttttaaagaaagtcagtgagtaccatggagggcaagaaggtacatctttagtagaacttgtagcattatatcatgaaggagaaatgagtgccctattagatgaacaaaaaagacagagagaagaaagggaaaaaagacaacgtcaagatttaatcagagctaaagtaggggctttttttactcaacggactccttcagtcagaaaaaaagagggtctatctttaagccaatcttcactacatgattcttcaccccaaaaatatacacatccaagccataaaacatgtggtcgacttgctgctgaacaagctatagaaaaaggtttctttgagaatcataaggcaaattgtagctttatattgggaatagagcaaaagaaagagcttaaacaattagaagaagagtgcgaaaaagagcttaaacaattagaagaagaatgtgatgcagcatatgcaatatttcttcaacaattaccattcctttgtgatgaagatagacaaacacaagagcagcacttcgtatcccaacgtcagcagatagaaaagtatagggaacaacaaaaagaacaattaacctgtttacaacacaaacatcaacaagaagcaaaagaacttgagaaattattagaagttcaggcaaaagaactggaaaaaaggcagaaagaagaaagacaaaaacaacgagatgttgtttcttcatatccagagagaaaagctcagcaagagcgattaataactcagtctaaacacctgacggctcttaaagaagcattaagtgaagaagattctatctttcaaaaagacctcacttcttcaacaatcgtaaaacagcaattgtcaaaggttgaacaacagaaagaacttgaagctttgcaagaagattttgtgttagatctttgttttactgagtcagattatacaagtgtttcagaagagagttcagaagaatcttctgtaccagaaggtattagtagaaaacctcatggacctagtggaggtggattcagacatcctaggagagagataagtagtagtgattcagatacagagggcaagtcagatgatcaatctgttagaaggatagaacaagaaatacaaacagaacagacaggtccacaaggtacagaagaaagtcaaacatatgctgtgcaacagaagacaagccaatttgtagaagtgaaagaagaggaaattcaggttctagaagaaaaagtacaaattgtagaagagagaggagacagtgataaagagaaagtcttaacaagagaagagaagaagaggaaaaaagaggaagtacaaaggaagcatgagaaagaacttaatctgtggatgtcacagtatgaaactacagtccaaaagatagagcaaaagtataaagaaaagaaagctaatcgccatattcttggatgtacattagaggagttacaagaacaggaagaaaaagaatctaaagtagctgttgggaactttactgtattattagagaaaatgagggaaaagcagcaaaaagaattacaacaattcccatcctcagatgaagatgaaagcgatgtggatagaagaaagaagaaaaaagttataaaaacaaaagctgaacgaaatgcacaaagagagcaacgtaagcatcatcatactcctcatccttatcatccagaggagtcaacatctcatttagttttagatactaagcaaatagtaacactgacaccaagtagcagtgatcaagaaacaccagttcaatcaaaagaaacagctacaaatgaaacacctattccatcactacctagtacggtaaaaggccttacactagaggaagttacagtaactgtattacctcaacctacacaattaagtagcctcttaagttatttttcttctgaaccattacaagaacaaccatgtcaggtagaggagcaacaagtctcatttgaaagttctcaagtacaagctagtactgatgaggcaacaatagatccagaagtacaattagttttggatgagtattcatcaaaagttgcttgtttacagcaagagatggataaaaaattacaagaaatagaagaaaaaggtacagatagttcagcttcatcagatactgaatggtcttggcctaaaaaagatatgccaagagaaataaaaacactcaaaggtagtgatagtgaaggaaaagatcagcaagaagtgccaaagattccttctgcaggtgcacattctttgagtagtatggctgaatctgaagatgtgggtgcagtttcacacatagagaaaaagaaaagaaagagacataaaaaacataaaaggagtcaaagggaaaaaatatctcgagcaaagagagctcttatggcacaatattttgcaaaagtaacactcttaggacaagaatgttcagagaaagtaagtgagattcaagaacaaaaaaagcagaaatgtgaaatagaagaaaagcagagaaaagagagagaagaattttttgatcaacatcaagcagcaagaaatgctcttttagctaaacaacaacaagaactcataggagtagcacctgaggaagttggaccattacaagataaacatcgtcaagaacaacaagcacaaagtcgacaatggggcttaaacttacatagtttaataaaacaacagaggaaagagagagggcttagttcttctatatctagttcatcatcagatgaagacataatagatgaaggcagtcaaagtgatgatcaagaagatagcaaaagtctatcgtcacctatatctccaccaccttctcctcctgtatctggtgcagactcacaatgtataggaggagcatcttcttcagacactgatgctacaatgaagtctgatggtcataaatcgccagaagtcccagtatcatcagataaaaaagaagaaactggtggtaatcaatcaagtaaagttacaacttatttactttctgtctttacaggtaaggggggaactgctgctggcgctcagtcttcttctagtgaacatactggtagtaaaagacaacaaccatctggttcagatcaaacatcgaaatcaagtagacaagggccttctactccttttgaagggcaagggacatctggagtagagggtgcttcagggggagcaggtgatccaggtgatggtgaggataaaaaatctaagaaactagatgatagtcatggtaaagatcaaaaaagttctctaaaaaaacataaagataaaaagaagcatacaacagaggaagaggaagctaaaaagaggttacaagaaaaagttgaacagaaaagaaaaaatagagaactattgaaacaaaaatgtaaagaagaagaagaagcttttttaaggaatagagagaaatgtaaaaaacagtttcttcaagagcaagaagaggaatatgaggctgctagacagtcaggtaaagatttagaattgttgctagttgaacaacgtgagagacaagtagaattttataatcatcacgagagtcaacatgcaaagatgaagaaaaaacacgaggcgttacttaaaggaaagcgtaagaagaaagtcaagaaatatggaacatcactagaagaacaacaagcaaaagaaagagcagaggctcgtcagaagtatcaaaaaggtatagaggtgatggaaaagaggcagcaggaagaattagatgaagcctctgctcagggtaagaacttagaagatattaagaagaaacatagacaagaggaagaagatttttaccgtgaacagatgttaggtgaattaggaaacctgcttcaacgacaaaaccaagaaagacaaagtgtagggttacctccaattgaagggagctcaagtagtggtgtaacaacatattctgatacagaatatagttctcttgaaatggatcttgaaactaaagaagaggtttatacaagtggaaatgaaagtacagaacaagaagtagtaacagaacaagaagtagtagtaacagaagcagaagaagtaacagaggaaaagttgttagtaaaagatgaaagcttttcttatcaaggtagtcttacagaatatctttctcaggcgatcccagaggaagtgaataaaccttgtatagatgatacaagtagcagtactagtactactggacggaaatctagtttttttgaaaagttcttttcaaaagttaaaggaagaaagcattcacaagaagaaactgaaagtaagtcaggcactggtagtacggcatcatatggttctaagtcttcaactacaatgcagaaagatgaagtacaacagcattctgataggaaattaaagcataaacagaagaaaaaaagaaaaaaagaaaaacaattggaagaaaagcaccagcaacagcagcaagatgtttataaagactttaaaaaacgtcgtttattaatggagacaagacatcagaaggaacttgaagaagcaatctctaaaggtgaagacataacaaagttacaagaaaaacatcatgaagaagcttcagtacaacatcctcttttattttctcaggctatgagtgtattgagagaacaacaaaaagttgaaagagaaaatcttatagtaagttcaggtgacagtgataccacctcagatacatcagatttagaggagacaggtgtgtcttctaaagatcactctccagagaagaaaggtggtaaagacggtaaacctgatcctgatggaggaagtacttccagtagtcaatatcaaggacttgtttattatgtaacagcagattcagcccctgtattcccatatggtagtgaggcatcattacctttctcttcagacaagggtaaaaatgaaggtaagcaacagacattacaatgtggtgatagcggatatgagagtgataaccaagaatctggggatggttctggaggtagtagtactgaaaatcaagtatgtgtgtcgcaagagtcaaatagttctttaggtggagggcctcattctgacgatggatatgaaagtagtgatgaaaataaaaatggaaaaggtagttcaggtcctcagtcagtatgttgtgtaaatggtgttggagcaacaggagctgctaacgggggtgggtcttctgtagcttcgggagttggttctggaaatacaggatcttcaggaagttcgtcttcaagttctggagtcagtgggaatgttggtactccaggcaatggaggtagtagtgcaggtagcccaggtggaagttcaggaagtccaggtggatcaggtggaaacgttggaggctctgggaattcagctcctggaggaaatggcttagtttccgttacaagctctatgggtaatggctctaaccccccagatccaaatgatcctttaacaatgtctttactagcagatgatgaagatacactttcagacgaagctaaagaagaattgttggtaccattagactataatgaaaatgctattatgggctctcttgatggattacaacaggtccttcatacacctgcaaagagtgttcagagtgcaatgagctcattagcattacagtcacgaactggacatatgtctccaactaaacgttttcaggcatttgcttctattgaaggtgaagtgagttcacaatcaggaaatcaaaatgcatatacttctcagtttggtattgttattcatcctgtaccaaacatacgggttggtttagcatacaactatagtagagatcatactggtgacttatatggtatacgttctaaaaaagatattggttttgcaaaaagtaaagtatcgacacatattttgtcatctatgttggtatggaatgctgaagattcaggttttacagcacatataggtatttcatatggtttagggcaagtaaaaaatactcggtatattagctacttagatgatgttattcatacaaaaggacgttctgacacctccatacttggaggtattgcccaattgggatataccttacggttaccaaaatttcttcttacaccctatattgaactatctactgtaaatgcttggtggaaagcttatggagaagagtatggtctcttggcttctgacatcagtagaggagaagaaagaatatgggaaaaaagtatgggcttacgtacacgctggagtattacagatgacattcaatggcgagtatggagtaaagtcattagtggacaaagaaaaagtaaagaattaacggctactcttaaggctccttttgttccttgggaaacatctactcctgataaaaagaaaacgtattctcaactagagttaggtactgcatttgatatacaactttctaagcagtttggcattggtgtaaatggttctattcgtttcagtaagaaaaaagaaatgagacaacaaaacgctggtatgcgtttttggtataatttttag

SEQ ID NO: 8888 - DNA, 1482 bp, Lawsonia intracellularis
atggttagttatattcgtttattaggaagtatatttttagtattagcaatttttggttgtggcgctcagtttaataaaccctctttacttgatgaaacccctatagattacagttctgtactttctgattacatagtagaattagaaaaagaaccacttcagtatatattactaaaaaaagaaaaattttctcaaatggagatatataattatcaattcacatcacaacattggtctccagataattttgtatcacctgctatatgggaacatcaggtagatatatatatccctcaccatccagtttcagaacgtgcacttcttatcatcaataatggtattaataatggtacattttttacttctcctaaagctccaactgattttactccagaagtattagaagaaatcgctcgttcaacaaaaactgtagtcattgctctaagtgatatcccaaatcagtatcttacttatagaggtgactggagatttcttaaggaagatgaaagtattgctatgagttggtctagttttttacaagatccagaaagtcggtacacaagacctctctatgtccctatggttgcagcagtttctcaggcaatgactcttgcagaaaaggagttacaagcattaaaaattaagcattttattgtatctggtgtgtcaaagcgtggatggacaacatggctttcagctattgctgactcacgagtagatgctattaccccgtttgttattgatgcattgaatactcggaaagtccttggacatatgtataaaacatatggaaataattggcctatagcattttatccatattatagatttgatttagataaacaactagatacagttccttttttcaatcttatgaatattgttgatccatatagatatttaggaacaccatataagtctcgacttgctatccctaaatatattgtaaatgcaagtggagatgatttttatgtccctgataattcaagtttttactatgatgatctccctggagagaaagcattacgttttgcaccaaactcaaatcatcatgggatattaaatttcacaaaacaatcgcttattccttttgtgaatagagtacaaaaaggtatttcaacgccagttttagatatttccacagagatgacggaacgagttcaatatgtgactgttcgtttttctgaagttccagagaagatagtactttggaaagcagcaaatccagagtcacgagattttcgttatgcctgtcgtgttaggtacatggaaacaccattacacctttctgcaacaggggaagttagcgtttcattagagatcccttctgtaggatggcaagctgcttttattgaagctacatttaaagatggttttgttgcaacaacaccagtgtatattttaccaaaagatatatatccacctataaaaataccacctgtacatggattattatgtaagtttgtacatggtcgaacctag

SEQ ID NO: 8889 - DNA, 1374 bp, Lawsonia intracellularis
atgaaaaaagacctacaaaagagtacaaaacatgaatgtacaaaagctggttgtagaaatacaatggtaaccatagagcagttatataacaaagatatctgtgttatggtagtaggtcttggatatgtaggattacctcttttaatgcagctagctcatcatttcccagctattggatttgacatatctaaacgtagaatacatgaattacttagaaaatatgaccgaacaggtgaaatttcaagtgaagtattagataatacaaaagcatccttttcttataatcaaacagatatccatcaagcagatatcattattatagctgttcctacccctatagatacataccgtaaccctgactttacacctcttatcaaagctactcaaatggttgcacgacatatgcgtcaaggatgtgtagttgtatacgagtcaacggtatatcctggtgcaacagaagaaatatgtattccacttttagaagaagtttctggcttatcatatcttactgattttacagttggttattctcctgaacgtattaatcctggcgataccatccatacattagaaaatattgttaaagttgtttcagggagcgacaaagcaacaacagatctcctcacagcactctatggaacgtttattcaagcaggcatacataaaacatcaagtcttaaagttgctgaagctgcaaaagttattgagaacacacaacgtgatcttaatattgctcttatgaatgagcttgctattatctttgataaacttgatattgatactcttgaagtactagaagctgctggaacaaaatggaatttccttccattccgtccaggacttgttggaggtcactgtattggagttgatccatactatcttactcgaaaagcagaagaagttggatatcatcctcaagttattcttgcaggaagacgtattaatgatgaaatgggaaaatatatagctgaaacttgtgtaaaactgcttataaaaaagaatgtacttattaataaggcacgtgtaggcattttaggattaacatttaaagaggatgtctctgacttaagaaatacaaaagtcattgatattgttaacgagttagaagagtttggtgttacaccacttgtacatgatccacttgttgatgctgaagatgcacttaaagaataccaaattgtcattgaagaattttcggtatttaaacagcttgatgcacttattcttgcagttcctcataaaatctatttacatctccaacctcaagagttgctttcatgctttaaaaatataaactctgctgtactcatggatattaaaggtcgacttaatccatcagactttactgaagatgttcttttttggagactttag

SEQ ID NO: 8890 - DNA, 558 bp, Lawsonia intracellularis
atgattactattcatcccacaagtattgttgatgaaaatgtcactattggtaatggaacaaccatctggcacttctctcatattcttcccttcactattattggaaaatcttgcaacattggacaaaatgtttctataggaccacatgtgcagataggaaatggctgtaaaatacagaataatgtgagtatatatcgtggcgtaacccttgaagattatgttttttgtggaccaagcatggtctttacaaatgtttttaacccacgagcattcatcccaagaatggaacaagctagacccactcttgtcaaatatggtgcaacccttggagcaaattgtacaatcatttgtggtataactataggacgatttgctttcattggagcaggctctgttgttacaaaagatgttccagatcatgcattaacgtatggaaatcctgctaaacaacaagggtggatatgccaatgtggtgaaaaactacctgtaaatcttcattgtatcacctgtggtaatgcttactttgaaacaactcaaggacttcttcctcaccaatag

SEQ ID NO: 8891 - DNA, 1170 bp, Lawsonia intracellularis
atggaatttattgatttagcctctcaacaaaaacgtatacgaacagttattgagtcacgtattcaagcactgcttgatcatggaaagtacattatgggacctgaagtaaaggagcttgaaggacaacttgctgcttttacaggatcaaaacattgtataagttgtgcatcaggaaccgatgccttacttatggcccttatggctcatgaaattgatgctggagacgctatttttgtacctgcttttaccttttttgcaacagcagaaatgcctgcattgcttggagctactgtcgtttttgtcgatattgatcctttcacatttactatgtgtccaaaccaattaaaaaaagctatacttgctgttaaacatcaagatccttctatatacccattacctgtaacagccctagaaactgaacttacaccacgtgcagtaattcccgtagatctttttggccaggctgcagattacacacgaatccttaatattgcaaaacagtttaacctctattctattgaagacgcagcccaaagttttggcgcaacctataaagatcaatcaacctgcaacttaggttgtgattgtgctgttacaagcttcttccctgcaaagccacttggatgttatggtgatggtggtgctatttttacaaataatgataaacttgctggcatacttaaatctattcgagttcatgggaaaggacaacataaatacgaaaatgtgaggataggtgtcaatggacgcctagatacccttcaagcagctattcttttagcaaaacttgatgttttccctaacgaactttgtacacgacaaactgttgcaacatggtatacaaaagaacttactggagtaaaagatatcacccttccacatattgcaccaggtaattttagtgtctttgcccaattctctatacgtattggatcagatatgcgtgatattgctgctatttatcttgcagaaaaagatattccaacaaacatttattatcctaagcccctgcatatccaaccagcctttgcagatcaatattatgaggcagaggatatgcctatatctacaacatgttctcatgatattctttctcttccttttcatccatatatgacacaagatgatgtaaaacttgtctgtaacacactgaaagaggttctttcatga

SEQ ID NO: 8892 - DNA, 375 bp, Lawsonia intracellularis
atgacgtatcttgcaagggaaatgtacatggaacataatcagttattgtctcttcattcaacctcttctaaagagaaaactatctgtttaggacgtcaacaaaacaaaagcatttatcctattaatctttgtattgctcaagaaaaacggtcatcgactatagccacctatctatcaacaatatctatccataggcaatgcataacaagactatcgccttttaaccccttaacaatatttgttgataccattttttcacaaaaaaaaaattatcccataactaactatagattttccataaagtgttctttaaaagctaacagttctcgacatgtaaaggctactagcaaaggaatatccaatggaatttattga

SEQ ID NO: 8893 - DNA, 1053 bp, Lawsonia intracellularis
atgaagcaacccatagtaggacgtaaaataaaaatagctatcataggttgtggtcgtattgcagggaatcatatagatgcaattaatcatcacaaagaagacattgagcttgttgctgtatgtgacagttatgccgaaagtcgtaataactatagtaaaaaatataatgttcctggctatgagaaccttgaacaactctttgcaaacacagaatgtgatattgtagctatttgtacaccaagcggattgcatgctcaccagacgatcgtctcagcaaatgcagggaaacatgtgatgacagaaaagccaatggctactcgatggaaagatggattacatatggttcaagcatgtgatgaagcaggtgtatatctgtttgttataaaacaaaatagacttaacccaactcttcaactgttaaaacgtgctatagatgaaaaccgttttggacatataaatatggtccatataaatgttttctggcaacgtccccaagattattacaactctgcaaaatggcgtgggacatgggaaatggacggtggagcactcatgaatcaagcaagccactatgtagatctatttgaatggctgattggtcctatagctgacgttcaagctatgatagcaacactaggacgtaatattgaagtagaagactcagctgtacttaatgtccgatggcgtaatggagcccttggctctatggctgtatcaatgttaacataccctaaaaatcttgaaggaagcattacaatccttggagatacaggttctgtacgcataggaggagttgctgttaatgaaatacaactatggaactttgctgaacctaaagaatatgacgacctcgttacatctgtaagctatcaaacaaattctgtatatgggtttggtcatccattgtattaccaaaatattatcgatgtccttcgtggcaaggctgaacctgaaacagatggacgtgaaggtcttaagtcacttgaagtactcattgcagcatacaaatcagcaagagaccgaataacagtttctcttcctcttgaatattga

SEQ ID NO: 8894 - DNA, 1341 bp, Lawsonia intracellularis
atgtctctttgtttttcttttcttttgctttcagcttcccttatggtaacaagttgtttactcatttatatccccccgagtaaaatcatgttaatgggtatctctacctatcttatgataatttcgttcatccttataggggtcattattcaaaaatgtcttagacctattaataaactcatacaagatataaataagtcactgtcaaaaacaaaaataccttctctgaattactatacgtgtaaaaatgaaatgcatatattaaaacaaacaacatttgaacttataaaacaatttcaaaacctcaaacatgaactaagtatcacaaaagaaacacaaaaacagcatgaaatagaattatctactattattagtagctctaaaattaatgaacaaaaaatggctgctaaaataactcacttagaaacacttccagataaagctgttaatgtaaccaaacacgctcaagaaatactatgtaacctcacagcctatctttctaagtgtacagagtctgttaaaatgcaaattgtaaaaaatactccatcatctatatctatagaagatctatttactactataaatcaaaatctcgaatgtactgtaacaaaaattcagaacagttataaaaattcagaacaggatataaaaaatacaacacatgctattaattcaatagaacatgtaaatataaatatctcctctctacaaaatatcattatactcttacataaaaggattaatgatatacttttaaaactcacattacttgatagagtaacaaatcaaacaaacctacttgccatcaatttagcagtggaagcaggtaaaatgggaactccaggaaaaggtttttctattatagcaaatgaagtgaaaaaattatcacaacaatctatgtctacaataaagaaaattgaacaaactctttataatattcaaacacaaacagaacacattactagtgttatcaaaaaaatcaataaatataatacaacacatgtaaattatgctctaacatctgggaaaatcacattaaattttatcacaactatacaaaatacactaaaagaactttcatctctttcagataccatcaaagaaatagctaaaacacgtgtacccctcaacactacaaatgaagaacctgactctactttgaaagactgcgctctctctaatacttataccacactatgtgaactcgcagacgttttaaaagagctagattctaccttacataatacttcaaaacataatgcttcaaaaagtgaacccattacaaatcatacagtattaccaatacctatagctacaaataatatgcatatagctgaatag

SEQ ID NO: 8895 - DNA, 1044 bp, Lawsonia intracellularis
atgaataaaatagacaaaaacaacactgtacctcaaacagaagtaatggcaacatctaagattatacatccatcttctaacaaatctcaacgtcatccacttgaaaaaaacatccaacatcaacaaaaaatttctatagaattccgctcatcaacaggattacctcttgaagcaccacttgagatctcttctatatcattagtataccgaggagctattctttctgagtgtcatctcacagaaaatcataatactgacttgttatcctctaaaaaaatgcactgtttcgataacaaattatctgtagatatacttaaatatggaatgttattcactaatggcaccatatcttttaatgtgccatatcgacaccttaatcttaatgaactttctattattattcactatcgatcacaaaaacctgtaaaagtagatgttcttgttatacaaaatactcaggaatattactttggagaactagctgttttaaaaatatctagttgggaagagtctcaccttgctttcaataaaaatcctattcatattagcacctcaaatacacaaccagaacttctgatagataatatttcatgtattaatgaacataacgaaaatacattgttaatacacacaaatgaaaaattttgttttgtaattgactatacattaacaaataaaaatctctttgaacaaataaaacttttcattcttcttaaagaaaatacaactgcacatagtcatactattcttactcaagacttgaaatttaaccctttttctccaatagggaaaataatcactcctgtaaacttccctatactccctggcgaatatacagttacacttcttttatccaaaaaaggatattatcagtccaaaaaactaccgtttgaaaaaggtatacctacaacagaaggtctttaccttacctacctaacatataacaatatctctattaaagtagttgaacaaagtctagaatattcatcgcacatggcatattctttagaaaataatgaatggagtatctttgcttacaactaa

SEQ ID NO: 8896 - DNA, 411 bp, Lawsonia intracellularis
atgatagcattgactacatacttttttattctacaactaattttgtttgtagtattaagtattatagctgttaaaagtaatattattgttaaaggaaatcttttaataatgctctctgcgacattattagctacaattcctttacattatataggtcctcgtatcgcacgattatattctaatgaagtaaaaattgatactatgctagaattttttatttttactattctttttgcagggcttatacatcttatctcttttttatttaaaaaatatatttttaaaaaattctataagcctactaatgatacactattaagttttatttttgcaaatctttatcctgtatatgctgctctttttgctattattctttttttttggaggaagcatgattggtttccaaaatag

SEQ ID NO: 8897 - DNA, 882 bp, Lawsonia intracellularis
atggtagaaactcgtgttagaagctcgttatactttatcttaggatcgttatgccttggagtaatagctactattcaggttttagttcctgaaaatatttctccattactgattggtgcaatgcgaataacaggtggtgccgtaacattacttttgtggggaatttttactcatggtcttccaacagctcgttattggccgataataccaacagtttgcgcagctcttgggcttattgcttttcaaatgacattttttgctggtatagataaggctggaatatcccttggcacatctatacctattggcattgttcttttagtatcaggactgtctgcaaaacttttttatcgtgaaaaagtttctcttcaatggattatctatacaattttggctttgataggtcttggttgtataattgctactagtagcagatggcatacaaacaaagaagctattattactgcaagtattgctggtattggttatgctttattccttgtttctagtaaagtattggtccgttttcatcgtgctgaaagtgtgatgactgtcttgtttactattagtgcaatagtactcttccctatttttttcatagagccatttagctggccaggaaaaggttctactgttctcctttcgttaatacaatttgctattataacaacagttattgctttttctctgattggtatggggttaaaaaatattacactttctgtatcttcaacactttctgttgcatgtacttttatggctgtatttttaggtatttttttcttggaagtacatcttagtatgcaacttatttttggtttaatattgttattagtatgtattacaatgcttgtaagacgtgagagaagaaatcctttttaa

SEQ ID NO: 8898 - DNA, 1398 bp, Lawsonia intracellularis
atgagaagtgttaacttgttagctttcctctgtgtatctattactttttttggattacttaatagttctttttcttatggctctcaagaacaactagcacaaaaggagcttaaacaactacaggacaaggttgttagtattcttgaagaaaaatgtttatcttgtcattcatataatgcagagttaccgttttatactaaaatcccaggcattaaacagattattgaaaaagactttaaagatggtctgcgagcatcagatttaaatcaagattttattgaagcttctaaaaaaggtataatagatgaagcaactgtagctaaattagagtgggttatagaaaaccatacaatgcctccagcaaaatttacagctgtccactggggaagtagagtttcaaaggaagatgaaaaaattattcttgaatgggtaagaaaatatcgtaacacatattatgcaacagggttagcgtctccagaacgctctaatgaacctattcagccaattccagatactattccttataataaacaaaaagcagcattaggagaaaaactttttaatgatagacgattatcccatgataatacaataagatgtgctagttgccatgtaacaagtgagggaatggcggatggcaagcagtttgcgacagggatcaataagcaaaaaggacatgttaatgctccaactgtatataatgctatttttaacactcgtcagttttgggatggacgtgcagcaaatctccaagaacaagcttctcagcctccattaaaccctatagaaatgggaagcactagttgggatgagattcttgggaagttagctaatgataagaaattaacagaagagtttttggcagtttatcctgatgggtggactgaaaaaaatgttacagacgctattgctgagtatgagagactatttattacacccaatagcccatttgatcgttggcttaaaggtgatgatacagcactaacctcagatgaattgagaggatataaactctttaaagcatacaggtgtgcaacatgtcatgttggtaagtcaatgggtggacagtcctttgaatacatggatcttaagaaagactattttgcagaccgtggatatgttgaaggagttgatgataatggtagaatggcctttacacatgatcctagggacttgcatcgatttaaggttccaaaccttaggaatattgagatgacggctccatatcttcatgatggtactgttacaagtttagatgaggctgttcgcattatgggtatctatcttgtaggaatggatattcctaagtcagatagagattctattgtgttatttttgagaacacttacaggtcagttcaatggtcaaaaagtccttggaacgcctgtaccacaataa

SEQ ID NO: 8899 - DNA, 2097 bp, Lawsonia intracellularis
atgaagcttggttataagataagtgctggttttgccattggaatgatcatggtagttttgatggggatctatgtttctcaagaactaggaccttctagcaagactatggaagttatagataaagaaacatcacagataattgaaattgcttccaatatgctcacacgttatcaagaagctatttattatatgcgaggattttatgcttctagaaagcaagaagactatgatcgctgtataaaagaacttaacaaagctagagaatatctcagccaagccaaaaaatttgcttctacgtctacctcaaatcaataccttgaaaaagatatcaatgaaataggaaaaatctttacagattatgatgttgcagtaaaaaatctgtatagtaaatctatggactttaatgaagaatcctctaaaggtaccaatgttatccacaatgtcttccagcaatatagtcaaattgtatcaataatgaacaagcaatacgctaatgatgacaatgcactgttatactattcagagctaggaactttaatgatgcaactctatctccttcgaggcgactattctagtgcgttgagggaacaagatattgataatttgaaaaaaagtactcaaggtattgatgagcttatgaataagctatctatatttaaaaatcgctttagagcagaagatatgcgtaatggacttcaaacattaatcaggtctataggagtatataatcaactcctaaaaaaccttgtttctatgactgaacaaagcaaagtagatttagattatcgccgtcaacttgctgatgccttaggtgaaaaactaatgaagttaacaaatgacaatctctcaaaaattcaaacagaagctacatatgttaacacacgcctccaacgtgcaaatggacttatttttattattactggaatacttcttcttatcacaatcgttgtgtcattcattgtcacaaggagtataactaaacctgttacccaaacaacactatttgctcaaaatgttgcagcaggacatcttgatcaacatctaaagatcacctcaaccgacgaaataggacaacttggtatagcattaaatacaatggttgactctcttaaagcaaaaattcttgaagctacacaacaaagtgaagctgcaaaacgtaaagaagaagaagcaagagtagccactgctaaagcagaagaagcccttaaaagagcagaacaaggtagacacgaagggatggttacagcagcagggcgtcttgaagatattgctaatgtcatttcttcagcttctacagagctttctgcacaaattgaagaatctggacgtggtgctaatgagcaagcagctcgagttaaagaaacagcaacctctatggaagaaatgagtacaacagttgtagaagttgctaaaaatgcaagtgaaacatctgatatttcttctcaaacacgtcaaaaagctattgatggtgctgatattgtccgaaaagttattcaaagtatagaaactgtgcataatcaatcccgtgagctaaagtctgatatggctgtcttaggcgatcatgcacaatctattgatcaaatcatgggtgttatttcagatattgctgatcagacaaacctacttgcactcaatgctgccattgaagctgctcgagctggtgaagctggtcgtggttttgcagttgttgctgatgaagtacgtaaacttgctgaaaaaactatggtatctactactgatgttggcaatgctattaaagctatccaagaaagtgctacacagagtatgtctcaagtagattcagctgttcaaaatattgaaattgctacaaccctggcttctcagtcaggacttgctttagatgaaatcgttcatatggtagatgcaacagctgaccaagtccgtgctattgcaactgcttctgaagaacagtcagcttctacagaagaaattaatcaatccatttctgaaattaatcatattgctacagaaacagcaagggccatggatgaagcttcacaagctgtttctgacttagcaaaacaagcacagtctcttgcttcacttattcatgaaatgaaaaatcctatatcttaa

SEQ ID NO: 8900 - DNA, 657 bp, Lawsonia intracellularis
atgagtcgtgtttcacttatacatggtatagattacaatttaccgctatcttttttaagtaatatttcattcaatatacgaaaacgtatatttaaacggctaaaaagttatattgatttctcatcactagaacatgttcttgatataggagttacatcttataaagataatgctgaatcaaacttttttgaaaaattatttccttatcctgaaaaaattgttgcactttctaaacaaaacgcctcttggttagagaaagaatacagtggtcttaaatttgtctatggcgatggctgtaaacttccttttaatgataatacatttgatcttgtcttttcttcagcagtaattgaacatacaggctgtacttcacaacaacaatcttttatcaacgagtgttacagagttgcaaaaaaatatgtttttcttacaacgccaaatcgctggcatcctttagaatttcattccctacttcctttaatccactggcttcctaaacctcttcataggaaattacttaaccttttaggatataaagaactttctcaagaacaacaccttaatcttctttcaacaaaagagttaaaaaatctctgtaaccaactacagcatatatatatatacaaatcatgtaaaattcttaggctttccttctaa

SEQ ID NO: 8901 - DNA, 1437 bp, Lawsonia intracellularis
atgtcatatatgaatacaacatgggaaaaagtctgtgatagccttcaaaaaaggcttagtccaggaacgtttaaagtttggattgctccattagtagcttctgaacacgatggacaattatttctttatgctcctagtctatttgttatgaattggattcaggagcgtctttttgtagatattactgaagctgtgagtgaagtttcaggagggactatgaaagttcagattgaagtaaaatctagtgtcccagacaaaccacaagtttctttaactgattataataataaacaacatataccatataatggttttcctaatactaaagtttctatttcaagaagtcatatatcctctcaaacagaacagttacctttacctgtttcattagttaaagctccattttctagtcgttcatggcgttatagttttgattcatttgttgttggtccttgtaataacttagcccatgctgctgcacaaaatatgattaaagatacagcctcagtagatacgttatttttaagttctggtccaggtcttggaaaaacacatcttacacaggctgtagggcaagcactttgtaacatatctaacagagcaaatccaaaagtcgagtatctaactgcggaggagttttgttcttgttttgtgcagtcattacgaacaaaaaatgtcgattcttttaaaggaaggtttagagatacagatcttttccttttggaagatatacattttttacaaggtaaagagaagatgcaggatgaattgttagcaactattcgatcattacaaggacgaggaagtcgtgttgttttaacaagctcatttgctcctaaggagttaaaaaatgtcgataatcgcctggtatcacgattttgctctgggtttttagctggaattgaaaaacccaatgctgaaacacgtcggcgtattttaatagaaaaagcaaaagtacatgctgtcgtgttatcagaggctgtagctgattttttagctatgaagcttgtaggagatattcgtcagcttgaaagttctatttctaaccttgtacttaaagcaaagcttttggattgtatgatctctatggatatggctaaagatgttatagctcaatatacacaagatgatccatttatgaatatagactctattatccatgcagtatcaggaagctttggattacaagctgagaagctttattcacgtagtcgtaaacaagattttgttgttgctcgaaatacaattttttatcttgctagaaaacatacagatatgtctcttcaggagattggtgatcgttttcatagaagacattcaactgttttaaaaggaattgcttctattgaaagggaaattcaaagaaagtcacctactggccgtcagattgctaatacacttaatttacttgaacgtactaacattcatttaaattga

SEQ ID NO: 8902 - DNA, 1080 bp, Lawsonia intracellularis
atgtttgccaaacttgaaaatctagaacaaaaatttatagaaattgaatgtagtcttgctcaacctaatatttttaatgatcaagaacaatatcgaaaactaacaaaaacacattctgacttaaaacctatagtcactacttttcaacagtttaaaaaactccaacaacagcttagtgaaaacaaagaacttattagtgatattgatcctgatattcaagaaatggcacttgaagaaataaaaaaacttgaattagagttaactcatcttgaatatgagctaaaaatattactattacctaaagatccactagatgaaaaaaacattcttctggaaattcgtgctggtacaggaggtgaagaagcagcactatttgcagctgacctttttcgaatgtattgccgctatgctgaaaaaatgcattggaaagtagaaattatgagtcaaagtgattctgatactggtggatttaaagaaattattgcacttattcaaggagacaacgtatatagtcgtctaaaatttgaatctggaacacatcgtgtccagcgagtacctacaacagagtctcagggacgtatccatacttctgcagcaactgttgctgtattaccagaagcagaagatgtagatattgaaattcgtcctgaagagttacgatttgatgtttttcgctcatcaggccctggaggccaaagtgttaatactacagactctgcagtacgtgttacccatataccaacaggtattgtagtcacctgccaagatgaaaaatctcaacataaaaataaagcaaaagcactaaaggttctctcttcccggttgttacaaataaaacaggaacaacaagaaattgaacaagctgatgctagacgtgctcttgtaggatctggtgatcgttcagaacgaatccgtacatataatttccctcaaggacgagttactgatcatcgtattaatctaacactttatagccttataaaggttatggaaggtgaaattcaagaatttatagatgctcttagtactcatgcacaaacagaagcattaaaaatgcaagcaactcaaatagctagttaa

SEQ ID NO: 8903 - DNA, 315 bp, Lawsonia intracellularis
ttgtttattgtgttgagcatattttttacggaagcgatcaattctaccagctgtatcaataaaacgttgttttcctgtaaaaaaaggatggcaagaggaacaaatttcaacctgcacattttcacctttggtagaaagggcttctatactaaagccacaagcacaagtaatagttgctttataaacttgaggatgaatatcttttttcatagagtacacctttcagattttgaacaaatatacatatactattttgttatgactagcaagctaatatttatgtgttatattatcactatatatttttataaataa

SEQ ID NO: 8904 - DNA, 756 bp, Lawsonia intracellularis
atggccaaacataaagtacgtgctgatgaacttgtttttttacaagggttagcagaaagtcgtgaacaagctaaacgacttattatggcaggtaaggttacattaactaataattctacaactataccattacgtttggaaaaaccaggacataaatatccattagaaagtatctgcagtttaataggggtagaacgttttgtgagtagaggagcatataagctattaactgctctagatttttttaaaattgatgtaaaaagttgtatttgtcttgatgcaggcgcatctactggtgggtttacagattgtcttttacaacatggagcatctaaagtatatgcgattgatgtaggcaaaggtcaattacatgagaaactgtatactaatgaacaagttataaatattgagggagtgaatttacgtacagcatctaaagatcttattcctgaagaagtagatattttaactattgatgtttcttttatatcgcttactttgattttaccgtcatgtatacgttggctaaaggcttccggaattattattgccttaataaagcctcaatttgaattatatccagataaaataaaaaaaggtgtagtaaaagaaactagcttgcaatatgaagcagtagaaaaaattattcatttttgtcaatcagaacttggacttatatttattggtgttgttccgtcggtaataaaaggtccaaaaggaaatcaagaatatcttatttacttgaaaaaacgttaa

SEQ ID NO: 8905 - DNA, 543 bp, Lawsonia intracellularis
atgaaaataaaactattttttgttacttcaatagtaactatttctctcttaactagtattactagtgtagtattagcatgttctgttacttcagaagtccatatgattgatgacaatggaataaaacagagtataggcacagtaacttttactgatacagataaaggtctacaaataaaaactgatcttaaaggccttcctgcaggagaacatggttttcatatccatgaaggaggatcatgtggacctgctgagcatgatggacatctaacagctggactccaagctcatggtcattatgatcctgacaaaacaggaaaacatgaaggacctcttggtaatggacacaagggagacttacctagacttgtagttaaagctgatggaatagcaaaagaaacactcttagctccaagattaacagttaaagaaattaagggtcgtacagttatgatccatgctggtggtgataactattcagataaacctcttcctcttggcggtggtggtgctcgtatagcttgtggtgttataccaaactag

SEQ ID NO: 8906 - DNA, 270 bp, Lawsonia intracellularis
ttgtataaaaaaagagaggtatctggcaagtattacttatttattttattgaaattttttgaaaaattatttttttcttacttattaatttttatagataaactcaagagaacagatttattttatattttaactactttttttgagaggtttatactttggttaattgaagttttttctataatgtataattatcttatgatacactatacccttttttatttcccatatattttggatcttcatgttattattcattttatattataa

SEQ ID NO: 8907 - DNA, 1599 bp, Lawsonia intracellularis
atgagtgataaaggcaagacaggtggatctatgccggaagaagattttacaggctggcgtgctatcctttggccagtatataattttgagttaaaaaagtttttgccaatgggtttaatgatgttatgtatcttatttatctacaggttagtccgtgatataaaagatacattaatggttagtcaggcaacaggcggtggtgctgaaactttaggttttcttaaactttggggtgtaactccttcagctattttatttatgataatctttgttaagcttgctaataaattaagtaaagcaaacttattttatacaatagtaagctttttccttggattttttgttctatttggcttggtaatttatccactgacagaatactttcatatgagttatgaaactatttctcaccttcagactacaatgccaagattatattgggtatggccaattataggtaattggagctatgcaattttttatattctttcagaactttggggtagtgtagtattatcagctctattttggcaatttgcaaatgaaattacaaaaattagtgaagcaaaaagattttatagtctttttggttttgttgggaactttggactattagcttctggttctataattattatttgtgctaatatagcaaaaaatagtgctgtagacggaacaatagatgtatttggagaaagtttaaagtatcaaatgttagctgttctgttttttggtcttctattactttatttgtatagatggatgaacaaaaatgttttaacagatccaaagctttatacacctggagctggttcaaagaaaaaatctaaaccaaaactagggttaattgaaagtacaaaatgtattttaacttcaagatatcttttaatgatatcggcactagtcattggttatggaatttctattaatcttgttgaaggagtctggaagggacaaataaaactactgtatcctgacccaaatgattttaatgtcttaatgggtaaactggctctaacaacaggttttgttacaattattatcatgttaattggagctaatattttaagacgtttttcatggagaacagcagctctcattactccaatatttttaatggcaacaagtgttattttctttggcgtcattatttatgagaataagatgggtcttgatgctaccttatggggatttggtgttttgctacttgctgttgtagttggtttaatgcagaatgctttttcgaaaggtgtaaagtattctctttttgatgctacaaaacaaatggcttatattcctcttgatcctgaattaaaagttaaaggtcaggcagctgttgaaattcttgctggaagacttgggaagtcaggtggagctgcaattcaatctattatgcttctaattataggtggaaatgtaactttagcaagtcaagtagagttcttaggatcagctgtactagtagtagttgctttttggattatttctgtatttggtttaagcaaacaatttgaaacattacagtctgagcaacaagctgaagaggctaatagtaaagaaaataaagaagttaaagatggtgagctctgcacaaactaa

SEQ ID NO: 8908 - DNA, 240 bp, Lawsonia intracellularis
atggaaaactttttgcaatcagcaaatgaagggtattttattattgcaatgatggataaagattatatttttgcaataccttttgagaaattaacaaatattgttccatatctaaatcataaaatagaagacaaacatctacgttatcacttagctctctataacgataatgatacatttgtcttaaatctaccattaaaatctaaggttatgagcttagaagagtttaagctttcttaa

SEQ ID NO: 8909 - DNA, 735 bp, Lawsonia intracellularis
ttgataattcaggctttgtattacaagatattacaaatgaacttggaagacgacttggatataatgtcaaaaatggtctttatagaggtaaaaaaaaacgctattggttttgatggaatttggaaaatagatgggtcacgggatattattattgaagtaaaaacaacagattattataatatacggcttgatcaagttttttcgtataaaaaacaatgtattactactaataatgtatcacaagatgcaatggtactatttgtcgttggtagggatgattcaaatagtttagaagcacaaattaggggatctcgctatgcatgggatgctcgtcttattagtatagaagctcttcttagccttgtttttattaaagagaagacacaagatataaatacattggaaaaaatacgagctcttattgaacctatagaatatacaaggcttgatagattagttgatgttgtctttcttagtattgaagatgcagaaaaaagtgttgaaaatgaaataatacaacaagaatttaataattcacagtcagatactgatttaattaatgaaccttgtcaacaaccagctgaaactactagtaatccaatagatactgtattaaaaaaagaaagaataaccaatcgtacacctatagagttgattgaagagaaacgtcagcaagctattactattttagctaaaaataaaaatacaatttttattaagtatagaagaacataa

SEQ ID NO: 8910 - DNA, 306 bp, Lawsonia intracellularis
atggcattactcaatctttatgaaggtaattccagtaatgtactctctatgagtatcaaacaaattgttactatggctggagatggtaacttaaaggataacaatacaacatcactagagctacgacaatttttatctaaaattcaaacaaaatatttctctctttatattaaagactgtttagaatcatcctttgataattcaggctttgtattacaagatattacaaatgaacttggaagacgacttggatataatgtcaaaaatggtctttatagaggtaaaaaaaaacgctattggttttga

SEQ ID NO: 8911 - DNA, 960 bp, Lawsonia intracellularis
ctgctattcagcataagacatataatattacattggaataatcattttactatgtccacagccaaacagaaaataaactctgatctaccaacacaacaacaagcaacagaagcatttactttagcaacagcccaaactcagcataatgttagaatattactaaataatatagctagtaatcctccacaggcacttattattgaaggtggaacattagatgaacgattttctattgccctttggtatgctgctcgactaaattgtatatatggaacaccttgtttaacttgtccaacttgcttacaaattggagcaaagcttttccatgatcttttcttattacatggagcagaaggaagtataaaaattgatgacatccgtaaattacgaacagtttttggagagcctgcccatagtaatgggaaaaaagttgtcatacttgctgaagctcaacatctccgtactgaggctgctaatgcactacttaaatcactagaggaaccacatccacaaacttgttgtttgctacttgtaccacaaagagaacaacttttaccaacacttgtttctagatcttggacaataacacttccatggacgtcagtaatgacttcatcctcctcagagctaatagaagaatgggaagaaaaacttactacttttttaataactggtaaaaattggtttaattttaccacaaataaaaatgtagtcgaagcctcattagtacaacatattatttcattaatcagaaaaacaattgttttatcactaaaaaaacaaagaaaaaatcaacttgtagaatgtttatctatattatctcctgtagattttcttaatttacaagatatactttcacaaagtgaatcagctctacatattatggtcaaccctacacttgtgttaaatagactggttacacatatataccttgcatatcataatgccttacagttataa

SEQ ID NO: 8912 - DNA, 3036 bp, Lawsonia intracellularis
atgatcccttctattttttttgaccgccaagaccgtgaactccttcggatgataaacgacacccttgataatatccactctgatataaaacaacagccaacaattgatattaaccttcatccacatggtatccttgaacttacaacaacaagagaatttcgtgtagcccatgctgttattaacctcttaactaatattgaaaaaggtaaagcaaaagataggctatatgccctccaagcattacacgatgaagttctacatagtgctcgtacaacctttcgctataatactggtcgtgtacttatccaaattatgaaagatatcgtccgctctagacatgatgaaagtcaccaacttaaacttgtgcatgactttagacgaactgctgaagggaatccaaatatagtaagaaaaatgcttactaaacaccacttattagaaatgccagaaaagtggaatcaactaactatggatcaccatgtgcatgattcaaacacaaaaggacgaaaaaatgcaacacatcttattatggatgcatgggttaaaggtatccgtaaactcacagttgtttactataattatgtggagccagaaatcgctcgggaagtattacaagcagcaagtattgtaggtattatcgtccgtattggtatagaatttcaaattcctttccacaatcgttttataagagttgtttgggctcctcgtggtttttcagatcctgaaagttttcttacgtttttagcagaaaaacctgtgtatgaactcatggaaaaaggaaaacaagtttctcaatggatgcaacaaaacgtattaactgtactaaatatttggaacacaaaatatcgcttagaacttgctaatgaattagaaattattatacctgaaattcagccacaagaattccttgcatttgtaggacaaggacagacatctctattacatcttactgagtgtatccataaacaacttttaccacttttatatgaaaaaacatcagctttaaaaaaagaaatgctaatagcaactcctgagcaggtagaacaaattacgcatcatattcataaaatgaatatgataactattgaatcaattagtgaacggtggatcacacctgataacaatcctgaaattgctaacctctttactcctgaccatcccactcaactgccagaacttttaaaattatccccctataatttgcttaaatatgtatctagcctaagaagtggatatcgtataacactacaacttgcaaaattaacagctgaagatgtccttgaactcttatgggactgtaaaggaatgatcactcatttagaactttttaaccttaaagaatggcaacaaggacatcttattcatttagctgcaattaatgaacttcaattagcaattaatgatccaaatatattacgtcttaaacagcttcttgtaagtatgattcgaagattagaattgttaaatacagaggcaagttacaagcgttataaaaaatttatagttattttgcgtaacttaccaatattacaagctccttataagataagtcctctacgtagtcgtattggtacagactcaacaagtaactcaaatttacgacatggtatgggtcttgcagcaccacaaacattacctgcaagttcaagaagagttttagcaaaaaaacaattattcaatcctatgatccttcctgttcatgtaccattagctttccaaaaaacttggatagttactacaaatactgaaggaattaattataaaattctttcttttcttagaaaactacctggcctcagaatgcttggcagacaaaaaaaagaagaatggcaagcacttgctaatataaaaattaaaccctatggtaatatcattgcaatgggtggaataggctctttaccagataatggtatttaccttagaaaaattgataaaaaaaaacaaacaaattcatggccaaatatcacctatctcaatacaaaatgtgcaaatctgttaaaaattattataggttttgttcctgcaacactagctttcctctatactcaagagtggtgggtacttgcatggtttggttcaactatttggtttgttataacaggaatacgtaatatcgcccaagcaatactaggtggtggaagcttctcaaaaacttctttactccgctggaaaaactttataagttggagtagaatttgtgattcattaatgtatacaggcttatctgttgttttgcttgaacttattattcatgacttaatcctacaaaaaacttttgggttcacgttaagtaatcattacatcattgtatttacagtgatagctatttgtaatagcctatatatagctggacacaatattcttagaggctttcctaaagaagctattattggtaatttatttagaagtatttttgcagttccactctccattctttataatgatatccttatagaatcactgttactttttaatattgcaaatcctttagcagttcttcaaccaggtgctgcaattatttctaaatctgcctctgatactgttgctggtgttattgaaggatttgcagataaaaataataactatcgacttcgctcttgggattataaaaccaaattagaacatttttttaattggtatacaaagttagaattacgctttcctgatctagatatattatttctactttcaaagccttatgaactattcaaaattacttcaaaagaagctcctgaattacaaagagaaagtattattaatgcattagactttatgtatttttggatgtatcaaccttatgcacaacaaacatttcgttccatactgaatacaatgacaagagaagaaaaaattatccttgctaaaggtcagaatgtgcttctgcttgtccaagaagtcagtcaactctttatagatggatacatgggtaaaaattttgctcgtgccctatctttttatcttacatctcatgaaacatatattaactctattgtaactgctattcagcataagacatataatattacattggaataa

SEQ ID NO: 8913 - DNA, 798 bp, Lawsonia intracellularis
atgattaaatctctcacaccatttagccaatcttcatataagactcctcaaaagtctattccaaaatttatacaacaattccctaatattggttatcttccaatattatggatcattaccaaaggtggtatcaaagcttattttaaaaaatatacttctgaatcatgggttcaatcaagtaaagaagtttttagtgttttagaaaaggttggctgtcaattcaatattgaaggattagaacatatacataataataactccccttgcattattataggtaatcacatgagtacactagaaacatttgttcttccttcaataattcagccatacaaacctgttacttttattgtgaaaaaaagtttaattagttatccattttttggaaaaattttatcttcaagaaatcctattattataaagcgccaaaacccaagggtagatttctcaaaagtacttgaggaaggttcaaatcacctcaacagtggaacctctcttattatttttcctcaaagtactcgatcacatacctttctccctgaaaaatttaatagcataggtgtaaaacttgcacgacgtactggagtgccagttatccctttagctcttaaaacagatgcttggggtgaagggaaattgataaaggactttggaccaatcaatcctcaaaaaactattcatttctcatttggtgctcctatttatgtatcaggaacagggaaaaatgaacacgaaaaaattattctatttattaaggaaaaaataaatgagtggaataaacttgacaacctatcttaa

SEQ ID NO: 8914 - DNA, 1233 bp, Lawsonia intracellularis
atgtctcttacaccattatctgaaaagttacgaccaaataacttagatacttttattggacaaaatcatctattagaacgattacagtacattatatctgccccacgtttgccaagcctccttttctttggtccacctggttgtggtaagtctactttagccttactattagcatataaaaaaagtacaaatattcttcgtattagcgcaccagaaacagggatacaacaattacgccagaagcttactgatattgatattcttattttagatgagatacatcgtttttctaaagctcagcaagacttctttttacctttacttgaatcaggtaaactaacaatgcttgctacaacaacagaaaatccatcatttagtgtaacaaaacagcttctatcacgcttaaatgttctccaactacgacaattaggatacaatgaattaaaagaacttgttaaaaaaggaactctttttctcaacatactattaccagatgatgttataaatttccttgccactaccgcacatggtgatgcacgaacactatttaatcttattgaatatatatcaatactgcctgaagaaaaaagagtacttgaatatattaagataaacctacctgaaatccttgaaagacatgataaagatggagatagtcattacgaatatgcatctgctcttattaagtctattagaggaagtaatcctgatgctgcactatattaccttgcatgtttattggaaggtggggaagatccaagatttatctgtagaagacttattatatctgcatcagaagatataggattagcagaccctcaagcattatccttagctgtatcctgccaacaagctgtagagtttgttggtatgccagaaggattcatacctctttcagaaacagttgtatacttagcattagcccgaaagagtaactcaacttatgctgcttatagtaatgccgcaagagaagttcgacttcatggggcacaacctgtcccattacaccttcgtaatccttctactcaactacaaaagcaatggggatatggtagagaatataaatatcctcataactatccaaatgcctgggttgaacaagaatacttcccatcaaccattagtaaccgcagtttttactacccaaaagaacagggagaagaacctaagttaaatatgtggcataaccatataaagaagaaatactctataccagaagagagcccaaaatga

SEQ ID NO: 8915 - DNA, 528 bp, Lawsonia intracellularis
atggatagaaaaataatttttactataaatcaatttgaaacagctatagttaacctgtctcaagaacttatagacaactatataacatttgataatatactatttattggtattcaacgtcgtggtgtaattttagctaaccgtctacaaaaagttattgtagagaaaacaaaacaatctccacttattggcaccctagacattaatttctatagagatgactggacaacacgtcaactccatcccatcatcggagaatcatttattcctactattcttgacgataaaacagttattcttatagatgacgtaatatatactggccgtacaatacgagctgctttagaagcacttaacaactatggacgtcctacccatgtcaaactccttacacttatcgatcgaggtggtagagaacttcctattcaacctgactatataggttacaccactaatataacaagccaacatactattaatgtacttgtaaaagaaattgatggagaagatgcagtgttactagaataa

SEQ ID NO: 8916 - DNA, 783 bp, Lawsonia intracellularis
atgatagctaaaaaaaatacctcttttggagagatagaattaccttggtctaattataaaacattttatcttgctcatgaacattggcaagagccttatatattaaataaaaaagaatcgcatcatcttttgcatgtattgcggattcaaataggtacagagattcatgtattagatggaaggggaagagaaggattattttctgttaaagaagtaataaaagatagagtaagtctctcttacattaatgactggatgcatcctgaacccacaagaaaagttgttcttgcagcaggatggacaaaagcagcaagaagagggtggttatttgaaaaagctgctgaacttgaagcatgggctatttggttttggaaagctgagaggagtcaatttccattatctgaagctaaaaaagaatcttggcaaggtcagattattgcaggagcaaaacaatgtaacaatccgtggtttccttcattacaattatttccaaatggtatagaagaacttatttataatgtagatacaataggttgtgattttcggcatgtattagttgaaaatacttgtggaccagcacaacctcttacattagatatgcttaagcaaactggtttaactatttgtgtccttgggccagaaggtggttttacacataaagaaatcctaaaactaaaggaagcatcatttttgtcgttgacactaggagatagagtattaaggtgggaaactgcagctatcctttgtcttggattgcattggtggaaaaaagtatattcctaa

SEQ ID NO: 8917 - DNA, 726 bp, Lawsonia intracellularis
atgtctcagaatccacatatagagacaacccaacatgatagatctattaattctatgtttggacgcatatcaagatggtatgatcctatgaatagaatattaagtggtggactagatatttattggcgtcattgtcttgttgaagctatggaacctggaaaaacaggccgtatccttgatcttgcagctggaacacttgatgtggctattgcattacacaatcggtatgagcaacttcatatttctgctgtagatctctgcttttctatgctatatcaaggaatgaaaaaactccatagagctaatattacaagagtatggccaataacagcagacgcaaaacttttaccgtttcctgattcttgtatagatggagtaacattagcctttggtatccgtaatattgtccctcgtacaaaggctttctctgaaattgcgagagtcctactccctggaggacgcatggctatacttgaatttggaacaggaaaacaacgtatttggatgggattatataattattaccttacaaaaatattaccatttattggcaaactctcgagtgacccttcagcatatctctatttaaaacaaagtattatggatttccctcatcctgatgaattacttgatgaaatccgtgcagcaggctttcatcaagcttattatactcccttatcttcaggtattgtacacctttacattggagaaaaagctaacaagtaa

SEQ ID NO: 8918 - DNA, 1272 bp, Lawsonia intracellularis
atgacaagtgctaagtcgaaaataagtttgcctgtccaaatgattattggattttttcttggtattatggctggtattttcttatctgaagagatcacatcaaactatttacgtccacttggtcaattattcataacgcttattcgaatggtagttgtaccacttgttcttgctactattgttgcaggcgcagctggtattcacgacatcaataaacttggtcgagttgcgactaaaacacttatttactactttgcaactacggctattgctatcactattggtcttatatttgcaaatttctttcaaccaggagttggttttaatctttctatagctactacacaatcagatatggttgaaccaccaagtgttattcaaacaattattaatattgtacctcttaatccaatagaagctttggccaatggtaacatgcttcaagttattttctttgcagttatgtttggttttgcccttagttctcttggtgaagttgggaaacctctattgagaagttttgagcttattggagatacaatggttcgcatgacaaatattgtcatgatgtatgcaccaattggtgtctttggcttaatttcatatacaattagcacacatggtgttgatgttctgttacctttaagtaaatttatgcttatagcttacttagcatctattgcacatgtattattatgttatgttcctcttattaaagctacaggtctaccagtaatggctgtatttaaacgtcttatggaacctacatttattggctttacaacttgctcaagtgcagcagtattaccaacaaatttgcaagctgtaagatctcttggtgcatctaaaggcatatctagcttttctataccattaggaaatactataaacatggatggcacagctatttacatgggagttgcagctatatttgcttctgagatatatggcatacccctagggtttgaaaaacaacttatggttgttctcactggtctacttgcttctataggtactgcaggcgtccctggtgctggacttattatgattacacttgtattcacacaagtaggaatcccattagaagctgtaacacttattgctggaattgatcggatactagatatgataagaacagctgtaaacacctttggtgatgctgttggagctttagttgtctcaaaacttgaaggagatcttggtacagaaccttttgatgaaacatgtgaagtaagtgctcttagtactggtactgaaacatacgaaaattag

SEQ ID NO: 8919 - DNA, 510 bp, Lawsonia intracellularis
atgtataatcaaatattaacacatcccaaaattgttactctaacaaatttacttccaaaacttgaatatcttaaaagtaatgggaaaaaaattatctttacaaacggttgttatgatattcttcatcctggacatcttgatcttctgactagagcaaaaacatatggagatattctggttcttggattaaatactgataactctgttaaacggttaggaaaagatccagatagaccatttaatcctttccatattcgtgcttttgtattagctcatcttgaacttatagatttcattattggttttgaagaagatacaccattacaattaattgaagctattcaacctaatgtactagttaaaggtggtgattggtgtgtagaacaaattataggtaaagagtttgtagagcgcaataatggtcttgtattaagtcttccttttcttgaaggacattcaacaagtgggttagtacaaaaaatacgtaataaaaaatctaattctacataa

SEQ ID NO: 8920 - DNA, 1008 bp, Lawsonia intracellularis
ttgaggaggccatctctaatgcatcagtctatgccactacgtacagtttctgggatgcgtcccacagggaggttacacctaggtcattattttggtgctatcaaaagttggttatctatgcagcaagaaatagaagcacttttttttgtagcagattggcatgcacttacaagtgattatgctaatacaacccacttaaaagaatacatatatgaccttgttattgactggcttgcatctggaattgatccacatcaaagtattatttttcaacaatcaaaagttccacaacatgcagaacttaatcttctacttggaatgatcactcctttaagttggttagaacgtaatcctacatataaagagcaacagcaagaaatcactacaaaagatttgggaaattttggatttcttggatatccagttctcatggcagcagacatccttctttatcgcccacagttagtacctgttggtcaagatcagcttcctcaccttgaacttacacgtgaaattgctagacgatttaataatctatatggcactattttcgctgaaccaaaagcaaagctcacacctactgcaaaatgtccaggacttgatggacgtaagatgtctaaaagttatggaaatgcaatttttcttaatgattcttttgatgaagtcactcataaagtcaaaaaaatgtatacagatccagcaagactaagaaaaagtgatccaggtaaccctgatgtttgcaaccttttcccttatcatcaacttcttacaactccttacatccaagatgaaattcgtgaaggttgtgtaacagcaacactaggatgcgtagaatgtaaaaaaatattgttacaaagtttaaaagaattccttaatccatttcatgaacgtcgtgcaacctatgagaacaaaaactacattgatgatctgctaactgatggtaaccaaagagcaactataaaagctgaagatacaatgaatcttgtccgagaagctatttataaatag

SEQ ID NO: 8921 - DNA, 675 bp, Lawsonia intracellularis
atgtttgaatttgatattacaaatgctattaagcgaatagcagtagcttttgttcctcttgtcttaggaatcatattacatgaagttgcacatggatgggttgcacaacgacgaggagatccaacagcagcaatgttaggaagaattactcttaacccaactcatcatattgatccactaggactcatggtctttactataactagcctaacaagtccatttatctttggttgggctaagccagttcctattaaccctagaaatttttatgatctccgtaaagatactatgttagtatcctttgcaggccctgcagctaactttcttctagcctttacctttggattgttgttacgaatctttctagaatttttccctgcttatgaatggcagcagtcttctgtatggacttatttttttcttatgttctcaagtggtattatcatcaattttactcttgcttggcttaatttactccctattcctcctcttgatggtagtaaaatcctctgggcaatactccccaatgaacttggctataaatatatgttagcagaacgatatggttttgttatctttattgctcttcttttaactggtttactaggatatattttatacccacttattaatctatcgctcatcctttgcaccttattatttggactaaattaa

SEQ ID NO: 8922 - DNA, 1197 bp, Lawsonia intracellularis
atggtatctattgatgatcaactacaacttataaaacgtggttatgttgaacttataaatgaagaatcattacgcaaaaaacttagtaatgaaaaacctcttgttgtaaaagcaggctttgatcccactgctccagatcttcatcttggtcatactgtacttattcacaaattacgacactttcaacaacttggacataatgtcacttttcttattggagactttactggtcttattggagatccttctggccgatccactactagaccagcattaacagttgaacaagtacaagctaatgcagaaacttataaaaaacaaatttttaaaattcttgatcctcttaaaacaaatgtagttttcaattctaaatggctaatgtctatgtcatcagtagactttattcgtctagcttcacattatacacttgcacgcatgttagaacgagatgatttttctaacagatataaagaaaatacaccaatagctcttcatgaattactatacccactcatgcaagggtatgattctgtggctctaaaaagtgatatagagcttggaggtacagatcaaaagtttaacttattagttggtcgtacacttatgtcacactataatattgaacctcaatgtattcttacaatgccactattagaagggcttgatggagtccgtaagatgtcaaaatcttatggtaactatgttggaattgacgaacaaccttatgttcaatttagtaaagttatgtctatctctgatgaacttatgtggcgatattatgaacttatctctactagtagtctatctgaagtagaaaaattaaaacaaaatgttaaagaaggacatctccatcctaagaaagtaaaagaacagttagctgttgacattgtaacacaataccatggcaaagaaaaagcttatgaagcactgcaagaatttacagctgtttttgttaatggtgctcttcctgatgatacgcctgaatttatatgtaactatggtgaaacaagtaagccacctgcttttcttactgactctaagttatgtacttctcgtagtgaagcaaaacgccttataaaacaaggttctcttacagtgaatgataaacgttatcatgatgttgagttaccccttgaacctggcgactatattatcaaacttggtaaaaaacgatttttacgtttacaggtacaatag

SEQ ID NO: 8923 - DNA, 522 bp, Lawsonia intracellularis
atgctactatcatcacaacatgaagttatacaagaatatatttctggagaaatactaaccctcactatctattcagtaaacaatttgattaatcaaatagacattgattggttaaaaaatccatttaaccctactacaactattgggaaacaggttaaaaatcttttattgtcttatgaacaaggaaagcttgttcaatgggatctattacctctaaattggaattctattccaaaaaactcttttcaaaaaaaagtcttacttacccttacaacaattaagtatggaacaactattagttatagagatctagcagcattagctggtaaccctcgtgcagcacgtgcagtaggaaatattatgtctaaaaatccatggccacttgttgtaccatgccatcgagttatagggattaataatcatctaactggttttaaggggaaaaaaggactctcaataaaagcatggctattacatcgtgaaggacatcttatctctaacaataagtctattatttcttaa

SEQ ID NO: 8924 - DNA, 1080 bp, Lawsonia intracellularis
atgaatataagaaaaaaaacacgtaagatctatattggaaatattgctattgggggtgatgctccaattatagttcaaagtatgacaaatactgatacaagggacatagaagctactcttaagcaaataaaccaactacatgctgtaggatgtgaaattgtacgccttgctgtcccagatgcaaatgcagcaaaagcattaaaagctattcatgacgcatctccattgccacttattgcagatattcattttgattatcgcctagccttaacagcacttgaatctggtattgaaggacttcgtatcaatcctggaaatattggtgaacgaaaaaaagttgtaactgttgttgatgctgcaaaagcccataaagcaagtatacgaattggagtaaatagtggatctgtagaaaaacatcttattgataagtttggaggaccagtccctgaagctatggttgaaagtgctcttaatcacataaaaatattagaagatgaaaaattttatgaaataaaagtttccatcaaatcttcttctgtcttagacactattgctgcttatagaatgctttctaaatcttgtgattatccacttcaccttggtgttactgaggcaggaagtcttattcgtggtactgttaaatcttctgttggactaggaatacttctttcagaaggaattggtgatactcttcgtatttcattaacagaagatcctgtagaagaagtccctgttgcttgggagatacttcgagctcttgggttacgaagaagaggtccagaaattattgcatgcccatcttgtggtagagcagaaattgatcttataagacttaccaaagatgttgaagcatgccttgttaatgaaaaaactccactcaaaatagctgttatgggatgtgttgttaatggacctggagaggcaaaagaagcagatattggcattgctggaggacgtgataaaggaattatttttgctaaaggaaaagttatccgtagcgtacatggacaagataaattacttaatgtgttcatggaagaagtaaataaagtaatagctgaatacaatacaacacaataa

SEQ ID NO: 8925 - DNA, 3585 bp, Lawsonia intracellularis
atgagcaaaaagaccctttcaacacaccatgatagtataaactcagtggaaactatacgtaaacaattagtattaacaggttctgatattattactataggtgaagatgcagaattacttgtaggtgggaaaaattataatactgcacttcttggacaaattaaagaaataaaaactccacaatttcgagctatttcttctcttgcatttcatcaaattcttgatgaaactaaagtttgtgctgcacttattcgctcaaaagttgaagaacattatacacatatcaattggaataatcctgaagtcgtacaagaccatgaattcttaccaaaatttgtccgtaatatagcctctattattcaatatgaattagatggaaatacaaataaattaccccttatccgcttacggacatttattgaacatgttgtagatggttttgcctcttcccaagaaaatatagatcagttacgtaaacgttctattcttgtacaatgtgctattctatcagtccctcttcctccacaagtcattgaagcagtaaaaatagcttataaagaaatttgtaatgaagcagaagaaaataatgtcccagtagcagttcgttcgtcagcagccggagaagactctcgtaaaaaagcatttgctggactacaagatacatatcttaatatggtaggggaagatgccgttgttcttgcatatcattgggattgtgcttctgcctataatctacgttccatgatttatcgacgtgaagctatccttgatgctctaacaaaatcagaaagtacaggagatgaacaatttgccattcaagcaaaacaagaatgggctattgaaaatacatcattatcagtatgtataatgcgtatgatcaatcctgtagtttctggtactgccttcagcgctgacactgctacaggttgccgtggaacaacacgtaatgatcttgttagtattgatgtaagctatggccttggtgaagctattgttggtgggatggttaccccagataaaatgtatgtttaccaaaaagatgatgctaatgaagttatcatacgctttatgggtaacaaaactctcaaaattatctatgatgaaaaaggaggaacaaaaaaaattcctgtatctgaacgagaatcaataatgtgggcattgtctcctactcaagctgaacaaatagctaaaggtgtccgtgctattagtaaagcctataaagatatcatcatggatacagaattctgtatagatactaaaggtactatatggttcgtccaggctcgacctgaaacacgatggaacgatgagcttatgctctatcctaacactatctttatgcatcgttgtgaagttgatcctcaagctgctgcaacagcaaaaattgttcttgaaggaaatggtgcttctcgaggtgccggacaaggtaaagttcgctttcttaattcagcccttgagctaaataaaatacaaaagggtgatatcctagcagcagaacgtaccgatcctgatatggtccctggtatgcgtgtagcttctgccattcttgctgacgtaggtggagatacaagccatgctgctatcacatcacgtgaactaggtattcctgctattataggtatacaaaactcagcagctttaaaagctcttgatggtcttgaagtaactgttgatggtacacgtggtcatgtttaccatggactgcttccactataccaaacaggtggagaaataaatatcaatgagttaccaaagacaaaaacaaaagttggccttgtactagcagatataggtcaatcactctttttatcacgtctacgtaatgtccctgactttgaagtaggtcttttacgtgctgaatttatgttaggaaacgttggtgttcatccttcagcacttgaagcttttgataatggttcattagaatctattatccaaaaaaaaatagatgaacttgaagtacatctccgtaaaactatacaagaacatctttgtttaggacttgtaaacttagatttacacctccgtgaacatgtaggacacatctctggatatacagaagaacttgaaaggctacataaaagaaatgatccacataatccagaagccgtcatagcaacatatagacagataaaagaacttgaaaaacgactagatgaacttacagaattagcagcatcttccctagatacccttaaagtttcttctgacctctctgaacatgtaaaaattattatgggttatcaaaagcagcttctatcgcttaatgatgaatctcctcagttaaaaaagcgtcgtatagaccttgaaaaagaaatagaaacgtatactgctgatatagctcaaaatccaatagtacagaagacaataagtcaaattgagcaacttcggaaagaagtaagtgagcgatgtggtattaataaaaaaattaaagaattacaatctattcctctagctattggttcccttatccgttcttgtggacataaaacaggtcgtgaacattatatccaaacactttcacaaggacttgcgcttttctcaatggctttttatggaaagcctattatctatcgcacaactgactttaaaacaaatgaatatagaaatttacttggcggtatattattcgaagactttgaagataatcctatgttaggctacagaggagttgctcgggatattcatgactgggaaattgatgccttcaaggcagctcgttctctatatggtgctaaaaatctccagcttatgcttccatttgtaagaacaattgaacaagctcgctctatgcgctcttatcttagtgaggtgcataatctcagaagtggtgaagataatttacaaatttttcttatgtctgaacttccttctaatgctattctcgctcgacagttcattcaagagtttgacggattctctattggctccaatgacatgacacaaatggtgcttgctacagatagggataatcaatctctttctcatatttatgatgaagaagatccagctgttgtttgggctattttggttaccatttttacaggtcaaaaatatggtaaaaaagtaggattctgtggacaaggtgttgcaaacagtgctattttacgaggtattgtaactattagtggtatcacctctgcatctgttgtacctgatacatactatcaaacaaaacaagagattgctgatattgaagcttcaaatatctctctttctgaactgggccagtggctcaccaaacaacataaaaacaatctcaaaaaattacttgaagaacatggttataatctattcaataccaatcctacaaatcaagatattcaattatggtataataagaacatttcaaccttatgcacacagctacaaaaaaatctaacgactagtcaagcgccaaaaattgctaaaactttaaaagaattccggacactcttccataaagctgttatctatgccacatggccatgggaagaaactgttaatgatgctttatatcaagctggatttagatcttttgaagaacaaaaggttgcccttgaacagcaaagaaaacatattatgaatactatcagttacaagtaa

SEQ ID NO: 8926 - DNA, 984 bp, Lawsonia intracellularis
atgctaaaatctatcaatgggacattaaggattgttcatatacaatcaagtaaagaaaaaaataaccaaaatataattattcataatcctcagcttattcctgaactattactacgtgataattctcccacatttattcataaaaaccttcatggattaaaaaatacatctattccctgtatggaagcaagcctatcatgtccttctttgtcctcttcaaaaacaatataccttccagaagttgtctatttacatacaacatgttcatcaagcttagatattgcatatactctttataaagaaaatcttctccctatatggggaagtattattgttacctcccaaacagcagggagaggtcaactaggaagaacatggtgttctcctataggaaatgtatatgctactgttagattaccccaatgtgaacttttctcaaagacaaaagcagcaataattgccagtaccttttttattcatgcattaaataaaataggattccatgtatttcttaaatggccaaatgatattgtagtatttgctaataaacaatggtgtaaagtaggtggcattttacttgaagaaagagatgatattcttttagctggagtaggtattaatatgaataaaaattctaatgaatatacaattcgtgaagatgcctcactacaaccatcaaatcttccaccacacccactgttttctggatatggatctatccttcctttatggttatcccttgtaagtcaagtctatctttgctataaagaacatagggatgttaaccaaaaaacatcatgggtaaaacttgcagaacagtatctttgtttaaaaaattgtagtgttgtcatcaaagatggattaaatgaacatcaacactataaaggaataatagcaggtatacatgataatggaggtcttattttatctacttccaagcaaaaaaaaatatttttatctggaagcttataccctttgctataa

SEQ ID NO: 8927 - DNA, 978 bp, Lawsonia intracellularis
atgaataaaatacttgctcaagacgaagttgatgctcttcttagaggactttctggtggagaaattgaaagtgaaactgatattcctgaagatgattctggaattgttccttttgatttagctaatcaagatcgtattattcgtgggcgtatgcctgttttagaaatcgtaaatgatcgctttgctcgtctttgtacaaatgccttatcaaatgctatacgtaaacgtgtagaacttaatcctatttctatagatatgacaaaatttggagattttatgcgctcactaccagttcctacaagcataaatatcttcaaaatggatcctctaagaggaaatgctattattgttgtagattctcggcttgtttttgcactagtagaaaatgtatttggaggtataggctctcaaccaaaaatcgaaggtcgagagtttactcgtattgagcaagttattgttgatagaataatcaagatagctcttgataatatggaagaatcatggagacctgttcatgatgtaaaattagaacttatacgttctgaaataaatccacagtttgctgccattgtaccaccaagcgatgtagttattgtcattaattttgaagtggaacttgattcttctattggatctatgaccatatgtataccatatgcaacaattgaacctattcgctcaaaacttcatgcaagttttcaaacagaacgacttgaaattgatcatgcttgggtaggtcgacttaaagagcgtcttttagaaacacctgtagagcttaaagtaagaatgggtaatacacagattacaggaaaccaattattaagattaaaaattggggatgttcttgttcttgacacagatgtagaagatctccttgaatgtactgtagctggagttactaagtattggggcattgcaggaacagtaaaatcaaataaagcatatcaaattataaaagaagaagaaccacactgctaa

SEQ ID NO: 8928 - DNA, 489 bp, Lawsonia intracellularis
gtgcatccccagcttacttcatttcaacatagtcttcagattattattggtcaagttttactcattattttatgtcgattggttttctttttcttctataaggttgaagataaggagttttttatgttgtcaaaaataaatatattattttttttattagttataagttttttaagtatacatacgtcatctgttgctgttgaaagtgaaaagagtacttatagtgaccaacttacttctgagaataaggtttataacaaacaatattcaggtaatagttctacaaaagtatatcataataaggaatgtagatattttgattgtactgcatgtactataggctttgactctaaagaggaagctgaaaaagctggttatacaccatgtaggctttgtgaaaataaaaagccttcacagctatcacaggagacagagaaaaaccatcaagaatcgttggataatacaaaaaaagaacaaaacagtcagtaa

SEQ ID NO: 8929 - DNA, 1503 bp, Lawsonia intracellularis
gtggataccattatgcttattcgaaatagtacagagctttttactgcaatgcttgatagaaaaactattatccttggcgatgagggagagctccagacaaaagaaaaaactctaggatcaagactcaaaccacaacctgctagagttgcaccagaacttacagcaaaacaatcagaagctgtacaactttccatggcaaaacttgttgaatatgaagcacgctctagtttcggaagagctaacctaccgtatcctatgccacttggcggtaaatcatatgaagaaacactacacaaagctcgattgactcttggaaacaaaatgattgaatttgttgcagaaaaagaactaaaagatgaacctaaagccattagacaaggtgtcattccatatcttcaagcattatggcaagaagaacatcctgaaggacctattgatatatatgaaatacaaactatagtaaaagatatccttactgaactaaagaaagatccagggaaacccctatctcaacttgcctatggttttatcttagggcctacagagttacaagaacatatgttgtatcttgaacaaaagataggacgtgcaatagaacttacgtgggatgacaaacatcaacatgaatttgatgaaaatggtatatatgacatctttactcgagatgctcctagagatcgtccctactttcaaaatgtcaaactttcatacgaaaaatatagcaatgaagatgcattagaaaaatataaagaaatgcttataaaagaatttcctgaacgatccatagctgctgttgtaggtatctgtatgtcacaaactataatggcagatttttcagctatgattatgaatgtaaatacaccatttcctcttaacccatattgtgaaaaaaatagtcaagatatttctagaatcatgacacttgtaactagtaatacagatcctttaccagaagaaaccttagacgaagaattagatgaagatctaaaagttcaagaaataccgcttagaggagctgagggaggaggacaacttcaagagttacctcgagaagagaagcctacagcatttaccacaagtgaacaagtcgaactagctgaagaagctgaagaaagctcaagcgaagaagaaccttcaacatcatctgtaactagaaaaccactatcacttcgagagcaacttataaaaactgcacgaacaagaacatcacgcacaatgctttttaatcaggaaggatatgtgttaataatccgaaattttggtattagtttaagagatactactacaggtttttatcaacaagtgggaagcacatcttttatgttacaaatacctaaagatcaattccctttagctgttggtgcaaaacctgttgttaaagttgtagatatgcaagtagaacgaaagaccccatttgtaggacaccatgctctacaaaaagggtttataggacaagttattccagggccagtcttaatgtctgaagaactaaagaaaaaataa

SEQ ID NO: 8930 - DNA, 1173 bp, Lawsonia intracellularis
atgcttattaataacagtaaagagttatttgggtacatggatgagggctattctcttgtacttgataaagaaggagagcttcatacacaaacatgggcaggttatagttatgatctagctagagctgcaattgtagccagtaggtttgtccaaacaagtcaagatgatttactacttgctatggcaactcttgttgaaaaagatgcaataagtaaacatggtccttgcaaccttagagaaccattacctttctgtggacgttcatttgaagacttgaaaacaagcgctcgaaagattgttggaaaggcaatgattagacactgtgtaaccaacgaacttcacgatcaacctcgcccagttcaggatggagtaaaaatatacctacaatcattatggaaaaataaacatcctgaaggtgacagttgctaccctacaataaaaacatttgttgaagaacagattaaaactctcaaagaaagccctggtcatgctcttggccaccttgcatgtaattatcatcttacatctgatgagttaggtccacacatgaaatacataggagaaaatatacagacagccatcaaagaaacatgctgcgaagaacataaaaatgattttgataatgaaggtatttatactgtttttaataaagattgtgtaagagaaacacctttcttgggtggttggcgttttggacataatgagtatgataatgaaacacttgtatcactctatcaggataaaattaaagaagaattccctgatatctctatgagaagagttgtgtgtgttatgatgtcacaaaccatatcaccagttataacagaggttattagaggaatgggtacaccatatcctctctgcccttttattccttctaatagcctagaaatgccagaaaattttttaatgaatgtaagtaatgaaccaccttctcctgacaatccaagaagaatagttatgcaaacaccaagtaatgttctatttaaatactcttatgatattcaggtaacaagtacagtaacaggtgaaagtcaaaaattaggaaatcttcagctatcagtacaactaccaaaagatcagtttcctcttcctttaggtgcaaaacctaagcttcaagttactgatataaatctacaaaggaaaaaaggaattgaagtcagaatatcataa

SEQ ID NO: 8931 - DNA, 459 bp, Lawsonia intracellularis
atgttacaaaatattattcttatgcttaatactattgcccatgatcaaggacttaatacagttatagcaccaggagaatactcaggtgcccttactataggcggctttaatatcaacattggtcttctggagtccagaaaaattattctttttcaagcacctataggtataatccctgaaaaaaatcaacttaagctttttaaaaagcttctcacagctaataatctttttatagagacatcaggtgcaacattaggattagattacaataatggactaataacattacaagttgcatggccatttgagaatcttacttattcctctctaacagaccttattggaaatgttattctactgacaggagagtggattgaaaagattaataaattcaatcatgaagacaatgattgcacctcatctaaagaattcgacgtacaaaagatgttagcagtataa

SEQ ID NO: 8932 - DNA, 1317 bp, Lawsonia intracellularis
atgattattactaataaagacagtttacttcaagcattggaacaaggatatactctcactattgataacagtgggaatataaaaacagaaaatcggctttcttcttcttttagaaaatttgctgatctctttagatcagcaaaaacaattaaggtacgtcaacaatgtcttcaaattgcaatggccaatattgttaattctgactccatagtaaatgcaggtcctcgaaacattcaagaaccacttcattccacaagccgaactttggaagaaatagctgctacatctcaagaaatactttgttctgctatgattacatatattttagaaaaaaaatttggaacagaaaatcctcaagtacaaaaatctattagtgaatatattcaaaaagaatgggcagaagataatagtacagttcctatttcatacccagcagttaattcatttataagtagtagactagttggaatttatgtaacaaaaatcctctacaataaacctgagcctatccgtaaaggtgttatatcttttcttacctcttcatgggaaaaggaaaattctggtagtcaaccaaaacaagaatctatagaacaatatgttacacaagaaatcgatcactggcaacgaacagatcctctaggacaaacaatagctaaccttgcatacgggtatactatagactctgaagctcttacagagcatatgcagttctttaaacaaggaatactagaagctatagatgaaacatggaaagaagataaactcactaactatagtgacgatggaatattcaacctttttactgtagatgcacccagagaccgcccttcaattcaaggtgaaagagtattccttcaatcagacttaccaaatgctaaagatatatacgttaagatgatcaaagaagaatttcctgagttttctatggctgcaatagttactacaattatgacacaaaaatctttacctaacctttcatgtatggtttctggtataaagacatactgtcctcttaatccctacatacctaataataaagatgataatgatatggtaccagacgttgtgccacttattgaaaatagtgatagtattcaaccacgaatgacacttacccataataatgaagaaattattatacattgtaactatggtatcaagctttgttgccctatattagatcttcaacaaactgtgggaaatgttcaagtggacattgttatccctaaagggcaatttcctttaccaataagtaatatcccaaatattcaagtcaaaaatatgcaagtaaacaggccagttggttttgtagcttga

SEQ ID NO: 8933 - DNA, 2421 bp, Lawsonia intracellularis
ttgtataatctttttttaccatttattctaactaaccttatatattatataattattccatccttatttatagcattttttcctctacaagctttatctattataaacatatccgaatttgcacaaccagatattaaccaatctcaaactaaatggaaccttgaagctgatacgttaactacactatcaaataatactattattgaagctaaaggaaacattatccttacaaaaggacaggatgtatttaaagctgactttgcaaggtattatcaaaaaacaggttggcttttccttaaaggtcatgtcactgtaaagatggatgaaaatgaaatcaatgctgacgaagcagaatttaatttgaatactaaaacaggctggcttaataatgggaacatatttatctcttcatcacatgtttacttttctggtgcacgtattaccaaacattacggagattattatacttttaataatgtcaaagttactacatgtgacggacctcatccagcatggtcaatatcagctaaagaggcaatagtagaagttgatggatatgcacaattatatgattctacctttaaaattaaaaacatagatgtaatgtatagccctatttttacaatacctgcaaaacaaacaagacaatcaggttttttaaatcctaattatggaatcagtcagcgacgtggaatttattatactcaaccatactttttaaatattgatcaaagcagcgatctaacattttatgctggactgatgacaaaaataggtccattaggaactgtaagatatcgttcacacaaatttacaaatcaaaaaacatggtttgctgctagtggcattcatgataaaaataatattgtcacaccagggaaagatcctgtctatccatcaagccaacttgtacgtaataaccatcaacgttattgggttcgtggaatggctgatggttttattggaaactcaacttggtgctatatatctaatttagactatgtatcagaccaagattatcttagagaatttgatcaaggtataacaggcttttcacactcccgtagtgaaatgtttcaaatgtttggcagagatatccaagaagatgaccaatctcgattaaatgctttacttattagaaaagattggcagcgtataggggtagtaggaaatattagatatgaacaagatccaacattaggacatgggaatcatcctactagtcaaagtgagttaacgcaacgaattccacaaattgacatgtttctttaccaaggaaaactatttcaacctctttcattagagggtgccattcatttacagtctgcttatatgtatcgtgctaaaggcactaaaggttggagaacagaactttatccaaaagttacattaccaatcgatctcaaatatggatctgttataacaactgttgggctacgtgaaacttactatcaaacaggtataaaatcacacacaagtcctgtagcaccacatgtccctgatactaaaacaccacgtcaaacaggtcagcatcgttcactttttaacttacaactagaaagtagtacacaagctcaccgaatatggcgactaaaggataaaaaaactattaatcttcattctcaaagtataggaaaaaccttttgtacagcactcaagcatacaatccaaccacgtatatgctatagctttatacctagagaaggccaagaaaaaaatccattttatacactatcagataggatccttccccaaaatgaccttacttattcaatagtaaatattctcacaaaaaagaatgttactattagtgtagataataataataataataatgataatagtgttacaccaacacttattacttcctactatgatcttctctactggaacttatcaacaggatatgattttgaagaagaacgccgaaaacaatatgtagaaaaatatccaaagcgccctataaaagacatctattctgaactagaactttatatactatcttggttaacttattcaggtaagacatttatttctccatataacggtaatattactagacatgatcataatatcatattcaaatcagacagattttcttggaaaacaggccttagctttcgtgatcaatactataattaccgtgagcatcttcaatatcgagatgaaaataatattattatgtctagtaggttacgcttacttcaaaactctttttctatacagctattaccaaatgtatctgttacgttagaagatttccgaaacctacgagaacttggaacttttggtaaaacaaactctcaactagttgaagttacatatttagcacaatgttatcgtattattggtagataccgatatgacggctatgatcgtagctatacagtattaatagaaatacctggattatttgaataa

SEQ ID NO: 8934 - DNA, 1143 bp, Lawsonia intracellularis
atgtattcaagtagtgtttgtataaagatccatttagagcgattacgttataatttacgtatacttcgttctagatatcctaatgttatgcctgttattaaagctaatgcctatggtcatggtatcagagttgttgcaaatgtccttagagatgaaggcgttcaacatatggctgtaggatctattacagaagggtttttattacgacaagaaggtcatcaagcttttttacttgctttgttaggacctttttctgaagaagatgcaagaattgctgtagtacataatataactccggttattcataatattgaaagtctccaatctattgttcattatagtagagtacaccaaggtggtactgcagtaccagttgctattaaaattgatactggtatgggcagacttggcttttcttctaatgactatataagtcttatagatttattaaggcatacaccagaagtaaatcctattttattattatcacatctagttgcaccagaaatttcatctcttgataatgttacacataaccaagtagagcaatttgcaagagcttataaagctattaaagaagcttttccaactataaaaacttctttaacaaattctcctgggcttttagcatggccaaactatataggagatttttctagacctgggatagcgttgtatgggggaaatccattttatggtacaagtcgtgtaagtcttgggaaaggttttttaccagttatggaggtggaagcaccagttgtagctataaatacagtttctgctggttcttccattggatatggttgtacttattatgctaaagaagatatacgtgttgctgttattggagcaggctatgcagatggatattcacgaagtttttcaaataaaggttgggtagttataaaaggaaagcgctatagaattgttggtagggtttgtatgcaaatgttgatggtggatatcactaatagtcatagtaagatatctattggtgataaagcatttttattaggtggtgggggaagtttagctattaagccagaagaacttgcagaatggtggggcactattcctcatgaagtttgttgttcattgggttcatcaataggagctcaacaaaaacaattagtcattatttga

SEQ ID NO: 8935 - DNA, 453 bp, Lawsonia intracellularis
atgtctaaaaagcttccaggaattgaaagcattctccgtagtttttctgaacaccttctgaataaaggtttaagaaacacccatcaacgacaacaaattattagaacatttcttagcacaacaggacacctaactactgaagaaatttatcatattataaaaaaagaagatccctctcttgggcaagcaactgtttaccgtactatgaaacttctttgtgaagccaacttagcacgagaagtacgttttagtgatggtattgcaagatatgaacattttaatgaacatcatgatcatcttatttgtgatacatgtggtattaactttgagtttatagatcctactattgaaaaacttcaacaaaaatatgccaaacaatatggttttattttaaagtcccatcagctttatttatatggtatttgtccaacatgtcaaaatgtatcactataa

SEQ ID NO: 8936 - DNA, 1050 bp, Lawsonia intracellularis
atggacaaaaatgaattatattcaactaccataaaatcaataactaaaaactgggttgttattcgattaagtgcattaggcgatgttgttcttacaactggtgttatacactattggtatactcattttaattggaagtttactattattacacaagaaggcttaacatctatatttgaaaataaccctgctgttcaaaatattattgctttaaccaaagaacaactattacctaaacatattatatctactgctcgttctcttgctaaccaccataaaaactatggacttattgatttacatggcacactaaaaacacgcctaataagtttattatggagagggcctatataccgttattcaaaaatgagttttgagcgtagattatttcttttaactaaaaatcgtcttttaaaaaaacggcttaataaatggactgtgccacaacgatatatttatgcacttaacactcttccaccaacacctgatcagcttacaccaattattttacttcataaaaaagaagaagataaagttaaaaactattttacatttttggaatcacctgaacaaaaagttgtagcaatccatccttatgcaactcatataaataaagcatggaacactaactcatggtataacatcatagaacaccttacatctgaaaaaattccatggtttattatagggcaaggtactcctttaaaaaatatcccaccccaacatgactttacaaataaaacatcaataagagagacatgtgctttacttaaaagagcagccgttcttgttactggtgactctggaccaatgcatcttgctactgctataaaaacaccagttattgctctattcggtccaacaacaaaagactggggatttttcccaccagaagatgccaatatcatccttgaagccaatataccctgtcgcccttgctcactacatggagacaaaaaatgtcctatccaacgtaaatgtatggaagaactaactcctatacaagtaatgaatgcaattaaaaaaattcttgcacgtcaacctagttaa

SEQ ID NO: 8937 - DNA, 243 bp, Lawsonia intracellularis
atgaaaaagtttcattctactcaatttggtgtaatgttacggacgctacgtcaacaacgtggactttcacaacaaacacttgctgaatttgctgatgttgaaagaaattatatttattatctagaaaaaggattgtcagatcctactctaggagttcttattggtcttgctaatggcttaggattaaatttttcagaatttgcagaaaaaatcgagactgttatttctattagaaaattataa

SEQ ID NO: 8938 - DNA, 510 bp, Lawsonia intracellularis
atgttaattatctttaggctaacatttcgattatttgtactaactatatttagcattctaatacctttctttctttttttatgtattgcaagagcagaaagttttataaaagtaatagatggagatagcttaagtttatataaaacaggtaataaaaaaatattgcgtttatatggcattgattctcctgagctatctcaaccctttggtttattagctaaaagagctacagaatttttggttgagcatggtaatattgtagtcaaaaatatgggttatgatatttatggtcgtacgttagctattatatatttagaggatggtttaacactacaagaacatttacttcggaaaggtcttgcttgggtatatcctaaatattgtagcgatgttatgtgtaactactggtatgaactagaagaattttctagaaagaacaagtttggactttggagtaaaaaaagagctatcccaccttggaagtggagaaagttaaagctgcgatattag

SEQ ID NO: 8939 - DNA, 474 bp, Lawsonia intracellularis
atggttgcgacagacgttatcaaggatctaggtcaggaattaaatattccaggacttgaatttgatcaaaatttggtatgttcgttctctgtccataatggtaatcttgatatgactattgagactaatgagacaggagatttagtctatgtgtgtggatacttaggaattatgcctgatgataataatgctgccgctgctgttgctattctatttgcacaagcaaattctacacttagttctatgaatagaggagtacttgccctagattataatggagaaagattattattttcaaagctttataacgttagtcattgggaacctaatgaatgcattgagtcaatcttacaactcatagaggatgcagaggaatggaaacatcgtttatatcagcctgattttggacttagtgaacttacgaaaggtggtataaataaaacagaaaataataacagctttttaaaagtctaa

SEQ ID NO: 8940 - DNA, 1524 bp, Lawsonia intracellularis
ttttacttagaagctatttttaatatagagcataatggaattataggggagaataccatgagagttggaagtagaccagaccctaatgttcctactaatgttgagcaaaactcagatattgatagtgatgataacacatcttcaagtactacttgttgtgtttctactcattctgtcaatgaaggtgctcaacagcacagtgatagtacgccactaacagacagagcttctcagggaagaaagtgggatccatctattgattttaataggctaggtgctcaattaataaccagtgtacagtctttttttactatcattagagatagagttagtagttttattacaaatatgaaagacagtggaccatgggctcgaagtagaggttcatatgattttcacagggatgatgatacaataagtacgacaagttcagattcatatactacagttagtgatataaattcctcagaagacactgctagtcttaatagttttcactcagtcagtagtcatagctctagtgaaaaaacatttccagtttatactcaagaacagttacagcagtttgcacaagaaggtgttactaatttagttcattcaagaccttatgtttctaatggaccttctattaaatttcctgatcaacttggtggtcatggagacgttggttttttgcaaggtacaaatatagttttcaaacaaaatcttacagctcaagaggctaagacatataagttattaaatgacttgaaaaattggcttcaagatcctcaaccttcatctatcaatattcctgaatcattaaaaggtatctcgcgctcagagatgaaacagttacttgataacaaagacttgttattgagtagtttgccatttcctctagcaatggcagagggtgaaggctcagcagctgtagctataaaaaatgttaatatgtatcaatcggaagaaggctcatttaataaagtatcttctaaaggtgttattgatgtaaaacttggctgtaaaactatgtctcttgctgaattaaaagctcattatcctaataaaactaagggaatttcactttttagaaagattgttacaaatggtgtattacctatgttgcgtggaacaactagccgtggttatgaggtaataccacaagcaaaaggtatgaaacgactatttatggcaaaacaggcatctgacaaccttatgcaaaacttatctgcacgtcttacagcacaacaggctgtaaatttagctaagcaagtgactgacttaacaagagctatgcgtatattacctataacatttgttggttcaagtatgcttatagcacttccagatgcaagtagtactaactctatgccacaagttggattagttgattttggccatccagtatttagtactgaagtaactgtagaaggaccaatcacagagcaagtttacggtgaattaaaagacaactatatggaagctattggtaaactacaatctcaaattgaagaaatttcatatcaggcatcaagacattaa

SEQ ID NO: 8941 - DNA, 1929 bp, Lawsonia intracellularis
atggagagcaatatgaaagttggtccatctgatcccggtattaatagagttcagatagaggaacaaccatctacagaaagtataagctcttctagttctggaagcagtagtggcataagaactagagagcaaagttctaatcttgatcagagacgaatgactagtagtaacctgagaatgagccttagattaaatcctgttgtatcggataaggtcctcaaattttttggattgcgttcagcaagtggaagttactctccatcaacatcttctagttcttcttccagttctgcaacaagaagtagcagatatagttcaacagattcattaagctcaagaagtactattggaagtaatataacatttagtgaaagcgatgaatcttattatagtacaatagaagaagacagtgaatcaatttatgagtcagtaagtagtagcagcagtagcgatatatatacatatgactctaattctaatagcagttcagtttcaaattcaacacaaagtcaagcaccagagctacctccacgtccaaatgtattgcaaagtgaagcaccagaaccacctctacgtccaactagtacatcttcacagcattcaatacaatctcaggattcagttggatctgatgatgttttttggtctgaatctgaacctgaatcactttatgcagataaagagcaagttggggaaggtgcttatggaccaataagatcttcattagaagaaccaatagttttagagtcaaattacatatcatttggttctgatggtgtagtctattctgactttgctccaatgccacaggttaccagtaaatcttcacaatcagactctgtatcaacaccaccacctgtttcaccaagagagcaggttgcaggctcactaggtgtaggaagtagatcaaaattatcttctactaataatgtagctagttcgctgtttgatcctaatatgcagcgtattgcacgacaggcaattgataagactattcatggaaactttggtagtccaaatggaccaaaagttgattttccatatcaagttggaggctatagtaagacaggttatatagctggcacagatcttataatacaacaacatgtaaacccaactgaacaagaagtgtatacatttatgtctcaagttggtgagtggttaaaagatcctcaaggagggcctgaaaatgcaccagaggtccttagtggtcttacctatccacaactaagtgtaattcattcttatagagataggcttctaggaagtttacctattcctgtggctatgggtggaactagcgacaattcagctgtagtacttttaaatccaaataaacaacctgatggatcaggtggtgttatgaatttatctggatttgaaagtactgatgttaaagtaggtccaatacttgtttccaaaagcgaattatcagctcactattctaaacaagcaggagggttagggtgggctaggaaggttgtgactggaaggattgggccagggatgcgaggggcaactatccgtggatatgatatgaaacttgggaaaaatgaacgtggtttttcaagattacaaacagcagtaggaaacagtgatgatgctttcccaaaaaggttaggaggtcttacttctaaccagctaaaaaacttggaaaagactatggaggggttacaacaagcagctcattttttacctgttacatttgtaggatcaactcttcagtttgtattaccaaatcctggtgatacaaccactatgcctcgtgtaatgctaggtgatataggtcatcctatatttaaagatgaagcaacaggagatggtcccataagtcctcgtatctatgataaatataaaagcaattttacaagtggaatggattcaattaaagaaactatttcaaatatagtaaaaagtaaaatagaataa

SEQ ID NO: 8942 - DNA, 474 bp, Lawsonia intracellularis
atggtttcaacagatgttatcgatgcattgggtcatctattgaatattcctggtctatccttcaacgaagatttattatgtttgctttctgtaaataacgataacgttgatgtaactattgaaaccaatgaatcaggagacttattatatgtatgtgctcacttaggcactatgccagatgatgataatgcagcagcagctatagctcttctctttgcacaagcaaatgcagtgttaacagcaatgaataaaggtgtccttgtgcttgactataatggtcaaggtttaatgcttgtaaagttatatgaaatgaagcactgggaacttgaagattgtttagagtctattcttcaactttttaacgatgcaggtgaatggaaaaatcgtctatacttacctgattttggtctaggtggaatggattttgacttagatactagttcaagtggttcagatcaatttatgagggtatag

SEQ ID NO: 8943 - DNA, 2703 bp, Lawsonia intracellularis
atgactaaagttggtggtagtaatcctttttcaacacttgcatcaatggttggctttagcaaatcttcttccagctcatcttcaagtaaggtagctgaattaaaaagtaaatttgaagcacttgggacactaacaaaagcaagtcctcgtcctgcaaatggcactcaggatactaatcgattaagtgatagactatttagaggacactatacagttcctgctaatacagcttcaagagtaggtggtcatcttcagcgggttgatgacaataaaagtagcagttcagcagctaatgttgcaaaaagagctgcagcacattcttcttttgcaagttcaaacccaggactccaaggagctagcggttcttcttctggaggaacaggcggaagtataacagatcaagttaaaagtaggggaattactgcaaggaatttttcggattctaataataattctataggatcagggtcaagcagtggaagtatattagatcaggttagaagtcaaggtattactgccagaggatcatctatttcttctggtaatgcatcaggtactagcaatgttaatgatggaacaagttcaagagattatggagctaatgtccgtaatactcgtgaaagatttgaagctggtcctggaggtgctcaaggagagtctcctggagtaaaagatgctaaagaagctactaaaggagttagtgtttctaatttaagaggaatatttgaaggaagaggtggtgcagataataatcaagtaggtagaagctctggtggagtttcaggagcatcaggatcaggaggagctcaagggacaggaggaacatcgggattaggtggagcacaaggtacattaggaagtggaggtcttgatggaggaggagtttcaggtgctgctggtggaacttcaggcgcctcaggagccggaggagcaagaggtactgctgatggaataacgtctcctggagcaagagaagcacaagaaactattaaaaatgctggtgttagtgtaagagatttagctggaagatttagtggagctcaaggtacaagtggagcttcaggagcagcgggagcttcaggagcctcaggagccggaggagcagctggtgcggcaggaggtggaggtcttgatagaggaggagtttcaggttctgctggtggaacttcaggcacctcaggagccggaggagcaagaggtactgctgatggaataacatctcctggagcaagagaagcacaagaaactattaaaaatgctggtgttagtgtaagagatttagctggaagatttagtggagctcaaggtacaagtggagcttcaggagcttcaggagcagctggtgtggcaggaatgccagcaggtagtggagatgttgttgatggactaagaagaggaggagaagatactgtcgatggatttggaagaaatcagggtagtggtcctatccctagttctgcagattttgtagatggtcctataggcggtatacaaggagctggaggagcttcaggagcagcgggagcagctggtgcttcaggagcagcgggagcttcaggagcagcagagccacttcctactaatggtacagatcagcagatagctgaagtcgttgtaagaaatgcagaaaatggtcattttgatggtattgatttctcgacacagcctggtggtgtagaatcaaatacaggtagtatccctggaacagatcttattgtccaacgagacatcactcctggagaacaaggagtgtataataatctcagtgagatgggatcatggatggatagccctaatgctagtcctacaaatgcaccagagtctcttacagatgatcatagtgttttgactacactacttaataataaagaaggcctacaagatactgttccttttcctcttgctgtgggtgaaggcactgttgttactaaaactcttgatccagacattgatacaagtaagattaaaatcccacttgaaattgtttttggttctggaagtatgtatggttctggtattggaggaggtagtagtacaattagctcctcaatgtctgatgatggaagttctagcataggatcaactacacgtaaaaatagagcaggtgaaataataagtagaattgcaatgaatcaatcacctggcgctggtagcgggggtcaaactgtagttggtggtcttggttctggtagtagtaatatcaatataagtggtggacgtggtggtattgtttatggaccaatgcctaatgtgaatgtagtagctggagatggccttaatagactacagcttggtagtggaataaatccattagcacttcttcaggaaagaatggttaatttttctgctgctcaactagagcatttacatggccaacttacaggtatgatggctatgatggaagctatgcctggcgtagcatttgaaggtgcaagtgtccaaatgacattacctgaaccaggtgatacacagactatgcctagtataaggctatcaggttttggagagccaaggttgcgggaaaatataggacagccagggcaacctccaacacaagaagcatttgatgcattaaggaatggtccactaaatggagtaagcgagttaatgagccaagttcaagaaatgataactgtaaggagtgaaggaagtatttcactaagcagaagtagtagtttatcagatttaagttcagaaatataa

SEQ ID NO: 8944 - DNA, 1911 bp, Lawsonia intracellularis
atgaaatatattcgctgtatttatcttggactattattttttatttatgaaagtattaatcaaattgtaagagttgtattacttattcatgtaggaactagtgctatagactcattttattcaattccgttgatacttagtgtaggctttattaatgatgtttttccttttatccttataacccttccattagcaatatgtgtactattaactggttcacgtgtagttggaaaaattactcaacaaattttattttttgtatttagtctctatacggctgtttttctatttacaggtgctgctgaatatttattttgggatgaattgcattgtcgatttaactttatagctattgattatcttatatacacaactgaagttgtaaaaaatattatagagtcatatcctattatccctattttaataggtatccttttatgctctcttggtgtgtcttggatactacttaggcctattgcaaaaaaaattaataatataccagtgcctagtgtacgatggttttttagtgtttggatcattcttgcatctataaccactatatattcacctcctactttttctaataatgccttaagtcaagaactttctaaaaatggtatatggtcactattttcagcatttagaaataatcaattggattacagacaattttatcctgtaattgataaaaaattagcttttgaactcctacatcacgagttaatagaaccaaatagtgtatttttcaatgacaactctatggagtggagaagatacatacactctaatagtccagaaaaacatttaaatgttattactattgtagtggaaagcttagggagtgtctctttaggagaccgtacaccacacttaaatgatcttagtaaaaaatgtctttatttcacaaatatgaaagctacaggaactcgtactgtacgaggtcttgaagcaattatcttaagtctaccccccacaccaggtgcatctattgttcgtagaccaaataatcataacctctttaatacaggaacacttttccgacaaagaggatatgatactgtttttatctatggtgggtatggttattttgataacatgaatgaatttttttcaggaaatggttttcgtattatagatcgatcaaccattccagatgagtataaaacgtttacaaatgcctgggggatatgtgatgaagatttatttgatgcagtcattcgtgaagccgatatagcatatacctctaataaaccattctaccatgttgcgcttacaacctctaaccatcgtccatttacctatccagatggtcgagttgacgtcccttctggaactagccgaactggtgcaatcaaatatacagactatgctattcatcgctttttaaaagaagctaaaaaaaaaccttggttctctgatacaatatttataattgttgctgaccatacagctggtagtgcagggaaaacagttcttcccccagataattatgatattccatgctttatatatagtcctgcacatataaaaagccaaaaaatagacacattatgttgtcaattagatattgcacctactcttttttcactattgaactggaattatagttctagtttttttggaaagaatatcttaactctttctaaaaatgatggtagagcttggattggaacatatcaattattagggtatctaactgaaaaagaactagtaatattagaaccattaaaaaatccaataatagaatcttttttatcatcttatacaactgctacaaataaatctaattcaatattaatccaacaagcaattgctgtatatcaaacagcacaagagctctttacccagggtaaacttaaagaaaatatgctatctactcctgatgaaatcatactttcaacctctcaataa

SEQ ID NO: 8945 - DNA, 2640 bp, Lawsonia intracellularis
atggtaaagttaaataatgtaataaacttcaataaaaaattagcaaaagttaatgtaactagtctttctatgctactttttaacttcattgctattttctttttaattcaatcagatgcttatgcagtgatttttagtaatagtcagccacggatatttacagatgttaacactccagctgaaacttattttggtggttttgatatgcgtgatccaagaagccctattaattcagggccaactagtatgacttttaccacgcataatttagcccaaaaccaaattcttgcagcttctggtggtagtatgggtactgctgcacgaggaagtgtagttaatggtgatgcaactattacaatgcataatactgtatgtaactttttatatggtggtggttactctgaaggtccagatgttgtagttactggtacagctaatatctctgtctataattcacaacttatagatatctttggtggaggttttgataatggtggacacaatggtcatacaagtgtaggtgctgtaaagattttagtagaccattctgttgttcagaatttgacaggctcagcttcatctgttggtattgagtctcaaggtcgctatgctgtttttggtgatgtagatattgctgttgttaatggttcagatgttacaacactcacaggtacttctacaagttcagctcatattaaaggaaatctctcaatccttgtagaaaattcgcatataactgaccttaactgtgttgatcatgctttattggatgggaatctttttgttcgtattggtcctggagcattggttgatcgtctcttcctttctacagaaaatcttcctaagggttcttctttatttgagattgatggtggtagagttgatggtttatttgttggtccctatgctggaactttaaatgacgcaaaagttttaatgaaaaatggttatgtattgaatcttgatccatcaccaagaacgcctgcaggtgtaataaaaaatttagacatatttatggaaggtggaaccattgcttggttaaaccttgctccacaacaaggtgtgtctcataacgtcacattacatttggatgggggtacagttgaaaatctccgatttggtaatttccctggtgctaattttgatggaataattagttttgcaaaagcagaagtaaaaggtggcactatagagaatatagagcctttaagaagaggagtattaaattctagcttaatttttattcctggtggactatcaagagttcatacagttgaaaatgggagaggtttaggccttagtaatgttacagtacaagagggtgcaagaacggtttgggggctacctggtaatcgatttacaattgaagcagatgattttgatctagggggtactattatccttccaagtacggatagtacaatagagctagttgtaaataaccatttgatagctagtggtggaatgtttgaaattaatgatgcagatagatctagagtaacaccactagttgtatttactggaaatcctggaagttctgtaaatattatagatcctctaagtgtaaacttagatcttcctttaagctttttaggaactagtggtattgtattagctcaagctacacctaatcttgctgatcccaagttgtttgaaccaataatacataaaggacttatgtggggagatattgtttttgatgctacttctaacacatggtttattaataatattcgtgaatctaaggattactatggatatttatcagtccaaggagcatcaaattggttacgtcaacagcatatgataacaacacaaagacgttcagccaacgcactgttacataaacatgatggactttgggtagatattcaagctggtcatgaaaaaattggtacaaactatggtaattcaaagatgccatgggttatggcaagtgcaggatatgattatagaaaaaatattaatgataatatagctatgttatatggttttgctcttggtataggagatggtcatcaaaagtggactcttgttagtaagatgaaaaataggattaccatggggctactagatggatatttaggatttagttataatccaataggactatatggattagtagcactacaaggttcagtaagtaaaataaaaacaaaaagtccaggattttttgtaaatgagaactggacagaagtagtcccaacagaatctttagagctaggttggcactatgcctttaatgagttctttactattactccaagggcacaaatgattttagagcaaactcctaaacattctattgaattttgttgtagaaaaaataaagagaaaattaagcttcatagaaatacaacagtaacaacagttgctggtattttagctaactataatattgaatggctggatattcatggtagtgttgattggataaaaggtgttgctggtacatataaagctcactcagagcttttcaataagacatttaaagataaaaataataatagtgtattgcgagcatccttaggatgtgattacattatcagagaaaatatgagcataggaataactgcctttggagatatgattaataataaagggattggaggccaagctaatttctcatataaattttag

SEQ ID NO: 8946 - DNA, 393 bp, Lawsonia intracellularis
gtggcttctaatcttgatgaggttaagtgcaatcagttatatcgctattttgttacacaagactctattatagctattttgatggatggcatttggtatatgttttttcctaaagatactgaaggcaaaaaaatggaagaaaaagcatttatggaggttaatcttaaagagattgacccgaccttgcttccggagttgcgcaagttatgcaaaggccgttttgatttgcagaaaactcttgaaactgttcatgagttgaaattcaatcttaaaattaaattgttgctggtgaataatttggaggaaccccaagaaaactttgtcatttacattacaaaagaatttgggattaaagcacaacaaaaagcaattgagctttacaggttatgttaa

SEQ ID NO: 8947 - DNA, 1113 bp, Lawsonia intracellularis
gtggctatgactattgaactctttcaaagacaaacacatattaattttgttgcaaagcggcatcttgcctatattatttctattatatttattttgataggaatcagaaccattattgtaaatggaggagtacgttatggtgtagactttgcgggaggtatagctgtccaactccaattttcacaacctatagaagatgaacatataaaagaagcactgacaaaacttaaccttccaggccttacaatacaacaatttggagaagataataaagcatatcttgtaagattttcatcttctgaatttaacagtatgactattaaatctgatataagtacaatattacatacatattctcctagtaatccagttacgattcaacgactggaagtagttgggccaaaagttggtgctgatttacggaattcagcattagaagctatattttatgctatccttcttattacaatttatatatcaggaagatttgaacatcgttggataatagcagctggcataacaggagttttagctgctgcaatgtattgtatgaatctttttgacttttctatggtgactaaggtagttattgcacttatacttactattctactatgttggaaattaaaacttaactttgcccttggagctattgttgggttactccatgatgttcttattaccgtaggattattaacacttatgggaaaagaatttgatctcaatgttattgctgcactacttacacttgtaggttattctttaaatgatacaattattgtttatgatagaatacgtgaaaatctccaagaacaaaaacagaaaaactatcttcccctttcaaatattattaacctgagtatcaatcaaacattagggcgtactatcatgacttcttttacaacctttgtaactgctttcagtctcttcatactaggtggtactgttattcatgactttgccttaacaatgattattggtatcattataggaacattttcttccatttttgtggcaagccctatccttcttatatttggagatacacagcaatatattcaacatactactactcctatatatacacgccctggagaaaatggtattgtttaa

SEQ ID NO: 8948 - DNA, 1584 bp, Lawsonia intracellularis
atgaaatcgcttccttggcgaattactatctcgctctttattttaatattaagcataatatatgttcttccaagtatcccatttattgataactctattataggtaaatacctacctgatactaaaataaaccttggtcttgatcttaaaggaggaatacaccttacactaggtgttgatgttaatactgcagtgtctaatgctcttgtattaacaggacaagatcttcgtagtactgcatctaaaaatggtcttactatcttaaagacaaaaataactcctgatggacaactagaatttttattacctagaaaagaacaagaaaatgacctagaagaattaatagtaaaaagttaccctcaacttgttctttcaaaacctacgactattgatggtagtttaaaatattatgctcacttcacacaacaggctaaaatttctattgaaaacatggcccttgagcaagccatacgtactataagaaacagaattgaccaatttggtgtttcagaacctgatataagaaaacaagacaactttcgtattcaaattcaactacctggtttaacagactctacacgtgctatacatcttataggacaaaccgcccacttaacctttcatattgtaagggatgacttacaacaaaatacacctcttccatctggagtacgcttatttcctcaagtcattttctaccctgacggaacttcaagagaaattcttatcccactcgaacgtgaaccagttatgacaggagaaaacatttcagatgcacgccctaactttgatgataaaaacaataaagcttatgtagcactttcatttaattctcaaggtgctaaaatgtttgagcgtattacagcagaaaatataaaaaagcgtatggctattgtcttagatggaaaaatatatagtgccccaactattcaagaacgtatatctggaggaaaagcaagtatttctggaaactttactatggctgaagctcaagatttatctattattctacgagctggctctctccctgcacctgttactattcttgaagaaagaagtgttggaccttccctcggggaagaatctattgaaaaagggatgttagcagctattgtaggaggatttgctgttcttattattatgccgctttattatggtctttctggcttacttgcagatgttatgctgctttttactatgacacttttattagcaggattagctgcttttggagcaacacttaccctaccagggattgctggtattgtacttacaataggaatgtcagttgatgcaaatgttcttatttttgaacgtatccgtgaagaactaaaaaaaggactaatgccattaaaggcagttatagctggatttgatcgtgctagtatttctatcatggattcaaatgtaactacaattattgctgcagcaattttataccaatttggaacaggccctgtaagaggttttgcagtaacattatctttaggtattattgcttctatgtttacagctatttttgtttcttatacttgctttttgttatggctacgcaaaagtaagaaaaaaacattaagtgtttag

SEQ ID NO: 8949 - DNA, 339 bp, Lawsonia intracellularis
atgatttctattgctcatgcttttggaactcctgatccttcttcaggggaacctagtaatgtatttatgcagtttattcctcttattataatgttagctattttttactttttacttatccgtcctcaacaaaaacgtacaaaacaacataaggcaatgctacaagccttaaaaaaaggggatcatatattatctacaggtggacttattggacggattgttgatattgatggtgatactattacaacagatcttggtcatacaaccgtacaaattaaccgtgcatatgttgttggactagtagatcaaaaaggttctttaactaaagaagaaaaataa

SEQ ID NO: 8950 - DNA, 3228 bp, Lawsonia intracellularis
atgagatcttttctcattagtatagttactctctttctattaggaattatagtattttttggtattacattctactttatcaaacaacatccacaatatattacaaataaaatactttctactatttcaaaacaattaaaggatacttctatttctgctaattctattgggtttcatattgtaccttttcctaagctttacttaacaaatgttatacttcaaacacaaaaaggtgatacaattcatattaaagaatgcttgattactccaaaaatcaccaacatattatcaggaaacatttctatatattctattgaggtaatccaaccaatagcctccattattcttcaaaatgaacaaaaaaaaaatagtaaaaccacaggatatgctataccaaaacaagtttcgcatcttctccaattaattacagatagtaaactttttattgaaaatggtagtattacctttcaaaataatgactattgttttaagataataggtattaatggtaaaattggtgtttctaagacacttacaagctcattaaagctcactgcagatgaaataatctgggaaataatgaatactgtaagtaataattctagcactgcacaaaaaagtattgaaaaagtacagctccacatagaggatatgccgtataaaataaatacagcattacttcatgatacttctcctttatacgatttatttacaaatactaaaaaaactacatttaaggtttcaggggctatacctacaaccaatacagctaataacattacattcgacttcacgacaaaactagaaaaagataactctgataaacttacaatgcatgggcagttacatattgaaggaacactccctaatggtaatacatccattcctatactattatctgttccgtttacaacaacatcttctgaggacatgacacactttcctccactgctgataaaaaactcaaaactactttttgataaaactcatatagatcttcatggaacaataaaaaattatgatacactatcaaatctcttttttgatggaacaatggatgtaaaaaattttagttttccctattggtttacttttgcaaggcaactaccaaatggtattcaacatgctcttaatcaattatctggagaaataaaatttacattatctcctcaacaagttaatgcccaaaaaataatcattcattctttagatactacatttcaagggaatggaactgtcaataattttttatccccaacgattacattatcccttgccacaaaacagttcaaccttaatacacttcttccagaactaaagggtaaaaaatcttcacaactatcctatcctaaagaaacgtttttaactatcttaagtaatctccataataataataataataataatataaaaaaaacaatcaactatgacattactattcaggctgatcatgtaacatgttggaaatttgatggatatcagtttatatgtaacatacaacctaaacctcagggtactcagattcatactaactgtaaaaatttttatgatggcagtttatcttcctcacttttactatctaataggcacacaatacaattagctatagaaaatattcaactgtctgatataacaaatattattacaaaagaatatgaactaaaaggtaaagcttctggcacaagtcgtgttaatggacatggtgatactttagcatcatttctttcaagtctaaaaggtacaattgatttatatgtaactgatggattagtaaaaaaaacagcgtctgaagctattcctttttctatgcttcatctaacatgtgacagtattggtcaaccatcaaagggaaataaatcctctacaattccatataaagggaagtggagtgcagagatatcatcagcaagatggaatggctcaattacaatggatgggttaatacaattttcaaccactgactggctttctattaaagcagaaaacataccatcaaaagttgtatgttctgtatctggcgtacaagctgtggcttatggaggaatatcttttgacatagataatagttttcttagcttctctaattttcaaggtgaaatacatcctaaaacagccctatctggaacaatcaaaactagttctagtacaagtaacacaagacaatgggagggttctctcactgtcatgacacaaaatcttagaaatttattaagtaaacttggttatgaaccaaaaaatatttctccaactatgttgcaatattgtaaattgcaaggagatatctttatttctcctgcaacaattcgccttacaaatatacagggaatattagataatacactgattaaattttctctcaatggattacagacaaaccctccaagttggacaggagatatccaactaagttcattaaacttagataaatatttactatcaattaaccaaaataaactgaaaaaatcacaggaactctggccgatagaattgctgaataaagtaaatattcaatctacactgactctagctgagcttatctatagaaaagttccatatactaatgtagtagtacccattagtcttaatcaaggaacattatctatcactccaattacagcatcactatgtgatggaaaaacagaagcaagctttaaggcttgccctctttcaactaatggcaatagtgcacagatagattttcattatatttcaaaaggtgtggatatgattaaactaagtaaaaaacgtcaacaagaatatcttatttcaggccttggtacatttgttattaatatacagtcaatagcaaaatcatctatagatttccttaaaaatcttcaagggaaatggcgtatttttatccagaatggctatttcaaaagaaacaccactactactcaacaaaattttagtaacattggtgcaacaggaaatattataaatggtattattacaaataataattttgcaataacagggcctggaatggtaataacagggagtggaaaaattgatcttcctgaatggaatcttgactacctcatcactatagatatggaaggatttcctatagctatccccataaaatatacaggaagtatagataacccaaaaagaacaattaatgcggccaagttaattcttagtactataggttctcttgggagagatactataggattaatacaagatattttttcagctccactgaagttacttcttccctaa

SEQ ID NO: 8951 - DNA, 3210 bp, Lawsonia intracellularis
atgaagaaaatgaacatacaaaagtcatcatatgaagaatactttcctcttcttcgtcaaattcgtgcctcagctggatctgggaaaacatatgaactcacatatagttttcttagtcttctaaataaaagtataaatgacaataacacaaactcttcttataacaagtatgaacattcatggacaagtattcttgccattacctttaccaatagagctgctgcagaaatgcaacagcgtattataactcgattaaagcaagcagcactcaatactcaaccaataccaggcttaactagtacacaagcagcacattggattaatatttttctacgcaattatagtgaactcaacatatgtacaattgatagtttacttcatactattgtgcatagtactgcattagaacttcatctcccacctgattttcaacctattttttctacagaagaagcactaacaccactattagactctatccttaaaaaaacacaacataacgaaagactttatattatactaaaagaagcctgtagtgatatattatttcatactaaacataacaattttatgattggatctactctaagagaaaaagttctttcaatactacctctacttataaatggtgaacaagaaataacttcacctcaagaaattacagcacatcttacaataaaaattcaatcagtaaaaaaaatagcaacagaacttgcatcttgcatcaaaaacgaacaactttccattcattcaaattttaaaaaagctcttgaagcttgtcagataggaacacaacatacaattccaccaaaatctacaatgttacgtaaaccaaacctaactgactgtatactcaaatcttcaaaaaatacccctagtcatcatactatttcactttataatacccttcaatcactaattacatatcttgatacaacaggagtattattaaaaaactctcaaaaaactataccttatgttaaattagctaaagaattatataacctactaccagaatttttttgtaaacaacgtattatccttgctgaacttattccttcattggcacaacaagcagtctcaggacattatggtatatcagaaatattctgtaaacttgggacaaatcttcaacacattcttattgatgaatttcaagatacaagccatgaacaatgggctgttattcaaccttttgttgttgaagctctttcctatggaggatcattaacatgggttggagatgttaaacaggcaatttatggttggagaggtggtgatacaacactctttgaaaaagtcctatccgatccagagctacaatctatagcatcttatgttcaaaaagagagcttacctataaactggagaagcgcatatcatattgttaatacaaataatactctttttactaaattatctgatcacaatatagttcaatctattttctctaagatactccctaatgaaattgcaccaacaataaaaaatactattctctcagagcaagtacctctagtaactcagtcttttgcagatgctgaacaatccatagctccaaacaaaaaagaaggatatgtatatattcagcgtatactaaatgatgaagaaagtgatcctgacactgttgttcatgatagattaataaatatcattcatgatattcaaacacgtcgctctttgggggatattgctattcttgttagatctaataaaagggctatgcaagtagccaactggctgatggaaaaaaacattcctgtagtgacagaaaatagctttttacttatagagcatccaattatccttcagtttattgctatattagagtttttagattcacctcaaaatgatcttgccttttggagaataataaatggaggaaatcttgttcaacctcttcttaatatcccacaacaaaaattagatgaatggatatgtattagaaatcgctcacaacccttataccttgctttcaaagctgactttccagatgcatgggaacattggattcttcctttttatgacgattctggattactttctgcttatgatgcaatacaagaatctattgaccggcttaaaataaaaaaacgatttccaaaagaaatgtcttttattagaagatttcttgaaattatctatatagcaagtacaaaaggatatgattctatatcaaattttttagagtactggaaacagcacggtcataaagaaaaaacaccaatgccagaaaatatagctgccgtaagaatcatgacaatccataaatctaaaggactacaatttcctatagtcattattccatggcatgattttcctcttaaacctaacgattcacttattcaaacatgtgttgatggttttaatattattgtaaaacaatcaccagccatgccaaaagaatattatagcagtttactaaaaaatgtttgtgaatcattaaacctcttatatgttgcatggacaagagctgaagaagaattatatgcactcattacatcaactaagtctaaaaaaatatcatttgctgaagccattaaccccatactagactatctcagctgggataataatatctatcaactaggtgaaaaaacatatacttctaatcatacagcaatgttatcttctaataaaaacagtacagaaataccatacatatatcttgaaacaaaagatgaaagtacatctagttggagacctatgcactggttacctcaattacgtatttttcgtaatccagtgaatgaactaggtattacgagcaaaagaagaggaacttttatacatcactgtttacaatatttatgcatatcaaaaaatccaaatatagatatctcccttgctatagattatgctataaaacgatttccactccctttaccatcctcacaatataatattattgtaaaagacgtgctatctattcttcaatggtatacttctctaccaaaaacaaggtattggatacaatttggacttgcagaacaaacacttcttgataaaaataacaatatttatcgtgttgatcttctggttaataatggtaaagaatattctgttattgaatataaaacaggagaaacatccctacagcatatacaacaattacagaaatatttggatatcataaaagaaacaacatcattacctgtaaaaggttacattatttatttagacttaaaacgaatacataccattgaataa

SEQ ID NO: 8952 - DNA, 1368 bp, Lawsonia intracellularis
atgactaatacacattactcctcactttcagtcacattacttcctatcaaaactcttggagaagctgctataccctctcctttaccatactgcgatattaaaaaaaacgaatacatacacctttgtcttaaccaagaacaaatagaagacttaggttcttcacctacactttctcttgaacttgctggtccacgacaagatttatactttgaacctcaaacaacacgttgtgctattgttacctgtggaggcctttgtcctggcctcaatgatgttatccgtgctattgttcttgaagctcactatgcatatagcgttgcttctgtaattggcattcgttatggattagaagggtttattcccaaatttaatcatacacctattgaacttacaccagatgttgtaaaaaatatccattgttttggtgggactatacttggttcatcacgaggtccacaacaacctgaagaaattgtagcctcactagtacaccataatattaatattctatttgttatcggtggtgatggctcaatgaaagcagcaaattctatcactaaagaaatccaccaacataaccttcgtatttctgttattggtatacctaaaaccatagataatgatattaactttattcctaaatcatttggatttgatacagctgtagaaaaagcaacagaagctattggatgtgctcatgttgaagccagtggtgctaaaaacggtataggcattgtaaaacttatgggtagagaatcaggatttattgctgcccaatcagcccttgcactaaaagaagcaaactttgttctcattcctgaagtacaatttacactccatggtaatggtggactccttcctgctcttgaaaaacgtctttctgaacgttcacatgctgttattattgtagcagaaggtgctggacaacatttattagatagtcaagatgaaacagatccttctggaaatcctgttttagctgatattagcactttgttaaaaaactctataaaagattatttttctaaaaaagatatacctattatactaaagcttattgatccaagctatattatacgatcagttccagcaaatgctaatgatagagtttactgtggatttcttggacaatatgctgtacatgcagctatggcaggtaaaacaaacatggtagtagcaaatattatggacaactatgttcatatcccactaaatatggttatcaaaaaacgtcgaaaacttaatacaaagtcaggactttggcgagcagtacttgaatccactggtcaaggaaggcttacaggtatgcttcctcattgtaatcctctcacaaatgaagaaaatgaacatacaaaagtcatcatatga

SEQ ID NO: 8953 - DNA, 333 bp, Lawsonia intracellularis
atgagtaacactgataattacataatgataaaaaaaacaaataatcttaataaattactatggagtatattgttgtgttttttattagtatgggttgtattaacctttggtattggtatcccatattatggagtacagccaagtaacctgctagagtcattaggttataaaaagaaggtaacaaaagttaacaataatcaacaggtattgtatacagaagatactcttgatcagatgacattggaggttatgagaaaagataaaaaatctaacttagtgtcatccagtgtacaaactccatatttttttatatggttagagataacttgttaa

SEQ ID NO: 8954 - DNA, 873 bp, Lawsonia intracellularis
atgaaagagataacaaatctaaaaaataaaaaacaacataataaaaaacatcgccaattaccttatacaaaacagcttacgaagatgcaacaccccaatttttctgaatattctctagattttctctcaactatttctatcttgtcaggaattaagccagttttggatttaattgaaaaagaacctcaaaaaattgacacaatatttttacaaaagggtctttgctcaaaagaatatcaaaaagttcttgatctatgtcgccagacaaacatacgttttatatttaccacaagtaaagttcttaaccgtttttgccttactaatcaccaaggtattgttgctcgcttatttgaatctggatttatagaacttgaagatttatttgataaagttccagatgcaccccttccgcttattgttgtatttgatcaaatacaagatcctggtaacgcaggaactattatcaggactctttattcacttggtggagcaggagttataatccctaaacataatggagtatttcttggtcaagatgcaaggagagctgctgttggatgtcttgaacgactccctataagtaaagcaataaatctttctagagctattgaaacagctaatgaaaaaggtttccatatttatggaacatctatagaaaaagatagtaaaaatgtttttgaagcagaactaaagttccctgctctacttattcttggtagtgaaaaaagtggtatcagattacaactaaaaaaaagatgtcataccatattacatatccctatggtgagagatgttaattcacttaatgttgcacaagcaggaggcatcattataagttgttttgcacgttgccaaaataactttactgtttaa

SEQ ID NO: 8955 - DNA, 1668 bp, Lawsonia intracellularis
gtgtaccaagttataactgttatatttattcttaggtcaagagcaatgagaataaaggtttctcattacttaatgcttttattacttctactgaactttggaatattagaaggttgtggaaataaaaaactttctggcagtgataggtttgtttctacaaggagttatagccgttgtaaagaagaaaaaacaggtactgtttatcttcctgcagatgacggaacacctttaaataaaacagaattcaatgcttttaattcaaaaggtcaatttgatagaaatattgattcaaaggatatgagagatattttattacactttaaaaagtatgtacgtcatgagcgtaaaactgttgaaataaatgtgcagcgtgctagtagatatcttcatcatattattaaaacttttaggcaagaaggactacctgatgagttggcgtatttagcttttattgaaagtggttataatccatgtgctcgttcttgtacaggtgcatcaggagtttggcagtttacttgtgcaacaggaaagtactatgggatgtccaaaaactcttgggttgataaaaggcgtgatccttatgagtcaactcgtgcagcagctcaatatttaaaaagattacatcaaatttttaatgattggcatcttgctattacagcttataatgctggagaagggcgtgtttctcgtgctcttgctgctagtggagcaaagtctttttttgagcttagaagacgtaataagtgtattccagaaaaaaatcgtctttctgaagaaggaaagcaatatttacccaagtttttagcaatttgtaagattataagaaacttaaagcagttaggatttgaacctattgaattgtctaaatcacagaaaatggttgaattaaaagcaaaaccaggaacaaatttaaaaacactttcaaggcatcttggtatgagttgggatgaattttttgcacataatgcagcatacttaaaacatactactccaccaggtgtacatagtactatttatgttccacatcataaagttcgaatggctcatgcttttttgaataaaaagtcgaaatctaaaacatatatggcggatagaggaaaatatagagttgttaggggagacactatttcctctatagcaaaaaaaacaggtgtttctattgctgacttgaaagatgcaaatcctcattatggctctttaagggttggtactatccttactataccatcttcgtcaaaaatggtggcaaactatgtagagccagaaatatatcaagaaaaaacagttcaggatactaaaaactctcagaatacaaaagtacaattccatactgtaaagaaaggagatacacttttttctattgctaaatattatggtataactcaagattgtttagtaactgctaataatttgtctcatacagatattagtgtggggcaacaactttacattcctatagaaaaaatatcacctatggcaatgttgaaaaaggatccagagcaagttcagcctaaacgtattgttcaatatcaggtacaacaaggggatagtttatggagtattgctagaaaatttaatgttcctcctattgacctactttctttaaataacttaagccgtcaaagtaaacttcgacctggagattatgttcaagttgctataaattga

SEQ ID NO: 8956 - DNA, 759 bp, Lawsonia intracellularis
atgaaaacaacatttaaatacctcttagctatagttataatagttgtcctatggaagattggaagtatcattattggggaaaatattttacctaacccaacaaaagttcttatctacttttataatagtttaaaaacaaaactctttttaactcacgcaggtataagtattttgagaatatctgttgctatggcacttgcatggtttacagcttttccttttggcctacttcttggtactaaacatttagtagatactattttttctcctatcattttcttaacatatcccattcctaaaattgttctacttcctatttttctaactctttttggtcttggtgagtcgcctaaaattttactcatcacacttacaacaggctatcaaatacttattgctacccgagcaagtgccctcaacattgacaaaaaataccgtgactcttttcgatctattggaggaacaccatcacaagaactacaacatgttattattcctgcgacattacctaatgctttagtagctctaaaaatttctagtggaacagctacagccgtactttttatggttgaatcttttgccacacaatccggcctaggttttcttattatggatggatggggtcgaggcaatatgctacagatgtatacaggaattttagcaatgagtcttcttggaatgggtcttcatgaattctttaatgcaattgaaagatacctctgccgctggaatcatctccactcaggattagcaacttaa

SEQ ID NO: 8957 - DNA, 747 bp, Lawsonia intracellularis
atgagctttcatggtatttcagtagtaaatataaataaaatatataataatactctaattctccataatctttcttttaaaattcctgctggagaaactctctctattattggtccttcaggatgtgggaaaacaactctcctctatattctttcaggacttgaaaaagcaacttcaggtgatgtatcactatatagcaaaaaaatagcttttattctccaagactatggacttttcccatggaaaactgttgaagaaaatatacttttaccactattactccaatctactcctataaaagaacaaaaaaaagcccttaaagaaatattagaagaactccaacttgtaggacttgaaaaaagatatccaatacaattatcaggaggacaaagacaacgagttgctattggaagggccttagtaacaaaaccagatattctttttatggatgaaccattctgctctcttgatgctattacaagggaacggttacagaatacactttttaaaatatggcaacatagaaaaataacttttgttcttgtaactcacgacatcatagaagctacatttttagggaaatatatcatggttcttacacctactccttctccatctatgtactggatagaaaactctactttcaatactagacattgccgtacccatgaaacattctttaaaattacatcaaaactccaacaactccttatacctatccctagctgtgataaagaaaatatatga

SEQ ID NO: 8958 - DNA, 912 bp, Lawsonia intracellularis
atgattattattcgcatttttctttttttacttattatgagttatactcaacttgcccaaagtgctataaatataggtacactgcctgcagcatcttctatcattttacatgttgctattgatgaaggcctctttgctgatcaaggccttgaagtgaatcttgtaccttttagaagtacagttgaacttagttctgctatgcgtgcaggtatgcttgatggacattttaccgatattgtcactgttcttctccaaaatgaaacaggtgtcccacagcaaattgtggcaacagtagcacgatcaacaacacaacatcgcaattttggtattgctgtttctcaaaaatcttcaattcaatctcctaacgatttaaaaaatacacctattgctatttccaaagctactattatcgaatttttagcttcaagactcctacaaaaagctcatttacccccaacaagttgcccgctaactgatatcaacaggattgctttacgcacacagcttctcatgtcaaataagattgaagcagccctattagtagaaccattactatcgttagcagaaagtaatggctcaaaagttatccttgatgataagggacttaatcttgtttttgctgttattgcattacgtaaagaagtattaagtgataacatagcacaatcttttcgtaatgcattgttagaagccgcaaaacgtatcaatgctaacccagatacctaccgtacacttatggttaacaaagacttgcttcctcaagatgttgttatgacttttgctatgcctttttttgatattgaaaaagaaccattacctaattcagctgatatagaaacctttgcaaattggatgatatcttcaaaactattacaaacatctcctagctatgaggaaatagttctacaatga

SEQ ID NO: 8959 - DNA, 510 bp, Lawsonia intracellularis
gtgcaaactttaattgttgtaacctatgataccgagttaaaagcagaagaagttagattagactttttaaagatgcaaaaagaatatctagttgcattagaagatgctgtagttgtggtacgtaaaccagatgggaaaataaagctacatcaaatgtataatctcacagctggaggagctgttagtggaggtttttggggaacacttattggtttaatctttttaaatccactattgggattagctgtaggagcaagtgcaggtgccattgctggtgctttaagtgatgttggtattagtgatgattttatgaaaaatcttgcaaaacagttaactccaggatcatcagcattatttgtattagtaaattcaaatattactgacaaggtattagacgcacttcatggtacaggtggagtaatcattcaatcatcattatcccatgcagacgaagcaaaattacaagaagctcttaatggtatgtcatctaatgatgatagtagtaactaa

SEQ ID NO: 8960 - DNA, 771 bp, Lawsonia intracellularis
gtgattatgataaataagacaactaagcgccataaagcattgcaagaatttcttgctgcccgtggctatgcaactattgaagatcttgctagacattttgatgtgaccccacaaactgttcgtaaagatataaacagattagcatcagatggaaaagttcagagattccatggtggtgcaggaatgcctcttggctctgaaaacattgtttacgatgaacgaaagagcatttgttcagaggaaaaaaatagaattgcaaggttacttgcaaatcacatccctgatggagcatcacttttcattaatattgggacaacaaccgaagaggctgctagagcgcttcttgaacataagaacttaagaatactaacaaatagtttaaatgtagctgctatttgtgcaagaaatagctcttttgatgttcttgtagcttgtggtacagtccgacataaagatcacggaattgtaggagcaagtgcagaacgctttatgagtgaattccgtatggattatggtatcataggtatttctggtattgatgaatctggaaacttgttagattatgattatagagaggttgctgtagctagaacgattattgaatattctagagtagtatttttagcaacagatagctctaaatttggtcgacctgctatggttagagtaggtgggttatcaaatgtaaaagctatttttactgatggaccattagaagaaaagtggcgtcagttagtggagagttcaggaacagaactttttatagcctga

SEQ ID NO: 8961 - DNA, 321 bp, Lawsonia intracellularis
atgaaaattgataatgctccatcagtacagtctatgttacttgggagatctcaaaaaaacacaaattcctccacttttagtagtcagttgaaagaacaagttgatacctctactaataatataacaatacaacaaactacgcctaatattaaaggtaatataagcttaccagatgtaaatattattagtcgagaagcaactccttttctctccaaagaagaagtagatttttttgaaaaaatgatgcaaaaaaacattaatcttcaagggggctataagacttactccacccaacaatctagtataaatataaaaacataa

SEQ ID NO: 8962 - DNA, 693 bp, Lawsonia intracellularis
atgaaattgagcatcatgaatcaaaaacttattggaatacttggaggaacattcaatcctgtacactcagcacatataaacattgcattagctgcaataaaatatatgcatctagagcaaatacaattcataccatgtatggtacctcctcataaaacaactaaaaatgttattccatttcaactacgtgtggatcttttgcaagctgctatacagggaaatccattattatctattaacactatagaatctatattgcctcaaccatcatacacttggaacatgctcaattactggaagaaactacatactcttcatcagccactttttattttaagtgatgaagattttgccatgctagatacatggtataatggtcttgaactacctagtattacaaatttcttaataattccaagatctacaaacaaaaaacaatcattttcatcaacactaaaacgcttttggaattgcactacaataatacaagatcgtcataacaaaatggtaagttatgcatcaatatttaaaaatttatactgtttctttcttaatactcctataatggatatacgctcctcaaatatcagatccgcatggaaaggaggagtgtacctaaatcatacaatgccaacacctgtcacaaaaatgttagaatatcaccagaatatattaaaaaaattatggaaataa

SEQ ID NO: 8963 - DNA, 588 bp, Lawsonia intracellularis
ttgtcatttattattagacattcaaaaactattatagctttttttcttatattactaagcatagtaattattgctggagtctggagttggtatagttctcgtgaagaaataaaggcacaagcagcacttggtcaaattttaattaattcggtatctactgaacaatttgatacattgataaagtttgaaaaaacagctcctactgctttacaaaaaggcattattcttcaattagcattttgggctgttcaattagaacaatatcaaaaggctgctgaagagtatggtatcttatataataaagatcctaaaggtgctattggtattttatcaggccttaatcaggcggatcttttacaaagaactggtaactggaaagaagcattaaatgtattattaagtcttgaagaagttgcttcaaatcctatcttaacaggaatttatgagtcacaagctatatgtgctgaacatataggagaaaaaaatattgctatatctgcttataagaagcttatagatgaattaaatataacaggagttgacgctacatactatgaaaataagcttacaatattaagtaatagttaa

SEQ ID NO: 8964 - DNA, 399 bp, Lawsonia intracellularis
atggatgattttttaaaagaagcattagatatagtaaaagcacaagccagcgttcgggtaatggcagaagatgaaattatttctatggttcgtcgtctttcttcaggtataaaggttgtttctgaaggtgattgcattcaagaagagcaggcaccaacagaattacaaatggatccccgtaagtcagttaaagaaaaatctattacttgtcttgagtgtggtaggacatttaaaattttgacacgtaaacatttacgtagtcatgggcttgacgccaatgaatatcgtgaaaagtggggactaaaaaaagataccccgttagtatgtaaaagtttacaacgtgaacgtcgtaataaaatgaaagatatgaagctttgggaaaagcgtagaaagagttaa

SEQ ID NO: 8965 - DNA, 750 bp, Lawsonia intracellularis
ttgaagaatattataaatactataatttttcctaagcaaaggaacaaaaaaatgtcacaaaaattttctatgctacaactaatattattttttttaacttttatattttattcatatataacagatagttatgcagagtctataccaatagtaaaagaattacagcaatcatatcaatccattaaaaacttttctgcaacatttactcaagaacttactcatcaagaaagtgggtccaaagaaacacgtattgggaaactcttttttaaaaaaccacttcttgtcagatgggaaacaaacacacctcatgaagaacttcttcttattaataccaatgctgtatgggattatcttcctgatgaaaaccttgtttataagtactctacagatattgtaaaagattccacatctattattcaggttattactggacaagtacgacttgataaaaacttctcaattattgaaaataataataataataataatgagctaatcttccttaaattatacccaaaagaaccaacgactcaaatggttgaggcatttttatggattaataaaaaaagtttactcattcacaaagtacaatcaattgatttttatggaaatacaaatactattacttttattaatattacacccaatactcatattgataataacatatttcaatttactccacctaaagatgttactatagaaaatttacaagattcatctacaccagaacgaccactatttaattag

SEQ ID NO: 8966 - DNA, 2688 bp, Lawsonia intracellularis
atgatatattcaggcaaagaaaataaatctacccgaaatctatctcttcaacagagtagaccaaataatgaaacacctcctgaagataataatcaaaaacttgctcgtgagttatttggacttttcctcattttctggggattgcttgtccttttaagcctactttctcatgatcaacgagatcctagtcttaaccatgtagtaagtaatttttcaaaagctcataatcaagcaggaatatttggtgcatatatcagtgggctattggtagatatatttggattctctgctattgtttggccagccatatttatagcatggggcgctggatgtattactacttggctaactattccttggtggcgttggcttggattttttattctttcattttgcctcatttcctttggtgctgcatggaactttggtattggtgatgttagaggtggtggcatcataggtatgaccatttataaacaatcttctataatttttggtactattggttccactcttatttggctttttttattctttatttctcttgaatttgcctttggtattgcatggttaaatattcttcatcgccttcaaaatattattaaaaataaaattgaaaaatatgacatttctttaaaaactatatgttcaatatgtttaaactataattggctttgttttatacaaaactattttccctttaaaaaacaagaagaatatattgatattatcccattatatgaaattcataaccctactctgcaacctgcttacccttatgattcttctttattacataatacccttgcccatcagtatacaggtattgctacgctatcaagctatcgatctgaaagaatacaatattctcatacatcaaacaatcaactatggaacataccacattctttacaagaaacattaaaaaagtcccataagaaaagcataatctctacgacctataacgaattcacttctcctgacataactcctctaacactcgaagatgatacctttgaagatactcatatcgatatagataaattagaaaatttagacacaatagatatcaccacacatccattgataacctctcctacgactaacaagtatgaggaacaaatccaacatacttcttccaataatttaccaaagctactagagtcattctcagaaacatctagtataccaacttcaacagctttgcgacaaacaactaatcttgtaaaacacaaactaccattaccttccttatcccttcttcattcttctacagaaaatgatatactaccatctcaacttactcttaaagaaaaaagtaaaaaagtgatggattgtcttagtgactttaatattcaaggagaattagttcgtgttacaccaggtccagttattacactttttgaaatacgcccagcacctggagtccgtgtaagtagaatagcaaaccttagtgatgatcttgcaagaagtctgatggctgaagccgtacgtattcaagcacctgttccaggtagtgatacagttggtattgaaataccaaatgaaaatagatcactggtaagctttaaaacacttatacagtctaaagcattcaaaaacagctcatcaccattaagtatggccctcggtaaagacatagaaggaaagtcaacagtcaaagacttggcaacaatgccacacattcttgtggcaggaacaacaggcgcagggaaaagtgtatgtcttaatacaatactattaagctttctctataatgctactcctactgacttgaaactcatacttattgatcctaagagggtagaactagctatgtatacacaattaccacaccttatacatcctgttgttacagaacctgcacttgctaaagtagccttagaatgggctgtttatgaaatggatagacgctacaactgtcttgcacgccttggagtaaaacattttaatgagtttaataaaaaattacttagcattggcaataacaaacctgaagaatttgcagatttaacatacctcccttaccttgtagttattattgacgaacttgcagaccttatgatgactgcaggaaaagaagttgaaggctcaattgttcgccttgcacagcttgctcgagctgcaggaatacaccttattgtggcaacacaacgtcctagtgtagatgtagtaactggacttattaaagcaaactttccctctcgtattgcatttcaagtagctaataaatatgattcacgtacaatcctagatgccacaggtgcagaacaacttcttgggaaaggtgatatgctttttaaaccaaatggtgggaagattcaaagacttcatggagcttttgtcacagatgaggaagtaactgctgttactgaatactggagaaaacaacaagcaccagtatatgaagtagatttttctaattggaataaccctctcaatataaataatactacaactagtaatacaaatacaaaaactccttttagctcaagtgacgaagaatcgttatatgctgaagctattacttttgttcaagaacaaggtagaatgtctatttctctattacaacgacggttccgtataggctttaataaggctgctcgttttgtagaaagaatggaagaagaaggcatacttcctcctacaatacgtggaaatcgttcacgtactatacgttcaaattag

SEQ ID NO: 8967 - DNA, 558 bp, Lawsonia intracellularis
atgtattcaactactgattttcgtaaaggacttaaaatagaaattgatggtgtcccctatgatataatagactttcagcattttaaacctgggaaaggtggagctatggtccgcaccaaactccgcaatatccttaatggccgagtaatagataatacatttcgttctggagaaaaagtcgaacggccaaacttagagtcaagggatatgcagtttctttatcatgaaggctctgaactcatctttatggatcttacaaactatgaacaactccatatgtcagaagatgttactaatggaaaatctgaatttcttaaagatggacaacaatgccgtgtacttctttacaatgaaaaacctatagatatagatatccctttaacgttaattcttgaagttatagaaacagaaacagctataaaaggtgatactgtaagtaatgtaacaaaacctgcaaagcttgaaacaggagttgttatacaagtacctatatttattaatataggtgagcgtataaaagttgacacccgtactaaagaatatattggtcgtgagtaa

SEQ ID NO: 8968 - DNA, 609 bp, Lawsonia intracellularis
atgatgacacaatacaaacttcaacttgaggcaacaaattttactaaacaacagcttcaacaacaattagatattctagagcaaaacaatatacttcagattgcgttagcaggacgatcaaatgtaggcaaatcatctcttatcaatgctcttgcaggtcgtaaacaactagcaaagacaagtggaactccaggaaagacacgttccattaatttttatgcggtttatccaaatacttttatgttggtagatttacctggatatggttatgcacaatgtagtaaaatagagagacaacattgggctatgcttatagagtattatctaaaaaactgtagtaagctaaaagcttttgttttgcttatagattgtagaatccctcctcaaaaactagactatgaactagctgaatttgctaccagttattgtattcctcttattcctgttcttacaaaaattgataaatgtaaattggttgaacaaaataaacgtcaaaaagagtggagagcattgcttaataatacacaaccattacttgtttcttcaaaaaatatgaaaggggtacaacagctatgggaacgtatacaatatactattgatagctattaa

SEQ ID NO: 8969 - DNA, 660 bp, Lawsonia intracellularis
atgaggattgaatcagatggtagctggagacaagtaccaccaaataattcatcaacaagcagtgtagaatctagtcaaggagcacaacaaacaaaccaaacagaagaaacttctggtcgtagatcttcaagttctttttggggtaggttatgttctcgttgttctagtggtctttcacgtgttggagctgcaataagtagtatgttttctagtcttgttagttctattaggagcttaagtcaatatataacaagagataaaacagcttcaggtgtttcttctggaagtttagctcctagagttagtagccatggaattggtggtcaagatggatccacaaggcatactactagtaacccacgggacagtgctcctccagatttttctccacctccacctcctattaataaaagacatggtgggccagattcagatccaatttatgatgtgcctcatggagtggggagtacatcaccttctttacttccacatggtaaaccagatacagatccaatttatgatactccaagaaattttgggatagtaggtgcacctatacctatgccacaatcaggagggaatcgttctcaagaaccaatatacgatacacctaaaaagcctggagaatcgagtagtagttcttcatcatcgtcctcatag

SEQ ID NO: 8970 - DNA, 426 bp, Lawsonia intracellularis
atgaaaatatataatgagccaacatggtatgatggaataaaaaaagagaatgagcttatagagaaagaaaagcctctggaagatataagtagttattgggagttttgtaatattgagttggggatagttgcacgtgttattgttggaatttttacactaggcttgtcagaagctgtatttaagtgcatgaggatgtataaagctaaaaaaagtgaaatatatggtccaccaatagtaaaaggtgtttcatggtatgaaaatggtaagaagaaaagagtgtgggatgataatcagtcacactcagaagaagctcaaagtcaacctcagaggaataggagtaggagaaatagacaattaggtagtagagcaccaaataggtatgggttgatgtatcgtaatggtatgcctacaagattttgggtttaa

SEQ ID NO: 8971 - DNA, 549 bp, Lawsonia intracellularis
gtgatgagagtagatgcaggtcaaagaataaatcaagctttaatggcggatacaacacaagcaacttctactaatgagacttcagaagcgcagaatacagagaaaacagaaggcagtaaaggttcttcaaaactatgtggtatgaattgtaaaaaaggtctgaagttagctggacgtattgcccttgcagttctaacattaggtatttctgaaggtgtgagaaaagggatagaagcttatcaagctagacaagttaaatctgaaggggcacgaatgggtaaattatgggaaactggtaagcctagttttcctgaaaaaagtggcatacataatccatctgcaactgatgataatgataaaaatttgtggacatcttctagtcagaagaacagtggtggtgtaaatagttttggtaaagagtctccatcacctagttctggatctagtggttctcattttgtgtttcatgactcaccacagaaaccttcaagcggtattacagctgagacgacccttaaaacaaatagtggtggtgctacaggagaatag

SEQ ID NO: 8972 - DNA, 459 bp, Lawsonia intracellularis
atgccaattacaataacgctcaacgcacctagacctcaagactttgaagataacacatctgtaaatagagataataggacagaaaatactcgacaaacacaagagacgtcatctaaaagcgctacatcatcatctgcatcttcattcctacatggtctttgtagtaactgtaggcaacttggaggagcaatggcacgtgtaggaagctcagtacttgcaagtgctactctcacagtgaggaatttaggtgtaagagcagtaaatagttatgctgcaacacaagttaggagtgggatatcaagattagctgatttaatttcattaagagacagccaatctggtccaagaggtcctgaaattactgttagttataataaagatcaagataaagttacgtttcatgatccatacaatagaggtggtttttcttcatcaggtagtagtggtgttagtggatag

SEQ ID NO: 8973 - DNA, 477 bp, Lawsonia intracellularis
atgccgccaatagatccagctatagcagctaagatatcagcagctatgaatcaagggctttatgattacgctaatagaaacagtaatgacagtagtagtgcaagtagtacatcatcagcaagctctacttcatcattaagctcgtcctctccattatatactgctaattgtaaacaaggtttaaaaatggcagcacgtgttggacttgcagttataagcttagggttttctgaattaattatgaaaggtatttctctgtataaatcaagacaagctacacagaatccacaaccaagagtagtaaatgtatttgagtcacaaccacctttagaaatttcacgtagatcaagtacagatagtactagtagttctggaagtgtatcttctcgtacacagttgatttttgaacaatcttctcatatgcctacaagcggtattacagctgagatgtcacttactcgtggtagtaatgattaa

SEQ ID NO: 8974 - DNA, 423 bp, Lawsonia intracellularis
atggagataactatgagttatatcactatattaattcctgcattacttatagttctaatttggcttatcttgcaatctaaaacattagccaatatacatgatcatttagctattacagataatgatgagttagagattcttttaactaaagtgagtgcagtaacacttatagatgtacgctcatcacaggagtttaatgtaggacatctcactggagcaattaatattcctctcaaattccttaaaaaaagtattgatactcttgaaacaacaaagcctattatattaataggtaataatagcaaaaagttacaaaaagttgctatcctccttcaaaaaagaagacctgatcttacattacaatatataaaaggaacattagttcatactcttgataacaatatcataataaaatgggattaa

SEQ ID NO: 8975 - DNA, 804 bp, Lawsonia intracellularis
atgcagtctataataaaatttattcatatttctgatacacatatttctgctcaaggctgtttagtatacgataataatcctagagtaaagttacagacatgtattgatgagattaaaagagatcatttagatgcagcatttcttatactaactggcgatgtaacaaatgatggtagcatggagtgtttttcttttcttcaagaggtgttatcagaactaccaatgccatggtatcttgttatgggtaatcatgatttaaaacaatcgttatttacagctatccctgaatatccaagagatccaaatggttttgttcaatttacagtagatactcctgtaggtttatgtatcattcttgatacaacaatagcaaatcagtctagtggaatactttgtgctgcccgcttagactggttagctaatgaacttaagcaagcaacaaaacctgtgttattattttttcatcatccaccattttctcttggaattccctcaatggatgctattgtacactctttaaaaaattctgaagaattttttgctgtattgaaaccatataaagataagattcgccatatgtttgttggccatattcatcggcctatttgtggttcatggaatggtataccattttcttgtgcaccaagtacagcacaccaaattgctttaaattttcaatctgataaatctgttcttggatttaaagaaccatcaggatatagtattgttttggtaaataatgatcagttaatagttcatttccaagagtgtaataagaccccgaatataattattaaagcataa

SEQ ID NO: 8976 - DNA, 1050 bp, Lawsonia intracellularis
ttgtctgccatttgtttgaataatgtttgtaaatactgggatacatccaaagcagttgatgatataaattttaaagtagaatctgggaatttacttgtactcttgggaccgtctggttgtggtaaaacaactacattgaggctaatagctggtcttgaaaaagtaacatcaggccaaataatcattgatgattgtgatgtaacatatttgccaccctcaaaacgtcatttatctatggtatttcaatcttatgctcttttccctcatttaacagtacaagaaaatattctttttggtcttaaagtaagaaaggttccgaaacaagaacaaaaaaaacgtcttgataatgctgtagcaatgttgaatttatatggtttacttggtcgtaaaccttctatgctttcaggtggtcaacaacaacgtgtagctcttggtagagctcttgttgcaaatgcatctgtatgtctcatggatgaaccactttcgaatcttgatgcacaattacgtaatgatatgcgtaaagaaattagggaaattcaacaagctttaaaaatgacaatggtttatgttacacatgatcaggtagaggctatgagtatagctgatcaggttattcttatgaataaaggagtaattgtgcaacatgctgtacctgaagatatgtatataaagcctcaaaccatatttgctgcaagttttattggtactcccccaatgaatataataaatttatctcaaaaggatggaaagctaatcatatctggttctcaagatatttttattccgcaagtcccagaaggagctactgttataggtgttagaccagaacatcttcaaatttcttctgttggatggcctagtatcgtattatctaatgaataccatggagctgtttcattagtaacttgtaaagttggaagtgaaaaaattatttttattcagcatggtaatgtaacttgttctcctggagagatagtttatcttagttgttcaccagagcatatgcatttttttaatggagatacaggaaataggatcactagacactaa

SEQ ID NO: 8977 - DNA, 1296 bp, Lawsonia intracellularis
atggttcgacaatttatacataaaatatattatataggttttgtccttagtttcattatagttgttccaacatttgctatagcattggataaggtgcatctaacattttgttttcctgttgctgtaagtggtcctatcacaaaaattattgaagatatgactgctgagtttatgagaacttatcctgatatagttattaagccaatatatacaggaacatataaagatactattacaaaagttttaacagcaatgcatggaggtgaacctccccatgttgcagtgttacttgcttgtgatatttattcattaattgatgaaaatgctattattgcatatgaagatcttcctggaggagcagagttaagtcatgactatttcccagtgtttatgaaaaatagtcaagctcaaggaaaaacgtggggtataccttttcagcgctctactattgttatgttttggaataaagaggcttttactaaagcaggacttaatccaacagctccccctcaaacatggcaagagcttattgatataagtaagaagcttgttaatagagatagttcaggaaaagttacacagtggggtatttctattcctactacagggtatgcttactggatgtttcaggcattatgtattcaaaatggacttgaacttgcaaattcagaagggacaaaagtatattttaacgaccctagagctgttgaagcacttcaatttttagttgatttatcatataaatatggtgtgatggaaaaaggaactattgaatggtctacaatacctagagattttcttgaagggaaaacagctatgatgtggactacaacaggaaacttaacaaatattcaagaaaatacaacttttgattatggcgtatctatgttaccaaaacatataagattgggttcaccaacaggtggaggcaatttttatatattaaagaaaacaacagaagctgaacgtgatgcagccttaaagtttgtaaaatggatgactgataaagagcgtgcggcacagtggagtattgatacaggctatgtattagtacgtcctgatgcttgtcagacagagaatatgaaaagatatattaaagaattcccctaccttgatgtagcccttgaacaattaaaatatggagttgctgagttatcaactcatgcaaaccagcgtgtaactaaagtattagaggatgctatacagtctgctgtaactggaactaaaactccatctctagcactagaagaagcacaaaaagatgcagaacgtatcttattacgttacagtaattga

SEQ ID NO: 8978 - DNA, 888 bp, Lawsonia intracellularis
atgatactactacgtcattatattatttctcaagtaaatgcatggcttttattattaccagcattcattattatatttgtattttccttacttccgataacctctactattattaatagtttttttatgaatggagatgggggagctgtttcaaagtttgttggtatagacaactatctatatttactagaagataaagtatttcgaaaagctttatggaataattttatttttgttatgagtgtcatcccatgttcaatgattcttgcgttaattatggctttatgggttaatactaaactagctggtcgtagtttattgcgtttagcatattttgtaccaactattttacctatgattgctgtagctaacatttggttattttttttcacaccacaatatggacttattgagcaaattcgatctttctttggtctttctgggataaactggttaggtagtgagagtacagcacttttttgtgttattgttgttggaatatggaaggatgctggattttttatgattttttatttagctgcattacaacatatacctccttctttaggcgaagctgctatactagaaggtgcttctcgattttattaccttcgtaggatagttgtgcctctattgatgcctactacattatttattttaataaatgcaactattaatgcatttcgtatgatcgatcatctttttatattgacaaaaggtggtcctaataatgccagtatgttgttattatattatatctatgaagtaagttttcaattttgggatacaggttatggatcagtgctaacagtaactttacttataatccttggctttatagcattattccaatttggtattttagaacgaaaggttcattatcaatga

SEQ ID NO: 8979 - DNA, 837 bp, Lawsonia intracellularis
atgaaaaataaatataatccatatgaacctcaggggataacatattttttagaattggcaggggcttggttacttgctgttatttgggcattacctttagtatatgctatttggactgcatttcatccaatggcatattctacaaacttttcactatctgctccaattacattagaaaattttaaactagcatggcaagctgctccatttgcacaatattttgtaaatacattattgctagtgacattggttattacttctcaacttattttttgtactcttgctgcttttgcattagttcgttttgaatttagaggtaaagagatatttttttggattattcttatacaattgatgattatgcctgatgttcttattgttgaaaactataagacaataagttctatgggactgttggatacgactttagctattgcatttccttatttagcaacaggttttggaatttttttgttgcgtcaagcatttaaaattgttccaaaagaacttgatgatgcagcagctattgaaggtgcaaatatattccaaatcttatggtatgtttatgttccattagcaaagcctacgtatattgcttatgcattagtctcaatgagttatcagtggaataatttcctttggccattgattgttacaaattctgtttcttctaggacattaactgtaggtcttcaaattttttcatctatagagcaaggtgttaattggtctattattgcagctgcagttcttataacaactatacctcttttattagctttattactttttcagaagcagtttatgcagtcttttatgagagctggaataaaataa

SEQ ID NO: 8980 - DNA, 1530 bp, Lawsonia intracellularis
atgatattggaatatactatgaatactcaatatgctataaatacatctgtagttcgttcctttgcatcaaagtgctttacaattctttctagccttaacattgtaagcttacttatcctatttgctcttcaaaatatcttactccttataaagtacgtaccttatcttcttcaatattatgaccaaatcattctaaagtttggtatagctacttattctgattctatgattcctttaactccctggctatacctcactgcaatctcaccaatcaatttaacttcctttttaatgataacaaacatgtcactgtctgctattgttcttatttttacatggctactagctattattactaagcaaaaaaaaaatgtaccatttattgctggacttcttcttttatcaacaatgataacgctactgatgccatatatcactcctgactcaatactttttgctgctattgtcctgttagcaattatatgtctttataaaggatggatgaaatccagtgctccattttggcttactataggattcttactaacaggttgtgcaggattaacaggtggtttagtaggtttttttataccactcatttcaagccttatttttcttatttggagtggaaatcttcgacgagctggttgttatgacggagcattagcatttggacttatgcttgttatgttattaggatggggaagtattataagttcagtggagaatggaagagaactacttaaatttattacaacttatcaaattattaacccaactcaaacaatttttcatattcaaactaaagactttttgttttctactgcaatgatatgccttatatggttaccatggacacttattatttttcttttaccctggtcacacttttttagtattcctcgtaaactgatagcatatagattatccttccctggtcatagttggatatggattaatacccttattacagtactatgcattatatttataagttcatctgatctactctctattataagtctttattctttaatcgctatcttaacagctcaatgtataatctcacttacagaacaaaaaagtctattcttatatttaggtataagtagttattttttggtaattggtttattatttctatttatatcactttatcctataattcaaacttggcttccacgaggatttgaaacagacctccctaaaattattgagtctttcttttttgataaactaggaattgttataacttcaactatttctatattgtcatttttcatactatggaaatttactaataaaagatctcctactggtagccttatagttgttgtattatgtacaacacttcttgctattatattatcatattatacaactcctacaagtccaaatgaaatgactctttttatgcagctacagcattcatcaaccccagccacaacaaatcgtgttcctatagatagtcttcccgactcaacagatagtaatgaagatacagcagaagaaaattatcatgatttataa

SEQ ID NO: 8981 - DNA, 942 bp, Lawsonia intracellularis
atgcgtgtagttgtattaggtggttcaggatttattggtagttcacttataaaaacattagaaggaagagatcatagtattatagtttcaacacgtgattcatcagatatttctattagtccatcttcaaatgtatcttatgttgtgtggaatggtattgatagagaaccttgtttcaaaatgtttgatggtgcagatgtaataataaaccttataggtgagaacgttgcatcaaagcgatggtcagagaattggaaagaaaaaattgtaactagtcggattcaagtaggcaaaacaattgtaagtgtactagaagagttaaaaagttttccatctgtttttatacaagcttcagctataggatactatggatactggaaaaattttgatactgctcctcaatgtacagaaagctctcttccaggaaatggttttcttgctcaaacagtaatacaatgggaggcatctacttcagctcttgatacattgggtattcgtagatgtattattcgtacagcacctgttcttggtatgaatggtggtatattaaaaaagatgttacctggtttttattttgggctaggaagtatttttggatcaggtagtcaacctttcccttggattcatataaatgacgaaatagcagcaattatgtttttaatagataataaagaggcatgtggagtttttaatttagtagcaccagaacagttaaatatgaaacattttgcacagtgccttggaaaggttttaaaacgacctgtatttattcatattcctgaattattattacgtttaacattaggagaaatggctgaagagctcctactttctggacaacgtgcataccctgaagccttattagaaaagggatttacttttaggcatggcctacttttacctgcgctaaaggacttattggataaccatttagcaatgtga

SEQ ID NO: 8982 - DNA, 1095 bp, Lawsonia intracellularis
atggatccattgacacatgcactaactggagcaaccatcgtttatacatttcctaaagaaagccgaccatggtggtttcttgtatggggcatgcttgttgctatgctaccagatatagatattctttttgttagctctgcaatagactacattaaagttcatcgagggatcacacactctttagctggcgcttggggccttgcttttatatgtacaatcccattagttgtacttactgcattacgtccccaacccaatgaacttcctccacctaaacaaatttcatggacacttattgaagcatggttttttacttatgctattctaatattacatatttggcttgatgttatgaactcttatggcacacaaatttttcttccatttagcgaatatagagttcgactaaactctcttttcatagttgatttacttcttatactccctttaattattggacttttttttaggagaaacaatagattcattatggtgttattattactatggacaattatctatcctcttaccaatatagtaataagactaggtcttgagacatatcttacccatagttatctagcaaaaaatacatttcaaacacaaaaagaaataacactaccaagacataacacagaagaacatattatagcagtccaccttattcctgatgcatttacaccatttcactggaaacttattcttgataaaggtgaacactggaatgtctcaggttataatagttttacttctcccccatctaaatttacttcttttaaaaagcctccagaagtactttgggatatgttaaaagaaaaaagtagtatatttcgtacttatgaacaatttgtagtttttcctgttttaactgaaagttatgaaacacaaacaggaaaagtctatatatttagtgatctaaggtttggatctactatcccatttattaacgacttgcaggtaaaacgagaaggtgaagaacttgcatttagaatcatggcacatataaaccatgcaggagaactctcatctgttcgttttattacaggttttggtgctggcggtgatacaggatgggtagatccccttcctgattaa

SEQ ID NO: 8983 - DNA, 1083 bp, Lawsonia intracellularis
ttgcctattcttcatttaatcaaatacatttacaaaactgttaggaaaactatgactgctatccattcatattcaaaaaaatatacagagtctactcaaacttctccagaatacttactcaaactagcacacgaagtattaaccattgaaatggatggaattgaaacaatacgtgaacgtctagggaatacatttgttgaagctctattacttctttcatcttgtaaaggaagagttattgtaacaggcgttgggaaatcaggcctagtaggcagaaaaattgctgctactttttcctccacagggactcctgctttttttatgcacccagttgagggtgcacatggagatattggaagtcttaaaagttctgatctcattttatctatttccaactctggagaaactccagaacttaatgctattgtaccaacaattaaatcatttggtactccaatgattgctcttacctctgtattaaattcaaccctggcaaaagctgccaatgttgtactacatactgaagtacctaaagaagcttgtccacatggattagcaccaacagcctcaacgactgcagtccttgcattgggagatgccattgctgtttgccttatgtcactaaaatcatttacagaaaaagattttttacgttatcaccctggcggaatgcttggtcaacgtcttacactaagtgttacagaggtcatgcgcactgatggactacctactgtccatctaggcacatctcaatgtaacgcattgaaaactcttgacaaaggtggtcttggagttgtgttaataatagataaaaaaaatacagtatgtggtatcattacagacggagatgtaagacgttctatttgttataataggttgaagcaagatgcacctgttgaacaaataatgacacctaggcctaaatgtggtaaaccacaagatactattgcaatactccttgatattatggaacaaaaagctattacagttcttcctatagttgacgataactataaactccttgggattgtccatatacacgaccttcttggaaaaggaacaatcatcttttctgatcgttaa

SEQ ID NO: 8984 - DNA, 732 bp, Lawsonia intracellularis
atgttatttcaaagtgatatcaaaaaatatttcacaaatacagcacatagaagaaaacgaatatatgatcggttaggaaactataaaacttatataaaaaacccaaaagaattattatggaaatataaagcaaggtatagagctaattactttatatctaaaccagaaatactagctctccaacaaaaagttcaagatctttttcacggacaaacatatgcaaaatattcagactttaaacgctactttattattaatcttcgacgtatttatcgtttaggactacataaatcatcccctgtacgtatccttgatattggatctggagcaggttttttctgttggctatgcaaacaatatggacatgatgtttatgcattagatattccaggtgttgcaatctttgattatctaataccagcatttaatattcctagaacatattgtagtattcaacctaatatttcaatccccaaaatggatcagtctttccatcttatagttgcatttgctatttgctttcatgagttagaaggaaatcagcgttggaatcgtaataattggttatattttttaaatgatattaaaaaaaactttgctcatcctggaacaaaaatgcatctattttttaatgatcatccacatggagattttgaacaagtgaaatcgtatgttatctcttctaattatactattaaagtaggccataaaactcttgaatttaacttctaa

SEQ ID NO: 8985 - DNA, 402 bp, Lawsonia intracellularis
atgaaaaaagtcaaattatcctgccaggaggtatatactttggaacaaaaggatattgagtactttcgtgcattactcacaactatgcttgaagaagcccagcataagggagattctacactagaggacctcacagatggtaatgaaatttttgcagatcctgctgatagggcatctgcagaatctgatagagcattcacattacgtatccgtgatcgtgaaagacgattaattcgcaaaattcaatctgcactacaacgtatagatgatggtacatacggtgtttgtgaagattgtggtgatgacattggaactccacgacttaaagctagacctgttactaaactttgtattaactgtaaaagccggcaagaagaaggtgaatctattagaggagaataa

SEQ ID NO: 8986 - DNA, 504 bp, Lawsonia intracellularis
atgcttagtgatagtattaaaaactggcaaaactatgaacttggaccaatctggaatgagcttatgttatggatcaaccaaaaagtaaactcttccctaccagatgggatatatactgttgctggttgtaacattaatatttttcctatgacatcaaggatggagggatcttgcctctatgaatctcatagaacaatgtgtgatcttcatatagttcttaaaggaaaagaatatttttggaataggcctattaacaaccttgaactagaaggcttgtttaatatagataaagacattggtttctacaaaccaacaacaaatactgatggtttaagtcggataacattaactacagggatatgggtactggtttttccttgggaagctcatttacctgatatgagtatagatgaacattctatcacactaaaaaaattagtagctaaaattccattcactcatcttacaatatcagctaaaaaagtaactcatggatatttttaa

SEQ ID NO: 8987 - DNA, 1263 bp, Lawsonia intracellularis
ttggttttggacatacaggaaaaaactaatagctcaaaaggaaaggtattcatgcaactctcctacaatgaatctattatgctacatgaaaaaaaattattatgtcatacatatggacgataccccatacatgtagtagaagcccatggttctatcatattggatgcaaacggaaataagtttattgatcttctgtctggacttgctgtaactagccttggacactgtaatgaagagattgcagaagtcatagaaaaacaagcaagaaaactcattcacacaagtaatcttctttatcatgacgaacaactagaacttgcagaacgacttttatctatggggcattttacaaaagtatttttttctaactctggagctgaagcaaatgaaacaagcttcaagctaactcgtaggtacatgcaacatatcaaaaaatgtaatgcatttgaaattattagcttagaaggctcttttcatggccgtacacttacaacagttgcagctacaggccaaccaagtctcaaagaaggttttgctccaatgcctaatggctttaaacaagtcccttggaatgatctggttgcacttgaagaagctatcacaccctccactgcagcagtacttatagaaattattcaaggcgaaggtggggtaaggcctatggatagcgactatatcataggtattgaaaaactttgccgtaaacatgatcttcttcttattgtagatgaaattcaaacaggactatgtagaactggtcaatattgggcatttcaacactttccaattaaacctgatatcctttcatgtgctaaagctcttgctaatggattacccattagcgcaatattaacaacagacgaaattgctcaagcctttgtagtaggaagtcatggtacaacatttggaggaggtccacttatttccgcggttgctactaaaacaatagaaattatgcagcgagataacctgcacaagagagctgaaaaactaggtaatatatttattcaacgtctaaaaaatattgctaatcgccatccaacaaaaatacaagaagttcgtggtatgggacttatgataggtatagttttaccttgtccaggtaaaccactatgggaaaaactccttcaaaaagggtttctccttaatcttacacaaaataatatactacgactactaccagcactcactattgacgaacactatcttgagacttttgctcaaactttagaagatacactagaaaaatatatacaggaataa

SEQ ID NO: 8988 - DNA, 483 bp, Lawsonia intracellularis
atgtcagcttttttgcattctgaagtgtctattcgctttatgtacttaagagacgcaaaaaaaatatatacaactagtggaattgcatacgaaacaccagcctctgttggacttgatttacgtgcatgcattgaagaaacatcactaactattttaccaggagaaagagaaacaataccatgtggtattgctattgagcctcttgaaaaaaatattgctggatttgtttattctcgtagtggtcttggtgcaatacatgggcttactgttgcccaaggtgttggtgttattgatcctgactatcgaggcgaaataatagttgtccttttaaatacagctaaaaatcctgttcatgttaaccgtggtgatagaatagcccaacttgtattccaaccagctttccaagtcagcttagttgaaacacaacaacttgataatacgtctagaggaagttttggttttggacatacaggaaaaaactaa

SEQ ID NO: 8989 - DNA, 510 bp, Lawsonia intracellularis
atgacagaaataacacatagtggcgatcaaactactcatttaaaaattcttggtaaaggctctataggacatcagggacctccttcgtcatctctcttagaaacatttggtaatttatatccacatcgaccttatgttattactatagcatttccagaatacacatctttatgtcctgtcacagggcaaccagattttggaactattgttgttgagtatattcctcatgagcgttgcattgaatctaagagtttcaaactgtatttaattgcttttcgtaaccatcagacgtttatggaaacagtcacaaatacaattcttgaagacatggttactgttctagatccattatggtgtagagtgaagggtttatttgaacctagaggtgcaacacatttgcatgtgtttgcagaacatataaaagaggttgaagaaaaagagaaacaggaagccttacatacagttatttttaattggaaacagcagtacttaccacatagttggaaataa

SEQ ID NO: 8990 - DNA, 810 bp, Lawsonia intracellularis
atggagaactatggtcttttcattgatgtagggaacacatcagtaaaaattggtattggtgttattgataggcttctgatttcatatacactttcaacaaacaattcattaagcggagatacattaggcatacaactccttcaatgtattaatcatgcagagcaagttatcaataaagatattactatttctagttgtatgatgagttctgttgttccaactatggatacgttgttacagtatgcttgtgaacgttttttgttatgtaaaccacatattattaatcaggattttattatcccactagataatcattatgaagagcagtgtgaggtaggtgctgatcgattagttgctgcctatgctgcaagacgtttatttcctgattctaaatcagtagtatctgttgattatggaacagcgactacatttgactgtgtaacagataatacctatcttggcggcttaatatgcccaggtattaaatcttccttacaggcattatatactaatactgcaaagttaccttctattatattaaatactgcatctaaggttcctataattggtaaaaatacaaagactagtctaacacatggttttctttttggctttgctacaatgacagaaggtatttattcaaaacttattaatgttcttgatggaccagtaacttttgttgctacaggtgggtttgctagagatatggcaaatgttgtttgttgttttgatgctgtttgccctgatcttattttagatggactacatttactatggatagattgcttaagtaaaagttattctttataa

SEQ ID NO: 8991 - DNA, 1302 bp, Lawsonia intracellularis
atgactgctattgcatcaatttgggctagagaaatccttgattctcgtgggaatcctactgttgaagtagaggtgactcttgattctggatatattggacgtgcagctgttccatctggcgcatctactggaacccgtgaagcattagagttgagagatggagacaagcagcgatataatggaaaaggtgttttgaaagttgttgaagctgtaaatggtcctatctcagaggctgttataggtattgatgcattaaggcaagttcaagtggataatactcttattgatcttgatggtactgataataaatccaaacttggagcaaatgctattcttggagtctctcttgctactgctagagcagctgcagaggctgttggtctaccactatatcagtatattggaggaactaatgctaaagtactgcctgttccattaatgaatgttattaatggtggagcacatgcaccaaataatttggatattcaagaatttatgattatgcctgtaggggcagaaacatttcgtgatgcattaagaatgggtgcagaaatttttcatacattaaaaactatattatccgctgatggacatgttactagtgtaggagacgaaggcgggtttgcacctcaccttaaaagccatgatgaagcttttcaatatttagttaaagctattgaagaagcaggatataatcctggttcagaagttatgttggctattgatgttgctgcatcagagttttataaagataaacgttattttcttacagaatataagactcctttaaatagtgaggaaatgatagagtggctaaaaggatttacatctaggtatcctttaatatctatcgaggatggtcttgctgagaatgactgggatggttggcgtgaattaacagttgaattggggaatgatatccaactagtaggtgatgatatatttgttactaatccaatcatgctgagtcagggagttgaagaaggtattggtaattctattcttatcaaagtaaaccaaattggtacgttaacagaaacattagatactattgaacttgctaaacagtcagcatatacaactattgtttctcatcgctcaggagaaacagaggatagttttattgctgatcttgcagttggaataaatgctggtcagataaaaacaggttcattgtcccgtagtgatcgtcttgctaaatataatcagttactacggatagaagaagagcttgaagattctgctatttactatggtcctgtttttagtgaaagtaatcattcttgttgtgatcatacctaa

SEQ ID NO: 8992 - DNA, 1044 bp, Lawsonia intracellularis
atgaactccctttctagtatctcacctaaaaaaattcttgtatgtcagcttcgacaacttggagacgttattctggcaacaccatcgattgaacttttaaaacgtcgatatcctaatgcagaactccatttacttacagaaaaaaaatgtgttccccttttagaaaacaatccatttatagatactgtttggtctttggataaaaaaaaactatgttctttatttaaagaagtgcaatggtattggaaagtcactcagacaaaatttgatcttgttatagattttcaacaactaccacgatgtcgttgggtagtagctctttctaaagcacctattcgaatttcttatactccaccatggtacacaaaactgctttacacgcattcaattaaaccacttgatggttactcagccatgagtaaagcaagtatccttagactactaggtattgagtggaatggtgaacctcctcatatttaccttactcaagaagaaaaaactttagcaaaacaacgacttaccacattaggattaaagtcaaaaagtcatcttattaccattgatccaacacataaaaaaaatacccgtcgttggcctatcacacattatattgaattattaaagatgcttgtaaacgctaagcttaatttatactttcttcctctttggggacctggagaatataaagagatccaacaactgattaatacaccagaactcaataactatattttacttcctgataacatgttaactcttagggaaatgtctgcttgtattaatgaagcaatattacatattggtaattgctctgctccaagacatattgctgttgctgtagatacaccatctttcactatacttggctctacaagctctgcatggacatatccttcagacaatcatagacatatccaatcaaatcttcactgtcagccatgtaataaaaatacatgtaatatctctaccaaatgcctcaagcttgttacaccacaaaaagctgctcaagccattttaccttttattcgacaattattaacgtaa

SEQ ID NO: 8993 - DNA, 996 bp, Lawsonia intracellularis
atggctactaatttattctctatccaaaagaaatttacgttattcttagttcttgtaacacttattagttttatgtacatttcattcacaatcgcaaaagatagctctagttcttcaaaagaaaaaaatgtgtctaataagttgtataaaaaggaacaactaactagattagatgagtgttatactggaggaggtaatggttattatcaatgggattttgatctagataatattcctaaatggcagctattggagcatggtttatggttaggaaagtttccaggcgtgactaaggccggagatgtttttgaagttgtaatgttaaagattaatcctcaatattacgacttttcacttcacatggcatcacagactggtaaagcattttctttacaggattggagtaatacatatgagcttagtgcagtaattaatgctagtatgtatcttcctgatggcgttacaagtacaggatacctccgtaatcatgatcatattaataatgcacatgttggaaagcgtcttggagctttttttgttgcatcaccttataattctactctccctaatgcagatcttcttgatcgcacaagcgataactgggagatacttctccctcaatataagatagttgtccaaaattatagagttatttctgctaatcgtcagtgtttgtggagtacaaaaaaagttattcactctatagcagcagttgcacgtgatgggaaaggttatttattttttattcatacaaagtatccaatatcagatttagattttggtaaccttttactctcattacctattgatatccgtatagttatgtatgttgaaggaggaagtcaagcaggactacttataaatacttctaactttaaacaattatggatgggaaaacatccagttagtattttgtctatcaataatacatcagtacctattcctaatgttataggcataaaaaagagaaaaggtccaataccatctttaaaatag

SEQ ID NO: 8994 - DNA, 1227 bp, Lawsonia intracellularis
ttgactcctatgggaaattgtacaagtaaactgtatgtaataatggttgggttgccagcaagaggaaaaagtacgttagcaaaacgtatatgctctggactggaacagcagggtattcaaacagctatttttaataatggagagttacgtcgtactctttttggaggagaaagtgcttgcccagaattttttaatcctcaaaataaaagaacaaaacgctttcgagatcaaatcctttatcaaagtatggctggagcaaggggttggttagaacaaggtggagatgttgctattattgatgctacaaatggtacatttgttcaacggatgaatatcatgatgacattacaagatagaccgttgctgtttgttgaatgtgtaaatgaagatcctttacttttatcagcatctattcaacgtaaaacaaaattacctgaatttacagaactttcagaagatgaagcattagagtcgttcaaaaaacgattagcttattatgaaagtgaatatacaccattgagtaatgaaccttgttggatgagagttgatgctgttgataaccgtattttagcagaatctccatgtaatgacttaccatactatgcagctattagagacattgttgtttcaagatgggtccatgatttatttttagtaaggcatggtgaaacagaatataatttagaaggaagaattggtggtgatccacctttaacagaaaaaggacaagagcaagctaagcagttagctgatcattttatgtctattgatatcccttatatttttacttctacaaaaattaggtctattcaaacagcagaactattacttgctagccataataaaactgtttgtatggaattgactgagtttgatgaaatcgatgcaggtatttgtgaaggtatgcgttatttagatatacgtaaacatatgccacatgagtacgaagctagatcaactaataaatatagttatatatatcctcagggagaaagttatgccatgcttaaagaacgtgtggcacagggactgaggcgtgctttatttcttgcaggtgaaggaacattaatgattattggtcatcaggctattaatagaaccttattgtctttattcttattccatcgaccagaagatgttccatatacatatatacctcaaaatcaatattaccatattactgtgacacaacagaaaaagctttttgaaatgattcaatatgcttaa

SEQ ID NO: 8995 - DNA, 1281 bp, Lawsonia intracellularis
atgaaaaatttattaaatcaacttgaagacaatatacatgtctttctcttagctcgtaatgaagatgtagctgtggttgatcgtcgatcacttcgatctattaatgtaaaaagcattcaatttatggagctaggtataaaagcagcatcaacccttgtcagtaactacctaaatcaacttagtatgcctgatcttatcctatgccacgaacaattaaaagacataacaggaaaagagtttgttgaattattgcaattacatcctgtattaaaaaagattcctcttatcatgacaataacaaacatttctcaagaacatgcagaaaatatgtattattccatattaaagcgtccttattcatcttccgatttacttaagtccattcaattagctaaggaaaaaacacaatctattcaacatacagttacctcaaatacaattgcttttgaaacagcacttgaatattttatcaaaactcatcaaagcactaaagagttatcttctgaaaacagttatacagctggaattaaagccatacgagaaaaaaattgggatgaagctattactcaattaaactatatagtaaaacatcaacctgaacatgcaaatgcacttctagcattagcaacagcatggaaaggtaaaggaagtaaaaggaagtatagagatatattagacgaactgttacatatttatgtaaaaaatcatcaatgggaacatgcaaaaaccattaatcaacggttagtccaagtaaatgaaggtacatctaatcctttatatagtgaagcatgcgaattcttatcaaaaaaaaatatctcagatgctgcacaagctctcattgctggacgtacaccttttcaaaatgagttactctacgaacaagttgctcgtggttgtatagcaaatcctaatcctcaagaaattgcaacaaccctccaagaatacttaaaatctattggtgaagcaccattggcagaacttcttggaaaacacctctttcaacctgtcaaaaaacgtattctatcactggaacattcagcaaaaaaaattatttcttcttccaagaatgaagaacaattttccttttttttagattcagctaatactcaagacaaaaaacaacataagacaaatactcaacaaacaaaaaatataaatgagcctgaaaatcttaaagatagatttaaagcaccatcttttctaaaatctatgccaaaactgcaagatgctatttcaatacttaaatttacatatcatatgtttcgagattcaaagaaataa

SEQ ID NO: 8996 - DNA, 402 bp, Lawsonia intracellularis
atgattaattactataaatttaaacaagtttatgaatatgccattaatggcaaacatgaagaagcacttaaattacttatagaattacaacaggaatttattgaaattcatgatgaaaataataaactacgtcttcatctccaagacgttcaagatacattattcttttctaagaaccttcactttgatagaaattcctattggtttcatcatacagatggcaaaaaaggaccattttgtaaacattgctatgaattaagaggaatacttagctatattgataaccataaagaactatgttcaacatgtggggcttctgtaaagaaaaatactgatccaacgttgataaaaaaaaataattgtaaaaaaattattccattcccacagaatgtgactaactaa

SEQ ID NO: 8997 - DNA, 936 bp, Lawsonia intracellularis
atgaaaaaaattcgatatagctcaaaacatagtatccataaaaaaattcctatttatgaaaaaatacaatggtatgatatagctggtagtaaaaatgacctcattacttttcttgataatctttctatatctcctgaaatttctgaaattgctattgaaaaccaaccgttcccagaagctacagttttttcaacctgtgctatacttagacttcctatacgtagcgaatggtctatacctgactgtgagtatgtaacatttcttattttcccagatcgacttgttactctccatcaaagccaagtatctcttcttgtacaacttagaatacagtatcaaaaaaatactatggatgaagatgtaaaatctataccaactttaatttcttatattttagacaaccttatagatgcaaatattcgctgctttaccagagctcgactaactactgaagaatttggggaaaaagttgatttagctactgttgttatcaaagaacaagacgctgtgaatgtacgtcgacaagttagtcaacttctcagtcaatttgaagatcagttttatgcattaacaaatttagaaacacaacatacaaaaaaagcttttctcaatgaactttatgatacactaaaagacagcattgaagcacaaggacatctagtaagaagtttgacacaccttgaaatgcgcctgagggatatacaacaattttaccagtatctaatggaaagaaagacagaacaacgacttcgacaacttactgtactttctactgtctacatgccattaacgcttataacaagtatttatggaatgaattttgaaaacatgccaggtattggatgggaatatggatattttgttttattaggcttgatggtccttatctctgggattcttatttactttttctatcgtaaaggatggtttcaatag

SEQ ID NO: 8998 - DNA, 498 bp, Lawsonia intracellularis
atggctgatgctatagctcttggagatcatattgaatctaaatgtacacgttgtcatgatgtaacgggtcatattgtaattttaatgattgatgatgaaattactaaagttgagtgtagggcttgtggaagtatacataagtattaccctccagttaatcaaaagagtagtctaaaaaagataaaagaatctagtcctggatctaaaaaagtacaaaaagaaacaacaacatctgttaatgttataccaaaagctagttctaaaaagacaaagtctcaaaaagtgaatagagaactaacagaacagcaatggcaagaagctataaatacaagttatggaatacgtaagccttataccatgactataaatttagctcttggagatattgtagatcatcctaagtttggagaaggtgttgtacaggaactattcccgcctgataaagctgaaatattatttcgtgaagggataaaacttctaaaatgttctaccaattag

SEQ ID NO: 8999 - DNA, 1062 bp, Lawsonia intracellularis
atgggaatacaaaaaattcaagcagcaattataggtggaaccggatatacaggtatagaacttattcgcttactatcattacacccaaatatccaacctatatttattatatctagagagcaatgtggtaaaaaactctatgaagttcatccatttctttcaggaatgccttatgcagaaactattttttccccattagaccataaagctattggtaaaacttgtgatgtagcttttcttgctgtaccgcatggcacaggaatggagatagcaccacaattattagaacagggtactaaagttatagatctttcggctgactttaggcttaataatccaatgacatatagtcaatggtatcaccttgaacataatgcatctcacctactttctgaagctgtttatggtattccagaacttaatgaagaattcataaaaagagctaatattgttgcaaatcctggttgttacccaacatccattattttagggttgtatcctgctattaaacatgggttaatcaaatttgaaaatataatcattgattcaaaatctggaacttctggagcaggtcgtaatacctcaacgtcttcattgcttttttgtgaaatacaaaattcatttaaagcctataatattggtatacatagacatacaccagaaattgaacaagagctttcctatattgcaaaacaacctattacagtcacatttagtcctcaccttttacctactacacgaggaattctttccactatttatactcaattagcattaccaatctcacaggatgaagtgtacagactttatacgaatacatggaaagatcagccatggatacgaatagttccttcaagtaaacttcctgaaacacgaaatgtatgtggtactatgttttgtgatatagggttagtagtagatatacgtacacaacgacttataattatatcagctatagataacctctgtagaggtgcttcaggacaagctatagcaaatgcaaatcttatgtttaacctacccatgacaacaggacttatattctgtcctcttctgccctaa

SEQ ID NO: 9000 - DNA, 351 bp, Lawsonia intracellularis
atgtataaacctattacaactaaagaagacgaagtacactctacaactaaaaacattaatggcacaaaaaatacacaaccttcttttactacgacaagtaatttactccctaaagttacattctcaacatttattttatcactagcatcatcagccttagcacaacttggagaagttcctcatcctgaatctggggaaattatccaagatttacccatggcaaaacatacaattgaaattttatcaatgttacaagaaaaaacaaaagaatgtctagatagtgatgaatctagacttattgaaggcctactttatgaactacgtatgaaatatgttatgaaaaaaaattag

SEQ ID NO: 9001 - DNA, 366 bp, Lawsonia intracellularis
atgtcattttgcttaataaagttttgtcatctaatacatgcaacaaaatattctctaatgggtttaatccaagcattcaaatctgaacaatcttttcgtcatgaagtaattatcttaggaattctattttttctcttgtggtttcaagacaaaaatgcactgcactgtcttattaccataagtggatggctttttgtcatgataatagaactactaaatagtgctatagaaaaaatctttgatcttattacaactgacataaaaccaattgttaaagcagggaaagatatggcttctgcagctatatttttagctattgtcatcaatataggtctttggatttatctgtttactcttcctttttaa

SEQ ID NO: 9002 - DNA, 2607 bp, Lawsonia intracellularis
atgaatattaaagaattcttttcagaagaccccatttacttgatggatggctcagcttttatttataggggattttatgcaaatcaaagcatgcaacgctctgatggatttcctacaagtgcactttttaatattggtagaattttcttaaaaatattacgtgaagaacaaccaaaatattttgtatttgtcttagatggccctggaacaaattttagacatacacttttccctctttataaagctcaacgtagccctgctcctgaagcacttataaaacaaattgaacctataaaacgcttagtaataagtttaggactatgtttaactgttgctagtaatagcgaagctgatgattgccttgcatcaattgcacaccgctatcgtgataactaccctattgtacttattgcttctgataaagatttaaaacaatgtctagataaaaatgttctgatgtgggatccagcaagtaaagctgaaaaaattactacactaaaaagctttaaagaagatgaaggattattaccttctcaatggccagatgttcaagcaataataggtgactctagcgacaatattccaggaattccagggataggactcaaaaccgcgaaaaaaatttttcaagactttccttcattagaatctataaaagataatttctcctcactacccttacctgttcaaaaaaaatttgatggccaccttgacgccatgtttctttacagacaacttacaacattatcaacgactgagtgtatagatcttcagattgatacaattaaagttggcccaattaacgtacaagaaacattgactattcttcgtgagtttgaacttgtttctttggagcgagaatttatggctgttgtacatcaaaaaaaactcatagacccaaagggtattatagagtctggaacatcttctcatggacaactatctctttttgggtcttctaaaccaatcaataaaatatattgctctacagccagtgatcttccatcagttaaagggaaaattgtagcactattgacagataaacatgaagtaacattagctgtagaaaatacagaatatttctatacaggaccattactaccactaactaaagctcttaatcaatcgcgacacgtagttactcctgatttaaaatcgttgctgagaacaaatggaatatggagaactatccctaatacacattggattgatttaggtcttgctacttaccttcttgatcccgaagaaagagattatagctggcctaaacttgttgcacgttggggctcagtttttggattatccgcaggaaacccaggtctcattgctctaaaagtatgggaacaacttcgtaataaacttaagactgctcaactattagaactaatggactcattggaactaccccttattcctgtccttgctgatatggaggcagtaggtgtggttctagatgatcaaaatttaaaaatatttcttgtggaagtacaaaatagtttagatcatctcactgaaacaatttatcatgaggctggtggttcctttaatatccgctcagctcagcaacttggagatattcttttcaatcaacttgagcttcctgcagctaaaaaaactcgtggggggcaagcatccacatctcaagaagtccttgaaaagctatcaggacaacaccctatcatagatacaatcctagaatatcgtaaacttgaaaagcttcgctctacttatctagaaccattaccacgacttattggtaaagatggacgtgtacatacaacatttaaccaacttgctacagctacaggaagactttcttccagtaaccctaacctacaaaatattcctatacgaggctcattaggacaacgtatgcgttcatgttttacagcttctcaagggaacctcttaatttctgctgactactcccaagttgaactacgtgtcttagcccactattcaaaagatcccacacttcttactgctttccttgaaggtgcagatattcatacacgtacagcaagccttctttatgaaaaaagtcaggaagaagtaacagcggatgaaagaagaaatgctaaaactatcaattttggtttaatttatgggatgggaccacaaaaacttgcccaagaacttaatacaacattaaatgaagcaaaaaaattcatacaacgatattttgaacaccttcaagccataaaaaaattttatgatcaagtagaacactcagctaaagaatatggatatgtaactactattgctggacgtagaagactattaccagatattcactcagaaaatattcaattacaagctttagcacgccgccaggctatcaatactattatccaaggaagtgctgcagatattataaaaattgcaatgttaactgttcatggtgatacaacattagctaaaatggatgctcagcttattcttcaggtacatgacgaacttgtcgtagaagcaccagaagacaatgcaaaagaagtaggtaaacgtatagccatgttaatgtcaaatgtaacgccaggtggtaaacctcttatagtaccacttgtaactcaatggagtataggctatgattggggaagtgcacattag

SEQ ID NO: 9003 - DNA, 1275 bp, Lawsonia intracellularis
atgggcaatcctataggtagtaggaataatggtcttaataaaaaaaataaagatgaacattttgaagatgagtcttcaggtaatgcaaagttatggcttgcccttattttcattattatttcagcaggtgtgatacttttattttggtttgttagaggttctgtttttcaaaaagatgaagtaactacagaagatacacagaatatgatagtaaataacccttcagaagcatatgaagctatgaaggaaaagcttatgaaagatatagaatcttctcagtctaaagaaaaagaacctatgcttgaagaagtaattgaggaatctatatctccaccaccacctgcgtcaacttttaataattatgagcaaggaagtaaacacatatttagagataaggatgaaacaggagcttctgaacgtgggattttttccacaaaatctacacatcctgttcatacaaaaagagacaaaaaagatgatacagttgttcgaattggctttattgatagtttagctgcatggatggcaaaaaattatatacctccttcaaagtctacgatgtctggctccattaatgtaacgcttcagagtcttaatatgcgttatggtgtaggtatgacaggcctttcatggaaaggtgaagatccacaggcagctcggtctgcaattttacgatatgtctttacaccatctatgttagacgcattatatcgtctatatgttgatagatttatgaaagcactttctgaagagctttctgtacgtcgtcataataaggtacttactattcaacagaaacaagaattttatcgtttatatgctacacagtttcgtggtattgcaagtacattgcagggtattgctactatacctaattttgtccaaaaggtggatgacataaaattggctgccaaacgtgtagtcgatactaatacaaagtatataaaccttgtaagttgtacagacaaatgtaaagaattaggaaataaagtggagttacagcagctcacaaagaaagttactgctgcaagtaaagcatatcaacaagcaattattacacgtgagaaaatgattaaagcacttattttatcaattaaacaacatactactacacgtgttttggatgactccaacatactattccttgcaaactgggtatatcgtcgggtaaagagtgatccagggaatatagatgctgtattacaatcatcaacattgtttttagatcttgcaaaacgttttgagatgacctctggaataataagacatgagtag

SEQ ID NO: 9004 - DNA, 642 bp, Lawsonia intracellularis
atgaagagttggtttgtaatttttttaggtataattcttcttctttattatccttttataggagtaggaaaacagacacccagaaattcattacttaaaatacagtatgcaattgattcacataactttgagctttttgaagaatatgttgatataaatggattattaaatcaaggagttgaatattttttttgttcactaactactgttaaagatacatcaaagttaccatcacttttatatttattggctaataccatacaagtacctcaatatgcagcacaggtcagatctttatttattagtgaattatatttatttattaaatatggaatttcttctgggttgtttgcagggcatgaactattagatgaacctactggccttttaacaccttatatttcaaaaatttctttaggtagaaaagagttattattttctaattcagaaaaagtattagcaaaaatgtataaacagaaaagagatattgtagttcctatccaaattaaagattatggtaatggacgacagtatcctgttttactaggtatgagcttttgtaatggtatgtggaaagttactactattaaaaatcttcctgaactatgtaaaaagtttgaagaggaatatttgcataattag

SEQ ID NO: 9005 - DNA, 945 bp, Lawsonia intracellularis
atgaatagcagtataagattgatatgttatatagtttgttgtttttttattctttcaaaattgagtatggctgctgttaattattctgatctagaaatacttgttcaacatagaattgtttttcaggaaggctcagatattgctttatttggtgataaacaaattcttttcacacaggatgctcagatattatgtgatgataatgctatattagattttgagtgtctattggcatcatatccaggggttataactggaattatcactgatgaagaaaaaagactttggttaattgtgaatggacataaagtactttatgatgatggtaaaaaacgtatttatagtgaggcattattaaacagtacagttaaagattctatggctcaactgtatcctttagagcctagtcgtcctatccctgatgttggcattgcaccaggacgagttcgttcttatgcattattagaggcaatatatggtaatagtagagaagaagtagagaagcaattagtagggattaggtttaaaaaaagagaaaaaatatgttttttttctcattctgcaaaggctgctcaaagcttaaaagatgtttttacacaacttgatacattattagataaagatcctcaggtttatgaatatatttttcctttatcaggtggattcgcatggcgtgttattgcaggagaaaagaggttaagtccacatagttacggtatagcaatcgatttacatccaaaaaaaggtatatattggcgtttagtaaaagatagagaaaaatatttacagatacaaaaagaatatccaagtgagttagtaggcatttttgaacaaagaggttttatttggggcgggaaatggtatgaatatgactttatgcattttgagtatcgacctgagttaatttataaagcaaagagaagtattcataataacgttatgtaa

SEQ ID NO: 9006 - DNA, 1665 bp, Lawsonia intracellularis
atggatacaaataatatcaaaactgtttctcaactcattattgagtgtttagaagcagaaggtgttaaatatatttttggattacctggtgaagaaaatttacatctagttttggcatgtgctaattcatctattaagtttattcttgtccgccatgaacaaggagcatcatttatggctgatatttatggacgccttacaggaaaagcaggcgtctgtatatcaacacttggtccaggagctatcaatctcttacttggtgttgcagatgctcaaacagatagtacacctcttgttgctatctcagcccaagttgggctcaaccgtatttataaagaatctcatcaatacgttgatcttgtatccatgtttaaaccaattacaaaatgggcagatatcatattaactccaaactctgtacctgagatgatacgaaaagcctttgaacttgctcaaactgaaagaccaggtgctgtttttattgccttgccagaagatgtagaagaaatgcatattgatacttctttgaaaccgttacttacacgtcctcagcatacttcatatccagatccaaagatgttagaacaagctaaagaactcattgtaaatgcaaaaaaccctgttattcttgtaggccatggagctgttagaaacaaagctagtgaagctcttcaacgttttgcggaacaattacaaattcctgtagctacaacatttatggcaaaaggcatactgtcagatagaaatccattactgcttggtgtaattggatttatgaaacatgactacgaaaactttgcttttgataaagcagatctcattattagcattggatatgaacttcaagaatttactccatctaagattaatccaaataataataaaaacatcattcacattcatcaaattgcagaagatgaagacattgcatatcctatcactgtagctatccaagcagatattagtgctacactaaatatgttatgtgaacagcttcctaaaaacagtcataccccttggaaaggtatagctaatattatccagctgcataaagaagagcttgaatatggagaatcagcagatgactatcctcttaaaccacaaagagtaatcagcgatattagaaaagcaatgaaagatgatgacattgttcttgtagatacaggagctgtcaaaatgtggatggctcgactatacccaacctatcttcctcttacttgcattatttcaaatggattatcaacgatggctttctctttaccaggagcattagctgcaaaactagcttgtcctgactgtaaagttcttgtggtaacaggtgatggtgggtttatgatgaactcccaagaaatagaaacagctattcgagaaaaaattccttttgttatccttatctgggaagataaatcatatggtctcataaaatggaaaatggatatggaaataggtaaacaccaatttgttgatttcactaacccagactttgtaacatatgcagaagcatttggtgctaaaggctatagaataactaaagcagaagatctattaccaatactacagaaagcacttaatgactcaacagtctctgttatctcttgtcctgtagactatagtgaaaatatgaaacttattgaaaaacttggagagttagatcttaaactttaa

SEQ ID NO: 9007 - DNA, 930 bp, Lawsonia intracellularis
atgttagatactataattggagctttattacctattgtaatcacacttcttttaggtgtacttgctggatggcataaagactttaatatagagcaagcaacaatactaaaccaaatggttatgttatatgcactacctctaacattattttctagtatggttcttatccctaaggaacaattagtttctgattggggattattctttctcatatgcattgcaatgattggaggttttttaggtgtttttctaatatctcgaattgtctttaaacaagacttaggaagtgcagcactgcaagcactagccataagtggacctgctgttccctttgtaggggtccctgtattaggatatctttttggtattgaaagtgctgttgccatagctatttcaagtattattatgaaccttttccaagttcctgtcagtttagtattactctctatatctacattatctgaaagtaataagaataatttctataaacatattcttaatgcattacgtcaacctgttgtatgggctccattacttgctcttgtttttattgtatttaatattcaatttcccacatctattaatgattctttaacattacttggtaaagcaacaggtggagttgctctatttgcatcaggcattgttttatttgctcaacgtgtcacactaaatttccctgttgttatttcagttattagtcgtaatataattataccttttatagtctggttattagcaatgttacttcaactccctcatgaacaaactatggaatcagtattatccatggcaataccaactgcttccataacagtcatccttgctgttcaataccatacagcagaacgtgaaatggcttctatactctttatcagtactaccttatccattatcacaatggggctatttatctggctactcaagtaa

SEQ ID NO: 9008 - DNA, 987 bp, Lawsonia intracellularis
ttgaagtataattacttttattatgatataattattataatatacagttatataatactactaaataacacaataaaggaagatattatggaagagtgtacgttatacggtgtatttgcacctgttccaactcctttttatgctagtggagaaattgcatgggataaatttatagaaaatattaaacaatttggaaaaacaacgctagatggtattttagtacttggctcaaatggagaagcagtatcattatctgaattagaaaaaataaagcttatctctttagctagagagcactttcctcttgaaaaaattgttcttgctggagtaggatgtgaatcagaatactctacattaacattatgtaaagaagcttcattagctgaagtcgatggtgtagttgtcataaatcccacatattatagaaatactgttagtaaccctgaagttatgttagattacttccttagagttgctgatcaatctacttctcctgtattactctataatatcccaaggaatactgctttaaatatacctgcatgggtaagtatatctgcatcacgccatgataatatcataggaataaaggatagtagcggagatattatccaactttctacaattattcatgatagtgcaccaggtttttcagtaattgctggttcagcaagttttttattacctacattatatatgggtggatgtggtggaacaatggcttatgcaaatattgctcctgactactgtaaagctattataaaagcatttcatgaaggtgaacataataaagcaaaaaaattacaaatggatattcttgaactcaatgcagctattacttccggatttggtattacaggacttaaatatgcattagactgcctaggttattatggtggaccctgtagaagtccattaccttccactctttcagataaagataaatctactatgcaacagttaatgaaaaaagtaggattactttaa

SEQ ID NO: 9009 - DNA, 744 bp, Lawsonia intracellularis
ttgtattacatggaggttttcatgtatagactttatagcattatcctatgtatagttatcctgtgttctggttgttctttatggactagaataaagaaagcaataaagagtaatgatactatacaagaagaagtattaaatgaagctgaagctggtactatagctgaagcactttctgaactagatgcagatagagaaaaagagagttcaacttatttaaacaagatttctgataaaaagacaaacattgaccctgaatctgttgaaaaaaatactcaacatgtgaagtctgtagatccgtcgccttctttagatgaaacaataccaaaaaagaaggtacagatagataataataataataagttaagccaatcacaagaacaaaaaatgtataaagatgctcttcatctatatgagctgcataagtataatgagtctataacgctttttgatcagtttatggaaaaatatcctaaaagtcgcttgatgccaaatgctctttattggaaaggagaaaatttatacgcacaacagaagtttgctgatgctatttttatgtttaaatccgttacagcaacatatccaaaacatcagaaagcttcggatgctttattaaaagtaggaatgtcatatagagcgctaggagatcaagataatgcaacgttgcattttagagcactatatgaggattatccaaaatcgacagctgtacaacgtgcacaaaaattaggaatcaaaccatga

SEQ ID NO: 9010 - DNA, 1266 bp, Lawsonia intracellularis
atggaatacttctttggaggggtttctttgaccaagaagttatttcatagtagtgctcttggggcattagatgcagtaagtcgaaaagaattttgggcatctttagctttaaaatatacaaaaggtcttggaggacgtacatataaaaaacttttaacttcttttggttcagcatttgaggcattacaacaggtaaaaaagtggaaacagcttggaataccaagtgataagtctttaggcatactttccgattcatggagagcaggggctaaaaaagaatgggaggcagttcgaggttgttatggaacaattttgctttggactgatccacgctaccctaatttgcttaaggaaatttctgatccaccactttttctatactgtttaggcgatatatcgttacttgaaaatccttgtatagctattgtaggaacaagaaaatgttctatagaaggcattagagttacaagagcttttgcaaaaggattagcaactgctggaataacagttgtttctggtatggcgttaggtatagatcgtgaagcacacctttcttctattgattttcctggtaaaactattggagtacttggttcaggaattaacataagttatccacgtcaaaatagtgatgtaagggaattacttgttaataaaggtcttctcatttctgagtatgctcctggtactcgtccagagcctggattttttcctacaagaaataggattattagtggactgtctttaggtgttcttattgtagaagcagcacttcatagtggtagtcttatcacggcacgtttagcgcttgagcaaaatcgttctgtatatgctatcccaggagcaattggttctccatttgcagaaggttgtcaagatcttattcgtgaaggagcaagacctattttttctgttgatgatatattacacgatttgtcagaatcgctaaaaggatttattaatcagtataataaacaggatattatatataaagaaaaaaaagagggtttggaggagcaagatatcatgctttctcttcctgcttctaatgataaaacaactgttattaataaacaaagtcaatataaaacatttggaaagatagaacgacagataatagatattatcagactagagccaaaagatattgatcaactgtgtcagttattgcaacttccagctgaagaaataagtccaatacttattattttagaaattgagggaattattaaacgtcttcctaatacacagtatgttttagcataa

SEQ ID NO: 9011 - DNA, 942 bp, Lawsonia intracellularis
atgcaacttccagcagtaacagaaacatttttatcatggcttaatcttcataagggattttctttagcaacacaggatgcctatagaagagatatatctcagtttgaagtatatcttagaacaattggacttactcttgagcatccagaacatattaataaaaagcatattcaacagttttctgcttcattatattataaaaagttaacaaggacatctatagctcgaaagttagcagcattacgttcccttttccgttatcttttaaaaacacaccatataaaagataatcctgcagttggcgtacataatcctaaacaacatgtaaaatatcctgagatacttaacgtagatcaagtatttttgttattgaagggagcaaacaatatattaaagacatcacatacagggttagaattagctattgcacatagaaataatgcattattagaacttctatatggttctggtttacgtatttcagaagcattatgtcttaatgtgtctgacataagaacagaagatggatttgtacgagtcattggaaaagggaataaagagaggttagcgccactaagtgatacttctattgtagcattagaagaatggttagctattagacatatggtagcaacattaggggaacaagcactttttgtaggcgttagaggtaaacgattgcataggagacagacaataaggatacttgaagaactgtgtctacaagcaggacttccattaactactgctcctcatacattacgacattcttttgcaacacacctccttgaaggaggtgcaaacttgcgtgctgttcaggaactattgggtcatgctagattatcaactacacaacgctatacacacataacgctagataagttaattcaagcctatgataaagcacatcctttttcaggtactctacggttaaaaaattaa

SEQ ID NO: 9012 - DNA, 942 bp, Lawsonia intracellularis
atgtttcaaaaaattactgtttgtatatgtttattacttactgttacagttcttgtccttggatggcataaagcttatgcacgtattggtggcggacgctcatttggtgggaaatcatttatgaatagaccatattcaaagcctattccatcttcaccaatgatgcgtcaacagtctaatatatcacaacaaattcaacaaggaagcgttgcaaacacagcttctcgtggttttggtggattaggtggtatttttggtggactcttagcaggaacgcttattggctcattactttcaggacatggattttctggaggaggctttttagatctcattcttattgctggacttgtatatctagcctaccggcttttctttaaaagaaaaatcacatcaaatgaagcttctgtaactaattcactttacgccacacaacaaccactaacatctgaaatgcctatacctcgttcaacaacattatcaggtacaggttgggaatctctcaagtcacaacacacaacatattcagcagatgtatctaatcaagctataacaaccaatatacctatagactttaatgaagaagaattccttaaaggcgcaaaggcagcatatgtgagacttaatgctgcatgggataatagagatttagaagatattcaacaattcactacacctggttttttaaatgaacttcagcaacaaattactgaaaatccaaatccagagacaacagagattatgttagttaatgcatctgtagtagatgtgaaaaaaatagaagatgaggaacttgtctctgtatattttaatgtacttcttaaagaaaaccaatctcaagaatcccctattgaagttcgagaaatatggcactttgtacgccctgcttctggtgagggttcttggaaacttgatggcatccagcaagttgagcatgcctaa

SEQ ID NO: 9013 - DNA, 1362 bp, Lawsonia intracellularis
atgttaccgaaaatagctctagtaggtcgaccaaatgttggtaaatctaccctttttaatagacttatacgcaaaaatagagctattacacatgatcggccaggagttactcgagatcgaatggaaggactagttcaatctataggtcatccatcatttattcttattgatacaggaggagttatactagatagccattattctactatcaatatcattgatgaattacatggctttgaaaaagatatctttcaacaagtccaattagctatagaagaatctcaagctatctgtcttattgtcaatgctcgtgatggattattaccttttgatgagcacttagcattatttcttcgaaaaacaggtaagccaatattacttgccgtcaataaagttgatggaatagagaaagaggatcaaatagttgcagaatttcatatcttaggtttacctatgattgctgtttcggctgaacacggtcataatattagacaactagaaaatgaactttctttattattacccaataatgaaaatataaaggatcagtctactgcccaagctgcactaaaactagcaataattggacgccctaatgctgggaaatcctctattataaatgcaataattggtaaaaataaactaatagtaagcaatattgcaggaacaactcgtgatagtattgatattccttttatttttaacaaaacacagtatctttttgtagatacagcaggtattcgtcgtagaacaaaaattacagatcctgttgaacgcttttctgtaaacgcatctataaaaagtgcaactaaagctaacattacactatatgtgattgatgctacagaaggcatcacagctcaagataaacgtctgcttgatcttttagacactagaaaaataccttttattcttcttattaacaaaacagatcttattgcaaaaaaacaaaagacattactttctaagtcatttaaagaagaactacagttctgtcctcatattcctattcttatggtctctgcagtgacgtcatcaggacttgatcaaattattgctatggcagaacaagtttatcttgaatgttctactcgcattaatacaggagtcctaaatagagctatggaagaaattattacacgtcatcaacctcctgttgtacgtcgtatacgacccaaatttttttatttgactcaagctgaaactagccctcctacttttgttttttttgttaatgatgcagaaaaaatatctgaaacatatgtacgttatcttgaacgctccttaagaaaaatttttaacttacatcatgctccaatacgtattcgattacgttcatcacataaaaagcgtaaccaataa

SEQ ID NO: 9014 - DNA, 1275 bp, Lawsonia intracellularis
gtgttgttagatcttaaattgttacaaaaaaaacctgaaatagtgtcaactgcacttattcatagaggatctccacttaatataacaagttttgaagagcttgatactaaacggcgtgaacttctttctgaagttgaaactcttaaggctaaacgtaaccaagcttctattcaagttgcacaaatgaagcgtaatggtgaaaatacaaatactattattgcagaactttctgaactttcgtcaaaaattgttgtattagacaatatgataaatcaagtaaaaaatgaactctatgactggatgcttgctgtccctaatatcccacactacagtgttccaattggaaaagatgaaactgataataaagaaatatatagatggggtgaaatacctatatttgattttcaaccaaaggaacattgggaactaggttccactcttcaaggattagactttgaacgagcaagtaaaattacaggaagtcgttttacaatactatggaaatgggcagctcgacttgagcgttcattaattaatttttttcttgattttcatctagcccaaggccgtacagaagttctacccccactcattgttaatgaaaaatcaatgacaaatacaggtcaactaccaaaatttgcagatgacctttttaaactagaaggaacagactattttttgattcctactgcagaagttcctcttacaaatatacactctgacgaaattattgatgaatacctattacctctatcttactgtgctcaaacagcatgttttcgttcagaagcaggttctgcaggtaaagatacaaaaggacttattcgacaacaccaatttacaaaagttgaaatggtctatttttctcatccagatcaatcctatgatcttttggaacaaatgaggaaaagtgctgaaacattattggaacaacttgaacttccttatagaacagttgttctgtgcactggtgatctagggttttcttcaagtaaaacatatgatatagaagtttggcttcctggacaaaacacatataaagaaatatcttcatgttctaactgcgaatcttttcaggctcgacgagctaatattcgttttcgtgcctcttctggagaaaaaacacagtttgtccatacactaaatggctctgggttacccattggacgtaccattgttgctatcttagaaaatggtcaacaaaaagatggctctgttaaacttcctaaaaaacttgttccatatatgggaggcatagagtgtattgagccatag

SEQ ID NO: 9015 - DNA, 579 bp, Lawsonia intracellularis
atgggtaatagtattttacaggtagtcattaaactctctttattttttttcataatccttttaggttgtggaccatcaaataaagttaacttgatatatccaaaaggtgaaattgtccttcctaaatcaggagctcctagagtagtggttgtattatttcatggctccaataaacttcatacgattgggacaaaaacggatggttctcactttatgcctacatctccagttactgagtggataagtagatctttagcagaggaactctctaagcaaggtttacaagtctcttatgcaagagatttagctcaggcaaagatgagcaatcctaactatatagtgactggaactataagtgaagtatgggtggttgaagaaaaccctgcaacgtttactgctgccattggattaaaagtttctctttcaaataataaaggagtaatttatacagaaaacttcaactcttctcaagaaagacaatctattccaataggttctcaagttgaagtattactttctaccacattaaaaagtcttcttgagtcaatagctaagaaaattcattcagaaatccactag

SEQ ID NO: 9016 - DNA, 1080 bp, Lawsonia intracellularis
atgaatgaagtaagtgtagggatagaagatggagatagtatagcatgtcaaaaacaatggggatactttagtataattacctatattctcctattttttttgattttttctccatctattactatagcaaaagaacctatacttgaagtaacttatacaattccctaccatgcacatttagttacagagcctgttatacaaatagctgaagctgccactaaattacatgcattagagcagactagaagtaattttacatcaaacttggctgtaaagttagaattaaggacaagggagcaacaattagcattagcatcggctatatattttgtctctattcatgagagaactgtacttgatggccctaaactttctataaaagcacatgtatatccttcatcagaaaaaatattagacgatcatattcgtcaattattacgtcaacaggatcatcttcagcttagactgttggcagtaaatcagcttgaacaatatattaatgaaggtgttgaacttcttaatcaagcacatctatgttctagtgctgatatacggtgtaaacatgatgattcacttgtaccaaaaattaaacgaacttctaatcgtattaaggcattggagttgtttctagttgaattaaatgattttgaacatgtttgggcaaatccagaaaagtctgttttaactttttcagaagcaacagcattagatcctgataattctttattatggttaggggttggagagtgtctggtgcttttaaatagaccatatgaaagtattaaagcatttcagaaagttatgataaagaataatatacctgctcgtacattatatatgcgtggaatagctcatttacagatgtatcttcctggacttgctataaaagatatttctcaagcattgcagttagagccagagcaccccagttggtggagagctcttggcacagctaaacttgttgcaggtgatacagtagcaatgtgtgccgatttttatcaagcatgtgctatgggggattgtgaaggactagctgaagtccgtgaacaaaatttttgtttagtatctcctgaattttaa

SEQ ID NO: 9017 - DNA, 1512 bp, Lawsonia intracellularis
atgaaagtatatctcattggagcaggaccaggtgatcctggtttacttacagttaagggaaaagaaatattacagcaagctgatgttattatgtatgattttttagttaatgaaatcctgcttaactatgcaaaaccagatgctgaaattatttatgttgggaaaaaaggtaattcatcatatacctcacctcaagatgaaataacacaattacttataactaaggcaaaagaaggaaaaataatagcacgattaaaaggaggagatccatatatttttggtagaggtgctgaagaagctgaagcacttgttttagctggtattccgtttgaagaaatacctggtataacaagtaccattgctgcacctgcatatgcaggtattcctttaacacatagagattatacatcgtcagtaacatttattacaggacatgaagatcctgataagattgattcagcccataattggtctgcattagctcatagtgcgaatacattagtttttgtgatgggcatgaaaaatcttcctgagatttcaaaaaatttaatacaagcaggattatctcctgatacaccagcagcacttattttttggggaacaacagcaaaacataagagtttagcttctacagttaaaaatctccctgaagaagcaaaaaagaatggttttacaaatccttctattattgtcataggtaaggttgttacatttcatagtacattaaattggtttgaacaaaaaccattattaggaaaaagtattgttgttactcgtgcaagagagcaggcaagttctttagcaaggctacttactgaattaggagctgaagttattcagtttcctacaattgatataacaccagttacagaaacagctacgattgatcaatatgtacataaaataaaagaatatgattggattatctttacttcagtaaatggtgttcgatttttttgggaacgtcttatagcttttaaattagatgcaagggtatttgcaggtgtgagtattgtagctattggacctgctacagcagaagctataagagaaaaaggaattcagcctgactttgttccagaagaatatattgcagaaagtattgcagatggattagtgaaacttggagttaaagggaaacgtattttactcccaagagcacaagaagcacgagaagttcttcctaacaagttacgcgaggctggagcaacagttgatattgtcccagtttatgaaacacgtcttgctattaaacttcaggataatatattacaactcttagaacaaggaacgttagattgtattacttttgcttcttcttcaacagtagagaatttttttgaacatattcctataactgtgctaaaaaaatatcgtcttccaaaatttgcaactattggtccagtgacatctaatacattaaaaaaatatggatttgagtatgatatacagccaacaaaatacacgattcctgatttagttaatgctatcgctgatacctataaaggttaa

SEQ ID NO: 9018 - DNA, 684 bp, Lawsonia intracellularis
atgtcattaaaaatagctgtatttggctctggaaatggaggaaattttcaagctattcaagatcatattacaaaaggcacccttaatgcagaaattaaactcttagtttgtgataagtctgatgcttatattatagagagagctaaaaaggagaatattccttattttattgttagttatacaaaagataaaagtagagaggagatcgataaaacaattcttgatgcagttcaagaggcagatgtagatgtacttgttcttgcagggtatatgcgtctactgtcatcagttgtcattaaggtgtttcataaccgtattctaaatattcatccctcactacttccagcatttcctggtgttcatggtatacatgatgctcaaacatggggtgtaaaatttacaggatgtactgtacattttgttgatgaaatgatggataatggttctatcattatccaagcatgtattcctgtcgtagatggtgaatcattggaaacattacaacagagaattcatgaacaagaacataggatatatccacaagcattacagtggatggcagataataggcttgaattatgtgaaagtagtaggatggttaaagttaaaggagataaccatagggggttggcaccattgagttatggtgtacttattaatccacctcttgaggaaggattttag

SEQ ID NO: 9019 - DNA, 501 bp, Lawsonia intracellularis
atggtgagcaaacagaaaatgagtaaagaagatgcctattttgctggaggatgcttttggggcattgaagatgtatttcaaaatacacctggggttattgatgctgtatcaggttacatgggtggatctacaaaaaatccaacatatgaacaagtttgtactggtcaaaccggacatgcagaaactgtacatgttcattttgactctatgcaagttagttacaaagatcttgtaaaacttttttttgaaatacatgatccaacacaatataaccgtcaaggtcctgacatagggacacaatatcgatctgtaattttttatgccaatgaacttcaaaaagatattgcagaacaaataataaaacaattaaaacaaactaatctacctatagttacacaacttcttcctgtatcaactttctatcctgctgaagaatatcatcaaaattttacagaaaaaacaggacgtggaggttgtcatttaagagtgaaacgcttttaa

SEQ ID NO: 9020 - DNA, 408 bp, Lawsonia intracellularis
atgaagccgctatcagataaagaagcatggattattcttcataaaggaacagaacctccattctcagggaaatatgttaaccataaagaagaaggaacatatatttgtaggcagtgtggtgcagttctttttaactccaaagacaaatttgattcaggttgtggttggcctagttttgatgacacaattcctaatgcggtgaaacaattacctgacgcagatggatatagaacagaaattgtttgtagtacatgtaatggtcatttaggacatgtctttgaaggagaaaattttactcaaaaaaatgttcgtcattgtgtaaactcactctcattactatttgaaccaagtatagaactatcacagaataaaaatcatacaaatggtgagcaaacagaaaatgagtaa

SEQ ID NO: 9021 - DNA, 657 bp, Lawsonia intracellularis
atgtcacttagttacttcataccaaatattaatttaactgatattcatcgtcgagaaatgacagtcagacaaagtcgatttatcataagtattgcacatacaccaacagttgaaacagcaaaaaattttatagaaaaattaaaatatgaatttagtaatgctagtcatcactgttgggcttttattgctggtgctcctgagaaaacaatatatactggttactctgatgctggagaaccacatggtacagcaggaagaccaatgatgaatatccttatccataaaaaaattggtgaaattactgctataataacacgctactttggaggaattaaactaggtaaaggtgggctaatgcgagcttaccaacaaaccattcaacttggattagaagaattacctcttaaaaagatggctatatcaacaacactagaggttgttttaagttatgaacatatttcctcctttttacatcttctccaacaatttcattgtataattattaatgaactttttaccagtgatgttacctatgttatctctatacaaaatgaatatatccaaagctttcagaatgagcttactaacctcacaagtgggacagtacttattactcaactcttaggaaaagatatcattgactatagtcattcgtaa

SEQ ID NO: 9022 - DNA, 759 bp, Lawsonia intracellularis
atgttaggtattttttctatggaaactacaaactgggcagctgaaagccttgcagttatttgtggtagtgcttttttatggggattgggtagttcacttttaagtccatgtcatttaggaattgtacctattttaggtagtcatgctgctgggtacagtatttttggttcaaacacaaatcctttgcgtcaagtgttgttatttacattaggttttttccttacaattcctctcattggtttgttaattggttttattggttatggcctccactttggagggcattattggactattccttctggatttctactgttatggttaggatgggatatgacacgtggacacagctgttcacatttgtcttatttattaggcagaataagaactcggcttggccttggtgtgtcttctggtgcattagtactaggttttgcttatggatttcttgctggaggatgttccgcagggtttcttgtccccatctatgcacttaccttacctagtagtatatgtgtatatgtagttattgctgcatgttttggattaggacatacattaccaatgactattgcaggtggttctgtttcattagcaaaacgttttctaggtgataaaagatgttgtgatcaaaatagtaaatgtgaaagtaagacaaatgaaccacatagtggagaggcaaaatttcgtaaatttgtaggaattattactattattataggtattctatttatattacatccatttcttgaaagttga

SEQ ID NO: 9023 - DNA, 570 bp, Lawsonia intracellularis
atgacggaaaaagaaaaagcaaggaatggattattatatgatgcaaatactgatcctttgcttatagaagaacgcttaagatgtaaggagctatgctacgaatataaccagctacaccctataaaaatggaagaacgtagaaacattataaaaaagctctttggtaaaacaggagaacactttcttattgagcaacccctatggtgtgattatggatacttaattgaaattggagaaaatttttatgcaaatcataattgtactatactagatacagctaaagtcacttttgggaataatgtttttattggaccaaactgtggcttctatgcagcagtgcatcccttagatgttttacaaagaaataaggggttagaatatgcttatcccataactataggtaataatgtttggataggaggtaatgttattgtcttaccaggagtaaccattggagataacagtactattggcgctggaagtatagtaagtaaagatattcctgatggtgtcttagcatttggtaacccttgtcgtgttattaaaagtatcccagcaacaaagaactaa

SEQ ID NO: 9024 - DNA, 909 bp, Lawsonia intracellularis
gtggctgttgagtacaaagattattataaagttcttggggttgagagaaatgctacaaaagatatgatatctaaagcatataaaaagcttgctaaaaaatatcatccagatcttaatccaggtaacacagaggcagaagaaaaatttaagaatattacagaagcttatgaagtacttaaagatgatgaaaaaagaaaaatgtatgatcaactaggttcaaactggaaagatggtcaatatttccagaacgaaagtggatttgataattttagctttaatttcggcggagatgcctttgggggctctggttttagtgacttttttgaatctctttttggtggggggcaaagaggtagaagtagtgggtttagtgggttttcttctcgccaacatcgtggaagggatattgaagctgaaatttctatttctcttgaagatgcactccatggtggtgaacgtagttttactctacaaacgccagatggtccaaagacattaaaagttaacattcctgcaggtgttcgtgaaggtgctaaattaagacttgcaggccaaggatactctggctcaggtggaggagcaacaggagatttatatttacatattcgctttttgcctcattctcagtttcatgttgaaaataataatatcacatacaatgtacaaataatgccttgggaggctgtattaggaacaaaaattagggttcctactcttgaaggaaatgttgagctttctgttcctgctggaacaagtagtggacgtaaaatgcggctacgtggaaaaggattaggctcttcaaattctcgtggtgctctttttgttattataggtattaaaacacctactaaccttacagataaacagcgtaaattgtgggaagagctagctgctaatgcagaaaagtga

SEQ ID NO: 9025 - DNA, 312 bp, Lawsonia intracellularis
atggatttgttacaagacaaaaaagacctacccagctgctccagatttatagtatggtcagagtttatagaactcacaggaacaactcctgagcgtgtctttgagcttattgaaataggctggcttgaacctgtacgtaccgcagaaaatattttgttatttcaacaaagagatgtttataaattacgaaagcttgaacgaatttgtatggattttgaaatagatacactaagtggaagtattattattgatcttcttgaacgtgttgatagcttagaaaaaagagtaagaatgctttcatcactttattaa

SEQ ID NO: 9026 - DNA, 2634 bp, Lawsonia intracellularis
atggatgtgaataagctcacacaaaagtctcaagaagcattatcagaagcacaaagactttctgctcaatatgggcatcaggaagtagatgtagaacatttagcattggcacttaccatacaagagaatggttttgttccaagggttcttgaacaagcaaaagtacatgtaaaagttgtgatttcagcattagaagaagtattaaaaaagcgtccttctgttcgtgggcctggaagtgagatggggaaaattactatctctcaaaggctaagtaaagttattgccaatgctgaattattagcaaaacgattgggtgatgagtatgtaagtgttgagcatctttttgctgaatgtcttaatgagccagagtcaacaggaatgggacaagttgcaaaagagatacaccttacgtcacaaagatttatagaagttatgttagctgtgcgtgggccacaccgtgttacatctcctactccagaagatagttacgaagcattaaaaaaatatggaagagatcttgtagaagctgctcgaaaaggaaagcttgatcctgtaattggacgggatgctgaaatccgtagagttatccgaattctttctcgtagaacaaaaaataatcctgtgcttattggtgaagctggagttgggaaaacagctatagtagaaggattagcttttcgtatcgttcaaggagatgttcctgaaggtttaaaagataaatctatttttgctcttgatatggggtcactgattgctggagcaaagtacagaggagaatttgaagaacgtcttaaggctgttttaacagaagtcgagaagtcagaaggaagaattgttctttttattgatgaattacatactattgttggagcaggaaaagctgatggagctatggatgcagggaactttttaaaacctatgcttgctcgtggagagctccattgtattggtgctacaacattggatgagtatagaaagtatatagaaaaagatcctgcattagagagacgttttcaaccagtgatggtagatgaaccttctgttcaagacactatatctattttacgaggattaaaagaacgctttgaagttcatcatggtgtgaggattagtgattctgctatagttgaagctgtagtcctttcagatagatatatctcagatcgtcaactaccagacaaagcaattgatttgattgatgaagctgcagctatgatccgtacagaaatcgactctcttccatctgagcttgatgaagttaatcgtaaaattatgcagttagaaatagaaagagaagcccttagaaaagaaagtgattcagcatctcatgaaagattagtacgtttggaagaagaattaaaagtactgcaatcaacacagtctgaattaaaaaagcaatgggaaactgaaaaaggttcaattgattctcttcgaaacataaaagaacaaattgagcagacacgacttgcaattgatgaggctacacgaaatggtgagctaagcaaggcagcagaattaaaatactcaaaactgtttgaattagaaaaacaattagaagaacgtgaatcaaaggctgatggtccacgtttacttaaagaagaagttcgtccagatgatgttgctaatattgttgctcgatggacaggtatacctgtaacacgactgttagaatctgaaaaagaaaaattgttacgattgccagatacattacatgagcgtgtaattggtcaagatgaggctgtgaatgtcatatgtaatgctgtattgcgtacacgtgcaggactttctgatccaaagagaccacaaggttcttttatttttcttggacctacaggtgttggtaaaacagaactttgtaaagctcttgcagaatctttatttgatactgaagaaaatatggttcgctttgatatgagtgaatacatggagaaacactcagtagccaggcttattggagctcatcctggttatgtaggttatgaagaaggtgggcaacttaccaatgctgtaaaacgtaaaccttatagtgtcatattatttgacgaagtagaaaaagcacatcctgatgtatttaatatttttctacagttacttgatgatggacgtttgacggataatgctggccgtactattaattttagaaatactattatcattatgacttcaaatataggcgcatataaattacttgaaggtattagtcctgatggttcttttcatgaaggtgtatatgagtctgttatgggtgatttgaaacaacattttagaccagaatttcttaaccgagttgatgatgttgtactttttaaaccacttctggctgatcaaataagtagtattatagacttacagttaaggagtttaaaaaaacgcctagagtcacagaaagttacattagaattaacacattcagcacatttatatctagctgagaatggatatgatcctcattatggagcacgtccattaaaaagataccttcaacgagtagtggaaacacctttagcaaagatgattattagtggtaaagttcatgaaaatcaacagattgttatagattactcagaaagtgattcttctttacaatatggtgtgaaaagtgcatctgaagatatcaactgggttcaagtataa

SEQ ID NO: 9027 - DNA, 759 bp, Lawsonia intracellularis
ttgatcattatgaccaggagaactatgactgaacctatcattaccattcgtaatatttggaaattttttggatcacttacagccataaatgatgtaagcctagaaataataccaggagagaaagtagttattattggtccttctggatcaggaaaatctacacttcttcgttcaattaatcgacttgaaactattgataaaggacttatcattgtggatggccttgatattaactcatcagaaaatgatattaataccattcgccaagagttagggatggtattccagaattttaacctattccctcataaaactgtactccaaaatattacaatggctcccatccatttaagaaagctttctacccatgaggcagaagaacaagctttgcaactcctcaaaaaggtaggtctttcagataaaataaatgtttatccatcctatttgtctggaggacaacaacagagagttgctattgctagagctcttgctatgcatcccaaaattatgttgtttgatgagccaacttcagcacttgatcctgaaatggtaacagaagtccttgaagtaatgaaaacacttgcagaagaaggcatgactatgattgtcgtcactcatgaaatgggttttgctcgtgaagtggctgatcatgttatttttatggataaaggacaaattgttgaaactggccccccagagactatttttacctcacctcaacatccacgacttcagcaatttcttaaacaaattttataa

SEQ ID NO: 9028 - DNA, 786 bp, Lawsonia intracellularis
atgcaaaatacaagcatacgcattgaaattacagacggagcttctatcccagatcctagggaaaggaatattatcaatgcttggaatattgcattttttggatcaattcttcttttagttctcctatgtagttttggctcagaaaactacatagacatcctagcatttcttcctgatggcatttttgtaacatttgaagttacatttctttctataatttgtactctccctctaggtcttcttgtaggttttggtagactttctaaaaatcgtattatcaatattcttacctctacttatgttgaagttattcgaggtattcctttacttgtacaacttttttatatctattatgcactaggccatttttctccgcttgtatcagctatcattgccattaccttttgttatggtgcttatatgggggaagtatttcgagcaggtattcttactgttcctaaaggacaagaagaagccgcacgctctcttggatttaacaaatatcaaacaatgcggtatgtcattttacctcaagctctaagagctattctcccacctattggtaatgaatgtattgctatgctgaaagacacatcacttatctccattattgctgtagctgacttacttcgtcgaggaagggagtatgctgcagtaacctttgaatattttgaaacgtatactgtaattgctattgtatatctaattattacactcttactctctaaaggagtaagtattatggaagggaaacttgatcattatgaccaggagaactatgactga

SEQ ID NO: 9029 - DNA, 750 bp, Lawsonia intracellularis
atgcttcgcacttttggctttctaagcatactcactatattaagtattttttcttctaccagtattgcaaaagatatttacattgttgcttctgatgcaacatggcccccaatggaaaatttagatgaacacaaaaaggttgtcgggtactcttcagactatattactgctgtagctaaagaagcaggaattaacatagaaatccgtaatactgcttgggatggaatatttgctgcacttaatgctgatcttattgatattattgcctcttctgtaacaattacagataaacgtaaacaaaaagtaatggattttagtaaaccatactataatgttcatcaagctattgtagtccctaatggttcaccaataaaaagtatacaggatctaaatgggaaaaaagtaggtggacagattggcacttcaggtcttatagaaacgttacctaaagcaaaagtaaaagctatagtaaaaacctatgatgaaataggtcttgcgctagaagatctttctaatggaagccttgatgctgtcatttgtgatgaacctgtagcaaactattttataaaacaacaaccagaatatacagatcatattactatagctttcattactactgaaatagaacagtatgggtttgcagtcaaaaaaggtaataaagaattattagagaaaattaatgctggtgtcaaagcagtaaaagaaaaaggaattgaggctgcattaataaagaagtggatcatgcattaa

SEQ ID NO: 9030 - DNA, 594 bp, Lawsonia intracellularis
atgaaaaaggtatggaatattttttttgatcgtgatggcactcttattgaagataaacattatctttcgaatcctagagatctagtattattaccgaatgtaggcctagcattagaaaagcttattaagaatggatgtcatttatttttagtttctaatcagtcaggagttggaagaggtttgtttactgaaacatctgttttagcatgtcataaagagcttacaagacttcttgctggttatggagttttttttactgatgctctctggtgtgtacatgctccatcagaaaattgtgattgtcgtaagccaaaacttggtatgtggaaagcactatctcaaaaacatagattaaccgcatctgaaacaataatgattggagataaatgtgatgatataagttttggtgtaaaggcagaatttttagcttctattcttgttaaaacaggcaaaggtgaacaagaagctataaaatgtggatatcgttttcctgagaagggatgtgctcctatggaagtaacaaaaaataaatctacatgtattttaactacacaatctattatggatgctgtatcatggatattacaagaataa

SEQ ID NO: 9031 - DNA, 1308 bp, Lawsonia intracellularis
atgaaatttacttcatttgatgatgttcaaaattttttagataatcttggtttgtttaatatcgatttagagcttactcgaatgaatcaagcattgaccaaacttgattttaattctttgccatataaagttgttcaaatagttgggacaaatggaaaaggttctacagctactttccttgcatctttagcaaaatctcatggtttaaaggttggaatatatacttctccacattttgtgacacctcgagaacgtatttgtattaatggtgaaatgctttcaccagaggtatggattactttaactgaacgtatcttagataatacactatctttaacatattttgaattattaacagtattagctattgttgctttttcagagtttaaggttgatttggctatactagaggcaggccttggagggcaacatgatgcaacaacagctgttcctgcagatttggtatgttatacaccaattgatcttgaccatgaacaattccttggatcaacagttgaagcaattgcaaaagaaaaatcacaagcaatgcgttttagaaaacctgttctttcaagttttcagcagcctgaagtaatgagcatactttgtgctatggctaaagaaaaaaattgctcttttcagtctctagaacaaattagtttagtatatgatctcttttaccctaatctagatggtagtcagacaaagtcagaatatttaactttaggcatggctggtaagcatcaacgtgttaatgcacagcttgcgttagcagcatggcatgtactttcacagaactttggatgggattttaatcttaactgtatttataaagggcttgctcatgcgtttattcctggacgatttcaatatgttcctcctaatccatcattaggctgccttcctactatacttgatggtgctcataatcctcatgggttagaagcatgtattgctgcatgtaaatctataggaatccgcccaggagccattattttttcctgttttgctgataaaaatattaaagagatggttgaacttgttcagatatttgcagaagggatcccattatttattccaacaatccaagttcatgagagagctatgtgtagcaacgagctagcaaaactgtttaaatgttctgttcagcctgtacaacgtcttagtattgcattacaagctataaaaaattctgatattgaaattagtgaaaaacgtcctatagttattctaggttcattatatttaattggagaattttttacactctaccctcatgtattatcttcttctataggtatgatataa

SEQ ID NO: 9032 - DNA, 1437 bp, Lawsonia intracellularis
gtggtaagttcaatgaatatgctgttacgtcaattaccttctgttgatatctgtctacatgcaatttttaaagaagatactacactatatactgtaacacccagacttttattacgtgaacttattaatacatttcttgataaactaagggaagatgttaagagcggtaatattactgatagttcttttcttactttggactatattttacctcaattactgacatttataaaaagacactcctctttaaattgttgtaaggttattaatgccactggcgttattcttcatacaaatatgggtagatctattcttcctcaagaggcactacaagctattaacactatatgtagtggatattcaaatcttgagttaaatttaaaaacaggagaaagagggagtagatatagtcatgtagtaggactattgtgtaagcttacaggagcagaggccgctattgttgttaacaataatgctgctgctgtattacttacattagatacgctttgtaaagggaaagaagttattattgctcgtggtcagcttgttgaaatagggggtagttttcgtatccctgatgttatggagcatagtgggactaagttaaaagaagtaggatgtacaaatcgtgttcatttaaaagattatgaaaacgcaataactgttgatacagctgctattatgcatgttcacacatctaactacagagttataggtttccatagtgaagttagtttaaaagatttggttatgttatctagtaaacataatttactttgtatcgaagatttagggagtggtagttttattgatttttcacagtatggtcttttaggagagccaactgtacaatctgttattagcgcgggagttcatattgtaaccttttctggcgataaagttcttggtggtcctcaggctgggatcattcttggtaagaaagagactattactcaaatagcactaaatcccttaaatagagcattacgtatagataaaatgacacttatagctcttgaatcaacattaaaactatatcttgataaaaaacaagctgtaacaagaattccaactttagcaatgataactatttcacctaacttgttggaagaaaaagctaaaaatattctttctaatctaaaaaaaatatgcggtgaaatgatagaatgttctattgttcctggattttctcaagttggtggtggtgcatttcctgaatataatttaccaacatcacttatctatcttcatcctactatttgttcttcagaaaaattaaaaatgcaactgttagatgtttctcctcctatattaggaagaattgaaaaaagtgcattttgtatagatccaagaacaatagcagatacagaaattgatttagttactacagctatttcacaagctatagatgctattaatattataaataataaataa

SEQ ID NO: 9033 - DNA, 354 bp, Lawsonia intracellularis
ttgagtatggctataaaaattatagagcattctccattttgtatagtaaaaataatagactctctttctatagagaatgctattgctatacagcaggagttagaaaatatatttgttacaagtgttacattaggagaacttgttctggatttatctaatgttcaaaatgttgatttttcagggataggaggggttatagcagcattattctttgcaagagcaaagggtattactgtgatactttaccgtcctactaaacatattcaagagatcatgtggaaaatgcagacaaataatctttttcctcttattctttcagaagaggagcttataattcatgcgttaaatagttag

SEQ ID NO: 9034 - DNA, 1131 bp, Lawsonia intracellularis
atgaaaatgtatttacaacattattttaatcctgactttgactatcttcaattacagccaattgttagtgttaaaggacaagctgacttgtataacttaggatatgttcagaatgttgttaaaggtcaagtcattgctgaaatgatacctcttgaagcaatagaaaatccaattcctcgatttgtgcttgaacaagaaaagtttcctcagggaccaaatacatatattgatcctgcatatccacattatttactttctgacgtcaatgggtatgttttttattataatggtaagatatctgtaaaaaaagttttgaatgttcgttcaaatgtagactttcatacaggtaatattgcttttgttggtgatgtcatggttcataaagatgtcaaagctggttttcaactacaggcaaatactattattataaatggaatggttgaaggtggagaagttcgttcaagaaaagatatgaagattattggtggtgctcgaggtggagttagtaatcgctgtcttctttcgtctggaggaagtcttcatgttaactttactgaaaaagttgaacttcgatcaaaaaaaaggatgattgttgaacgtttttgtatgcaatgcaaagtgtatgcagaagaaagttttattgtttcaggattagtagctggaggtattattcaagtttcaaaacatgtttttattaaagaaaaattaggaaatacatcaggaataccaacgcatatttttttaggatataatccatttcttctgagaaaactagaaagttgtgataatagcttagggatattaagtgaaaaaataacaaattataaaacaattattgatcaatcatcttcttctacagatgaaattcatcaaaagttagaagaggttgttcagcaacataatcagttatcaaaatatagaaatactatatggaaactgttacaacttgatgaggctaaagcattttcttgtcgcttagttgttccagggatagtatatcctggtgtagaattatctataggtaatgctagtttttctgttaaggaagaacttaataatgtatgtttcaggcttcatgaaaatgaaattatttatgagtcagtccctgcaactcttcttccttttttttaa

SEQ ID NO: 9035 - DNA, 1704 bp, Lawsonia intracellularis
atgaataagtatattcaatatgatgagaacggagatatcattgatatcattatccagatacaggatagatctatatccatgttaggttctggggggaagataagagaaaagaaaattgccagccattttattacagcattgcaaaaagcagaaatgtcttcaaaagtattaccagttctcttaggaagtggtgcaggatatgcattaaaagagattttagaaaatacaacaagtccaattgctgtgattgataaagagttttttcttaatgatacacaattgaaagaaaaaattactgatcaaagaatcaattggatttgctcatccaatatcgaagaggtattttctgctctaacacattggcaaatacagcatggtcgtttacctctttaccctttagtgcatccattttactttagaatagataaaccttggtatcaaaaaattaaacaatatgttgcagcaagtacaagatttgacttttggtctaaggctattcgaccacgtttttctacagcagagccacgtcttctattaattacaacacgatattttttattaggagttattgaagaggcttgtaatcgtcttggtattcctcatcaaattattactattcaagatgaagaaacaggatgtgtagagtttgtagagcaacttttaacatcagttgccacgtttcaccctgactttattttaactataaatcattttggggtagataaagagggtattttagtagatcttcttgctaagctagagttaccaatggcttcttggtttgtggataatccacaccttattatccatgagtatggggaagttgtatcaccgtggacagctatttttacatgggatgaaaatacgttacattcattgaaagagtatggttatccacatgtgttttatttaccattagggacttctcaatatcgctttagacctagaatgccacaagataagcctttatcatcagtttttcctactcatctttcttttgttgggaactctatggtttataaggtagaagagcagatagagaaaggcaacttcccttcaatattgcttcaacactataaaaatatagctagtgattttatatattcagataaacgttctatacaacaatttttaaaggaaacatatccagaatattataaagaatatcttaagcttcctgatgttgaacagcgtttagcttatgaagcaatgcttacatgggaatcaacactccaatatagattcagttgtgtagaacaattactttcttttcaacctgttattgttggagacaatggttggtatgaattacttagtaattataaagataattggagttattgtccgtctgtaaactattacaatacattaccatcaatatacagattttcagatattaattttaacagtacaagtaaacaaatgaaaggagcagtaaatcaacgtgtgtttgatattcctgcaacaggctcttttcttattacagactggcaacagcaaatggatacattatttgaacctaataaagaagttgtctattatcgtgaggttggtgagataagagagcttgttcagtattatttgacgcatcctaatcaacgtaagtctattgccagtgctgcaagacaaagagttcttgctgaacatacttgggagcataggctacaaacgttattagagcatatgcgtcaaacatatggataa

SEQ ID NO: 9036 - DNA, 648 bp, Lawsonia intracellularis
ttgaaagccatggattatggtgatatattacctttggaggatatgatggattctgtacaattaaacgagtgtattgcttttattcaacgtgctgaaaatctaaaaaatacattacgcagtgcacatacatcgcaagggaggcaggaaagtgctgcagagcatagctggcggctttgtttactgatacttgtttttgcaaaatactttgaacatgctgatgtaaataaacttttgcgattggctgttgttcatgatttgggtgaagcagtttgtggagatatacctgctattgccaaaccggatttagacaaaaagtcggagactgaacgtagaggcatgtgtgaactgtgcacgggtttaccggaaagtatctatacggaaatgttggctttatgggatgaatatgaattagcggaaactctggaggcaaaaattgtcaaggggcttgataagctggaaacaatcatgcagcacaaccagggaaagaatccacctgattttgattatgaattcaacttgttttacggacaggatgctatatcagttcttcctctgcttaagcaaattcgagatgttcttgataagaacaccagggaaaatgttgctataaaaaactttttcaaacattacgatggtggactattataa

SEQ ID NO: 9037 - DNA, 789 bp, Lawsonia intracellularis
atgatatatggaacctcttatgaatcattgagtctattttctaaactgtatgtgagtacctgtctattatcttgtgcacatatcttagtagatcaatgtggcaggcctgtcccaaaaatgaaaattatgctatgggtatggccaataactgcattatgggctggaatttttggtatctgggcttaccgtgtaataagccatagaaacgtccttaattcaaatgaagacaacattgccacatcactaaaaaaaagaaaggatacacttgagataacaagacaacaggaagtcaatattttagacaaaaacataatgcaaaacatggatatgtcgtctacagaacataatcttaactggaaacatattataaaaggaacattgcattgtggttctgggtgtaccattgcagatctaataggaccttggatatttcgtttgcttccatttacactatttggaaatatgctctatggtgaatgggcattagaatatgtattagcgcttattattggagtattttttcaatatgcagcacttgcatcaatgacacttcatcatggactatcattatggtggagagcattcagagttgattttttatcacttacagcctggcaaataggtatgtatggctggatggccattgctatatttctactcataggtcctatgtctccaacagatcctactttttggtttatgatgcaaataggtatgttttgcggctttattacatcataccctatgaactggtggcttatgtctataggaataaaaaaagctatgtag

SEQ ID NO: 9038 - DNA, 387 bp, Lawsonia intracellularis
atgaaagtacatgcagtaattataagaagtggaatattatccattaatttatttactatacctttagctgtagcacataatttttcagatcaatttgttgttgaaacatcaattactcaaagtattaaagatggctatacaaatttaaaaagtaatgtcgaagaaacaatgagttctttaacagatgaaaaaaatactgatgctgaaaaatatcttgaacagcacgataaagatcttaaagcataccagaatgaaataaaaaaagcagatcaaaactatatgaaagctcgtaaagaagctcaaagaaattatatgaaaaaccatagtcaacttcctatggaagaagacatagaaaaagatatggaacatataaaaagtggattataa

SEQ ID NO: 9039 - DNA, 483 bp, Lawsonia intracellularis
atgaataatcttcctgaaaaacatgaaaataatgagattatcattaaaaaaaataatacaggagaccacaataatgaaatagattctagtcattttaaagaacaactacataccatttcagaacaagcattagaaaatatagaaaaaattatcaaaaagacaaaagaagttatttctcatgcaaatgaagctatgaaagagacgtttgaccatctaaaagaacaattacaccacacatctgatcatacaaaagaacagatagaaaaagcttctgataaaacaaaagaaacattaagtgatattaacatacaaattaaatatactattgattcagtaaaagaacaattacacacttccgcagaacacaccaaaaagtatatagaaaatacttctgatactacaaaaaaaacaatacacaatgccagtaaaaatacaaaacaactgtttaataacgttaaagaaaaaacaaaagatattttctaa

SEQ ID NO: 9040 - DNA, 1257 bp, Lawsonia intracellularis
atgataaaagttagtattattattccagtatataatgagtggcaattaacaaaaacttgtttaataagcttagctaaatatacaaacaacgttcatgtttatgttataaataatggttcatcagatgaaacaaatctagcatgccctacattaggaaatatattatttggatctaactttcattatatatcttttgatactaatcataactttggtcctgcatgtaacactggagcttatgctgcaaatacagactatattctctttttgaataatgatacagaagtatcatatggttggcttccacctcttgtagaagcacttgattctgatccatatctagctggcgttggatctttacttatttatcctgatagtacagtacaacatttaggtgttactataactccagatggaaactatgtaaatcacctttataactctattcctgcaacaatccccttagtacataagaaaagaaagttcaaaattatcacagcagcatgcttacttttacatagaaaaaattttattgatattggtggattctttaatggatacaaaaatggccttgaagatgtagaattatgccttagactcacagaacaggggaaatatatgatgtgtattcctgaaagtgttgttatacataaagaatcaaaaacacctggaagaaagaataaagaagcttataacacaagtctctttttcaagaggaacaatatttccttcctaggcgatatggattacttcttacaacaagatggttatacagtagatattacaccttctctatggccttatccaacaattcataaatcaaaacaatatgatctgctcaaaagtttatctactccttttaaccccttacaatgctttgatcttcttaaggaagaacctttttggaaacatggtagacaccttttagtcaattggcttgaaaaaaataatgaagtgtctatggcattaaccttaatgatagaagaacttaatttatgtaaatcacttaatatagatgagttaaaatatattataactctatgtaatagattagggattgattctcatctgtttcaacaaaagataaatagcctcttaaaatttattttgaataaatcaaactttttaggtaccttaaaaaggatacaatatattttaaataaaacaggacgctatgaactactaaaaaaatataatcaagctgctattcaagcccaaattatacgtaataaaataaaaactacttctatcatttaa

SEQ ID NO: 9041 - DNA, 960 bp, Lawsonia intracellularis
atgaaatatgttgtttgtcttttatgtgtgatattattttattatttctgtagtgcagggacactatatgatctatggggtccttcactgtattcttctttcccttctgatagtcgaaatgctcttcctaatgatgcatcaatccctaaaaattatattcctatatgctcactaccaccccttttaaatacaattggcacaatccgtagagttgacgtaccaggtgataaaaaagttgtagctttaacttttgatatgtgtgaacttgctacaaaaacaacaggttatgatacagctatcatcaattttttgcgtttacatcaaatcccagctacattgtttcttgggggtaaatggatgagaacccattctgaaagagctatgcagcttattgctgatcctctttttgaaatcggtaatcatgcatggactcatggtaattttgggattatgagtgaagcaaagatgaaagaacaagtattatggacacaggcacaatatgaaattttaagaaaacaagttattgagcgcatcaaattaaaaaattttctactacctactatccctgagtgtatgcaattatttcgtctaccatacggaagatgtacagggcaggccttaaaattacttgcagaactagggttttatgttatccaatgggatgttgttgctgaagttcataacaataatagtatacagggattagagcagtatgttgtcaaaaatgtaaaaagtggttcaattattttatttcatgctaactgtgttcctattggttctgctgagttacttaaaaaaactgtagaattattgaaacgtcaaggataccagtttgttactgtaagcactttgcttacaatgggtaagcctcaatatacaatggatggttatttcacatcgcctggagataacctttcattagatacaaaatttggcattgatggaacaggattaaagtaa

SEQ ID NO: 9042 - DNA, 888 bp, Lawsonia intracellularis
atggagaagctaaatgtatatatatatatagtacttttaatattttttccatctattttattggcaaaagagtttgatggggaaaaaatttttttcatgaaaaatcagtctccacaacaacaaatactttcaattgcacttttaaccaaaaacaaaaaaattattatatttgacggtggtacaaaagcagatagtaaccatctttcttcttttattaatgagcatggaggaaaagtatcagcttggtttttaacacatttacatgatgatcacacaggtgcactttcagaaattcttcttgatgataacataacaatcgataatatatactacaatttcccacctccagaatgggttgaagagcatgaacccatgtactcatcgcatcttactatgatagtagagcctttaaagaaaatggcttatttaaataatcaaaagaagatacaaaaaggtgatacattttcgatagatggtgttacaatcactgttctcaatgattttgatctttcaataactagaaatggtgtaaataatacatcatttgtatatgatgtaatgattgcagggaaacgtatgttggttttaggagacttaggtgaagaaggtggagaacggcttttagctgagtatggaaacacattgaaagcagacattgttcaaatgtcacaccatggacaacgaggtgtacaaaaagaggtatatactgcaattagtcctagaatttgtttatggccaacaccattatttttgtgggagaatgactgtagttatggtcctagttctgggacatgggaaataaataaggttaaaacatggatggaagaggtaggtgttagagtacactatgtttctgggttacaagaagatgatatcgttattgaatag

SEQ ID NO: 9043 - DNA, 402 bp, Lawsonia intracellularis
atgccagatatattattaaacactatacaacacgacacatatataccattaaaacttcattcagatctaacagaacttaccattacactccataaagcaacacaagatttagaaatggtaaaacatcaagtaaaggaagctgtaaaaacattatcagattcttcttcaaatatagatttatctatacctaataaagaaacaaaaaaacaagaaagccatacaaaacatacatatgttatgtatgataatgatgatatccctagtgaaactcgttgctactactttccttctcttgctgttacctgtgaacaaaagctcctcaaaggagaaaatgtaactgattttaaaggactcctctttaatgcttgtacatctatctctacttttacatcgcttttataa

SEQ ID NO: 9044 - DNA, 729 bp, Lawsonia intracellularis
atgaaaaaatatctttttgaagcatttgatggattaaacaggcttgctccaggaagtactgaaagtactcaacaagctattaaacttttacctgctgactttttacctaaaaagattcttgatattggttgtggagttggtgaaagtactcttttactagctaagcattttagtaatgctgaaataatagctattgataataaccaacaatatatcaatgaactggaaagcaaagctacaaacaatatcaagccaaaagtgatgtcaatgtttgaaatggactttgagccagaaagctttgatcttatctggtcagaaggttcaatatatattgcaggatttcaaactggtttaaaagactggaaaaaatttctaaaaaataacggatactttgtttgctctgaaataagctggttaatagatcaatactcagatgcaagtaagtatttttggaatgaagcttaccctgaaatcgatacaatcgagaacaacttacaaaaaattcaatctgcaggctataaagtcttaggacattttgttttacctaaaagtaattggaaagaaaattactatgctcctctccaaaaaaatcttgaaagaatgaagactacctataataatgatgaaaaagctcaacaagttatagcactaatacaatccgaaatcgatttatataaagaaaattcagatgattacagctatgtcttttatataatgaaaaagatataa

SEQ ID NO: 9045 - DNA, 1839 bp, Lawsonia intracellularis
ttgagtaataatataacaaataataatcttagaaatatagctattatagcacatgttgaccatggaaaaacaactttagttgatgccttatttcgtcaaagtggtatttttcgcgaagatcagcaagttgatgatcgtgtcatggatagaatggatcttgaacgtgaaagaggtattaccattgcagctaagaactgtgctgtgacatggcaaggtataaaaattaatatcatagatacaccaggccatgctgactttggtggtgaagtagaacgtgcactttcaatggctgatggtgcaattttacttgtagatgcagcagaaggtccacttcctcaaacacgttttgtgttaaaaaaaacacttgaagctggattaaagattattgttataatcaataaaattgatcgaaaagatgcacgagttcaagaagtccttaatgaaatttatgatctttttatagaccttgatgcaacagatgaacagttagaatttcctgtattgtacgctattggtagaaatggtgtggcaatgagaactttggatgatgcacaagaaggccttgttccactttttgagactataatagaagttgttccaggacctaaatacgatcctaatgaaccattccaaatgcttgtttcagatttgagctattcagactatcttggacgtttatctgttggaaagatatctcatggaagtgtacattcaaaagatgcacttgtttgcatgaatgaagagggtgtagctattcctcttcgagtaacaaaattacaatcatatcagggaataacacttacagatatagaatctgcagaacctggggatattattgttattgcaggtcttgaagatgtttctattggagatactatttgtactaaaaatgaaatacgagttctaccaaggttaaatattgatgaaccaacagtagctatgcgttttactattaataattctccattagtaggaaaagaggggaagattgttcagtcaagaaaaatcagggaaagactttttaaagaaacactaactaatcttgctattagtgtagaagaagctgaagaacgtgatagttttattgtaaaaggacgtggtgaatttcaattagcaattctcattgaaacaatgcgtcgtgaaggttttgagttatctgttggtagaccagaagttattctccaagaaaaagatggtgaacgacttgaacctgttgagcatttgtatattgattgtgatgaatcctttatgggagtagtaacagaaaaaattgctcaaagaaaaggacggatgttaaactgtgttaataatggctcaggtcgtgtaaggcttgagttttcaataccatcaaggggtcttattggatatcgtgatgaatttcttactgatacaaaaggtacaggaattatgaattcgttattatcaggatatgagccctggagaggagattttcctagtcgttttacaggttctattgtttcagatagggcaggttcagctgttgcatatgcattatttaatcttgaaccaagaggtgaattatttattgtttcaggagatcctgtctatgaaggaatgattataggtgagcataatcgtgataatgatatagatgttaatcctataaaagagaaaaagttaactaacttacgtacatcaagcaaagatgaagctattattcttactccagtaaaacctatgactcttgaaaaagcattacattttgtaaaggaagatgaactagttgaagtaacaccaatttcgattcgtctaagaaaagcagaattaagtgctcaaaagagacatcaaatagcaggaaaaaagaaaacaggaaagtaa

SEQ ID NO: 9046 - DNA, 1101 bp, Lawsonia intracellularis
atgtctttacaaattggtattgtaggtcttcctaatgtaggaaaatctaccttatttaatgcgttaacaaaagcacaaaatgctcaagcagcaaactatccattttgtactattgaacctaacaaagccactgtacctgttcctgatcaccgccttgaagaaatagcatctatagtttctcctcaaaaggttattcaaacaactgtagactttattgatatagcagggctagtaaaaggtgcaagtaaaggtgaaggacttggaaatcaatttttggcccatatacgtgaatgctctgttattcttcaagtcgtacgttgttttgataatgaaaacataacacatgttgaaggaaatgttgaccccatcagagatattgaaaccattgaaacagaactcttattagcagatatacaaactgtgacacaacgtatagagcgccttcaaaaaatagcaaaaaataataaagacgctaaagtggctgttgaagaaatgaatcttcttcttcttcacttaaatagtggaaaccctgcatctacatttaatgagaaaaaaaatgaaaaattaagttcattatggaaagagttaggcttactaactgataaacgtattatatactgtgctaatgtagatgaaactaatttaattgacggtaataactatctaaattcagtaaaaaaaattgcagaaaagaaccatacagagatgattgtcatttgtgcaaaaatagaagaagaacttcaaggattatcagatgaagaacaagctgaaattcttaatagttatcatatcaaagaaagtggactcattcaaattattcaaaccggctacaatgcactaggtcttattagttatttcacagcaggagaaaaagaagtaagagcatggacaattgaaaaaggttggaaagcacctcaggctgcaggggttattcattcagactttgaaagaggatttattcgtgcagaagtcatgagtatttcggattttctacaatacaaatctgaaacagcctgtcgtaatgctggagtgttaagaacagaaggtaaggattatattgttactgatggtgatattattcactttttattcaacgtctaa

SEQ ID NO: 9047 - DNA, 459 bp, Lawsonia intracellularis
atgcagcgttgtggtctttatatcatttgtttagtgttatctataggtatgataagttgtgcaaattttagtgcttcttcttttggagggaagcaaattcgtagtgcacatattgttgaatttggaaaagtcgtttctgtaaaacctgttgaactagaaggaaatacaccaattctaggtactattactggtggagctgttggtggtgttcttggtagtttaatcggtggaggatcaggaagaatattatcaactgttgttggtgctggagcaggggctgttgctggaaacattgctgaaagaaaaattacaacgcaacaaggtctcgaaatagaagtgaaacttgataatggtcaaattatttctatagttcaaggtgctgatcaatcttttagtcctggcgaacgtgttcgagtactacgtggaagtgatggttcggctcgagtatcttcaatatag

SEQ ID NO: 9048 - DNA, 2493 bp, Lawsonia intracellularis
atgacttttgatacaaatgatgatagtattgccaaaaattctcttgcaccatacaatcaagaaacagaacaacagcaagaggagggggcgatgaaaataaatgctgggacagaagatgatgttcagccacaagaaattccatcgagtatccctattttgcccctaagagatgttgttgtatttaactatatgattgttcctttatttgtgggaagagaacgttctattcaagctgttgaatctgctactacacatggacaacatatttttctctgtgcccaaaaagattcacaaatagaaaatcctacagaagaagatctctattccgtaggaactgttgctcttattcttcgtcttcttaaaatgcctgatggacgtctaaaagctcttgtacaaggtatctctagagctaggtgtcttacgatccataatgaagatggctatcttacagcaacagttgagttactccaagaacctcaacctaccgtaaagccaacagaacaggaagctcttctccgttatgctcgtgaacaatgcgaaaaaatactagcattaagaggtattcctactggcgaaattatgggagttctttctaatgtgaatgaaccaggaagacttgcagatctaattgcagccaatcttcgactcaaaacagaagaagcacaagaaatacttcaatgtcttgaacctatagatcgacttcaccttgtcattacacaccttacccatgaagctgaagttgcaacaatgcaagtaaaaatccaaacttctgctcgtgaaggtatggataaagctcaaaaagactactttctaagagagcaacttaaagctatccgtaaagaactaggtgatgctattgatgctgatgaagaaattgaagaagtttctagtgccttaaacaaagctggattaccagcagaagtacgtaaagaagtcgataaacagcttcgtaggctttcaacaatgcatgccgattcagcagaagctggtgtaattcgtacctatcttgattggattgctgagcttccatggaaaaaaacatccaaagaccaactagatattcataaagcaaaaacaatcttaaatgaagatcactatggacttgtaaaaatcaaagatcgtattcttgaatatctcagtgtacgaaaacttaatccaaagtcaaaaggtcctattctttgtttcgcaggacctcctggtgtaggtaaaacgtcacttggacgctctattgctaagtcacttggaagaaaatttcaaaggatctctcttggtggtatgcatgatgaagctgaaattcgtggccatagacgcacatatattggtgcaatgccaggaaggcttattcaagctatgaaacaagcaggaactaaaaatcctgttattctcttggatgaaatagataaactagggaatgattttcgtggagatccatcttctgcattacttgaagcattagatccagagcaaaaccataactttagtgatcactacctcaatgtaccatttgatttatcaaaagtcctttttttatgcacagcaaatcacttagaacatattcctgcagcactaaaggatagattagaaatcatatcattacctggctatacccaacaggaaaaacttgctatagctcgtaagtatattctacccaaacaattaaaagaaaatggactaaaagaaaacgagcttatcatttctgacacctgccttgaaaaaattattagagaatatactcgtgaagcaggattaagaaatatggaaagagaaataggttctctatgccgtaaggttgcaagaaaaaaagctgaagggaaaaaaccaccattccgtattactacaaaccaaattgaaaaatttttaggaataccaagatttattgatgatgacacagaaaaaacacttccaccaggtgttgccttaggacttgcctggacaccagcaggaggagaaattttatatatagaagtatctacagtaaaaggaaaaggaaacttacttcttacaggtcaacttggtgatgttatgaaagaaagtgctcaagcagcattaagttatgctcgttcaaaagcatctagtcttaatatctcaccagattttgctaaatcaatggatatacatatacatatccctgcaggtgcaactccaaaagatggcccatcagctggtgtaacattaacaacagcacttatttctgcattaacaggtaaatctgtccgtggagatttatgtatgacaggtgaaattaccctccgtggtcgagtccttcctgttggaggtataaaagaaaaagttcttgcaggtgttgcaagaggtcttggacatgttattatacctactaaaaatacaaaagatctggaagaaattcctcaagaattaaagaaaaagattaaaatacatactgtaagccatatagatgaagttcttccattagcttttagcgaaacaattcctgttgttactaagaaaaaacaaacaaaacaaccaacatcataa

SEQ ID NO: 9049 - DNA, 681 bp, Lawsonia intracellularis
atgccaaatgacaagcctcatcaccttggtcatcgagctagactcagaaaacggttatgtaatgacccatctgagatggcagaatatgaacttttagaattatttttaggatatgtacatttacgcaaggacacaaagccattggctaaaaaattattacaacaatttggctcaataagaggtgcacttgatgcattcccaggtgaacttgaaactattcctcaattcggtgaagctctaagtgcattttggaaacttatacgtgaaatttttgcacgttatgctgaaacacctgtgagagaaaaaattcaattatgtacacctaaaattgtagcagaaatagctaaagcaagatttacaggttgtcctcatgaagaagtatggattgcaactgttgatacacaaaacagacttataagctgggaaaggttaagtaaaggaaccatagggagttcacctctatatccaagagatacaatagaaatagtcttaaaaaggaaagcaagtgggtttatattagtacataatcatcctgggggctcttcaaatgcatcaagttttgatatagaaattacacgccacttagaacatattgcacaaagtataaacttacggttaattgatcatattattgtgacagaaaaaaattgttacagtatccgaaatgatgggttactgtaa

SEQ ID NO: 9050 - DNA, 978 bp, Lawsonia intracellularis
atgattcatcaaggattcatattctgtatatgtccagatagtacaattcttcaacagcaattagaggaactagttactgctcaatatgtgtcaaataagtgggaaaaatctgtgtactggggagatgaagaattaccaaaaaaattttgggacaaccttacattacaaaatctttttacaaataaacaaatagttgtcctccgaaacgcacaccttcttcctgttgatatatggaaaaatatttcatcaattattagcaaaccaaaccaatatctatggcttatattttgtttagaagctccatgggaaaaaagacaacctaaacttcctgctcatatccaaaaacttccatgttttatttttgcacaaaaacaaaaatggatatggagctctcctggtgttgatgaacgcaatttaaaacaatttataaaaacacaagctacaagcataggacttacgtttgaaccccatacattagaaacactttcaaatcttttacctactgatgctgcaactataaagtctgaacttttaaaaattaagctatctcattctgatagcttacctatctctactcaacaattaaatgtaatcagtcatacagcaaatacatttgatatttttatattcttaaaacagcttgaatcaggtaatgcattacaagtatggacatctatcttacatgaacaacaaaaagaagaagatccactcttttttattcttactatgctacaaagagaagccaaaacattatggcaactacttatgggagaaactgtaacaggttatccaaacgaattatctaaaaaaacacaacttgcaaaatatattggaataaaaggaataacaaaaatgtgggatgccctttattttgctgaggttacagttaaatcaggagaaggttcttccatacaggcacttgaaacacttatttctacactgttaccactttttaccaaggctcaagaaacatcatag

SEQ ID NO: 9051 - DNA, 528 bp, Lawsonia intracellularis
atgtataacaaaaaaattacaactactttttattgtatccccttatggttttatatatcaatatttttaactggttgtgggtacacttggcaagggcaagaaggatacctttctaaacgcactattcttggtgatggaacaaaaactctttgtatgaacaatatcgaacaatcgacactctacccatggcttccttatatgatacgaacacaagttcgtaatgatattaatgcacgaaagcttgctatttgggttgactctggaccttcagacttcactcttactgtacgtataaactcatttcaaataagaagtgctggagaatataaacaacataacttactatttacagcaactgtcaatatggagctcattatttttgacggaaaaactaatacagaaatttggagttcaggacctgtaatttatagtgaaaactatgaacatgctaatgaagaacaagctattcaagaagtcatattcatgacaacacgaagagcaatagatcaaattcaacaacctttttaa

SEQ ID NO: 9052 - DNA, 2508 bp, Lawsonia intracellularis
atgataatgcattctaattatgatcctaacattattgaaaagaaatggcagcgttactgggaagaacaacacgcctatgcttgtgacatagatcctaataaaaaaaaatattatgtacttgaaatgtggccttacccttctggaaacattcatatgggacatgtcagaaattattctataggtgatgttattgcccgtattaaaagaatgcaaggatataatgtccttcaccctatgggatgggatgcttttggtcttccagcagaacttgctgcaataaaacatcatacacaacctgcagattggacgtatacaaatattaatgaaatgcgtgcccaactgaaaagattagggtattcatatgactggcaaagagaaatagcaacatgtgatcctgactattatcaatgggaacaacttttttttgttgactgctttgaaaaaggactagtttatcgaaaaaaagctcctcagaactggtgtccatcttgcaatactgtactagcaaatgaacaagttattgaaggaagttgctggagatgtgatacatctattattcaaaaagaactaacacaatggtttttaaaaattacagattatgctgaagagctattagatgatcttacaactcttaaatattcctggccagatcgtgttataactatgcaagaaaattggcttgggaaatccacaggtgtagaaatttcttttcctattgaatcctctcaagacttcattactattttcacaacacgacctgatacaatttttggagcaacagctattattcttgctccagaacatcctatattagaaaccttacttaatgatactccgcaaaaagaaaaactatataatgttatcgaaaaaatgagaaatatggatagattagaacgtcaatctaatctactcacaaaagaaggtatttttattgatcgttattgtatcaatccttgttctggagataaaatacccatctggattggtaattttgtattagcagactatggtacaggagctattatggctgtaccagcccatgatcaacgtgattttgatttttgtaaaaaatataatctacccatttctattgttatacagccagatgaacttcaaataaatgaacatacaatagttgaaccatggactggtttaggaacgcttatacattcagggcaatttacaggtcttactaacaaagaagcaaaagaaaaaattactcaatatcttgaaaagataggtaaagcaacaagggttgtttcttggagattacgagattggaatatctctcgacaacgttattggggaacacctatccctattatatactgtaaaaactgtggtgttgtttctgttcctaaaaacgaattacctgttatccttcccactaatattaccattaatgaagatggaagctccccattacctcaagagtcaagcttcatagattgtatgtgccctcaatgtggtggaattgccaaaagagaaacagacactatggatacgtttgttgattcatcatggtactttgctcgttttgtagatcctaaaaatacaaaacaaccatttgatacatcaatagcaaaatattggctcaatgtagaccaatatattggtggcgttgaacatgctattcttcatctactatattctcgttttttcacaaaacttcttagagatttaggttacttaccctccaatataaatgaaccatttgcaaaattacttactcaaggaatggttataaaagatggttctaagatgtcaaaatctaaagggaatatagttgatccaaatcaaatgataaatatatatggcgctgatactatacgtcttttttgtttatttgctgcccctcctgaaagagactttgactggagtgactcagggattgaaggttcttatagatttctgcatagagtttggagactttttattgatgtacaaccacacatacatacaacacatgctggtaactcaacagttatagaaacaactactgcccttacaaaagatgtaaaaagaaaagaacatataaccataaaaaaagttagtgaagatatagaaaacaaataccaatttaatacagctattgcttcaataatggagtttgtaaatacgctttatctctcaaaaaatgaacttattcttacagttgaagggaaaaatatactttcatctgctatagcaactgtgcttactttattatcaccaatgactcctcatatttgtgaagaattatggagttatttagggcactcaacgtctattagtttagaaccttggccaaaatgggatccccaggcccttttaaaagatgttgtaacaatagttgttcaaataaatgggaaagttcgaaataaatttgaagtaccaatggatctctccaaagaagaattagaacacattatttttaatgatacaaagattactcaataccttgaaggaaaaacgattcaaaaacatattattattccaaacaaaatcataaatatagttacaacataa

SEQ ID NO: 9053 - DNA, 486 bp, Lawsonia intracellularis
atgcctgctaataaaaaacattctagacgaatagaccgaactaaagcttttcaagttctttatagtctccattttactcaaataaatacaattgaaaccctcaaagaaatctttcttaatctacctaacccattagaagaaagaaatactggtataataactgaattagatacacaaataagtttttcttggcaacttgttgagggagtctggcgtaatgtaactagacttgacaaaataataagtcaattttctcaaaattggcgagtcgatcgattaggtaagatagaattaacattactacgtattgctacatttgaaatgtattattgtccagacgttcctcctaaagtatctcttaacgaagcattagaactagctacttgttttggagacgaaaaagctagaaagtttataaatggtattttagacgctataataaaagctattgaaacagaaaaaatcaactatatagataaaaattaa

SEQ ID NO: 9054 - DNA, 474 bp, Lawsonia intracellularis
atgggacaactaaatgtaatagaaggacattatgatgcttcaggacttcggtttgctattcttgcaagtagatttaatgactttgttgttgatcgtcttatttctggatctattgattgtattctacgccatggaggaacaaaagaaaatattacaattgttcgtgtcgcaggagcaatggaactacctcttgtatgtaaaaaactttcattaacatcaaaatttgatggtatcattattttaggtgccattatacgtggttcaacacctcattttgactatgttgctagtgaagctactaaaggtgtagtcaatgtttcactccaaacagacgtccctataggttttggtgttcttactacagatactattgaacaagctattgaacgtgctggctcaaaagctgggaataaaggatcagatgctacattagctgtccttgaaagtatccgtgtgatccaaaaaatttcatag

SEQ ID NO: 9055 - DNA, 1269 bp, Lawsonia intracellularis
gcatggtttttattaaagaaaaaaagagatctcaatatgtctatttatagtgttgaggatgccatccaagatattcgccaagggaatatgattatacttgttgatgacgaagatcgtgaaaacgaaggcgatctcgtgattgcagcacaacatgttacaccagagcatattaattttatgacaaaatatgccagaggtcttgtttgtcttcctatggaatctacgctcatagataagttaaagctccctcctatgtcacaagtaaacaattcaaagtttggtacaaattttactgtatcaatagaagcacgacaaggagtaacaacaggtatctcagcagctgatagagcacatactgcattgactgctattgatgataacgtacaacctgaagatattgtcactccaggtcatatgtttccactacgcgctcaacctggtggtgtccttactcgagcaggccatacagaaggaagtgtagatctagtacaatttgcaggtttaaagccagcagctattatttgtgaaatacttaatgatgatggttcaatggctcgtatgtctgatttagaaatctttgcatctaagtataacttaaaaataactactattagcgatataattcgttataagatgaagcttggtaagcttactgtaaagcaggttgctagagctaacttaccttcaaaatttggtacatttgaagtgattgcttatgaaaatggcattaattcagacactcatcttgctataataaaaggtaatgttaacaatacagaggatgatagtcctgtattagtaagagtacatagtgaatgccttacaggagacgttttagactctcttaggtgtgactgtggtggacaactttctgcagcattaagacaaattgaacgtgaaggtcgaggtgtccttgtatatatgaggcaagaaggccgaggaattggacttgctaataaaattaaggcctatgctcttcaagataaaggatatgatacagttgaagctaatcaaaaattagggtttaaaccagaccttagagattatggagttggagcccaaatacttgtagatttaggtattaagcgtatgcgtatactcacaaataatcctcgaaaagttattggacttgaaggatatggaatacatattactgaacgtgttccacttgaaatagcaagttctaggactaacttatcatatctacgtacaaaacaagaaaaattaggacacttattacatctatgtacaacatgtcaaaggagttaa

SEQ ID NO: 9056 - DNA, 666 bp, Lawsonia intracellularis
atgtttacaggtgttactcaaggttgtggaaatatttactctattaaccattatggtaaagaagtacgtattacagtagaaccacttttccctctaaaaattatctccacaggtgaatccattgctataaatggtacatgtcttactgttgaacaatatacaagcactacttttactgtatacgcctctttagaaacactccaaagaacaaaccttggtaaattggttgttggaaattctgttaatttagaacaatctattgctgttggtgaacgcttaaatggacatattgtaacaggccatattgattgtgttgctactgttcaatctatagaaaaacaaggtaaatcaaactgtattaaacttatttttccttcaaaatttagtaaagaagttgtttctaaaggttctgttacattagatggaattagcttaactgtaaataattgtggctctggttttcttgaagttaatattattcctgcaacatggaatataacaactatttcaaattggaaagtaggtacacatgtaaatatggaaactgacattatagcaaaatatatttacaacatgctaaatcctatcatatcttctatacattctaatgaaaacaaaactacaaatatcactttagattttttacataagcatggtttttattaa

SEQ ID NO: 9057 - DNA, 1149 bp, Lawsonia intracellularis
ttgagtttacaagtgaatcatccatatgattatgctatgaaatatgctataagcattgccgaaaaaggtcgatgggatacagcacctaaccctgttgtaggctctgtattaatccaaaatggaaagattgttgcagaaggttttcactctttatatggaggaccacatgctgaggttctttgtattaatgatgcaaaaaataaacatattaatctttcagactgtacacttattacaacacttgaaccttgtaatcattatggtaagacacctccttgtacaaaagccatcattgataacaatataaagcatgttataataggtacaaaagatcctactactcttgcctcgggtggtgtacatacattaacatctgcaggtataactgtcgaagtaggaatcttagaaaaagaatgccaagcactaattgctgattttataacatggcaaaacacttctcgtccatatatattactaaagcttgcaactacgctagatggtaaaattgctactagtactggacattctaaatggatttcatctgaagtatctcgacaaaaagttcataagttaagagagaatgttggaaaagtaggaggtgctattttaattggcggtaatacattaaaactcgataatcctcaactaacttgtcgtaataataataataataataagatacaacaaccattagctataattattacatcaacacttcctgaacaacaagatatctatctttttaatagtaggccaacagaaaccattatttatacaacgccacaaagcggatcaacacaacaggcaacaacactacgtaaaaaaggtgttaaaatagttacattaaaaaattggtcacctgatctatctgctatcttgacagatattacagaacatataaggtcaacacaaggatgtctttatatgttatgtgaaggtggagggaaattaggaagttcacttctcaaagctaatcttgttgatgaacttcatatttatttatctcctaaaattttaggagataacaatgcattacctatagttaatggtagaaatccattaactatacatgatgctatttccctcaaaatacatacaatggaattatcaggttcagatatccatctcacttttaggccggaaatgtaa

SEQ ID NO: 9058 - DNA, 498 bp, Lawsonia intracellularis
atgtcccgcttatcttggtctgactactttatgggtattgctcatttagtggcagaacgttcgacatgtcttcgtaaaaaagttggtgcaattgctgtcaaagaaagaaggattttagcaacaggctataatggagcaccatcaaaacttcctcatgcttcagaggtaggttgtctaagagatcaactaggcattccttcaggtcaacgacatgaaatttgtcgtggtttacatgcagaacaaaatattattatccaagctgctatccatgctatatcattaaataatgctgaagtatattgtacacatcaaccatgtcttatttgttcaaaaatgcttattaattgcaatattactactatttggtatactattccataccctgacgaacttgcaaaaaaaatgcttaatgaagctggagttgaattaattcaacttacatctaaacaaaataattctacctttgagtttacaagtgaatcatccatatgattatgc

SEQ ID NO: 9059 - DNA, 1239 bp, Lawsonia intracellularis
atggatcaaataatacttcaagaccctgaattagcccaagcaattatcttagaaagtggccgacaaatagataagcttgaacttattgcatctgaaaatattgcttcaactgcagttcgagaagcacaatcaacaattttaacaaataaatatgctgagggttatcctgggaagcgttattatggtggttgtgaatatgtcgacatagctgaaaatttagcgatagaacgtgctaaagcactttttcatagtgaatatgctaatgtccaaccccactctggaagtcaagctaatatgggagcttattttgctctcattaagcctagggatacaatcttaggtatgaatttatctcatggaggacatttaactcatggaagtcctgtaaacttttcaggtcgactttttaatattgtatcgtatggtgtcaacaaagagacaggacttattgactatgaagaagtagcaaagcttgcagaaaaacataaaccacaactgattgtagctggagctagtgcttatccacgtattattgacttttctaaatttcgttcaattgctgatacaataggagcaaaacttcttgtagatatggcacatattgctgggcttgtagctacaaacttacacccttctccaataccatacgcacatataacaacaactactacacataaaacactacgtggtcctcgtggtggtatgattctttctacagaagatatggggaaggtaatcaatagccaaattttccctgggatacaaggtgggccacttatgcacgttattgcagcaaaagcagtagcattaggagaagcttcaaaagctagctttgtaacttaccaaaaacaagtaatcttaaatgctaaaacccttgcaaaacaacttttggatgctggttttaaccttgtttctggaggaacagataatcatcttctattaattgacttaacaaataaaaaaattacaggtaaagatgcagaaaaagctcttgatcaagctggcattactgtaaataaaaatacagttccttttgaaacactttctccttttgtaacatctggtattcgtattggcacaccagctttaacaactcgaggtttatgtgaacaagatatgataaaggttgctaactggattgttactgctcttaataatatcaataacgaaactcaacttaaagaaataaataaagaagttacttattttgctcgtcaatttccactcttttcatggtaa

SEQ ID NO: 9060 - DNA, 1251 bp, Lawsonia intracellularis
atgagccaaaaacgtgttgtagtaactgggctttctgctataacccctttaggtaataatcttaaagaaagttggagtaagctcttagcaggagaatcaggaatagcacctataacgctctttgatgctagtgaatacgcatgcaagattgctggtgaagtaaaacaatttaatcctgagaactatggtatccttccaaaacaaagtaaacggatggaccgttttgtgcaatttgctgtagctagtgctagtgaactcataaaagattctggacttcaaatcacagaagcaaatgcttatcaagtaggaattattcttggtgttggattgggtggtctaaaaactattgaagtttttcatgaaaaacttcaagaagtaggacctaataggatatctccatttatgattcctatgcttatatccaatatggctcccggacaagtagctatttttactggagcaaaaggttctaattttgttgtaacaagtgcttgtgcttcaggaacacatgctattggtcttgcatactctgaaattcagttaggtcgttgtattgcttgcattactggtggtgttgaatcaacaattacaaaactttgtatctcagggttttcagcattaaaagctctctcaacaaaatataatgatatgccaactcaagcatcaagaccttttgataaaaaccgtgatggatttgttgcaggagaaggtactggttatcttatgttagaagaacttgaacatgctaaagctcgtggagcaaaaatttatgctgaagttattggctttggtacatcagatgatgcaagtcacatgacagcaccaggagaagatgctgaaggaatgagttttgctatgaaacaagcattaaaaaatgctcaaatagcacctgaaaaaattactcacattaatgcacatggaacttcaactttcctcaatgatatgtatgaaacagttgctattaaaaaaacatttggtaatcatgcatacaacatagctatttgtagtaataaatctcaaattggtcatttgcttggtgctgctggtggtattgaggctgtcttttctgtaatgtctctatatacaggtatagtacctggaactattaactatactacacctgatccaaattgtgatctcaactatatgcctaatggaccacaagaacttaaccctcaatatgtattaagtaattcttttggttttggtggtacaaatgctagtttaattttaaaaaaatttgaatgctaa

SEQ ID NO: 9061 - DNA, 744 bp, Lawsonia intracellularis
atggctaatttaatctctacagctatagtaacaggtggctcaagaggtattggtaaagctacggcactttcactagcaaaagcaggttatcaagtatttattacatatgttagtaaatctgaagaagctgaatctgttataaaacagatacaatcccaaggtggaaaagcaaaaatgttcaaccttgatgttagtaatgccgatgatattactcgcttttttaatacagaagttaaagaacaagtaaacctttctgtacttgttaataacgcaggaataacaaaagatactcttttattacggatgaaaaatgaagactttgatcaagtgatagacgtgaatcttagaggtgcatttatatgtatgcgtgaagcagcgaaaataatgacaaaacaacgatatggacgtattataaatgttacttctgtagttgggcaatctggtaatgcaggtcaggtaaactatgcagcagcaaaggctggcttaattggaataacaaagtctgctgctaaagaacttgctagtcggaatattacagtgaatgctgtagctcctggatttattgctactgatatgacagcaactcttagtgatgatgtacaaaaagcatatcaagaatctattcctttaaaaagattgggaacacctgaagatattgcagaagctatactttttttagtatctccaggtgctggttatattacaggacaaattcttgcagtaaatggtggtatgtattgttga

SEQ ID NO: 9062 - DNA, 1005 bp, Lawsonia intracellularis
atgaatatccctttcacaacaaactcactttatattgaaggaattggttcctacaccccttctactattcttacaaacgaagatttatgtcagcttgtagacacaacaaatgattggattgtcactagaacaggaattaaatctcgctatatacttaacgactatgaaaacacttcagatgcaggttatattgcagcaaaactagctttagaaaatgcaaaaattactacagatagtattagtcaccttatagttgcaacttgtactcctgactttttgtgtccaaacacagcatgtgtaataagtaaaaaattaggaatagttggacctatggcttttgatataaatgcagcttgttcaggtttcatttatggtcttaatattgttcaacatattgctaatgaccctacagcatgtatccttcttattggttcagatgctctatccaaacgtgtaaattggaaagatagaagtacatgtattctttttggagatggtgccggagctttagttttaaaaggaaaaaaaacactttcaacaatagctgaagttcaggacacagtctgttatgcaaatggatcatatacttctttacttactgttggaggaggaacatcaaagaagtataatttaggtgatacaattgacgacacattttttattaaaatggaaggacaagaagtttttaaacatgctgttagaaatcttacagaagtttgcactactattcttcaaaaacatgatttgtcttttaaagacattgatctttttattccacatcaagcaaaccaacgtatcattgaagctgcagcttctagactctctattcctcatgaaaaaacatttataactttagataaatatggtaatacatctgctgcatccattccactagctattgcagatgcaataaaacagcaacgtattcagtcaggaatgcgtgttcttttagcaacatttggtggaggtttcacatggggtgcagctatacttaacttttattaa

SEQ ID NO: 9063 - DNA, 1044 bp, Lawsonia intracellularis
atgctcaacagtcatagtattacaattgctattgatgcaatgggtggagattatggtccatctgtagttgttcctggagcagttaaagctgcccaaataacaggagcaaaaattatacttgttggaaatacacctgaaattgaagatcaacttgcattacttcaagtaaaaaatacaaaaatagaaattgttcatgcatctgatgtagcaaacatggatgaaaaaccttccgatattcttcgaaggaaaaaaaactcctctattcagattgcttgtcgacttgttaaagagggtttagcgaatggtattgtaagtgctggacactctggagcatctgttgcatgtgggatgtttattataggtcgtatcacaggtgtagagcgacctgcattagcttcaatcctgcctactgaaaaaaatcctcttatattacttgacgttggagctacagttgactgtaaaccatatcacctttttcaatttggtcttatgggacatacttttgcttgtgatttattaaatattcaatctccacgagtaggtattcttagtattggtgaagaagaaggaaaaggaaatacacaagtaaaagaagcttatgaacttttaaaaatggcaaaagatattaattttactggaaatgttgaaggacgagatctttttactggaaatgttgatgtcaccatatgtgatggttttgttggtaatgttgcattaaaattaagtgagggtttaagctcatctttaagtcgtgttttaagaaaagaactattttcttctgggattttttcaaaaattggaacattccttgctaaaaatgcttttaaaaacttttcaaaacttattgattatgcagaatatggcggtgctccacttttaggattaaaaggtatttttattgttagtcatggatcctctaatgaaaaagctatatgtaatgcaactaaaatggctgttctttttgaacaaaaagaaacaaataaacgcctaatagattctattggtcttaatgaagaactaacccgttttggtcattcctgctag

SEQ ID NO: 9064 - DNA, 537 bp, Lawsonia intracellularis
atggactcattctgggttaaacttgatacatcagagagcaaaaaatttgttcttgactctccatcaatatgggaaaattctattaaacaattcaatatggattgtaaacttgttcaaccgttttctggtataattacagtaacattacaagaaaatggatgcatggtagatggatcaatttctgggaaaatagtcatgccttgtaataggtgtactactgacgttttaataactattcaacatacttttagagatgttgagcctcttccaactcttaatatagatgggaaagaggttattaataaagatataaatgaaaatattatacgtcagtccaatggaataattgaggttaacctagctgaaattttatgggaagaatttgtcctttcattaccaagtaaaccactttgtaatattgactgtaatggattatgttatagttgtggtaaggatctcaataaagaaacttgcaattgtagcaaagacgaaggtgatccacgtcttgcagcatttaaaaatatagtaattaaataa

SEQ ID NO: 9065 - DNA, 1092 bp, Lawsonia intracellularis
gtgaaagaaatacaacaagctttgcttaactggttttataaaaataaaagagctcttccttggcgtgaaacatatctcccctatcatgtatggattgctgaagttatgatgcagcaaacacaaatggatagaggtgttgagtattttttacgttggataaaacagttccctgatattgcttctgtagcctatgcacctgaagaaaaattattatctgcatgggaaggtcttggttattatagaagagtaaggcatcttcagtctgctgcacaagtcattatgcataaatataatggaacatttcctgaacgatatgaagatattttagaattaccaggaattggtccttatacagctggtgcaattgctagtacagcctttaaccaagattttccttgtattgatggcaacgtagaacgagtactatcaagaatttttgatattaacactcatataaaaaaagagcctacaaaaagtaaactgtatgatttagtcaagcaactcatgccaaaaaagaatgcacgtgactttaatcagtcagttatggaacttggagcacttgtttgtaaaaaaaaaccaatgtgtcttatatgtccagtctatagtatgtgtaattctagaataaatgggacacaacttagtcgtccagtattagctaaaaaaactccaacgactcgccttaaaatggttacaggcattctacaatgtaatcaaaaaatatttattcagcaacgattggacaacaatatctggggaagactatgggaattccctaatggatgcatagaaactggagaaacgccagaaagtgctattattcgcaactggaatgaacaactgggattttctattcaaatagaaaacattattacaacaattattcataactatactcattatcatattactctttattgttttgatatttgcttttcacaaaatataactaatacgctttctgttgtattaccaaacccaaccagactctcagcttcaagctatcgatgggtttctcaaaaagagctacaaacaattcctttaccctccccacacagaaaacttgctaccttattttttaatacaaaaaaataa

SEQ ID NO: 9066 - DNA, 507 bp, Lawsonia intracellularis
atggcaaatcctatagttttaattgaaacatcatttggagatattctagtagaactttttactgaacaagctccagtcacagttaaaaattttttaaaatatgtaaatgaaggtttttataaaaatacaatttttcatcgagtaattgatggatttatgatacaaggaggtggattaaatattaaaatggaagaaaaacaaactgatgctcctatagaaaatgaggcttcaaatgggcttaaaaatattcgtgggactattgcaatggcacggacatctgaaccacatagtgctacttctcagttttttattaatactatagataatgattttttagactatcaatctcctgatgaagatggatatggttattgtgtttttggtaaggtcatagaaggaatgaatgttgttgacaagattcaaaaaacaaaaacgcatcaagttggaattcattctgatgtcccaaaagatattgtattaataacaaatatttcattatttgaataa

SEQ ID NO: 9067 - DNA, 609 bp, Lawsonia intracellularis
atgaaaaaattaatagcttctttttttacattaagttgtattttatcttttttcttcttaaaagatgttcaatctggggaactacctaaagttcttgtaaaaacaaattatggaacgtttactatagaagttgatacacagaaagcacctaaaacagcaggtaattttcttttttatgtaaaatctggattttataataaaaccatttttcatcgagtaattgatggatttatgatacaaggtggtggttttactgaaaatatggaagaaaagaagccaattaaaaaacctattcaaaatgaagctgcaaatggattattaaataaaaaatatactatttctatggctagaacaaatgatccacattcagctacaacacaattttttattaatgttgaagataataaagctcttaactataaagctcctactcctagtggttatggatatactgtttttggacaagttattagcggacaaaatatagtggatcttataaagcaagttcctactcatacagttggtatgcataatgatgttcctatcgtacctgttattattgaatcaatggtgatcatcccagctgaagaaaaaacaaaagataaataa

SEQ ID NO: 9068 - DNA, 3222 bp, Lawsonia intracellularis
atgaattttcgggaggaaaatatagcccgatctctgatccaaggctttataaaaggttcaatccctgattatattagggatgttggtcaatcaattattcaaaacaatggtgtccaaaaacttaccattcgtaaagaacatgatatttggtatatagacagtattgtacaagaagaagattttcaaaactattctccacaacttattatttttattgaagaatcacgtgtttctcatacatgcaactgtcatgaagcatttatgggcgtatgtaaacatattgcttcagtagctattaaacttcataatgatcttgataaatcaacagatcttgttgaagaacctataaaacataatattgaatggcgtcaaagttttcggaatttcttttctacttctcttgaaccagaagtaggacgtcattaccttatttttaggttttaccctgaacctacaagacttattgtcgctttcttccgtggacgccaaaataagaccggactgtcttctgtccatcaagaaacaacattagaacaaattttacgtaatcctgactggtgtgaacaatctcctcagcttttaaaagtagcccaacaaataggacatttcttagactattatggacatagagtcgaaatccctgaaggacttgtttcatggtttttctgggctatacgtcatgaatattatcttctttggagagatacaaacctcccttgcactattgtcagtactcctttagcccttaaacttaaaccaagccttgatgatgaaggactacgcttttatgtcttgttgcaacgtgaaggaaagatgcctttttcactcacagaagaagatacagaaataacgtttcatggacaaatgcccctttgggtaaattggaatcaaagtttctatcctgttcagacaagtctgtcaccaactcttattaaagaacttgttgctaataccccaattgtaccacaagataatatttctgaatttcttgatagagtatggactcgactaccttcatctgaactatacgaaccagaagaatttctaaaaataatggaacctattttccaaccagcatcctatgacccaaaactttttcttgatgaagaaggtagtttactcacgctagaagtacaaaatacatatgaaacaattcatggcgaatttactcttcctgggccaaatcctgactttcaaacaggaagctatatttttgaaggtcacacatttcttattcgaagagatcagcaagaagaatcagcgcttataacacagctgtctgagatgcactttcaaccacgcagtaacaaattatggttcatggaaccagaagaagctattgcatttctactagactcatatcccactctagtagaaaactggagagtttatggagaaaaagcacttaccagatataaagtaaggatagctcaacctgttattactgcaaaagtagaaagtaatgaaaaagaaaaatggtttaatttagatattgatgtagaatatgatggtcaacatttacccctagaacgtatttggaaagcatgggtgcgaggtaaaaggtatgtccagttaaaagatggttcatatacaagtttacctgaaacatggctacaaaaactctctcataaacttcatgcacttggctttgatccaactaaacctccaaaacatcaatttaaacaatttgaagcacctgttcttgatactattcttgatgaacttcctaattcagaaacagattcattttggaattcattacgaaataaaattagaagtttcaaagaaattacacctattgaaacacctaaaggattaaatgcaacattacgtagttaccaactacaaggcgtatcttaccttaattttcttagtgaatatggttttggaggtatccttgctgatgaaatgggattaggaaaaacaatacaaactctttcctttattcaacatatggtaaatcgaaagtatgaaggaccaaaccttatagttgttcctacctcagttcttccaaactgggaaagagaagcagaaaaatttgttccagatttaaaaagattaactatttatggaacacgacgtgaaggcatgttcaaaaaagttgtaaattcagatttagttataacaacatatgctctacttagaagagatttagaagagttagaaaaacattactttaatactattattcttgatgaagcccaaaatataaaaaatccaaatacaattacagctaagtctgttaggacaatcaaagcacgtatgcgtctttgcttatcaggtactcctattgaaaataacttatttgaattatggtcattatttgaattccttatgcctggatttcttggttcacaacatgcattccaacgtggagttattaaacctatacgcgatggtgataatgaaaccttagaatacttacgaactcgcgtaaaaccatttattttacgacggacaaagtcagaagtagcaaaagatcttccaccaaaaattgaaaatattacatattgtgcaatgacagatgaacaaaacgagctttatacagcacttactaaaaaacttcgctcacaagtacttgctgatatagaaactaagggtattgcaaaaagtcaaatgtctatacttgatgcactactaaaacttcgacagatatgttgtcatccacgcctactcaaagtagatatgccaggcttctctattggaagtcttgcatcagggaaatttgaagctttcaaagatatgatctttgatattgttgaaggtggacacaaagttcttgtgttctcacaatttgtacagatgcttcaattgatcaaaagctggctacaaataactgatattccattttgttatcttgatggaactagtaaagatagacttgaacaagtagataaatttaataacactccagaaattcctgtcttccttatctctcttaaagctggaggaacaggtcttaacttaacctctgcagattacgtcattcattatgatccatggtggaaccctgctgttgaaagccaagcaacagatagaacacatcgtattggacagacacgacaagtgttttcttataagcttatctgtcaaaatacagtagaagaaaaaatccttaaacttcaagaaatgaaacgtggtgttgcagaagcaattattcctggacaagatacttggaaatctcttactaaagaagatttagaaatgctatttgaaatctag

SEQ ID NO: 9069 - DNA, 1658 bp, Lawsonia intracellularis
atggataaaattatacattataaaactaaaacattagtacattcaattttttttcttctttttttattgacctctctttatctaacaatacattttgtttatgcacaaaaactaacagagcaaaacagtgatgaggaccttagtacagaacaaccagtacatggtggacgtattcgtttaggaacaatagcagaaccaataaatttaattccttacttgtctacagacggtacttcacacgaaattgctgacttactatttgtatctgcacttgagtatgataaagatttacaagtagtaccactagcagcaaagtcatatgaagttttgaatgatggaaaattattacgatttattatgcgtgaagatgtgttttggcaagatggagtgcaacttactgttgacgatatagaatttacatataaattaatgttagagcctaacacacctacagcttatgcagaggactttctcactattaaggagtttaaaaaaacaggccgttttacttttgaagtgtattatgaaaagccatatgctagagctctaatgacatggatgggctcaattttaccaaaacacattcttgaggggcaagatattaccaaaacaccttttgctagaaatcctataggtgctggaccatataaattaaaaagttgggaaacaggttctcgccttattcttgaggcatctgatagttactttaaaggtaagccatatatctcagaagttatttatacagttatcccagatagttcaacaatgttccttgaattaagagcagggaatttagatatgatgggccttacaccacaacaatacttaaagcaaactaaaggtccacagtgggaaaaaaattggaagaaatatagatatcttgctttttcatatgcttacttaggctttaatttaaacaagcctatgtttcaagatatattaactcgtcaaggaatttcccatgctattgatcgtcaggctattgtagataatgttcttcttggtgaaggagtcgtttcctttggtccttacaagccaggaacatgggtatacaacacacaccttaaaccaatagaatataatccagaaaaagctcgacaattatttacacaggcaggatggaaagatacaggcaatggtgttcttcaaagagatggtaggccttttacatttactatacttgtgaatcaagggaatgaacaaagagcacgagtagcaagtattattcaaagtcagttaaaagaagtaggaattgaagtacaaattaggactgtagagtgggctgcttttcttaaagagtttatagataaaggaagatatgatgctgttgttcttggatggtctattacacaagatcctgatatttatgatgtatggcattcttcaaaagcacatgaaggaggattaaacttcatggggtataaaaatacggaacttgatgcactccttgtagaagcaagaacagaacttgatcaagctaaacgcaagccattatatgataaaatacaagaaatacttcatcatgatcaaccatactgttttctttttgtaccttattctttacctattataaaatctaaatttcatgggataaaaccagcaccagcaggtattatgtataatcttgatcagtggtggattcctaaaaagcttcaata

SEQ ID NO: 9070 - DNA, 2196 bp, Lawsonia intracellularis
gtgattgaagctcctacagtaggtttaccaacccctatgcaaaacgttctacggcggttagaagcaaataaagcaactgccacagagcgttcacttgttcaaaaagcatatgtttatgcagcagcagctcatgagggacaacttaggctttcaggagaaccctacctatctcatcctctagctgtagctgaaatgttatctgaaatgggttttgatgcttatgctattatggcagcattattacatgatacagttgaagatacaaagtgttcactagaagatattgaaacagaatttggaaaacaagttgcagacattgttaatggtgtaactaaaattagtatgatgagttttgaaagtaaggaggaacaacaagctgaaaattttcgtaaaatgattcttgctatgtctcaagatattagagttcctattgttaagttagcagatagactgcataatatgagaacattaaattttcaaaaacctcataaacgtcagtctattgctcaagaaacaatggatatctatgcaccattagcaaatagattaggacttcatagaattaaattagagcttgaagatttaagctttaaatatctccatccagatatttatacacaaatttctacctggatgcattccaatagagttgtagaaagaaatcttattgaaagaattatttctaagattaaagctattcttcataaaaacgggctaaaaggtacagtgcaaggtcgtgttaaacatgtttatagtatacataaaaaaatggttgaacaacatcttacactggatagtatgcatgatatccttgcatttcgagttatcgtagatacgattagtgattgctatgcagtattaggacttcttcactctcagtggaagcctttacatggacgatttaaagattatatctccatgccaaaagtaaatggatatcaaagcttacacacaactgttatgggtcctgaaggagaacgtattgaaattcaaattcgtacaaatgagatgcataaattagctgagcaaggtgtagcttctcactggttatataaagaacgtaaccattcagttaatttaagtgatgtacctcaatttgaatggttaagagaagttttagatcgtcaaaaggacgaaaaagactctcttgaatttatgcaatcattacgcttagaattattcaaagatgaagtatatgtctttacacctgcaggagatgttaaagagctacctaaaggagcaacacctcttgattttgcgtttcttatccatacagaaattggtaatcattgtgtgggcagtagagttaatggtaagcttgttcctctttactcagttcttaaaagtggtgatactgttgaaattattacagataaaaataggtatcctagtcgtgattggcttaaaatagtaaaaacagctaaagctagaaatcgtattcaacaatatcttcgaactgaggaaaaagctgcagctatttctcttggtagagaactgttagaaaaagaagggcgtaaacttggtattagtcttaccaaagctgaaaaagaaggacaccttatatctcttgctacccatctttctttaggttctgttgacgagttactagcttcagttggatatgcccgcaatacacctcggtatacattaaaacgcttacagacattaatgtcttcagatgagacttctagttattctaaagtaattgctcctcataaaaagaaaaaagaatcttctgtattgcaaaattttagtggagttaccgttagaggcattgataatatgcttgtacggtttgctaaatgctgtaatccagtgccaggtgattctattgttggatttataagtcgtggccgtggtgttattgttcacacagaaacatgtcctaatgttcaagcacttgaatctgacagacttgtttcagttcaatgggatggacatgaaactgttccttttcctgcacgtatttatttagttggtataaatgttgttggattacttgctgatattgctctagtttttaaagcagaaaatgtgaatgttgaatcgtgtattgttcaacgtttaattgatggaagatcagaaatggatgctaccattggagtaagagatattgcacatttatatcaagttattgataaactacgtcaactacctaatattgtagaagtccttagaaaaacagcagacgagtaa

SEQ ID NO: 9071 - DNA, 408 bp, Lawsonia intracellularis
atgaatatgtttttctttattatgttatttggactagctattcttggagaaattattgaatatatagctcaaagttggggaagtaaaaaatatggttctagtacaagtggaatgtggataggtttattaggagcgtttattggtgcaatattaggattaccatttttatttggattgggtgcttttattggagcattagctggagcatggataggttgctattttatggaaatccttaatggacgtagtcgtgaagaagccagccgggcagctaaaggtgcacttattggaagattattaggtattattataaaatgtggcattggtattattatacttgttatgacttatcatgctctttttccaacaatagtaccctcttttactccaccaattacaaacttttaa

SEQ ID NO: 9072 - DNA, 1299 bp, Lawsonia intracellularis
atgttttggattgatacaagtttctcacgatctaattcaagtgattactttggagcaaatcaacgttttacatttcaaacgacttatgaagccaatgaaaatcttaaaggtgtattacgttttcgtattaataatgactggggagtaggaaaaaatgaaaatgattatagttatggaggttctattggtacaaatggcaaaagtattggcgtaagatatgcttatatagactggattgtaccaaatacttctatcaatgtccgtatgggactacagcaatttgcttttccaggttttgtggctgattcagctattcttgattcaaatgcaacaggtattactgtaaatactcctataaatgatactattggtgttaccacatggtggattcgtccttatgaaggtaaaaataaatcaacaatggatactgttgggctttctattccatgtacatataatggcttatctataactccatggggagtttatggaagaataggtaaaaatgtttttaacctgcaaaaacaatttggacaacctgatcaacttctttttccatttatttggacacctactggaacacaactcctcaaagaacatgctaatatttggtggctaggttttaccgggatgtacaaatttgaaattcctttttctattgcttgggactttaactatggaaaccaatcatctaatacaaaaaaatttaatcgatcaggatggtatgccgcattattagcacaatatcaatttacaggtgtaacacctggaatcttaggatggtatactacaggtgataaagataatttgagtaatggttcaaagcgaatgccaacctatgattcaaattggacaggaacaagtatggggtttgatggttactggcaagatcgtgggacaggagcatcaatagctggaaatgatcctacaggaacatggggaattgccggacaactgatggatattagttttattgaaaaattaaaacataatttacggctagcatggtatcaaggaacaaataataaagaaattgcaaagcaatatgccttattcgcagctttacctaatagtgggttatctagaaatggatttcttactccaaatggactttatttgacaaaaaaagactctgtactagagttaaatattaattctttttacaaaatatatgaaaatcttatggttggattagaacttaactggatgcatcttaaacttgataaaaaaatatggaacagtcatgatacaaaaagcaatgcatatagatttatttgtacacttaggtatactttttaa

SEQ ID NO: 9073 - DNA, 1167 bp, Lawsonia intracellularis
ggttggaaaaaaaggagacaaagaatggccgccacaaaaaggaacaaaacaaaatatcccggagtattcttccgagaagaaaaaagaataggtgcctctggaagcgaaaaggtctactatgtcgtattcaagaagaatgggaaggttattgaagaaaaagtaggacgacagtttatcgacgacatgactcccgccaaggcttccagaatacgttctgagcttatagaaggtaaacgaaaaaccaaaaaactagccaaagaagaagctcttgctgcttcgctcagaaaaaatattcatggtatttgggaagagtatgccaagggtcgccctaaaaacaaaaatactgatattgacctgtgcaggtatgaacttcatttgaaaaatatatttgggcataaatttcctgaagaaatcacaacaaatgatgttagaatattcaaagataaccttattcaatctggaaaaagcccacaaacagttcttaatactcttgctttgcttcgtcgtattctgcgctttggtgaaaaaaatggcttttgtacactacctgatagatcacaacttgtttttgagatgccaaaagtcgataatataaaaactgaaaacttaacagaaacacaactaaaagcattgatggaagctcttgatgctgaaacagatcaggttatggcttcttgccttcgcttagctttagtaacaggcatgagaaaaggagcattactagcattagaatggacggatttagattttgagcaaggtatcattacattacaaggaaaatcagctaaaaaaggaaaaacggcatacatacccatgtccgaagctgcgaaaattatcttggaaaaacttccccatacgtctcgatatgtttttccaaatacaaaaggagaaaagcgatctgactttcgtagtatgccaaatagaataaaacaaaaagcccaattacccgctgatttccgtccatttcatgggttaagacatacttatgcttcacatctcgcttctagtggaaaagttgacttatatactcttcaaaagttactgactcactcaagtccacaaatgacgcagcgctatgctcatcttgcagatgaagctatgaaacgagccgctcgtgtagctgatgatatattaaccagcaatatggagaaaaaagatgacgactga

SEQ ID NO: 9074 - DNA, 1011 bp, Lawsonia intracellularis
atgacgactgatattcttcagaaggctctagagagtagcttcaattcttttgtcaagtcagaatacataaagagaaattttgaatatacaagtcaggaagatgctgtgtggctaaaagaaaattggaatttgccattgatggaattgaattatgattttgacgacattttttcaatattatttttaaatgacttaataacttattttcatcaattaattaataattttgaatatcactcgtttattacaacagtttacgagcaagattttaaaatgattataaataaatatcaaaaatggattaaacacgtatataatatttcgtgtcaatataaactatcctttgcagatctatgccatccatttaatatagaagaattcataaaaaataaaattcgagatacacaactacatcttccaacatttatttcgactactacatcaactggctttgtagggacaagtcgaatagatggaaaatggaagttcgttgtagattttacaaaagaagatttgaattacgaagcacttctaaatctatttaaagagcaactagctatagagtttgcgtacttatctaaaaaaattactcctcatattgaaaatgtactaacagaaatagtaaaggaagataatcgtactgaaacttatgaaaattcgagattaagtcgtctatatggtctagctcaatgggaccatcgtttgaaatatattgacaccaaaggaaataatattggaaaatttaaatgtggtcttagaaaattaaattggccgtattgcgaaagcgaatgtaaaagtgataataaatattttatatgtaaaaatagagaagcttgtaagaaggcactaaaaagacaactacaagggacgatacaaagtatagaaaataaaaaaagtgtagctatgattgaaacaggttgtacaatgcctaagaacgccaaaaaaatttttgaaagatattccatgcctgatgtaacgaaaatttatcctttggcctaccttcacatctaa

SEQ ID NO: 9075 - DNA, 1665 bp, Lawsonia intracellularis
atgccttaccctcagactttcgtatccaacacgtggaacaatgcatctcctgatgatctcatctcgtacatggaaaagcagaaccatgcccgaagtgtcatcagtacctcatataaaaactacatcagcgatttaaagagcaagcgggtctatgacgcatcagaaagactcagatgtacctactattctttgccggaacaaaacggaccaatgaattattttgctccaaggactcctgttccttacatccttggaaaggtagcttctgatctcgcatgcaacacagggttcgatcaagtcggtctctataaaatgctgcttgcctatacgctatacgccacagcaggcaactggatcatccgctgtggaagcgaatggacagaacaagccattatcaatatcattgccaccgctccatccggccatcgaaagtccgtcatatcggccttttgtcaggaaccattcaatatatttgaaaaaaacttcaacaagctgagaggttccgatgaaggctctggggatttatcccacacgaagctgaaggttgctcaaagagtggccgccagaatcacccagaaaaaaattgcctcctcgctggtaaacttaggcagcactcccacggacgaagactttgaagctctcgtcaatgaaatcgcgggggaagaacaaagccggattgctcaattcatagagcagccgtccctccagttttttacggacaacgtaactccggctggctttcatcgtatctgctatgcccaaaagggtcggctggccatccaatcaacagaaggaggtttcctgacccggacatcgttccttaagggatctctgcctgaaatgctgaagaattctttctctggagaaggcttcacactacaaaatttcagaagcacataccgctatgaacatccgtttgttgcacttttcattctcacgcagcccgagcaattatcgcgttttctgtacaagtccagcgccttcgaaggcgacggactgtgggcccgcatcgtttttcatctggcccagagtagtaccccaaacggagaattttctcttggtgaggcgcgcaaaagttactctgatgtcatttctccaatcattcaaaaggagtataacaactcggcacgtcaccagattgccctcagcaacgaagcctacgacatggtaaaagaatatgagaagtctcttgccctcgattttcaaaacggaactccattcatgagggaggccctgaaaaaagctcacgggcttgcgtgccgatttgcgtttgctgcccatctatggaaccaagctgaagcctcaagctggccaacaaccatcaccgctgatgaaatgaatctcggcgtatctttgagtaaggacagcttggcgcatttcaggttcacgatcgaccccacgtgccttcgagcgcgaatccatgcccgaaagctgatcgactccctgctgtgtatcgacttcaatatgcagcacgatgtgctcacgcatggaatcacctcgcggatacttcaacagcgtacgggactcaaagccgacgaagtcagaaatgccctggctctgcttcaacagtgcaacttactttccgcactcgacttcggaggaaaccagctcgtggcagctctcaggccggacttttttcagcagccgatgggcacattcttataa

SEQ ID NO: 9076 - DNA, 393 bp, Lawsonia intracellularis
ttgaccatgaggagcactttttaccgacacaaccgctacaaaacagacctctatgctcccgtactgatcccctccccacaccgcctatccgcctcacacggtacgtcatcggcaagacgggaggataacgagtctgaggccattccagaaccaatcagagacgccatccccagaaagcgcactgagggatctccactgccgttacgaggcctaacgctccacatcctctttcccacccacaaaagcagacagacattcgcagactcacagagcgtcagaagacctccaagttcaacggtcaggacgatcacaaagttccgaatctctgctgctcacaagccaccgcaagacaccctgaaggtcgtcataacccctaaagccccaagacgctga

SEQ ID NO: 9077 - DNA, 546 bp, Lawsonia intracellularis
atgaataacaaaaactatttccatactatcaatgaaagaattgaaaacttacttatcaactatatatcaaatcacaacaaagtattaccggtattcttcaacgtcagatatcctcaacattatccttaccctcaaaagaaagatatttcctcgttattcgataaggtcaatacgtattattttcgtttaggttatgatccttactacttttggaaaagagaacagaatatatcagaacaccaccattaccactgcttgctttttctgaatggtaacaaaattcaacgtatcatgccggtattcaagacagtcgaaagattctgggcttctacattgggtatagagaccgctttaggactggtacattactgcttgaaagactggaaaggagatttgacaggtaatggtactatgctcagacgagatgatcctgaattgtcctataaactagacagatttcgtatggctgcttcctatctggcaaaaacagctacttcaggttttgtgaatgacggatatcggaactttggctgttctcgtatataa

SEQ ID NO: 9078 - DNA, 495 bp, Lawsonia intracellularis
atggtcgacatagcgcatcaactgggtctacaatcaattgatactataccactacaattcccttcatctgacaatggaaataccgctatattcaaaagtacggttactttgaaaagcggtatcgtatgttctgctataggagatgctacgcctgaaaatgttcctcctgcgtgtcgtaacgccttcatccgtatggcaagtacacgagcaaccagcagagctataggacttgcttgtaacgtaggcactctggattttgagtccgaaacgatgaacgaccaggtgatcgatgtggattaccgtgatagctctgcatcatctaccgtccaaactgctcatagcaagcccgtaagtcagaaacagcttgagtatattcatagtctcagtgacaacgcagaacagatagccatggaaaaattcagtaaggacttgaactctctgacaacaacagaagcgcatgaagttatttgtgagtgcagagccagggagaaataa

SEQ ID NO: 9079 - DNA, 1920 bp, Lawsonia intracellularis
atgaacattatcaatatcgggattcttgcccatgtagatgcgggcaagacgacactgacagaaagcctgctgtatgccagcggaaccatttcagagccggggagcgtcgaaaaagggacaacgagaacggacactatgtttttggagcggcagcgtggaattaccattcaaacggcagtcacttctttccagtggcacagttgtaaagtcaatattgtggatactcccggccacatggatttcttggcagaggtataccgctctctggctgttttggacggggccatcttggtgctctccgctaaagatggcgtgcaggcccagacccgtgttctgttccatgccctacggaaattgaacatccccaccattatctttatcaacaagatcgaccaggttggcattgatttggagagcgtatatcagtctgttcgggataagctctccgctgatattatcatcaagcagacagtgtcgctgtcctcgaaaataactctgacagaaaacactagtgcagaggtttgggattcggtcatcgaaaataacgatgagttattggcaaagtatatcgcaggagaatcaatcagtcagaaagaacttgcgcaagaagaacagcggcgagttcaagacgcctccctgctcccggtctatcatggtagcgccaaaaacggccttggcattcaacagttgatggatgcggtgatagggctgttccaatcgaccaaggaacaggggagcgccgccctgtgcggtagagtttttaaggtggagtatacagattgcggccagaggcttgtctatctgcggctatacagcggaacgctgcgtctgcgggatacggtggccctagccgggagagaaaagctgaaaatcacagagatgcgtattccatccaaaggggagattgttcggacagataccgcccataagggcgaaattgtcatccttcccagcgacagcttgagattaaacgatatattgggggacaaaacccaacttcctcgtgaaatgtggagtgatgttcccttccctatgctgcggacgacgattacgccaaaaacggcagagcaaagagaccggttgctggacgctcttacgcaaattgcggatactgacccgcttttgcactacgaggtggattccaccacccatgagatcattctttcttttttgggtcggatgcagttggaggttgtttccgctttgctgacggaaaaatacaagattgaaacagcagtgaaggaacccaccgtcatttatttagagcggccgctcaaagtggccagtcacaccatccatatcgaggtgccgcctaacccgttttgggcatctatcggactgtctgttacaccgctcccgcttggctccggtgtaaaatacgagagccgggtttccctgggatacctgaaccagagttttcaaaacgctgtcatggatggtatccgttacggtttggggcaaggcttgtgtggctggaacgtaacggactgtaagatttgctttgaatacggactttactatagcccggtcagtacgccggcggacttccgctcattggccccgattgtattggaacaggcattgaagaaatctgggacgcagttgctggaaccttatctctccttcaccctctatgcgccccaggaatacctttccagggcttatcatgatgcgccgaaatactgtgccaccatcgaaacggcccagataaaaaaggatgaagttgtctttactggcgagattcccgcccgttgcatacaggcataccgtactgatttggccttttacaccaacgggcggagtgtgtgcctgacggaactgaaagggtatcaggccactgtcggcgagccaatcatccagccccgtcgtccaaacagccgtttggataaggtgcgccatatgttcagtaagattccttga

SEQ ID NO: 9080 - DNA, 915 bp, Lawsonia intracellularis
atgaaattacctccattttttgtgattatcgtgcgcctacccttatttttgaccttgcaccccatttctgctccttttcgacctgttcctgctggtaagctgcctccagtatcctgtccgcctgttccgggccttttccagtgcagccgcaatggctctgctgttgttgcgcgccgtaggcagcacgttggctccggcaaaaagaaacagggcggaaagtcctatgagcgtgacataaagaccgtaatccccggaaccggtgagccaagtgtacgcaccgtatacggaagctgcgagcgcaaggcagaatatggccagagctatccacttgtgggccggattggtcagctgatccacgcgacgggccttgctggccgcggcaagccttgccgtcagatcaggacgctcttccagaaaggccctggctctgcgaagctcttccagactctcctgggccgcgggagaaagctgcttcacataccttgcctcttccgccgctctggcctcggcaagtcttctggctgcggcttcggacatggtcttgatatggggaaaacgccgctgaatttcggcaagcatcagatcgacatgattttcatgcttgaaggtgcactgcacgctttcgtccttcccgtattccaccacgagatagggaatggaaccgaatatccccttgccggtaaacgcgcctttgctcatggcgacgcgtttgtaggcccgtcgaatgttggatacgggtacatagaaacgacgatccatgaaaagactgttcagatacagagccttcttcccgaccccgcagggaccgaacggaagacaggatgttctgtctttcttcagttctccgtcatccaggccgacgctgcccagccgtgcaggtttgaaatacagcatcctcgactcccgaaggaataa

SEQ ID NO: 9081 - DNA, 786 bp, Lawsonia intracellularis
atgcctgaaattttcgacgcgtcgaaatttttagaggaaaccatgaaaaaactactccttttgttatctattctgtttctaaccccaagtattaccttggcggaaggtaatactttcaatgatagtttcaacaaggctaagcgcatactgcaagatgaggtgtattacgaccaccaagttacactatactgcggatatgaatatgatgaccaaaaaaggatatgtctccctgatggatttatagcagagaaacatcaaaaaagatcatataaaattgagtgggaacatagtgtgcctgctgagaattttggcagagcttttactgaatggcgcgaaggtcatcctctttgtgtagataataaaggtaaaagtttcaaaggacgaaaatgtgcagaaaaagtaaataaaacatatagatatatgcagtctgatatgtacaatttgtttccagcagtcgggtctgtcaatgctgcgagaagcaataagcaatactcagagttacttggagttcaatctgcttttggaacgtgtgaggcaaaaatagatgggaatagattcgaaccaccggatagagctaaaggtcaagtagcccgtgctgctctttatatggataaagagtacaaggaatacaatctaagtcgtcagcaaagaagactttttgaggcttggagtaatatgtatccagtcgatgaatgggagtgtacacgagccaaacgaatcgaatctatacagggaaatgaaaatatttttgtaaaaaatatgtgtatcgaaaaggggttatggtaa

SEQ ID NO: 9082 - DNA, 861 bp, Lawsonia intracellularis
gtgtatcgaaaaggggttatggtaaacaaacgaggacaatataaatactacctaagtaaatcatataaaaacagatatatattgcgacaagaaaacaatagagagaagtacaggcttactgtctgtacttctcttttttattactcaggagggattatgacgcaatccactgatatcactaaactttctcaggctatgctcatcgtccaacagcaacttcaaccagccataaaggacgccaaaaatccgtttatcggtaacaaatacgccacactcaactctgtcatggaatcctgccgcagccttctttcttcccaaggtatctggcttacccaactcccatgtcctgcgcctgtagaactcgggacaggacatatcggattagaaacaagacttatacatgcggaatctggtcaatggatttccagcacagccatcatccctctgacgaaaaatgatccacagggaatgggcagtgctatcacctatgcccggcggtattctctgtgcgcgatccttggtatcgtgacggaagatgatgatggtaatgccgcctcgattactccaaaacaggccaaaacgcgaataaggcccgtagaagccacacagagacaaaaagtggcatcagacaactcttcatccacgaacaaaattttagacacctcaaatcgccccgtatcgcttcaccaaaatctgcccaaaatcgacggcgtgagcttcaggacggttcaggccgatgatggaagaatgtgcatcgtggcatctgggcgtacactggagaaaaaggaattgctcagggcttcagggttcaagtgggattcgcagcaaaaagtctggtggaaatatgatgatgctgcataa

SEQ ID NO: 9083 - DNA, 1203 bp, Lawsonia intracellularis
atggaatctgatactcgtagccaaaaactgctcgaaattatcacccatggactagacttatacgcaaacaggaacactctgactcagcttggaaatcgggaagagtatatcggcatgagcgaccttggaagttatatgacctgtcctcgtatggccgttctaaataagctccatccccagaacactacctatgccctcaagcctcttctcaccatgcagagggggcattggttcgaggatgggattgccgacgccctcaagactctggaactgcctctggttcgtcagcttgaaattgccgtcacgcataacggcacgcccatcaaagctcacctggatttcgtgctcgcctccacccatccaaggcctacagtacggatactcgaagtaaaaagctgccagaaactcccggattgcctctacgcatcctatgaaacgcaggtgtatggacaggtaggactgctgacgcggtactggaaagagccggttttcagtgtcagagaagaaactggacagtatagttttcaagacatgacttttcctgaaatcgcccggaatttttggaacttgaatttgccgtatgagtgggaaggggtagatatcgaagcctgggtactatgcctttcgatgacggatgcaaaagtcttcggtccttatgtgtcagatgcaggaatgatggatgctgtacttggaaaagcagaggaattttggagtacgattcaccaggtaaaggacggcactctcgacgcatcttccctcaaaacaacaagcggtttcaatcccctatgtgaacattgcctctggaatgccgactgcccgaagttcaaaggaaacgaccacccagagttttcccctgaacttgaggagctggaaacttggaaatcggagcgtgcaagtttggatgggaaaataaagaccagagagacaagcatgaaagactggtacgcgaatattttcggtactcaggacggatgggttcaggctggtcattggcggttcaaagcctcagaaatacccggcagacgcacactagccaaggacagccttgcgggagaactgattgaactttttcatgacggcggaatggatgatgtggacgtgcccgctcttttggctcgtcatgaaaaagtaagcgcaccttcaacacgactttttatctacaagaccagaaaacaggagaagaacgatgggttacaggtctga

SEQ ID NO: 9084 - DNA, 375 bp, Lawsonia intracellularis
atgggttacaggtctgatgttggactggctcttacgcaggcagccgtacaaacattgaatgaaaagatgaacgccttggataaaacgtccgaggcgtttgctgttattacggacttctttgcctacgcggacaagcactttgaagacactgactccggttctgaagtctatctgtgggaacatctgaaatggtacgaagagtttcctgacgtgggcttcatcgaacatctgctggctgagctcgactgggacgatttcctgttcattcgcatcggggaagagctggaggatatcgacacaaggggcagcttctgggataaccccttcgaccttggcatcagcagaagcatagtcataagcgatcccaacgactga

SEQ ID NO: 9085 - DNA, 951 bp, Lawsonia intracellularis
atgtctcatcctgttcaactcgacgccggtcaaattttcagtggcaaatcctccggcactatgattttcggctatgacgcaccctcggaatacacgccgtccatcgatcccaactatcttttccatgagtccagccgtgatgtaatcgtctggtttcttatgcaaaatcccgaaccgctgtacatctgtggccctacgtctgctgggaaatcgagtctcattcgccagattgcggcgcggctcaattacccggttttcgaggctaccggacatgaccgactggagttccctgatttggtcgggcatctatccgtacagaacggcaacatggtctttgaggatggaccgcttactctggccatgaagattggcggcgtattcctgttcaatgaggccgatttgtgctctccggctacgcttgctggactgaacaccattctcgacggttctccgctctgcattgctgaaaatggtggagaactcgtcaagccaagccccatgttccgtttcatcgtgacggccaactcaaatggcaacagcgacgaaaccgggctttatcagggagtcatgcgtcagaacatcgccttcatggaccgcttcatgctggtggaaatgggctatcccaaagcagaagttgaacgtgacctgctgaaccgtatgttcccggaaattcctgctgaaataacggagaagatggtcgattttgccaacgatgtgcggcggaattttatgggcaactcctcggcacatgatgctctggacgtcacgctttcgacgcgcacactcatccgctgggccagactcaccatcgcattccagcctctctccaaacagggaatttcgcccatcatgtacgccttggacagagctttaggattcagggcgtccaccacaagtcgggcagctcttcacgaaatggcccagagaatttttccttcaataagcaactaa

SEQ ID NO: 9086 - DNA, 996 bp, Lawsonia intracellularis
atggagaagattatggaaactcctattctgaacacacctttgcaagttttggacaatattctggcactgaatttgaacattacgctttggtcggccagaaagaagctcaccgctgaagactttggtggtgtagagcttccgcctgacgatttggcctctctcggctccaaaaaaatctgcgacccggccagactcaacgtctttaccaagctcaaggctcgtgcgttcagtcttctggataaacatggcgtccgttttctttcgggctgggcgataccggacgacaaggccggagatatcatccaggggctatgcgaaatccgagatgagtttttcacggaaaagcagaactttctgaacgtgtacgatgctgccatagctgactggattgcccgacatccttcctgggccaacatcatcgaaaattcaacggtcagcagggagtatgtggagtctcggatggggttttcttggcagctctatcgggtatctcctgctgctggtctcgaaagcgatctggccatgacggaatctggtctgcatgaagaggtagaaggtctcggaagtacgctttttgccgaaatcgccaaggatgctgcggagatttggaagaaggtgtttgaaggaaaaacggaggtcacgcacaaggctctgtctcccttgaaaacgatgcgcaataagctcgccggtctttccttcatcgaccccaatgtggaaccggctgtctccatgatcgacaccgccctcggaaatatgcccaagcgtggaaatctgtcaggaaacgcgcttcttacgcttcagggcctcgtatgcctgctcaaggacaaggaggcactgattcagcagacacaggcgttactggctaccccggcagaagaaaatgtactggatgatctgttgcaggggttccagcaagaagcccccgtactgaatctcccgcctgagcatagctacattccatccagcccacgcctcgatagtttgggtctgtggtaa

SEQ ID NO: 9087 - DNA, 1593 bp, Lawsonia intracellularis
atgtcagtcacgatgaaagccatgccgcttgttgcctcgatgctaggcaacaagctgggggtcaaagtcgttatcggttcttcggataccgcctgcactaacggcgataccatattccttccacctcttcccgttgacgatgaaggagttctgtatcctctggtgagcggctttatcgaccatgaggcggctcatatccggcatacggaccttggcgtgttgaatggaaagagacttacccctgtcgaaaaatacctctggaatgccatagaggactggcgggtggagcatgaaatcataaagcgctatccgggatgtcatgagcattttatctggctcatacggcattttttcttgaaggatacggaagaagaaaaggctggggaaaatgactccccggccttttctgttctgaactatgtgctcctgacgctgcgttcctgggatgtgcctgagctggttcgtaattgcgaactcgaagcaaatattatgcaaaaatactggcccggactacgctccagtattgacgcgatcatgcgggatattccggcccgatgccgatctacgcaggattcgctggattttgcccaagatattctccggctgatcgaacaggaagtccagaaggaacagaaatccaccgaaagcccagtagtatccccctcgataactgcgcaggataactcagaacaaacccaacaagaaccacaaacaggaggtgaagaacaaccgctccaagaccttctacaagcaacggaagaagagatgccaacctctatgggtaagcagctctccgacatgatttccggccaatgctctccccaacaacacaagggaatgagcgtggcagtaacaggcaagctcttaacagccgaacttcccgatgcgcttatcatggaggctcaggccatatccagagcgttacggacaaaactccaagggcttctgcaatcccaaatattgcggcgttccagtccctcacggcatggaaaattatgtgggcatggtctctaccgaattgccgtccatgatcctcggctgttcatgaaaaccgaatctgtgacaggaatcgatacagccgtccatattcttctggacatatccggctccatgaccagctgtatcgaacttgctggtgcggcctgttactccgtggcgctggctttggctgctatcccgggcatctccgtaggcgtttctgctttccctgccgattataaggaagatgttgcggccacagtttacccgttattgcgccatggtaaacgtataacaaactcattcgccgcagaagctcatggaagcacacccatgactgaagccttatggtgggtattggggatgctttcgacacgaccagaacatcgaaaaatcgtatttgtggtaacggacggctacccggacgatcctgagactgccaaagaaacgatagcagtagcgaaacggatgggaatagaggtgctgggtatcggcatcgacgccccagccatcatctctatgattcctggctccgaaaacatcaccgacatccgcgaactggctccggctatgttccggctacttcaacaaataatgactgaaaaagggaggtga

SEQ ID NO: 9088 - DNA, 1908 bp, Lawsonia intracellularis
ttgaatcaatttaccaggaatctcattttatgggggcttatatcccttgcaatggttattgtttttaacctatttagtcagccacaatcttcattacaagaacgtatgacttatagtgagtttttaaatcaagctcaaaaaggtaaaatagctgacgtaattatacaaggcgatattattaagggaaaaacaactgaaggaaaatcttttcagctttatgctccatctgatccacaattggtaagcaaacttattgagcaacatgtagatgttcgtgctgagcctattgaagattctccttggtatatgacactacttgtatcatggtttcctatgcttcttttaataggtgtatgggtttttttcatgcgccaaatgcagggaggagctgggcgagctatgtcttttggtcgctcacgtgcaagaatgctaaaccaggaacaaggaagagtcacatttgaagatgttgcaggtgtggatgaagctaaagaagaactctctgaagttgtagattttttatctaatccaagaaaatttacacgattaggtggtcggatacctaaaggagtccttcttgttggccctcctggtacagggaaaacattgcttgctcgagctgtagctggtgaagcaggggttccttttttttccatttctggttctgattttgttgagatgtttgttggtgtaggagcatctagagtacgagatctctttatacaaggtaaaaaaaatgctccatgtcttatttttattgatgaaattgatgcagtaggacgtcagcgtggcgctggccttggcggaggacatgatgaaagagaacaaacacttaatcaacttttagttgaaatggatggttttgaatctaacgaaggtgttattttaatcgcagctacaaatcgtccagatgttcttgatccagctctattaagacctggaaggtttgatagacaagttgttgttcctactcctgatgtaaaaggacgtttaaaaattcttgaagtccatactcgtcggacaccacttgataaagatgttaatcttgaagttatagctagaggcacaccaggtttttcaggagcagcacttgaaaaccttgttaatgaagcagcacttcaggcagctagagatgataaaaatttaattgatatgaaagattttgagtacgctaaagacaaagttctaatgggtaaagagcgacgtagtctcattctttctgatgaagaaaagaaaattacagcctatcatgaaggtggacatgcacttgttgcacgtttacttccaaagacagatccagtgcacaaagtaaccattattcctcgaggtcgtgctcttggtgtaacaatgcaattacctgaagcagatagacatagttattcaaaggaatatttattaaataacctgatggtgttattagctggtagagcagctgaagaaattatatttgatactattacaacaggtgcaggtaatgatattgaacgtgcaaccaatatggcaagaaaaatggtttgtgaatggggtatgagcgagcttataggaccattatcaattggtgagcgtggagaagaggtttttattggtagagagtgggcacattctagaaactttagtgaagatacggctcgtattgttgatagtgaagttaaaaaattaatagaagaagctagagaaaaatgtcaagaactattgacaaataatcttgatacgttgcatgctcttgctacagcactacttgaacgagaaacacttacaggtgatgatatagatcttcttatcaagggggaagaactacctccatttataccagaaaactctaatactgaaattaaaaaagaagattcaaatactgaaacctttattttagatgctgatgagcagaatccatctcctccaaaaacagaataa

SEQ ID NO: 9089 - DNA, 888 bp, Lawsonia intracellularis
gtggtgtggataaaacacatgaaaagtagtcaaataatcagttatgataatcattggatagttaaagggggtaggcaaataaatcctacccctttttgtattattggaatactgaatataacgcctgactcattttcagatggaggaagatatttaataacaaaagatgttattgagcatacaaaacaaatgcttcaatctggagcacaagttattgatataggtgcggaatctacacgtccttttgcagaaccaattatagaagaagttgagaaagaaagacttattcctcactttaaaatattaaaagaacaatttcctgatgttattttttctatagatacgtataaggcttttactgcaaaagcagcattagagttaggtgctgatattattaacgatgtttcaggatgtacgtttgaacctaaccttttagatatacttgtagagtataaacctggttttgtgttatgtcatactcaaggtaaacctaaaacaatgcaagttaatccttcatataaagatattatcgaagaattattatatttcttcgagtcccaaatgtctcttattacaaaagcagggttacctgaagatagaattgtgcttgatccagggatatgttttggaaagaaaaaagaacatacagaaataataatgaaaaatattgagagactaaaagttttaggaagacctttatatataggtctctctagaaaatcattttttaaacaattttttgatcttgatgtccatgaacgtgatgaagcaacacgtatagctactgcattacttgcagctagaggtgtaagatatcatcgtgtccatgatgtagcaggatgtactcaagcattaaaaataacagaagtttttactccatttttgtaa

SEQ ID NO: 9090 - DNA, 741 bp, Lawsonia intracellularis
atggatttcatcccttttagttggagggacttacttgacattacattagtaacgatacttatttatcgagttatcttattagtaaaaggcacccgtgcactttcagctttatctggtctgcttttacttattcttatttatcttggtgcgcaatatttaggactttatacccttggatggttattagaaaacttatttggttctctctttttagtaattattattttatttcatgatgatatacgtcaagctctttcaagagtgggtgttcataatttttggaagaaaaagaaagaaattgctccaagtttaattgataatattatttgggcttgtcaacactttgctaaaagacgtataggcgcacttattgtttttgaaagagagataccccttacagatatgatgcaagaaggagtgatgttagattctattctctcaaaagaactacttttaacacttttttatccgatgacagcccttcatgatggagctgttattatccgtagaggaagaattgctgcagcaggatgtattttacctttagcacaaatggatcgacaagcatttggtacacgtcatagagctgcccttggtgttacagaagtaagtgatgcttttgttattgttgtctctgaagaacgtggtgaaattagcatggtttcaagaggaaaacttgtggttgtatctgatattgaacaattgatagagagtttacgtgatgttcttgactacaagtga

SEQ ID NO: 9091 - DNA, 723 bp, Lawsonia intracellularis
atgttacgtttattttcaggtagagaactttcttacacaataaacctttctggtgttactcaaggagttaatactattcctctatcatctattcaattcccagaattacgtgcttatcaaattattgatgttattcctcctcgaatggtactccaagtagatcatgttaaagaagtagagcttcctgtaacattacaattaagatcttctcttttttctgatgcagcctatttagaagatgttcatattattcctagccatgtaaaagttcgtggtgcttcaaatattgtttcatcaatgaatacagttatagcagaagtttctgcattattagatgacgagggacgtgttgtgcaagacgatgcacctcttattgcaccacagtttgttgaagttagtccacctacagttaatgtctgttttaagttagggatgcaacgtcgttctattagtcttcaacgtactgtattactcccagaagaaaaagaaagattaacaactcgaccagagcgagtaactattgtcgtatctgttccacaatctcttttaaatgatcctaagtatatttctcaagtgcatgctagtgtagatacatcaatattagaagattcattaggtaaagattttgatggagttaaaagacctattaaagtatttcttccagcagcagctcgtcttattaaagtttcacctgatatagttactgtttttcgtcgaaaataa

SEQ ID NO: 9092 - DNA, 1356 bp, Lawsonia intracellularis
gtgggtaaaaagctttttggaactgatggattacgtggtcgtgtaaatatttatcctatgactccagaggtagcactaaggcttggacttgcagcaggaacatattataggcgaaaaagccatcggagtagagttgtaattggaaaagatacacgtatttcagggtatatatttgaaaatgctcttactgcaggtcttcttgcatcaggtatggatgtttttttagttggaccacttcctacacctgctgtttcttttcttacagcaaacatgcgtgcagattttggtgtggttatatcagcttctcataatccattttatgataatggaattaaattatttgatgctgatgggtttaaaattccagataaagcagagcataagatttctgaaatgattcttgaccaaagtcatacatgggattacccagacccctcaagtgtaggtcgtgcacataaaattaaagatgctttaggaagatatattgtctacttaaaaaatacatttccatcaactttatctctagaaggactcagaattgttcttgattgtgctaatggtgcaaactataaagtagctccacttgctcttgaagaacttggtgctgaacttataaaaataggtactgatccaaatggattaaatattaatcatcaatgtggctctttgttccctgagtatgtagccaaaaaagtaattgaaatgagagcagatattggtcttgctcttgatggggatgcagatagacttattgttgtagacgaaaaaggtattatacttaatggtgaccaaattatggcattatgtgctcaagatttaatgcgtcaaaataaattgcctggaaatattttggtagcaacagtaatgagtaatatggcacttgaagtatttatgaaagaaaaaaaaggagccttgattcgttctaatgtaggtgataggtatgttatggaagcaatgagaaaacatggagctatgtttggaggtgaacaatcagggcatctcatttttcgtgaatatagcaatactggtgatggacttcttgctgcattacaaattttacgtattatgaaacagtacgaacgtcctctttcatctttagctggtttattacaattatttcctcaacgtcttataaatgtgaatgttaaacaaaaacgtcctattgaaacaatgcctactcttttaaaaacaattcagcgcatagagacagcattttcaggacgtggtagagtgttactacgctattctggaacagaaccattgtgtcgtgtaatggtagagggggaaagcgatagtaaagttaatacatatgctgaagagcttgctgatattgtggccaaatctcttgctgaatga

SEQ ID NO: 9093 - DNA, 921 bp, Lawsonia intracellularis
ttgtatctattaactaataatatatttacaataggagctttaatgaacattcgtaaagttgtcgttcctgttgctggatggggtactcgttcattacctgcaagcaaaaatatccctaaagaaatgttgccaatatataataaaccagtcgttcaatatgttgtagaagaagccatgcttgcaggtgttcaggatgttatttttgttaccaatagagataaaagcgttattgaagatttttttgactataatccgcagttagaaagtatacttgagagatctggaaaatacgaacttctaaaagtcattcaaaatgttgctgaaatggttaatattatgtctgtccgtcaaaagcgacaattaggacttggacatgctgttctttgtgcaaaagaaattgttcgtgatgaaccttttgctgttatggttggtgatgacttaatgtttggagaaaatgctggcatggatagacttattcaaattgcccgtgagcagaataagcctgttattggagtccgtgaagttccagaagacaaaattaatagatatggtattattagtggtacagaaattagtactgatgtgtatgatattacagaaatgatagaaaaaccaaccttaggttctacacagtcacgtcttgctattgttggtcgttatttattgacaccagacatatttgaatatttagaaaaagtaacaccaggacatggtggagaaattcaacttacagatgcacttgcagcattagcacaagaaaaaggtatgctagctgttaaacttggaggacttcgttttgatgctggtgactgggtggattatctttcagcaaacgtatattttgcgatgatggatgaaacactaaaagatgatctttttaataaattaaatcagatccttcacatttcagaaaaacaataa

SEQ ID NO: 9094 - DNA, 2379 bp, Lawsonia intracellularis
atgaatgaatattgtacaattacactattatcaccaccatattctttattaacatacacattaccttcctggcttccatataccctatggaagccagggctaagagttgctatccttttaggtaaggaaatgttaaggactggtattatactatctttacatactcaaaaacctgaattacctcataacgttgttcttcgtccaatattatgggcattagaaaaaattcctatattttcatatgaatacataaaaatgatccaggaacttgcattaagacattctatcccttctggaaaaatttttgcttctattcttcctatgggacttcgaacaacacatgtacaaatgaagtgtacgtataaaaatgtattaactaaccttcaattaaaagaattaaaacataaaactgaagaagaacttcatgatattggaactaaatggatatctgaagaaaataatgattggttaacatctcaaacagaatcaatgattgtttcagaagaatgtatattaactgttgatcctccatggcctattcgtccttcagcaacacgccaacgtgtcattttagattttctttttacaaatggggtagtatctaaaaaagaattattacaaaagttaggtaaagaatatcgaacagcactaacttcacttactcgttatggaattatatctataaaacaggaaatcctaacagataaagatgagttagcaaatactattgccttattacctccacttataccatttggttatactcttactgaggaacagaaagaagtagtaactcttttaaagaaagaattacaaaaaaatcaagcaaaaacatttttattatttggtataacaggaagtggaaaaacagctatctatcttgagattattcaggaatgtatacgtaataatcaatccgtacttgttcttgctcccgaagttgcattagctcttaaattacaacatgaaattaaaaccgtatttcctattataccttgttatttatctcatggatatcaaagcagtcaacaaaaagaagatctttttagaaaaatagtaaaaaatcaagtagcaaaagttattataggaactcgttcagctctttttttacctttaacaaatattggttctattattttagatgaagagcatgatgcttcttttaaacaaggtgaacgcttaatttaccatgctaaagaaatagcttggtttcgtgctgttcaatcaaatgcacttttattattaggttctgcaacacctgatataaaaacatttcatgctgtagagaataataaaatttctatagtaaaacttcatagtcgtgttggtggaggagttcttccaacaataaaacttattgatagccaacagttggaatcaaaagatgtaacatttgctcgtgaaagtcttactactcttaaagaaacacttgaagttggtgagcaagcagttattttgcttaaccgtcgtggatatgctcctatcatttattgtattacatgtagaaagtctattcgttgtccttcttgtgatgttggaatgagttatcataaaatacaagaatcccttatctgccactattgtgggaaaagcataaggtttccttgtccttgccctttttgtaaaggaacccaatttttacctatggggcagggtacagaaaaagttgaagaagaaattcgtgcaattttaccttcagacagtatggtattaaggttagattatgatacaactagaagacctggacgtactgaagaaattttaaaaacttttgctcaaggaaaatctcaagtattgattggtactcaaatgctttcaaaaggacatcattttccaaatgtaactcttgttattgttgtcaatgcagatataggacttaatattcctgactatagagcagctgaaaaaacattccagctgcttacacagtcagcaggaagagctggacgtggtgagaaagcaggacaagtactaatccaaacacatgatacctctcattattgctggaaatttatacaacaacatgattatctaggtttttataagtatgaaattgctcttcgtcaaaaatggctatatcctccttttatcaacttagcattaatacgcttatcgtaccctattgaatggaaagaaggaaaaatttggataaaaaaagtccagtcattgttacaagagtgggctaataagttaaatgtatctgttcgtgggcctgcattatctcctattcctatcctgagaggacgtaacagatttcaatgcttattaaaaagtaacaattggcaacatattcgtacaatattttataaaattcaaacaactgctttaccacaaaaacttcgtgtagtacttgatattgatcctattgatatgctttaa

SEQ ID NO: 9095 - DNA, 648 bp, Lawsonia intracellularis
ttgaagtttattactgacttcaaaaagctagatgtattagcgcatcaggcagttacttcagcattgtccacttatcagtatcacctacctatttttattgatgctacagctgggaatggttatgatacatgcttcttagcacaacttgctggaacacaaggtatagtattagcctttgatatccaacaagaggctataacgaatacatatcaaaggcttatatctttacatttggaacaacaagttacactcataaaaagtggacatgaacgcttatatgctgaaacattaaacttttttcaaaaaaatactcatttagtagagttctaccattttaataatcaaatagatatttgttctggtgtgatgtttaatcttgggtttcttcctaaaagtgataaaaaaattgttacacaacctactactacaataatggcattaaataatgcattaaatgtattagctcctggaggaattataactattcattgttatacaggacacttaggaggagtagaagaaagtgaagctgttttatattggagtgaacaactttctttaaataaatgggatataacaatctataaacaaatttttaaacaaaagaacaatgagcaattagtgcttattaaacgtaaacagttatga

SEQ ID NO: 9096 - DNA, 1614 bp, Lawsonia intracellularis
atgaatagtttttcacagccatggatattttatttgtgtgcatcaattgcaataggttatgcattaggtagactaaactataagggagcctcccttggcagtgcagctattttatttgtaggtattgcttttggtaaaatgggtgcgtctattccacaagatattggtggtattggactattaatatttctttatgccataggaacagatgcaggaccaagttttttaagtgcattgaaaggaaaaggtcttcaattttccatggttgctttatgttttactattacagctgttataactgttgtaatctctggttcatggtttgatattgatcctgctggaatggctggtatttatgcaggagctatggtttcctctcctgccttagctggtatattagactctgtatcaccttatcagtctgttataataacaacagcctatagtttgttatatcctgttggtatcttagcaagtattttatatacacaatggattattgcatttgataagtcagataccagaaaagctgaagaagaattacatcaaaaatctctttttgaaaatccacctattcatattggttgttttgaagtataccctcgatctgtctcttcagttcgtgaaatccataatctttttaatgtaagaatcacacatattattcctgcaggaagaaaagttgtagctccagcatcagcattattaaaaatttgtcctggagataaaatacgtcttttaggttctgaaaatgcgttaaaaagagtagaaacctttttacatgcaaaaatagcaaatgatactgattttaaagaacatatacatcattatcaattagtcgttacaaaaaaagaagcttgtggctcaagaatcatgcacttagcagctaaatgccatatggatactcttatgtttgaacatgttcatagaaatgaaattgatattccacttacaccaagaacacgtttatatatgggggatatcttacatcttagtggggatccaagacaaattgagacattaagaagattattaggcgatgatccaagacaactacaaattgctgatgttatgcctgttatgcttgttattagtcttggatggctattaggcaatatccctatccctctgtacgaaggcaaaacatttatggtaagcagttcagcaggagtattgcttacagcaatttttttatccaatataaaaaaattaggttctatagatttttatttaccaagttcatctttactcttattaagagaaacaggacttgccttattttttgctgctacaggagtacatacaggcgcttctttaaatatgggaattatccttcaaagtggtaatattcttttatgtggtttaataacaacaatattacctatgatagtaacatggtattttatcaagtttgttcttcatatgaattatctttatgctattggcagttttgctggagcacgtgcaacagcttcttcctttgcaattgcaacagctataaccaaaacaccatatgttgcagctgtgtattctattgtttttccagtagttacacttttacaaattatgagtagtaaagtggtgtacactcttggttcgctatatctattttaa

SEQ ID NO: 9097 - DNA, 708 bp, Lawsonia intracellularis
atgcgttatattaattattattattattattattatttcttatttttttttattattataactcaaacaatatgttttgctcataacacagatggttcctctattcttgatcatagtattactataacaacaaaagaaatgcaggtttctgtacattatccagaaattcatagtagtaagattgatcaagatatcaaaggttgggcccaacaacttgttgaaaattttaaaacaactaatagtgaaaaagaacttgccattggtccctatgaacttagggcagactattctattactaaaccctctgataaagccatatctattatatatactataacagactttactggtggagctcatggaaatttagaaatttctgtatttaattatgatctaactacagaacaaccattagatcttatagacatttttgatgatgttaatagtgccttaaaaattatgtcagaatattcatataagtctttgtcagaaacactaggtaatatgtcagataaagaaatattatctgtaggcacagctcctgatcttgataactataactcaattgcattaatacctaatggtatccgtatatttttccaaccatatcaagttgcaccttggtctgctggtcctcaacaagttgatatgacacttgaagagctgagtaaagctaacccaactaaaaaaatatggaatttatcataa

SEQ ID NO: 9098 - DNA, 597 bp, Lawsonia intracellularis
atgataatagaccttatttggattattacttcttatgttattggctctattccttttggtgtactttttgccaatattttttgtggtattgatccacgaacattaggaagcggtaatgttggagcaacaaatataacaagaatttgtggtagaaaacttgggtttattaccttattttttgatgtattgaaaggattttttcctgttgtaatagcaacatatttatctgaaagtccatttatgtatactatgacaggtctagcagcaattataggtcacctttattcttgctttttacactttaagggaggaaaagctgtagcaacctctataggtgttcttattccaattgctttttggcaactgttatttgctgctatcctatgtacttttttcatatggcgttctggatttgtttcacttggttctttggttttagtaacttcattacctattattttgttcattacaggaaaatttgcatatattccattatcactaattattatggcacttattttttggagtcataaacaaaatattcaacgtctcattaaaggtgaagaaaaagtttggaaacatagtgagtcaatatag

SEQ ID NO: 9099 - DNA, 2022 bp, Lawsonia intracellularis
atgcaagacaaagaacctcaacttgcttgggttcttgaagaatttcaaaataaatttaaaatattattacctaatagaaaagaaataaatatacaatcatcaaggattcttccttggataggtccaaactatagaaatatagaaagtaaagatattgcaatagcacacattgaacaacataagtttaaacgtaaagagcttgaatcatcttttaattcttatgaattatgggagattgctcaaggagaaattattcaagcacctgcaaagtggttttctgagctagttacaacttctccagatattgatacaatagcagcatgtgcacatgtccttttaaaggataatattcattttaaatttcaatcacctaattttgaaatatattcaaaagagattgttgatattcgtgttaaagaacaagaaaaaactataaaacagcaagcatttattactgatagtataccctttttccgttatttatgggagctttatacacaaaaaaaagtctattctattaatactgctaatgtttatacgcaatttgaagaacagcttcgtcagatcattatggaacaaatttcaaatccagaaaaagctgatagtcagttatggaaaaaacttgtaacaggacttcctgatgatccatttcttgctttatatcttgcacaagcatggggaatattacaaccacatcataacatttggtttgagcgtatagattatgatcctacagataattggcaacaacctttccaaaacactatagacatgttgtgtaaacaatcttctctttatacaacgtctaccctaccccttccctttataagtattgattcagaaacaacaaaagataaagatgatgctttttttattgaaccaatagacaatggatggaaagtggttgttgcattagcctgccctgcattgaattggccatttgatgatccccttgatcaagcagttagaaaaagagcaaccagtatttatttaccagaagcaagttataacatgttgcctaatgtattagggatagacaagtacagtcttcatgctcaatgtactcgacctgtgcttattattacatgtattgttggctatgatggtgtagtaaaatcttgtacaccatcttttgaatctgtctctcttgctgctaatcttacttatcatgaatgtgagtatattttagaggataactattcagaagattctccatatgctgaacaactgaagttagcttttcatgtagcacaaacctatcaaaaatatcgtcttaaacatggtgctgttatagtagaacgttcagaaccatatctttctctaatagttgaagagaatgagacaaaagtagtattaacagaagagtttgctactcctaaatctcatcttttggtttctgaaattatgatccttattaatgcagcaatagctcattggagttatgaaaataacatttctcttttttatagaacacaagacattataattcctgatcaatataaaggtatatggaaagagcctcatgatattgcaaaagtagtaaaagtgttagcaccatctgtacttgatgtagttcccaaaaagcatgctggcatcggagaaaaatattatgcaccatcaacgtcaccattaagacgatatccagatatggttaatcaagcacaaattcttcatgtattacaacatgaaaaatataaatggtctttaaaagagttagagataatgctaccttatattacttctcgtcttgaatatacaaaccaaatacagcggtttcgacaaagatattggaagttggtatatattcttcaacaagataagaatacatggtggccagctattgttactgaggtaacagaacattacattgttgttaatttgccaagagagcaacttactcttcgggctcgtcgaaaactttttacagctgttcctgaaataggacagtctatttatattcgtataggtaatattcaaccactacataatgaaattcatatattagaaattcagcaagtctaa

SEQ ID NO: 9100 - DNA, 1275 bp, Lawsonia intracellularis
atgggtttacttaaagatatgtaccataaagtagtagaagaacactttccccccacaattactattagttttggagataaaatacttacatatacaaaaaaaacatggaatatcaatggggaaataaaaggattgcgctatggagataatccagatcagccagcagcactttatgaatttacttctggtgagttaactataggtgatacgatttggcgtacatctggaggtattatttcttcacttactgatgctgaattgatacaatctggtaaacatccaggaaaaacaaaccttacagatatagataatggatgtaacattcttcaatacttagcaagtcgtcctgctgcagttatattaaagcataataatccttgtggagtagcatggtcaaaaaaaagtattgggaatgcattagaaaaagctttttggtgtgatagaattgcagcttttggtggtgcaattgttgttaaccgtccccttgatcatgactcggctaaccttatttttaagcattattttgaggtcattgcagcacctgattatgaaccaggtgtgctagaattacttacaacaaaaaaaaatttgcgtatcttaaaacttcctggtctaaattctttagatcaactcacacattctcactatcttgatatcaaaagtctttgtgatggtggactgattcttcaagaatcttttcttaatcgtgtacgatctactgcatcttttttacctgcaacagctacctctaaggatggggttacaatatctgctaaacaaccaacagatgaacagattgaagatcttctctttgcttggtcagttgaagcaggagtaagttcaaactcagttatatttgcacatgatggtgcaacagtggctattggtacaggagagcaagatagggttggttgtatagagttagctattttcaaagcatatgcaaaatatgcagacaaattaacctaccaaaattacggattaagtctttatgagcttcgtgaacaagctgctaacgataaaacttcattagaaaagcttgaaaaaataaaaaaagaaacaaatgatgtttgcggaggattaaaaggatctgttatggtttctgatggttttttcccatttcgtgatggtgttgatttatgtattaaccaaggagtaacagctatcgcacaacctggaggatcattaaatgactatgaagttattaaagcagtcaatgaatcttctcctcaagttgctatggttttcactggacaacgctcatttaaacattag

SEQ ID NO: 9101 - DNA, 324 bp, Lawsonia intracellularis
atggaacagttattaataaagttagctagacagcttgaatctcttgatgaagcttctttaatggcactttgggaaaaatatgctaatattgtatctcagtttgaacctacaaaacgttgggaagaagcaaccttaattttttctttaattcaagcaaagcatatgaagaatcaactgtttaactataattgggcagaacaagttcgtccttctacatcatctcatgaagttcctatttctgtaatgcttgagacaaaaaataaaccccatgaagttaagcaagcaaaaataattccttttaaaaaacttattgaaaagtcataa

SEQ ID NO: 9102 - DNA, 1287 bp, Lawsonia intracellularis
atgcccaatgtagttattattggagcacaatggggtgatgagggaaaaggaaaaattgttgatttattaacacgtgacacagattatgttgttcgatttcaaggtggtaacaatgctggtcatacagttattgttgatgggaaaacatatatcttacatcttattccttcaggcattcttcacaaagaaaaaatttgtataattggtaatggagttgtccttgacccacaaatttttatacaagaattagatacgttgctatcacagggaatagatgtttctcctaatcgattaaaactaagtaccaagacacatctaattatgccataccataaactacttgatcaggttcgagaaaatgcaagtaccactcaaaaaataggaacaacaggacgtggtattggcccatgctatgaagataaagtttctagaatagggatcagaactatagatttaactcaacctaaacttctttataaaaaaattgaattagcattaaaagaaaaaaatacattgtttactcaattatataacactgaatttgttaatgcagagactatatttaatgaagtaatggaaacagcatctagaatccttccttatctatctgatacatcaagtatattacaagatgcgtttataaaaaataaaaaagtaatatttgaaggagcacaaggagtacaccttgacattgatcatggaacatatccttttgtaacctcatcaaatacaattgctgcaaatgcatctattggatctggtattgctctttcttcaactgagaaaatcataggtatagttaaggcatacacaacacgtgtaggatctggaccttttcctactgaattatatgataatacaggaaaatttttacaagaaaaaggacatgagtatggtgcaacaacaggacgtccacgtcggtgtggctggcaagatcttgttatgctaaaagatagcgttagactcaatggttttacagagcttgcacttacaaaacttgatgtcctttcagggctcaaaaaaattaatatttgtacatcatatgcttatcaaggggaaagtgttacttatccaccacaagatgaacacattttattcaatgaaataaaaccaatatatgaaactatgcctggatgggaacattctctagaatcttgtacttcatggaatcaattaccacagtgtgctaaaaactatattgaacgaattgaacaagtagtaggtgttccaataactatcatttctgttggagctgatcgtaatcaaacactttttcgggatatatga

SEQ ID NO: 9103 - DNA, 1059 bp, Lawsonia intracellularis
atgaatgttgctgtagctgttagtggtggtacagatagtttatacaccttagctacattaagagaggcctttggaaatcatcatgtatttgcactacatgcacgatttaaagaacaaattactaatgatcctgttcctgcacttaaggaacaatgccataaccttaatgtacctttacatgttgttgatttacataaagaatttaatgagctcattattcgtccatttattaaagcttatgcagatgggaaaacaccaaacccttgtgtacactgtaatgctaaagtaaaatttggtcttctccaaaaaaaagcacaggaactaggagcaaatcaaattgctacaggtcattatgtttcgcttattgaccatgatctctatggtaaagcattaaaatgtggtgctgattctacaaaagatcaaagttactttttagctttaactcctagagaacaacttcaaacagctattttcccattaggaacgttacgaaaaacagaagtccgtgaacgtcttcaaaaaatgggactagaagtacccctaccaaaagagagccaagaaatttgttttgtccctaatgatgattatagaaaattcctacagtcatctgatgtagacctcttatctgaaggtagaatggttatgcttgatgggacattagtaggaaaacataaaggactatggaagtatactgaaggacaaagacgagggcttggtgtatcttggtcagaaccactatatgttgcacacaaaaatcactcctgtaatgaacttgttcttggcacagcaaaagatatacttgttgatacctgtacagctcaagatattaactttttagttccacaggataactggccaaaagaactttttgtacgtactcgttacagacaacaagctgtacctgctgatatccaatttgtaactaatacgtcttcatcaaaaaaaataactatacattttcactctccacagcttcctgcagcacctggacaacttgcagctatttttgacaaatctggttatgtattagctggtggacttattacaaatgatttatag

SEQ ID NO: 9104 - DNA, 1185 bp, Lawsonia intracellularis
atgattggcatatcaaagttatattgtggtcaggtagagtcgtctgatgcattacgatatggacgtcattctggaaaacttccttcacatttattgcaattttcagcagataaaaaaccagtagtggtttggaacacaacacgtaggtgcaaccttaaatgtgtacactgttatgcaactgctttagatgaagaaaaaggggcagatcctatgtctacagaacaaggaaaagcccttattgatgatcttgcagcttatggtgcaccagtattattactttcaggcggagaacctttagttcgtaatgatttagttgagcttgcagcctatgcgacaagtcaaggcatgagagccgttatttctaccaatggaacattaattacaaaagaaaaagcacgtgaattaaaacatgttaacctttcttatgtaggaatttcgcttgatggagcagaagaggtacataataaattccgtggagtaccaaatacttttaaaaaaacacttgaaggtattgaaaactgtaaagctgaaggtcttaaagtaggattacgttttaccattaacaaaagaaacgttgctgatcttccaataatatttgatttacttcgtgatcttgaaattcctcgagtctgtttttatcatcttgtgtattctggccgtggctctgatctcatccaggaagacttaagtcatgaggagactcgtgctacaatagatcttattatggaaaaaactcgtaagctttttgaagaaggatacccaaaagaagtacttacagtagataatcatgctgatggaccatatgtatggatgcgattgcaaaaagaagacccaaaacgagcagctgatgtttttgaactattacaatataatgaaggtaatagttctggaagaggctttgcatgtatttcttgggatggtaaagtacatgcagatcagttttggagacatcatacatttggaaatgtccttgaaagaccattttctgaaatttgggatgacccaaatattgaattgcttcataaaatgaaaaacaaaaaagagcatgtgaaaggtagatgttctacatgtcgctttcttaatatttgtggaggaaattttagggctagagctgaagcttattatggagatgtttgggctccagatccagcttgttaccttacagatgatgaaataaaaaaatga

SEQ ID NO: 9105 - DNA, 999 bp, Lawsonia intracellularis
atgaatactattttctttcgtggccgtaggcttcgacgttcaatacaagttcgtgatttaatccaagaaactagattgcatagtcaagacttgattatgccttattttgttgttgatacagataatagtaatttttttcagcctataccttctatgcctaatcagtatcagctttcactttctaatcttgaaaaaaaagttgatgaagcaattaatcatggtttaaaatctgttattctttttgggttacccaaaaaaaaagattcttatgctacagaagcttataatgaaaatggtattatacagcaggcaattcgaactttaaaaaagaaatggccttcattacacgtcatcacagatgtttgtctttgtgagtatacaaatcatggacattgtggactactaaaagtagaagatcagtgtgggcatgtaaaaaatgatcctacccttgaattattaactaaagttgctatcagtcatgctgaagctggtgcagacatgatagctccatctgatatgatggacggtcgaattcaagcgttacgttctggattagatcatgctggttttatagatatacccattatgtcttattctgcaaaatatgcgtcagcttattatggtccatttagagaagctgctcaatctgctcctcaagtaggtgatcgaaaaagctatcagatggatcctgcaaatacaaatgaagcacttcgtgaagttcaagctgatattagtgaaggtgcagatattattatggttaaacctgcagggccatatcaagatatcatccgacgcatgtatgagacatttcctgttccaatagcagcatatcaagtaagtggtgaatatgcgcttattaaggctgcaggagaaaaaggctggatcaacgaacaagctgttattatggaatcccttataggtattcgtcgttctggtgcaaaattaataataacgtactttactgaggacgttctaaaaaaaaggtgggtagattcatga

SEQ ID NO: 9106 - DNA, 1314 bp, Lawsonia intracellularis
gtgggtagattcatgagtcttcaagcagaaaaaatatctctagagggacatctttctagaggaaaagatatgtataaaggccatcctcatgaacaattaatgggaaaaacttctgatggaagtggacaccctcatgtaaatggagctcatcctaaaagtgcacatccaggaggtatgcctaggacattaccagacggatcaccaacatgtaaactaattgcatgggaagtaacacgctcttgtaacttagcttgtaagcactgtagagctgaagctcatatggatccatatcctggagaattttctacagaagaagctaaagctttaattgatacatttcctgaagttggtaaccctattattatttttactggtggtgagccaatgatgcgtgctgatgtatatgaactcatggcttatgcaacgtccaaaggcttacgttgtgtaatgtcacctaatggaacacttattactccagaaacagcacatgctataaaaaaatctggtgttcaacgttgttcaatctctcttgatgggtacaatgctgaaagccatgattcttttcgtatggttcctggagcttttgaagcttctcttcgtggtattcagtatcttaaagatgaaggggtagaatttcaaattaatactactgtaacaaaaagtaacctcaatgattttaaaaaaatatttaaactctgtgatgaactaggagcttctgcttggcatattttccttcttgtacctatgggtcgagctgctgaaattgcagaacaatccattacagcagaagaatatgaagaagttttacattggttctatgattttagaaaaacaacctctatgcatttaaaagccacctgtgcccctcattactatagaattatgcgacaacgtgcccatgaagaaggtgttcctgttaatgtagatacctttggtatggatgccatgactcgtggttgtcttggtggaacaggcttctgttttataagctatgaaggtcaagtccaaccttgtggatatctcactatggattgtggtaatgtccgtgaaacacctttcccagaaatatggaaaaaagccaaaacatttcaacaatttcgtactcagtctgaatataaaggtaaatgtggtgtatgtgaatatcacaaatcttgtggtggatgcagggctcgagcttggagtatggatggtgatcatatgggtgaagaaccgctttgtacatatcaaccaaaacgctatttaaaacaaaagaattcttctcaacctattgatcatcaaggcattacaccttgtgctcgtggccatatgggataa

SEQ ID NO: 9107 - DNA, 453 bp, Lawsonia intracellularis
atggataatattgataaaaaactattagatattatacaaacaggatttcctattgttccaaggccttatgctgagattggagaaaaacttggaataactgaagctgaagcattaagtagagtacgagctcttaaaggaaaaaaaattatccgtagattaggtgctaactttcaatcttccaaattaggttttcgatccacattatgtgcagcaaaagtacctgatgaaaaaatggaattatttacaactgaagtcaataaacttccaggagttactcataactatatacgagatcatgtttataatgtttggtttacattaataggtccttcatgggaagaagtatgttcaacgcttgatggtgtaacagagcgaacaggtataaaaattctcaatttacctgctactcgtatgtataaaattcgtgtagactttcgtatggatgatgaataa

SEQ ID NO: 9108 - DNA, 990 bp, Lawsonia intracellularis
atgcattatccctttaaaaatattatacatttattcataacattagtgattagtgtatgtattggatgtacttcatataaaatttctgagaaatatccatatatagatggtgctgttattgaatattctaataatgttgggaataatgctaaagctgaaaaaattgataatggtatgtttataccagatgggaaaggtggatccatatggatacctggctcaaatcctcaaggtccgaatgaagcatttattcaagctcaagagttacgtttaaaagtaagagagcttgcatcacaacttcttgatacacaagacagtagttctttgattggtctaatagcattaccaacttcttttgttaatttgaataatttttcagaatcaagtccattgggtcgctatatgtcagaagctatgatttatgagttcaatcaacgaggatttcctattaaagaatatagaatagatactaaaatttctatgagtgaatcagtcggaggtgaattctctcttcaaagaaatctaccagcactatctgttaagcaacaatgggctgcaattcttgttggaacatacctaagagaaaacaatgctgtttttattaatgtaagacttgtaagagcaaaagatggaatggtattacgtaccgctcaaattgttcttccacaaaatgcactactttcaaatatgatatcgccaccattatcttcaggtatcttatatattggaccacaggaaaataatacatctatatctaaatttaaccctactagttcttctcaacaagaacaacaactagttaagccttctgtgaaaactcagcttgctcaagatacacaagaaatgaataatcagcttgagcaaaaagataataataataataataataataataagataactaaacagatacagtctaactctctagaagagagtagctcaaaagcaacaatatctcctccagttcctgggatgcctaataatctataa

SEQ ID NO: 9109 - DNA, 615 bp, Lawsonia intracellularis
ttgaatattcttcatatgttatcgggagttattattatgttccgattactatttatttttatttttagtataactttccttttacccaataaagtattagctactactagtggaacaatccctactgctgctgtaacaataagtgaacaattagatgctcaacttcttcgtagaattggaaataatctttataataaatcctctatatctattgtggtaaccccagctgtacttcttgaagatttatcaaaaagtagccctttagcaagacaactggcggaagagattacaaagtgtttagttcaaaatggatattctgtcacagaaatacgcaaagctagtaaaatcattatagataaaacaggtcctaaaattcttactcaagacccatcacagcttgcaacaactcaagtagaagcagtagctatacttacaggaacctacactgttacaaaaaagaatgttagattcaatataaaactattacatataccaacaaatgatgtcttagccacagcgtcaacaacaataccaattactaaagaaatttatccattattagtagataaaaatactaaacctggaacaccaagtgtaactacaaaactacaataa

SEQ ID NO: 9110 - DNA, 573 bp, Lawsonia intracellularis
atgattaagggaactcaggcgtatgtagaagctcagtttaatacgactggtcaaggagaagttcttcttcttttatatgatggtgcaataaagtttcttaatcaagctaaagagaaaattttagagaaagactttggtgcaaaagggatacttatttctaaagcacttgatgttattagtgagttagaatcatcattaaatatgaatcttggaggagaaattgcagaaaatttgcataatctctatgtcctttgtactactcgactccttcaagcaaatcttaagttagatatcaagttaatagatagtgtcatagatgttcttgcaggcttacgttcagcatatgctgaaattcttaatacacctgaagcaaaagctgcagctgctgaaattgcatctaagttatcagtatcccaacaaagtagtggttctcctgtaccaattacaaggacacaacatcctacaggagcaagtaaatcattggcccagtctgcttataaaacacaacaaattacaggtacacaagctcaagtagctgctcaacacaaagctcaagaagaattaaataaataa

SEQ ID NO: 9111 - DNA, 2085 bp, Lawsonia intracellularis
atggcggattatctttcaggaggaatttcttttggaggaattggtagtggaaccgatttccaagctatgattgatcaacttaagaaaattgagcttattcctaaaaatagacttgtagtttcccatgaacaatggacaaaaaaatataaagcatttgaagagcttataaaaacagttaaagatactgaagcgtctttaagtaagctaagttctgttggtgctattttaaaaaaagaaggttctgtttcaaatacttctgttgcaagcgttaaggcaagttctgatgcatctgatggaacacatacaattgatgtgaaacagcttgcaacaaacacgattctttctaataatcatatttttgattctaaaactgaaagtattaataatacaggttcacctggtatctttgcttatgagtataaaggggaactacatgaagttgaagttcctccaggtagtgatcttgaatatcttgcaacattaataaacaaagattctaataatcctggtgttaaagcaaaccttatcaagactggcgatggctatatgtttagtcttgaaggaactgaaactggtgcaaatgcgactttatctatttcaaataagacaacgcttccagactttaaagcatctgttgctaccagcagtgcattagctaatggtgaagatacaattattaatacttcaggaacaactcaacaattttcttttgaatacaatggaagaacatttactttcgatattccttcaggaacaacagcaaaagaactccaaacagctataaatgaaaatacaaaaaatacaggagtacgtgcaacttttgaaaaacatggctcagatatagtattgcaattagaaggaacagttcctaatcaacaagttaaagtaaccgctagccctactgatcttggaagtttcacatcttcgggtcaagcaggctggaataaacgtgattctcaagatgctatttttaatattaatggttgggaccaagaacttacatcttctacaaatgaacttacagaagttatcccaggacttcaaattacactactttccgaagggaaaacacaaattacaattcagacttctactgacgaagtaaaaaaacaagttgagaaagcagtagagtctataaataatgttctttccaaaattcaagagttaactaaagcaacagctgaagacaaagatgatagtaaagacacttctagttcttcaagtaaaattccatcatatttacaaagtcctacaaaagtgaaggctggactatttacaggtgatactggcatacaaatgcttagtactagacttaagtctatcttttcttctaatggtctaggtttttctcctaaacaaacacaagatggtccaggggatctattttcatcacttgcttcaattggtattgtcgtagatgctgatgagggtagtgaaacttttggacaacttaaaattttagatagagaaacaattggtcctgatgcaccttatacaactcttgatgaggcattaaaaaaagatccacaagcagtagcagatatattagctggtagttctggaatatctgattcaacagatttttcttatcaagatcatattgttggaaaaacacaagctggtacatatgatgtaaagtattctgtagatgcaagtggtactataggagacgtttacattggaggtgtaaaagcttctctatctgatcctgcaaaaaatatatatacggtcacatctggtcctgctacaggtcttagtatagcagttaataatcgtactccaggtatcaatgtagaaagtactgtaagagtcaaacaaggtaaacttagccaaatacaagaagcacttaaagctgaagtacagcaagatcctttaaaagaaaacacaggtcctttaattatcatgcaagataactataaggatgttatgaaaaatcttgagacaagaatagaaaaagaaacacaaagagttactagttgggaacgtatgatgcgtttaaaattttctagacttgatgctgtattagcaaaatataatcagatgatgtcagcaaatgcttctagtttagggcaacttggtgcataa

SEQ ID NO: 9112 - DNA, 1929 bp, Lawsonia intracellularis
atgcagagtgatataaataaaaatcatcttactatgactgaaggattaacatatattaatgaatcaggtttaaaagaagaagaatcaaaaaatattgttggttacaacattaatggctcaataatagatctttttacacctcttcctaccataacaaaagaagttatacctatcactattgattcagaagatggtcttgaaatgttacgtcactcagcagcacatatccttgctgctgctgtaaaaaatctttttcctacagtaaaaatatctattggtccttctattgagaatggtttttattacgactttgatgcagaacgtccttttaccccagaagactttcctgctattgaagctgagatgcaacgtattattaatgaatctattccttttgagcgtattgaaattagtaaagctgaagctctagaatttttttcttctcttcatgaaaattataaagtcgaaataataaactccttagaagatggtaatattacactttatcgaataggaaactttacagatctttgtaaaggtcctcatgttccaaacacaaattttataaaagcttttaaactactttcagtagcaggtgcctattggagaggtaatgaaaataatcagatgctctctcgtatttatgctacagcatttcctaataaaaaattattaaaaacatatctaacacaactagaagaagctaaacgtcgtgatcatcggaagttaggtaaagagcttaatttatttgaatttcatgaggacattgctccaggaatggttttttggcaacctaatgggatgttattacgtactattttagaagacttcttacgtaaagaacacttaaaaagaggatatcaactcgtacaaggtcctcaattacttagacgagaactttgggaaaaatcaggtcactatacaaattataaagaaaatatgtattttacggaaattgaagaagatgtttatgggataaaacctatgaactgtgtttctcacatgcttctttataaaacacatcttcatagttatcgtgaacttcctcaaagatattttgaactaggtgtagttcatcgccatgaaaaatctggtgtattacatggactcttaagagttcgccagtttacacaagatgatgcacacattatttgtatgcccgaacaacttgaagaagaaattattcaagttattacttttgtccgtgaccttatgtcactatttgactttaattaccatattgttatatcaactaggcctgaaaaaagcataggttctgactatgcatgggaacttgctacttctgctttaattcaagcagttgaaaaaataaatcttccatactctattaaccatggagatggagcattttatgggcctaaaattgatataaaagttactgatgctattggtcgtgaatggcaactttcaacaatacaatgtgactttacattgccagagcgttttgagttagaatatgtaggtcaagatggaaaacgtcatcagcctgtaatgattcatagagctatttttggctcaatagaacgctttattggtatattaacagaacattatgcaggtgctttccccacatggttaacacctatacaagtaaaaatattaactgttactgatgcacaaacaccttttgcaaaacatgtctatagtcaactacaggatgtaggtattcgtgtaggactagacattcgtaatgaaaaattaggttttaaaattcgcgaagcacaacttgctaaaattccttatattcttgttatcggacagaaagaattagaattagaaagtgtaaatgtacgattgcgaacaggagaaaatattggtatgcagtcagttacagagtttattaaacttgttgaaaatgactgtatacaaccgttcaaacgtggagggatgaattatcgcttctcttaa

SEQ ID NO: 9113 - DNA, 477 bp, Lawsonia intracellularis
gtgcgggttattggaccagatggtgagcagcttggtattttagaccgtaatcaagctattgctattgctaaagaacatggccttgatcttgttgaagtagcagcaacagcagatccacctgtatgtcgtattatggactatggaaagtttaaatatgaggcacaaaaaaagaaacaagaagctaaaaaacgccaaacaatagtccaaattaaagaaattaaaattcgtccaaaaactgatgaacatgactttgaaactaaagttcgacatattaaacgttttttagaagaaggtgatcgtgttaaagttacagtctttttccgtggacgagaaattgtacataaggatagaggaattgtaattttagaacgaattatacttgagacaaaagaagtagggaaggtagagcaggagccaaaagccgaaggacgtacacttcaaatgttacttgcccccttgcctaaaaaagctgtataa

SEQ ID NO: 9114 - DNA, 354 bp, Lawsonia intracellularis
atgcgtgtaaaaagagggttttctgcccatcgtcgacataaaaaatatttagaaatggcaaaagggtttcgtgggggacgtagtcggctgtatcgtactgcacgtgaagctgtagaacgctcattagtttatgcatatattggaagaaagcaaagaaaacgtgaattccgtaagctttggatattacgtattaatgctggtgctcgtgaacatggtctttcttattctaaaatgatggcaggattatctcaagctggaattatgttgaatcgtaagatacttgcagagcttgctgttaaacaaaaagaagactttgctaaactagtagaaattgctaaaaatcaagttcattaa

SEQ ID NO: 9115 - DNA, 1038 bp, Lawsonia intracellularis
atggacctaattaaggaatttgaacgcctgataccagaaattaaaaaaaatctggaacaggcgtcttcattagaacatattgaacaaataagagtagcttttttaggacgaaaagggcaacttgctgcacttatgtcaaaaataccttcagtagatacttcactacggccagtagttggagaaactgcaaatagtgtaaagaatcaacttactcaacttattcacgaatacaaaactcagcttgactttctaacaactactaatcgtatacaaaactttgatgcaggccttcctgggaaacgaccttggtatggaacactacacccaattacaattgttttagaagaaatttgttcagtatttactagcttaggatatactatagcaacaggtcccgaagtagaaacagaatatcataactttgaagcacttggtataccatcggaacatcctgcaagagatatgcaagatacattttatatttctgattctatcctattacgtacacatacatcttctattcaaatacgtaccatgttaaaaaaacaacctccaattgcaattattgctcctggacgagtatatcgtagagactctgatgttactcatacacctatgtttcatcaaatagaagggcttgttgttgataaaaatatatctatgtcacatctacgtggtacattaacagcatttctaaaaacaatttttggcgctgaaataaaaattcgattccgtccaagttttttcccctttacagagccaagtgctgaaatggatatttcatgtcacccttgcaataatactggctatgtaaaaaatgaaatttgtcgtatttgtaaaggaagtggatggattgaaatccttggctgtgggatggtacatccaaaagtttttgagtctgtaggatatgatcataatatatactctggatttgcttttggacttggtgttgaaagaatagcaatgttaaaatatcacattgaagatctaagaatattttttgaaaacgatctacgctttctacgtcaatttatgtaa

SEQ ID NO: 9116 - DNA, 2412 bp, Lawsonia intracellularis
atgttattaagtttaaactggttacgtgaatttgttccatatgaaggaactgctcaagagcttggtaatagactaacaatgcttggatttgagcttgaagatatcataacaccatataataacattcaatccattatagttggaaaagttgttcattgtgaaaaacacccagaagctgacaaactttctatttgtactatagatattggtcaagaaacattactacatgttctatgcggtgctccaaacgtagctacaggtcaaaaagttcctgtagctactattggtactactatgcctgatggtaccattataaaaaaaattaaattacggggcatagaatcttttggaatgatatgttctgaaaaagaattagaatttacagatgatcattcaggaattttagttcttccagaagaactaactgttgggacatcactagtgaatgctttaaatcttgatacagaaattctaaaaattagtattacaccaaaccgaggagattgtttatctattttaggacttgcaagagaaatttctactgcatttgggctaccgttatttcctcagcaacctatccatttcctagaagtagagcctgatttttcaaaaaattggtctgtccatgtttcttctaaaaaagtatgctcatcatatctattacgtttagttgaaaatatatccgtacaaaaatcacccttacatattcgccatagacttcactcaatgggtattcgtcctatttctaatgttgtagatatcacaaattatatcttactagaattaggccaaccacttcatgcctttgataaagatcttattgaaggtaatacaacatatatctctttagcaaaagaagaagaaatactttgtactcttgacggaaaaaatcatacattaactccatctgatttaattatctatgatgatactaaacctattgcactagctggtattatgggttgtcaaaactcaaaagtaacagaagcaacaaaaaatattcttattgaaagtgcagtatttaatcccagtataattagaaaaacagctcgacggcttggtatttctactgaatcttcctatcgttttgaaagaggtgttgattcatctggagcgatgtatgctcttaataaagccattaaaatgattattgatacaagtggtggagaagtcaagataggtaatgctcactatgaacctacaccttataaacaacctattatccaacttgatacatcaaacatacaaaaagtaacaggtacttctattccttctaacttctgtatcaatacactgacacaacttggttttgaaatagacacttctaactgtaatatatgggatattactataccaagttggagaaaagatattcaacattctgtagatcttattgaagaactacttcgattttatggactaaatactatacctgaagaacttccatgtatttataaatcactaaatgacataggattaccagaatctcagtatcagtttattacaaaagttaaacattgggcttgtggaataggacttaatgaaactgaaaattatagttttataggaaataacgagttagatttgcttaaattttctaataatactagacttattatatacaatccccttacagaagagcaaaatgtacttagaacctcacttatacctagtcttttaaacaatgtgaaatataatgtagctcatggaaatactggattaagattatttgaagttgctaatacatatacatttgaagcaatatcagaaacaacagcaaaagaagtcctaaaactaggcatagttatgcatggtgatttatttgatacaggttggcctcaaccttctactagcgcctcttatttagatcttttaggtattgttgaacactttataacttttttacatttaccacccctgactacttcacaaactgatacttatgcatttcttaaccctggagttgatctttttatccatgggaaaaaaattggatatattggctgtatatctcaacatattgcaaaaaattgccatacccataaagaaatatggattactgagcttgatttagaaacattagctcatttatataaaaatataaaaataacatttaaaccattaccaatttatccatcttcttatagagatatgactcttattattacttctaatacttctatctcaaacataaaaagttatatggacttaatagatattcctatattagaaaacattttcttattagatatatttagacctaataatatagaacaacattgtacgtttcgtttcgtttttagaagtgctaaaaaaacactcaaggatagcgaaattgatttggcttataaaaaaatcactgaaatactatccaatcaatgtaatataagatttaatgtattacttgaataa

SEQ ID NO: 9117 - DNA, 417 bp, Lawsonia intracellularis
atgaatgaacgattatataaaatcggtgaagcagcacgtatacttgaacttgaaagttatatcttacgttattgggaaacagaattttctcaactttctccaaaacgtacgccaaaagggcagcgtttatattcagaaacagatataaaacttcttttcaggttaaaatacttactgcatgaacaaggactaacaatagaaggagcacgtcgagtactttctggtgactcagctttactgataacaccacaaacaaaaaacaaaaatgaaactaagtcgattaaaaacgaaacaacaatatttaaagaaaaagaagaaatggaaaaattattagatacaattaaaacagttgaaaaagaactcttatatataaaacaactacttaacaaatcttcaactttttcattatcctgctaa

SEQ ID NO: 9118 - DNA, 468 bp, Lawsonia intracellularis
atgatctcatctcctgaacgttatatttcaaattttcatactgctggagctaatttacttgttgttcatgttgaagcaactatacacttacaacgagttgtttctgaaattcatcgacttggaatgaaagctggtgttgctctaaatccttctacctccttatcagtactagaatatattttagatgatattgatttagttctccttatgagtgtcaatccaggttttggaggacaacatttcctttcttctacttatgaaaaaatatacaacttacgcaggatgattgatgaaagagaaaaaacaatccttattcaagtggatggtggagtaactttatctaatacaaaagcattactagatgcaggaactgatgtttttgtttgtggttcttcattttttgtaggagaatcttactcagagaaacgatatcaatttgaatctgttgccaatagtctaaccatttaa

SEQ ID NO: 9119 - DNA, 1968 bp, Lawsonia intracellularis
ttgcgtatcctaacaatagacgctgtagaaaaagccaactctggacatcctggcgcacctatgggaatggctgatattgctgaatcactatggcggtgctttcttaaacataatccttctaatcctcaatggattaatagggatcgttttatactttctaatggtcatgcttcaatgctgctttatggagtattacacctttctggttatgatttatcaatagatgatattcaaaactttcgtcagcttcactctaaaacaccaggccatcctgaatataaatgtacaccaggtgtagaagtaacaactggcccattaggtcaaggcttagcagtagctgttggtatggcaatggctgaacgtttattagctacaacatttaatcgtgaacactttcctattattgatcattatacatatgtttttgtgggcgatggttgtctaatggaaggtatttctcaagaagcttgttcatttgctggaactcatcaccttggaaagcttattgttttttatgataataatggtatttctatagatggaaaggttaataaatggtttactgatgatacacctgctcgatttaatgcttgtggttggcatgtcattcctaatatcgatggccataatgcagaagctattgattctgccataatacttgctaaaagtataacagataaacctacacttatttgttgtaatacaatcataggatatggctctccaaataaatcaaatagtcaaagttcacatggtgcaccacttggaaagagtgagtgtgatgctgttagaacagaattacactggaagtcagaaccattccaaatcccagaacaaatatataaagcatgggattgccgtaaaaaaggaactatgcttgaaaatgaatggaatgaactctattcaaaatattgttcaacatacccagaactttcttctgaacttgaaagaagaatacaacacatacttcctgagtgctggaattcgctaacaacatcttacttacaagaaatagaacaaaataaaatagctatagctactcgagtagcttcaaaaaacactttagatattattgctccttgcttaccagagcttattggaggttctgctgatttatctggctcagttggaacaatccatagccacactaagtatatctgcaatttatcatatgatggaaactatctctcatatggagttcgtgaatttcttatgggttcaatcatgaatggcatagcgcttcatggaggatttattccttatggtggaacgtttttagttttttcagactatgcaaaagctgctatccgcctttcagctatgatgaatcagcatgttatttggcttcttagccatgactcaattggtgttggagaagatggaccaacacatcaaccaattgaacatatcagttctcttcgtcttattccaaatcttaatgtatggagaccttgtgatgctgtagaaacaactatagcatgggaaaagtctattgaatctcaaaaaacatcatgtatcactttaagtagacaaccacttacttatcaaagtcgtacaaaagaacaaatatcaaatatacaatatggtggatatatcttatatgaacccacaaaatcaccagagttaattcttattgcaactggctcagaagttgaactagctataacttcagcaattcaattagaaaaagaagggtatgctattcgagttgtttctatgccatgtacatccatttttgattcacaaccaaaagaatacaaagaattagtgcttccaagtactattcgaaaaagaattgcaattgaagcagctataactgactattggtggaaatatgttggatttgatggtgatgttgttggtatagacacatttggagagtcagctccagcccaaatattattttctcattttggctttacaaaagaacatattatttctaaagctaaaaacttattacaaaaatag

SEQ ID NO: 9120 - DNA, 1125 bp, Lawsonia intracellularis
atgataatgatgttagatcctattgttcgttcattaaactatatttcagaacaatctcaaggacatggacgaattattatgttatctgcatcaggaaaaccatttacacaaaaatttgctcatgaacttgcaaaagaaaaaaccttaactattatatgtggacgttatgaaggtattgattatcgtttatcagagctttttcctatagaatctattagggttggagaagctgttattaatggtggggaagctgcggctatgatgcttatagaagcaacatctaggctacttcctggatttataggaaaagaaacatcttatacagaagaaagtttttcaaataatctattagagtatcctcaatatacccgtccagaattatatgaaagtatatctgttcctaaagttttacttgaaggaaatcatcaaaaaataaaacagtggcaacgaaaacaatctctcaaagtaacatttaatacctgtcctgagatgttaaataaagctaatctctctacttcagatatggagtttttttgtaataatataaaagaactggctagattaaatttaggacgaaaccttcattgtgtattgttgcactatcctgttatgttaggagatcaaacaattggtgcgacatctttgacaaacctagatgttcatgatatagctcgttgtgctaaaacctatggattaggtagtgttactatagtgacgccgcttcaagatcaacaaaatattttagaaaaaattattacacattggacagtaggagcaggaggaaaatcaaatcctgatagagcagaagcttttaagcttgtgaatatagcatcagacttacaatcatccctagatactattgaaaattatacaggacaatccccattacttattggaacaactgcctgtaaatatggtgtgttactaccttgtgatgtaaaagaaatgctattacaacaaccaattgctcttctttttggtactggtcacggtcttacaccagatactttaaatagttgttttggagtattacgtccattacgatggatagataactataatcatcttcctgtacgtagtgctgttgccataactctggacagaattttaggtgatttttactaa

SEQ ID NO: 9121 - DNA, 348 bp, Lawsonia intracellularis
atggacattttcaaaaaaattgaacgtgaacaaatgcgactagatattcctagttttaaatcaggggacactataaaagtttattttcgtattgtagaaggggagaaagaacgaatccaagtttttcaaggaaatgttattcgtattcatagaggtacaaccaatgctactattacagtccgtaaaatatctgacggggtaggtgttgaacgtattgttcctcttcattctcctttggttgatcatatagaagtcgttagtgagggacgtgtccgtcgtagtcgactttactatcttcgtaatcttagagggaatgctgcacgcattaaacccaaaaaaatttattaa

SEQ ID NO: 9122 - DNA, 675 bp, Lawsonia intracellularis
gtgtttcaaaaaaaattaaaacaacaacagatagttgttaaacaaagcttaccaataactccccatgagctagtatatgataacttatctttactcactgcaggtcttgatgaagttggacgtggatgccttgctggaccagttgttgctggagcagtcatcttaccagacactatatcaatagatggacttgctgattcaaaaacaatctcttctaaccgtcgatatatccttgcaaaaaaaatatatgaaactgctattagctggggtattggagttgtttggccaaaagaaatagacgaaataaatatcttacaagcaagtcttaaagctatggctcatgctgcaactgtattaaaaacttttccagaacttcttcttattgatggcaacaaagctatacctcaaaaattttttatccaatttggttggaactttttaccaatacaacattctatcattaaaggggatgctagtattccagccatatcagctgcttctattattgcaaaaacttttcgcgatactttaatgtctaaacttgataaacgttatcctcaatataatttttctaaaaataaagggtatggctcaaaaacacatcgagaaatattacaaaaaattggcccttctcctattcacagaatgacattcaaaggcgtcacttctcactag

SEQ ID NO: 9123 - DNA, 399 bp, Lawsonia intracellularis
atgaaatcttgtgaaattggacaacaaggagaatctgcagctgcattattcctatataataaagggatgagtattttagaacgtaattggagaaaaggtagatttgaaattgatttagtttgtcaagatatcaaaacattggtatttgttgaagtcagaactagaaaagcaaaaggaatgctactacctgaacaaacattaactatatctaaacgttgtaatattattcatagcgctcagttatatcttatggataaaaaagattggagtatgccttgtcgatttgatgtaatttgtattatatcaaaaaaaacaaccctagaattggaacactataaaaatgtctttgaattctacgaaattatggatagtagcaacacctcttggcaaccctggtga

SEQ ID NO: 9124 - DNA, 831 bp, Lawsonia intracellularis
atgtctttgaattctacgaaattatggatagtagcaacacctcttggcaaccctggtgatttgtctattcgtgcaaaatctgtattagaatctgttgatattgtccttgctgaagatacaagacgtgctggattgctttgtcagcattgtaatatagtagttaaaaaatttcttagttttcatgatcataacgaagaaaaaaaacttaaacctcttcttacaatgttatctagtgggaaaacgttagccttaatttctgatgcaggtatgccaattataagtgatcctggatattgtttagtaaatgcctgtagaaaagcttcaataccagtttcagtagttccaggtccttcagcaccaataactgctcttgtaggttctggaattataccacatccttttacatttttaggatttttgcctagagatttcatagaacaagaaaaaattttttcttcatttattatgctgtcacacacactcgttttttttgaacgtaaaaatcgattaattaatacattaaaaaatgcttatacagtccttggtaatagagaagtatgtattgctcgagagcttaccaaactacatgaagaatttcttttttttaaccttggagaagaagttacatttaaaaacttactaggtgaacttactgttattattagtcctccaaaagaaaaacatataacagaacacagcatattatataaaataataacagaagaaaaaaaatatggtgggacagctcgtgaagttgctaaaagagtacaaacacgtacaatgggctggacgacaaagcagatttacagcatcattacatcaaggagctaa

SEQ ID NO: 9125 - DNA, 468 bp, Lawsonia intracellularis
atgtctgctaaaaaaaatagtcatcttgtatttgaaaatagaaaagctagacatctttatgatcttcttgattttcttgaagcaggaattgttcttacaggccctgaagtaaaaagtttacgatcaggccatgcaagttttcaagatagttatgtcgactttaaacaaggtgaaggatatattgtaggacttcatatccctccatataataatgcaggttatgttatacaaaatcctgatagacctcgaaagttacttttacatcggcaagagttgaagatgttagcttcaaaagtagagcaaaaaggacttacaatagtaccattaaagctatactttaaaaatagaaaagtaaaaacagaaattgcattggctaaaggacgaaagttatatgatcatcgtaacgaactaaaaaaacgtgcagaagctatggatattaaacgtgagttagctgctcgtcatttataa

SEQ ID NO: 9126 - DNA, 1683 bp, Lawsonia intracellularis
atgagtagtgaagcagaaaaaattatttattctatgattcatgtttccaaacgtcatgggcaacgtgaagtattaaaagatatatctctttcatatttttatggagctaaaattggtgtacttggactcaatggttctggtaaatcatccttactaaaaattcttgctggagtagatcagtcatttgaaggagaaacagttttatctccaggttatactattggataccttgaacaagagccacttatagatgaaacacgtacagttcgtgaagtagtagaagaaggagttcaagaacttgttaatctaattaaagaatttgaatctattaatgcaaagtttgctgagccaatggaaccagaggaaatggatgcccttattgaaaaacaaggtaaagtccaagaacttatggatgcaaaaggagcatgggatcttgactcaaaactagaaatggctatggatgcattacgttgtcctccaggagatacacctgtttctgttctttcagggggagaacgtcgtagagtagcactatgtagactattattacaacttccagatatcctcttacttgatgaacctacaaaccatttagatgctgaatcagttgcctggcttgaacattttttacaaacttttccaggtacagttattgctgttacacatgatcgctattttcttgataatgttgcaggatggatacttgaacttgatagaggtaaaggaatcccatggaaaggaaattattcttcctggttagaacaaaaagaaaaacgactagcaaaagaagcaaaagcagaaaaagaacgaataaaaacattagcacgtgagttagaatggatacgcatgtctccaaaaggtcgtcaatctaagagtaaggctagaattcatgcatatgaagctatgcttaaccatgaaagcgaaaaaagagctcctgatttagaaatttatatcccaccaggaccacgtttaggaaaaactgttattgaagcaagaggtacaacaaaaagttttggagatcgtctccttattgaagatgcacattttattatcccttctggcgcaatagttggtattattggtcccaatggagctggtaaaacaactcttttcaaaatgattgcagggttagaaaaaccagatactggtgagtttcttataggggatacagtagtattaagttatgtagatcaaaatcgtgaatcattactaccaggtaaaacagtatatgatattattagtggtggccaagaagttattagacttggaaatcgtgacataaatgctcgtgcctattgttcacgttttaattttataggttcagatcaacaaaaaagcgttgatgttttatcaggaggagaacgtaatagggttcacttagctaatatgttgaagtcaggtgctaatgtcattcttcttgatgaaccaacaaatgatcttgatgtaaacacaatgcgtgcacttgaagatgggttagaaaactttgcaggttgtgtattagtgattagccatgatcgttggtttcttgatcgacttgctacacatattttagcttttgaaggtgattctaaggtgtctttctttgaagggaattattctgattatgaagaagataaaaagaaacgtcttggaaaagctatggagcaacctcatagaataaaatttagaaaattaacacgttaa

SEQ ID NO: 9127 - DNA, 921 bp, Lawsonia intracellularis
atgggacgtgatatagcagaatcttcaaaagaaatgatgagcctttgggaaaaagcagaatctattagtaaactacctctccgagctgtgtactgggaaagcaatgatacaactttgatgtcagatacacaatatttgcaaccagctttaactgtagtgaatatgtcaatttggcaacaattatctaaacaccttgtgccaggttgtgtggctggacatagcttgggagagtttagtgcattagcagcagcaaaagttttatcctttgaatcagtgcttgaacttgtgtgtttacgtggggaattaatgtcaaatttagaacctagtgaacagggagcaatgattgctattcttcgtcttagccaaactgaagttgaatgtattgtgaaagatgtatctcataacatacaacaatctataacaatcgcaaactataatactcctgtccaatttgttgtaagtggaacaagagaagctatagaagcaactatttcttttgtaaaagaaaaaagaggccgtgctgtattacttcctgttagtggagcttttcatagtccacttatggaaaaagcttcacagaaattttcagaaaaattatctaaaatgaattggtctacaccactataccctatctatactaacagtacaggtactccctttgtagatacaaaaagtatttatgattctattctaaatcaaatgatatcacctgtccattggattaatgttattacaaatcagtggaaagatggtacccgccaatggatagaagtcggccctaaaggtgttttatcacgtatggttactcctattttggaagaacatatatctacaatagataataatattagtgttcactctatagattctttaaaaactcttacttgttttacttcaaataattctttaacattaacttag

SEQ ID NO: 9128 - DNA, 1038 bp, Lawsonia intracellularis
atgtatatttgttttgcaacagttatcttatcgtggagaaaaatgatgtcatctatagaaacactagagcgtaatttagcctttgatcttgtcagagtgacagaggctgcggctatttctgctgctcgttggctaggaagaggagataaaaatgccggtgataaagcagcagttgatgctatgcgtctttcttttaataatcttcctatgatagggactattattattggtgaaggtgaaaaagatgaagcacctatgttgtataatagtgaacaagttggattaggttatggataccctttagatattgctgtagatcctgtagagggaacaaatctccttgcatttggtagaccaaatgctattgcagtagttggagctgctcctgcaggaagtatgtatgatcctggtccaagtttttatatgcaaaagttagttgtgagtcagtcagcaaaaaatgttattgatctagatgcacctgtagaaacaaatttgaaaaatattgctaaggctcttgggaaagatataaaagatctcacggtatttgtattagataaaccaaggcataaacaacttattacagatattcgtacagcaggcgctcgaatacaacttcatacagatggtgacgtcgcaggtgcactattagctgtagatcccagatctgagatagatcttatgataggaacaggaggaactcctgaaggtgttctttcggcttgtgcaattaaaggtattggtggagggatgatcgcaagactagatcctcagactgaaactgaaaaacagtctctatacaatgctggaatagatttatcaaaactacttgaagttgatgatttagtaaaagcagatgatgttttctttgctgctacaggtatttcaggaggctcatttctccatggtgttcagtttcatgggcagggtgcaaccacacactctattgctattagaagtaaaacaggtactgttcgtcacatacaatcttcacataattgggaaaaacttatgaaaatcagttcaattggttataattaa

SEQ ID NO: 9129 - DNA, 1653 bp, Lawsonia intracellularis
atgagagctgagcaatatttgaagacatgtttagaatgtactataaaaaaactaggttatacctggcctaaaaaagcagttatagaaatcccccaaaatacattgcatggcgatcttgctacaaatattgctttagtccttgcaaacaatataggaataaatccaaaaaatattgctgaaaaaattgctgaaaagttgcagcaagaaagtacctcattttcttctgtatctgttgcaggaccaggttttctaaatattacattttctccaactttttggcaaaaaactattaatcatatcctctctaaaggaagtagttatggctcttgccaattaggaaataaacagaaagtacttattgaatatgtttctgcaaatcctacaggccctttacatatagggcatggaagaggtgctgcaataggagatacccttgcacgtcttctacgcttcactggatataatgttactacagaatattatatcaatgatgcaggaaggcaaatgcaattactagggttatctatttggctaagaattaaagagcttagtgggatacaagttacatggccagaagaatattataaaggaacgtatattattgaaattgcaaaagcattattagaagagcagcctgatatcatctcatatacagatatagatggtgagcaggctagttttcactttggtatgaatgtaatacttaacggtattaaacaagatcttaaaacatttaaagtagaacatgaagaatggttttcagaacgtacattaataaaaacaaatgctattgaacaaactcttaaagctttagagtgtacaggacttacattcgaaaaagaaggtgctctttggttccaatctactgtttttggtgatgataaagatagagtccttcgtaaatcagacaaatcgctaacttattttgcattagatattgcttatcattacacaaagtataatagaggatttgatagaatcatagatatattaggtgcagatcaccatggatatattgctcgtattaaagctgcaatgcaagcttttggacatgatccaatgacatttgatattatacttattcaacttgtaagtttattagaaaatggtattcaagtagcaatgtctacaagggctgggcaatttgaaaaacttattgatgtaataaatgaagttggcgtagatgcagcaagatttatgtttcttctacgtaaaagtgatgctcatcttgattttgatcttgaattagtaaaacaacgtacaatgaacaatcctgtttattatgtacaatatgcttatgctcgtatctgttctattataagaaaagctcatgaccttggctttactattactgatgtaaatgaagttcccttatcaaatattactacaaaagatgaactcaacttattacgcctattagataagtttgaagatgtcatttataatgctgcacaacaccttgcccctcactatattacacattatcttatggaacttgcaggagaacttcatagttattatgcaaaatatcctgtattacaatctaatgaaaagactatagttctttctcgtcttgcattactacaagctgttggacaagttatttataatgcgcttaatattcttggtgtaacagctcctaaaaatatgtaa

SEQ ID NO: 9130 - DNA, 777 bp, Lawsonia intracellularis
atgtcatataaaccaatatccaaaaaaatagtaagaccaaaaaagtatagttctcacacgacacctacttgtttctctttttcgattagtattccaggattatgtgtaatactttttataagtattatggcattaagctggagctttgtttttggaatactcataggaagagggtacagccctaaccataatctttctgaaattaatcaactcatcaatgatacatcatctgagaaccaaattgaaaaacagcctattttaaagccagaaaatctacgtttcatgcatgaactcaaacaagataataatcctactctatataataaagaagaaaaaaaaatacataatttatctcaagaaatagatacaaatcttcaacatagtcaaataccttcttcacacccacaccaagaccttaaacaaaaaaaagatatatcttctgaaacaaaaaatatacaaaaaaatattaatacaaaagagcaagttcaacaaataacatctcaaaatgatttaatgatatatagttttgtttttcaagtagcttcatttaagaaaaaaattcaagcagaaaatttacgagaaaaactcgaagaagagggttttcgcacacaactagtaacaacaaacgatgaaaaaggtaatatacgttggtatcatgtcagggtactcttgagaggagtgatcagtgatgctataatagccaaagatacctttactcaattaaaacttaaagatacaaaaattatttctcaggagccaaccggaagacatcgctaa

SEQ ID NO: 9131 - DNA, 801 bp, Lawsonia intracellularis
atgttaatggtatttaatcaattagttatattgcttggtcaatggactatcagtatttgtataacacttggagaaatatttttatttctacttgaagggttccgtcaaatatttattacaccaaaattatgctcaaaagccattagacaaatttatgttattggaactaaatcactttttgtcatttctcttataggattatttacaggcatggttcttggacttcaaggatattatgttcttataaaatttggatctgtcggttttttgggttcagctgtatctttaacacttattcgagaattaggtcctgttttaacagccattatgataatagctcgagcaggctcttcaatgacagcagagataggtgttatgcgtattacagatcaaattgatgcacttgaagtgatggatataccagggataggatatttagtttcgcctcgcattgttgcctcactcatatcatttcctcttcttacagctgtatttgatgttataggtataattggaggatatcttacaggagtatgcttactaggtgtaaatgaaggtgcatatttttcaagtattgaatcaagtacaactttatctgatattaatgaaggttctattaaagcattaacttttgctatacttgttattcttatttgttgttataaaggttataatgctcatcgacgtcgagatggtagaggtccagaagctgttgctaatgctactacctctgctgtagttgtatcatgtgtactagttttaattgctgattatgttgttacctcagcaatgttacgttaa

SEQ ID NO: 9132 - DNA, 831 bp, Lawsonia intracellularis
atgccacatatacgtacagcttgggatatccgtttagaacacctctacttaggttatgaaaacaaagcaatacttcataatattaatacagtgattcctggtggtaaaataacatttgtattaggtgaatctggctgtgggaaatcaaccttactccgacatattattggattagctaaacctatttcaggtaaaattctttatggaggccaagacttattttctcttcctacaaaacagtttagaagtatcagacgacgttttggtgtactatttcaagatggagcactcttaggagccttaacacttgctgaaaatgttggccttccattgtctgaaaatacaaacctccctccaactattattagagaaactgttattcgaacactgagtttagtaggattagaaaagtttgcagatttcttccctaatgaattatcaggaggaatgaaaaaacgtggtggactagccagggcaattgtcacagaacctccaattcttttttgtgatgaaccaacttcaggattagatcctataaattcagcacaaatggatcagcttttaattggtatgaaaacccaatatcctgaaatgacattattggttgttagtcatgatcttgctagtgtttctagaattgctgagcatattttatttattaaagatggagcaataattttttctggttcatacccagaactaaaaagttcaaaagatccatacttacaaagatttatagatcgtaaacctgaaaaggaaagtattcgtgtagaagcttcccctattaaccctgctgtgcgtgtggcccttaacgcttggcttgaagagtag

SEQ ID NO: 9133 - DNA, 444 bp, Lawsonia intracellularis
atggtaatttcaaaagaagctgcagttggtttttttgttttaataggtttaatttgtttaggatatttgactattaagcttggcaaaatggaactttttaactctgatggttattcagtttttgcaacgtttacatctgtttctgggctaaaaccaggagctgaagtagatattgcaggtgtaaaagttggacgagtaaaatctatacgacttgataataaattgccaagagctatagttgaacttaatgtcaataacaatatccatcttacagatgatgctattgcctctgtgaaaacaagtggattaattggcgataaatatatcagcatttcacctggaggtacaggagaaccacttaaaaatggtgatgaaataatggatacagagtcatcagtcgatcttgaatcattaataagtaaatatatttttgggaaggtataa

SEQ ID NO: 9134 - DNA, 651 bp, Lawsonia intracellularis
atgtcaatacaaaaaactttctttaactttatatttttctttttaatactacttattttttcaaatcaagcagttgcaacaggtccgacaaaaactattgaaacttccgtaaatgacgtgattaattatcttaaggatccatcatactctaatcctcaaacacatctccaagtaaggaataaaattgaaaatgaagtaagaaaagtatttgattttagtgaattttcactacgtactgtgggtttaaattggaactcattcacaacttcacaacaagaacggttcaataatgcgttctctgatcttttacttgccacatatcttgataagattgatggatataatggagaaaaagtaacatatacaaatgaacttatttcttctaaaggagaccgagcagaagtccaaacagtcattaatttatctgatggtagaacaatacctgttgtatatagaatgatgtcaaaaaagaatacttgggttgtttatgatgtaattattgaaaatattagtttaataaaaaattatagagcacaattccaagatattcttatgaaaaataaacctgaagaactcattcaaaaagttgaggcacgagcaaaagaacttcacaatgcagcatcagtaggaaatagtaagttaggacaataa

SEQ ID NO: 9135 - DNA, 897 bp, Lawsonia intracellularis
atgttctcacaacaactacgaacctatgattttatcatttttattataatcataatgattataatacattttttttgcttaccagcacatgcaaaacatctccctccaatagagaataaaagttcacaatctcaagaactacaatcaaaaccaggatgcaaaccttcaacatcttcaaaaataaaactgagtgatagtgactttgaagattatggtatatttgaagactatgatgaactttgcgataaaccaataaaagaccctttagaaccttggaatcgtttttggttctattttaatgatttcttctacttacgaattaccaagccactatataaagggtatgaagttattactcctgaatcgttccgtcaaggttttaaaaatgttttatataatctccaaactcctatcagattgtttaatagcctattacaaggaaaaattggacaagcttggattgaactaggaaaatttatggttaattcgactataggttttggtggatttattaatataacacaaaaagataaaccacttattcctatagatcctgatactgctgactttggtcatactcttgctatatggggatttggagaaggaatctaccttatttggcctatacttggaccaagtacaattcgtgatacttttggtactataggagatgcagctgtaggtccttttgcatggtttgtaaaaccaataggtattgttcctctagaatatggactcacaactgaactctttttaacttttaacaaagttaacacagttattgattcttatgaaagcattacaaaaagtgctattgaaccatatgttgctcttagagatgcatatgtaaaatatagaaggctaaataatggatgtatatgccgtgttcaaccttaa

SEQ ID NO: 9136 - DNA, 2682 bp, Lawsonia intracellularis
atgaatgaatcatctcaccgtataacaccaatgttagagcaatatcttagtataaaaagtaattatccagacacattacttttttatagaatgggagatttttacgaacttttctttgaagatgctgaaactgcagcaagggagttacaaatagctcttacagcaagaaatcctcgtgctgaaaatcctgttcctatgtgtggtgttccatggcatgcagcagatagttatattcatcaacttattcagaaaggatataaagttgctctttgtgagcaaacagaagattttcgtgaatcaaaaggacttgttcaacggaaagttacaagagttttcacttctgctacaactacagaagaaacaagtttagatcctaaaacacatacatatttaggagcaatgtattgggatgaggaggttaatattggtgcattttgttgggcagatgtttctacaggattatggactggtatacaagtaaagaaaaaatctgagctttggcagtggatacaaaaaatacttcctaaggagcttttatttcctgaaaaatatgaacttcctgctacagcaaagcttatagaaatacaatttgttccactaccgtataaaactcattttgaatatccacaagcagtaaaaagacttttacaagctcagggtgttgctgacttagaagcacttggtcttgaaaagcatacaatacttgttcaagcttgtggagcattagttgcttatcttgaacaaacacagttacaagatgtaaatcatttaatgccttttaaacctttagatattgggaaatatgttattcttgatgaaataacagaaaaaaatcttgaacttttcaaaagagttaatggaaaaaagggagttggtacacttattcatgttttagatcatactttgacccctatgggggggagacttcttgaggaacgacttcatcacccctggagagatattacaactattttagaaaatcaaagtgtattggaatggctaatattatataaagaaaatatgaagaaacttcaagacgcattgaaagctatctatgatctagaaagattatctactcgtattgtattaaatcgtacatctccaaaagatctccttgcattaaaaaatacacttcttatcttaccaagagttaaggatgcattaatagtagaaataaatgttaaagataatagatatattacgatagatgaatctatcttatccacaatgccaacaattttaagacaattattaacaaagtgggataatatatctgactatgctgaaaaacttgataaagctcttgatgaaaatccacctaattctattgttgaaggtgggttatttaagttaggttttaatgctgaacttgatgaacttatggatttattagaacatggagaatcaaaacttcaagctttacttgaaaaagagcagaaggtaaataatttaccaagacttaaaataggatttaatcgtgtttttgggtattattttgaactcacaaagtctgcaggcaccccaccctctcactttgtcagacgtcaaacgttagctaatgcagagcgttatactacagaagaactgaaagatttggaggagcgacttctttcagcaacagaaaaacgtaatacacttgagtataaactatttcaaaaattacgtgaggaacttgtttctatccgtccaagaatactttttatggcaagtcttatagctcaacttgatttatggcaatctttggcagatgtagctatacgacataattggaataagcctaccttattaactaataataatatttttattcgtgaaggtagacatcctgttattgaatctattattggtaaatccgtttttgttcctaatgatcttgttatggatgaaacaagaagaatgcttttgattactggtcctaatatggctggtaaatctactgtgctgcgtcaaacagcaattatttgtttattagctcatatgggatcctttgttcctgctacagaggcacagattggtatatgtgatagaattttttctcgtgttggtgcttcagataatcttgctagaggacaaagtacatttatggttgaaatgatggagacagcaagaattcttagacaagcaacgtcaagaagcttagttattcttgatgaaattggtagaggaactagtacttttgatgggcttgcacttgcatgggctgttgcagaagacttagtttgtaaagatcatgatggtgtccgtacattatttgcaacacattatcacgagttaactgcacttgaagaaaaattaacaggtgttcatacaatgactatagctattcgtcattggaatgatgaacttgtttttttatatagattgatccctggccctgcagatagaagttatggtatcgaggttgctagacttgcaggagtacctcagtcagttatccaaagggcaaaaattattttaactcaattagaacaaacacaccaacaaccccgctccttactgaatttgttacctggtgtagtacaaaatgctaatgaagaactaagcaaacaggatgttaaggtagttgaacatcctgttgtcaccttattaaaagaaatgaatccagagacacttacaccattagatgcacttaaatctttagttgaatggaaattattatatggaacgacacatgcaacataa

SEQ ID NO: 9137 - DNA, 501 bp, Lawsonia intracellularis
atgcatataatgcaacctctatgggctccttggcgatctgaatatatttcgcgtaagaaagaagataagtgtgttttttgtatatcagatataagtgtatctgacgatgaaaaatatttaatactgtataggggaattaatacttttgttatgatgaataaatttccttatattaatggacatgttcttatagcacctttacgccatataagtgaatttgagttactcacagatgaggagtcatatgaacttatgtttttgttaaaacaatgtacaagaattcttagagaaaaattttgtcctcaaggagttaatattggcttaaatcttggtgaggcagcaggcgctggtatttgtgatcatctacactttcatgttcttcctcgatgggttggagattcttcatttatggctgtacttagtgaaacaaagattatttctgaacacattacttctacttataataaacttaaaccactcttttctacgatatcactttaa

SEQ ID NO: 9138 - DNA, 1674 bp, Lawsonia intracellularis
atgtttgactattcacttgatactatactcatctttcataatcaaacaaaacaatgtatagggtatattgataatattacagtctcaaaagctatttcttatggattaggcgatcaacctgtgaaggaatttatgaatagtaatatcatcacagccacgccaacaacatcaattgaagaactttttactatttttactgagactcaacagccgattatccctattattgaaaataatatagtggctactactatagataaagtaaggcttttaaggttgtctcagatagataaaagtaatttatttgaagaaacttctatagatgaacacctatgttatctagacatgttaacgttacttcaatcaaatctttctactaccttattcaagttattaagtgaggtaggaaaattgggtgattttttgcatgtgaatgtatacgtagttggaggggttgttcgagatatcttacttaataatttatctatagtagaaaaaacagatatagatattgtcgttgaaggtgaatctctttcttttgctgaggcattagctaaaaagcttaaaggggttgtaggttatacccataataaccttatgactgctaatgtgaggtatccttttacatctgagaaggagtgctctattgatatagctacagcacgccttgaatattatgctatgcctggagctcttcctttagttgagcctacatccattgagcaagatcttttcagaagagacattactataaatgcaatggctcttcaacttaaccaaaaatattttggaaggcttattgatcatttccatggacaaaaagctattcagaataaatctattgatgtcattcattctttaagttttatagaagatcctacacggattattagagctattcgttttgaacagcgctatcaatttaggataagccagcaaacagaaaaatatatgcattatgccttaaagtgtaatgtaatagaaaaaatctttggtcaaaggttgctacatgagtttgaaatgatttttaaagaaaataaacctgatgcttgtattattcgaatggatgaacttggtgtattaacagcaatagataaacgtttttctcttacgtcaaaacaaaagacacttttttataacatttccaacatattacaatggtatcattccttgaatttgactgaaaatcagccagatataatgattatttatctcacagctatgtgttcttctctttcacaagaacaaattatagctctgctccaaaagataggagtagaatcagcatatcaaaaaaaaatagctttaactctttctatggctcaagacatggatagtactctttgttgccttttacatgaaaagaaaattgaaaaagaaggaccagtttctactatatttactttactttctaagctaactttagaagtattactttttcttcaagctttttcttattcctcctctgtaacctactttatttctcaatatatctcattatggagatttattaagccatatattactggaaatgatttaaaaaaacttggacttgtaccaggcccccaatataaagttattttagaagacgttcttaaacaaaaacttgatggcaatgtacatacaaaagaagatgaattagactatctttgtttgaggtataatttatcttag

SEQ ID NO: 9139 - DNA, 921 bp, Lawsonia intracellularis
atggatacaatattttctagtcagcttgcttggaaatggcttgataagcttatcagtgaaagaggcctttctcataatacaatccaagcttataaacaagatattgatgttttttatttattttttcaagatgctggatgtaactttaactctattgatgacgaatatattatgttatttattatatggttacgaaaacgtggagactcctctagaacactagcaagaagactttcttctataagaaatttttttcattggtgtgttgaagaagatattcttttgtcaaaccctgctctgcttattgatggaccaaagctaccatctcttttacctaacatattgtctcaagatgaaatgttaaggcttcttactacacctgatataacaaataaattgggatttagagataaagttattcttgaacttctttatgcttcgggaatacgagtatctgagttaataggagttcatgtattagattttgatcaagacaaaggcattatcaaagtttttggtaaaggaggtaaagaacgatacattccactacactcttctgctatgaaacttcttattcattatgtccaaaaaattcgtcctatgtttactcctatagaaaagtttctttttctaaatagatctgggaaaggacttacaagacaagctatttggaaaattatcaaacgttatgcattattagctagtatcaataagtcaatatctcctcatacatttagacatacatttgcaacccatcttcttgaaggaggtgctgacttgagatctgtccaactacttcttggccatgtagatatgagtgcaactgagctatatacacatgtacagtcagatcgtttaaaatatatccatagtatgtttcacccccgttcaaattatgtctctagtgagataactacatga

SEQ ID NO: 9140 - DNA, 552 bp, Lawsonia intracellularis
ttgttaaaatgtatgaagaaaatactaaaaataaattctaacatgactaactataaaacatcatatataagtctaggaacaaatctaggtaaccttgacgacaatctaaaagaagcaagaattagactaaatactaataacaaaattatacttaataggatatcccctgtctataacacagaagcccaagataattgtaatcaaccatggttcaaaaaccaaatcatccaattagccacaatagatctgacacctcatgaactgttagatatacttctaaatatagaaaccagtatgggacggatacgaagcaatgatccagaacaacgttatggtccaagatgtattgatttagatttattattatacgaacaagaaacttataatgataaaaaactttgcttacctcatccaagaatgctgcaacgtgcctttgtacttgttcctctctatgacattaatccagcacttgcatttccgaatggacaaacgctaaaagaggcattgaaaaatatttcatatagagtagaggataattttatctaccaataa

SEQ ID NO: 9141 - DNA, 2031 bp, Lawsonia intracellularis
atgtctaacttactttttacaataaaaacacaatataaacctcaaggagatcaaccagaagctataaaacaaattgtttctaacatccaatctggagtgaaagatcaagttcttcttggagttacaggatcaggaaaaacattcactatggctaatgttattgctcaatgtaaccgtccagcacttattcttgcacctaataaaacactagcagcacaactttataatgaatttaaagaacttttcccatacaatgccgttgagtactttgtaagctactacgattactatcaaccagaagcatatgtaccatcatcagacgtatatattgaaaaagattcatctattaatgatgatattgataaacttcgtcatgcagctacacatgccttacttactcgacgagatgttattatcattgcatcagtttcctgtatttatggacttggttcaccagaatattatgcacgacttattattcctgtggaaaaaggccagcagattaacatggatgaaattattacccgcttagtagatattcaatatcaacgaaatgatatggactttcatcgtgcaacatttcgtgttcgaggtgacgttctagaaattattcctgcatatgaacatgaacgtgcattacgtttagaattttttggtaatgaaatagaagaaatacgagaaatagatcctctaacaggagaagttcttggtaatgttggaaaaacagttatttatcctgcaagtcactatgtatctgatcgagataaccttattcgagcaatgacagatatccaaaaagaactttgtgagcgcttatatgattttcaagctaccaataaactagtagaagctcaacgtcttgaacagaaaactcaacttgatttagaaatgatccaagaatttggatattgtaatggaattgaaaattattcccgtcacttggatggtcgtaaaccaggagatcccccatctactttactagactacttcccaaaagattttcttttctttattgatgaatctcatattgctatcccacaagtaggtggaatgtttaaaggtgatcgttctcgtaaacaaacgcttgtagattttggatttcgtttaccctcagctcttgataacagacctcttgagtttcacgaatttttaactcgacttaatcaagtcatttatgtttctgccacacctggaccatgggaactagatcgctctcaaggcattattacagaacaaatcattagacctacaggactattagatcctgaaattgaagtacgtcctattaaaggacaaattgaaagtttacttgaagaatgctaccaacgagttaattcacatgaaagagtattaataacaacacttacaaaacgtatggcagaagatttaacggactaccttaacaatatgagtattaatacccgctatcttcattcagatattgatactttagaacggatggccattataaaatcattgcgcacaggagaatttgatgtcctagtgggtattaacttattacgtgaaggtcttgatatcccagaagtatctttagtagctatcttagatgcagacaaagaaggttttttacgctctacaggttctcttattcaaacgtttggaagagctgcacgaaatgtttctggaaaagttatactttttgctgatactatgacaaaatctatgaaagcagctatcgacgaaacacgacgacgcagagctctccagcaagaatggaatacaaaacataatattactcctaagaccatccaaaaatctgtagttactccttttgatatgatatctgcaaatacttcttcaaagaaaggttgtagaaaaaataaacattctatggatacaaaagaactttttgttattacagataaaacatctccagaagatattaccaaatatattaaacaactggaatacgaaatgaaagaagcagctaaagaacttgaatttgaaaaagcagctgtattacgtgatcgaattaaagttacacgtgaacaatttttactcatgagttaa

SEQ ID NO: 9142 - DNA, 2049 bp, Lawsonia intracellularis
gtgtctataaattcacctcaatattctttaccttctaaaaaagaaaaacaacgtgtaagagaacttcgcaaatttattaatcatcataattatctttattatacacttgatgatcctgaaatatcagatagcgaatatgataaagcatttcaagaacttctaacactagaaaatacatttccatctttaaaaacaaataattcacctacacaaaaagtaggaaataatattctaaaaaaacttgaagaacaaccacataggcaacgtatgtatagccttgataatgtattttctaatgatgaatgggaaggattcttaaaaagacttgcaaatgcacttccagaagtaccattctcattttggtgtgatccaaaaatggatggtcttgccttagagctaatttatgaaaaaggtcaattaacaagtgcgcttactcgtggagatggagatattggagaagttgttacagaagctgtcagaacaatttctaatattcccaaaagattaaaacactctataaatgctccagaacttcttgaaattcgtggagaagttgttatttcacgagcagattttaaaaaacttaataaagaacaagaaaaaaagaaaaaaaaactttttgctaatcctcgtaatgctgcttctggctctgtaagacagctagatccaacaattacagcttcacgtcctctcagattcttagcatatggtataggagaaatacaaccatcatctttaaaatggaatacataccatgaattaatgtcatacctaaaagaatatggttttgaaacaccaccaaaaggtaaactttgtatctcatctacagaagttcaatcctattatacaagactacaggcacaaagatattctttacgttatgaaatcgatggaattgtcatgaaattagatgacatacagtcacaagaaaagcttgggtatacttcaagggcacctcgatttgctattgcatggaaattcccagcaacacaagtacaaacacgacttctacagattcatatccaagttggacgtacaggtgtattaacacctgtagcagaacttgaacctattaatgtaggtggagctactataagcagagcaacattacataatgaagatgaaataaaaaataaagatataagacctggagatatggttattgttcaaagagcaggggatgtcattccagaaattgtttctcctattctttcagacagatcagctaaaagtaaacctttcgtctttcctaaaatatgcccagtttgtcatgaaaaagtatatcgtattaataatgaagtagcttggagatgcattaacctttcatgtcctgcgattcgtctacaatctatcatctattttgtatctaaatcaggattaaacattcaaggaattggacagcgcttaatagagttacttgttacttctggatgtataaaaacacctgcagacttgtttactctcactactgcagatttactaacatacaaaagaatgggagcaaagcttgctgcaaagactattcaagctctttctttagcaaaacaaacaatgtctcttcatcgtcttatttgtgctctaggaatcagacatgttggagaacaaacagcaaggatattagcttcttcattcatagatttagatgcactatcttctgcatctttggaagatcttcaacaattatcagagattggtcctgaagtagcaagttctatccaagccttttttaaaaataaagcaaatattcaaatgataaaccaatttcgagagatgaatatttggcctatacaacaagtaaatgatacaaccacaaaaggtttttttacaggtaaaaaacttttatttacaggaactcttgaaagaccaagagctgaaatgaaacgcttagctgaagaagcaggagccattgtaatgacagggatatcacataagttagactatgttatagccgggaaaaacccagggtcaaaacttaacaaagcacaagaattacatatttctattcttgatgaacctacatttttacaaaaacttttaatagttctttaa

SEQ ID NO: 9143 - DNA, 777 bp, Lawsonia intracellularis
atggatctttctatcattgttattggcgcttctggtcgtatgggaaaaacaattattcaagttgcacaggagcaaggtattattattgatgctgtaatagatcgtcctactcgtctaacatctttagcatcatataatatagctagtgatagtgaacctgataaaattttttcaaggtatcctcaagcagttgtcattgattttaccacaccagaaacatctatatctatggctcaagttgctcaaaaatatggtaatcctattataatagggaccacaggatttacactagaacaatttgatacacttgaaacattagcaaaaacatcccgaatcttttggtctcctaatatgagcattggcattaatgtactacttaaaactttacctcaaatggcacaaatcttaggaaatgaatataatatagagatagtagaagtacaccataataagaaaaaagatgcaccaagtggtactgcaatgagaatagcagaaacattaagtacttctcgccattgggaccttgaaaaagtagcttgctataatagagaaggtattgtaggtgaacgacctcaagagcaaattggtatacaaacaatccgaggaggagatgttgtaggagttcatacaatatactttattggaccaggtgaacgtattgaaataacacatcaagcagattctcgaaaaaactttgcacagggcgcattaaaagctgcagagtggatcataaaacaaaaagcaggaaggctttataccatgatggatatcatataa

SEQ ID NO: 9144 - DNA, 1578 bp, Lawsonia intracellularis
atgaatacaaatatagctctattacaattacatactataacaggagatattatagcaaatacacaaaatattctgcaacaagtaagtaaagcaaaaaaagatggagctacagtatgtatcactcctgaactcagtctctgtggccatccagacctgcatgaaataccaacaataatttctacctgtatcaattctcttcagcagatagcaaaagagtgtaatggtggaccatcgattattgtaggaagtattgaaacaacacctactaatatatataataccacttttcttatacagaatggacaaatccatacactatgcaaaaagccttttactcaattttatccttctataaaaaaagaagagtatattctaattaataataataataataatggattctgttttactagtataaataaacagttattccttatagttacaggatataaaacactaatcaattatgtatgtaataaaataatctatcaaaacgaacaattaaagaaagtagaagctatactttgtccttcttcagaaccatttattgcttcgcaaatccctcattttttttatgagctaacgtcaatatctgaccaactaaataaacctctatatttttgtaaccaagcaggtgaagacaaaaactatatttttttaggaggtagtcaatgtattaattctcaagaaacaaaaaacaatcaatctctactttttcaagaaaattacatagttgtaaaaaatcattcatctgtttctttaaaagatatgtcctttaactctaataagttattatgggaagctcttatccatggaatccaacagtatgtgaaaaaaaatggattttcagatgttgttttgggactttctggtggtatagattcttcaattgtagcagccctagcggtagaagcattgggagaacatcgtgtacatggtatattaatgccatctccttggtcaagcgaaggaagtataactgatgcagagctgttagctaataatttagatgtaaaaacatatttgcttcccattcatacattaatagatagttttactcatagtctttcagaactttttataggatatcccccagatgttacagaagaaaacattcaatctagaattcgaggggtacttcttatggctatttctaataaatttggatggatggttctatcaacaggaaataaatctgaacgagctgttggctactgtacattatatggagatacatgtggtggtcttgctcctataggagatctatataaaactgaagtttaccacttagcccaatggtataatcaatcaaaacaaaaagacattattcctactagtgtattaacaaagccaccatctgcagaactccgtccaggccaacttgatcaagatagtcttccaccatataaagaacttgactttattcttcaaatgttactctcaaaaaatccaactaatatagaccaagaacttcttaacaatcctaaactaaatgatataaaaaggcttatacaaaaaaatgcttttaaacgtatgcaaggaccaccaagtcttgttattagtaatttcccattatag

SEQ ID NO: 9145 - DNA, 681 bp, Lawsonia intracellularis
atggaaatacctgtggtacgtaatgttcttgaagtgaatagtaaacttgcagctatgttaaaaaagcaatttgcagagcataatatcttaactcttaatattataagttctcctggcgctggaaagacgtctttacttgaaagaactttaagtgatctttcatctgagtttagaatggctgttattgaaggtgatttacagacagataatgatgcaaaaagagttgctgctactggtgtaaaagctgtccaaattaatacagatggagggtgtcatttagatagtaatatgattatggaagcccttacatctcttaaccttaatgaaattgatatcttatttattgaaaatgtaggaaatcttgtttgtcctgcggagtttgattgtggagaggatgctattgttgccgttcttggtgtaactgaaggagatgataagccagagaaataccctcttttattccatcgtgcaggagtattaattcttaataagatagatctattgccttatgttaattttagtatagagaaagctacacaacatgcacgtaagttaaatgagcctttagagatcattagtctttcctgccgtacaggagaagggttacaagtatggtatgattggttaagagacagcttaagaaaaaaaagaagtattatttccaataaaacagaatcttag

SEQ ID NO: 9146 - DNA, 357 bp, Lawsonia intracellularis
atgcatgaaatgtcattagttacaggtatactttctattattcaggaagaaatgtcaaagaatggagtcaataagcttcaacgtgtaaaggtttgttatggtgagcttacaaatattgttcctgactcattacaatttgcttttaaaatttttactgaaggaacaagtcttgaaggagcaatactagaaatagaaaaaattcctcttatgcttcgatgttcaaactgtttgtctctatttaccccagaagataaacaaaagattttttttattacatgtccttcttgcaaaaaagaggtggcatataatgttgagacaggtcgagaattttatattcaacatcttgaagtagaatag

SEQ ID NO: 9147 - DNA, 768 bp, Lawsonia intracellularis
gtgacaaagggtacttttttaggagtctatgctagttatagtaataagacagctaccaatacaaaaaaggctttaaaacattattggtttgtatgggaagatagcaatggatatctagttcaattattagataatacttatcaacccattgctgaaccacaaactcttcctcttgaaatttttaaaaaaaattttataaatcaacctcacatcctagcagcacctataacttcactacacccatcaagtaaaaataacacagaaaaaactataacaaaatatcacaaacaatataaaactacgcttaatacctctcaggtaaccaaaaacaactttaacgttaaaaaagatatgataatagagcagagtgaacaagtaaaacatattgatactcaacttcgctctgaatttactacggctttagaacgttggaattctggtgataagctagcaccattaaaaacctttgaaggactttcaaatgttcaagaaggtattgtaccagaacataagcatatgtttacagactttggtgtcaatttaagaaaaaatagtttacctaaattagctatacttcattttaaacgtgcagtagagttaagtcctgaagatgctcatgcacactttaatttagcccgtatttgttatgaattaggcaaccttaatgaagcagaacaacacttagaaagagcactttctatttctcctaatttgaatgttgcaataaagtttcttggatttattcatgaccaaaaaaaatactcttga

SEQ ID NO: 9148 - DNA, 651 bp, Lawsonia intracellularis
atgcttattcttgcttgcttagctgcacttgagttcatacaagattttcccaatagctatcaagaagatggacaaatggttacaggaattatttcaaaaataataggctctaactgtgataattcttcaacatctgatataaataataagaaatccatagatagagataaagatacattactctcaagtagtaatagaaatacaatacaagccggtactccacatcaagaaaataacataaaagaagatcttcaactgactaacaaaaatgaacaaacaactccagaagaagaagaagaaagtaaatttatttggttaacagaagctccatcagagcttaaaaaaggagaaaaagctataacacaaacaagattgtctattggtaaggatatatcttttagaattactgctgatgatgccatcaaagctcaatcaatgatgttaaaaaatccagataggtttgttttagatcttcaaggaaagtggggtatttcccttccacctattccacctacaaatccttggttaaaaaaaatacgcttaggtactaataatggaaatacacgacttgtctttgatcttcaaaaaaaaccatctaaaactgaaattaaacaattagatacaaataaaattgaaatccaaattcattaa

SEQ ID NO: 9149 - DNA, 1584 bp, Lawsonia intracellularis
atgatgtttgagtatctacgtattcaaaatttggctcttattgatgatatagaactggaattttccagtggtatgaatgtaatcacaggagagacaggtgctggtaagagttttattttaaaagcaattaattttcttatgggcgataagttaagagtagatatggttcgtcaaggaaaagaacgagctcaaattgaagcactttttgttcatccagaaaaaggagagcttattcttcgacgtgaactttctgctgctacaggaagaagtcgtttttatcttaatgataaactgacgtctcaaaacactgtaaaagaattgcagcctaaattgcttacacatacaagtcaacatggtcaacaaaaattacttcaacctttgtatcaagaaaaaattatagatgcttgggttgaacatccagaactttttcagcaaaaagatatattaattgaagaaattaaaacattattaaaaaagaaggagaagctcatatatcgttgtcaagagattgaagaacgacgtgatttatttgaatcgtatctatacgatatcaacaaagtaaaaccaattcctaatgaagatgaacaattagaattactaaaagaagatattcgttcgattgcaattcttcaaaaaaaacaattgatgattttgcaacttcttcagggggaagaaggaggtttgattaatcatctttctctcattgagaaaaacttagaatgttttctgtctattgatcaaagcatcatggatagtctccctactataattgaatgtagacaacaattgaacgagttagcacaaaaattacaaaaactttcactagttacatcagaaaaaaataaaaatattgaagaaatagaagcacgtttatttgaactttcacaacttaaaagaaagctccatcgaagtttaccagaaattttttcttttaaagaagagattgaggataagttatcttttttagatagttgtgtactagacttacgccagattgaaaaacaatatactatattgatcaaaaaacttcaagtaatacttgagaaaatttatgaattacgaaagaaagctgctaataagttttgtcatgcattaaaagcacagttaattgacttaggtttttcggactatcttaatgtgataatagactttataccatatgaattattttctggatgtgttgaacataaggcccaaatattatgggcaccaaatcctggtcaacctcctcagcttcttgaacgaattgcttcaggaggagaattatcacgatttttacttgcagttgtttcaatacagtcaagtgaagatgaaggtatgcttatttttgatgaaattgatgcaggtattggtggtcatactctttttaaagtcgcagataaattagtaagtcttgctgataaaaagcaattattagttattacacactggccacaacttgcggtcaaggcatctcgtcattttttaattgttaaagatataaatgaaaatataacatttactcgttgtaagcagcttacagattttgaaaaacaagccgaactttctcgtatggctggactaagtttaagcaaacttgattaa

SEQ ID NO: 9150 - DNA, 819 bp, Lawsonia intracellularis
atgaggtttgttcaacaacatataattcttctaataggactcattattgttttatttatggttgttattgctgtttttgcaccactgctagccccatatgatccaacagaattacatcttaatgcagtgcttgaacctccatctaatacgtttcttcttggaacagatgcattaggaagagatgtactttctcgattattatatggagcaagagcctctcttggagttggattcattgctgtaggtattgctgttgtcattggtgtattttttggattaattgcaggttactttggtggtattacagatgaaattataatgagagtagttgatacaatgctttgtttcccctcattttttcttattcttgctgttattgcatttcttgaaccaagtttaacaaatattatgattattattggccttacatcctggatgggagtagcaaggcttgtaagagcagaaacattatctttaagagaaagagattttattgctgctgctaagctttgtggtgcaagtactacacgtatacttcttatccatattctcccaaatacacttactcctgtttttatttcagcaacattaggtattgcaggagcaatattagtagaatcttctttaagttttttaggacttggggtgcaacctccagatcctagttggggaaatatgttaatggaaggtaaagatacacttgaaatagctccttggctttcattttaccctggtttagctattttaataactatccttgggtataacctattaggtgaggggttacgtgatacatttgatccacggttagcacgttag

SEQ ID NO: 9151 - DNA, 1005 bp, Lawsonia intracellularis
atgtatcagtctacaaaatcacttatcttatattttataaaaaaaatactatggatactagtagtcctttggggaatcactattgttagttttattgtaattcacttagccccaggaagtccaacagacttacaaacaacattaaatccaatggctggtgaaactactaaacaaaggttagagtctctttatggtattaatagaccaatatatgttcaatacatagattggttatcaagaattattcgatttgattttggaacatcaatgtctgctgatgcacgacctgttattgtgaagatttttgaacgtcttcctttaacagtatttatgaatgttctatcattagcaatttcattaatgatagctatccctttaggtgtattatctgcatggaaacaggatagtttatttgataagttgataactattcttgtttttcttggttttgctatgccaggtttttggttagccttattacttatgttgtggtttggccttgatctacaatggttccctatttctggaattacatcattagacttttcatatctttctctatggggaaaaattaaagatgttgcctcccacttagtattgccaataattgtcatgactgtaggcagcatagcaggtatttctcgctttatgagagcgtctatgttagaagtgttacgtcaagattttattttgactgcaaaagctaaaggactttctacatggaaagttatttttcgccatgcattaagaaatgccctacttcctgtcattacacttcttggtctttctgttccaggactcattggtggtagtgtcattattgaaagtatttttgctttacctggacttggtcaacttttttatacagctgttatggcaagagattatccattaatcatgggaaatcttgtattaggagcaatattaactcttttaggtaattttttggctgatgtttgttatggcatagctgatcctcgtattcgtcagggagccataagatga

SEQ ID NO: 9152 - DNA, 522 bp, Lawsonia intracellularis
atgagtgaacaatatcttggacagggaatagatattcttctagggcaagagtttcttacttggttatggtttataagtgaaacaaaaccaatgggttttaaggatagtaaaggacaattatttactttttctatggaacaaagagttgttgttcaaggtggagaaggtgaatcgcttgaaacagcaacagtttttggtccttattctcctttaagggaagcacgaattggattacaaacaggaaaaaaagttacacgtgctctactacgttttgaaaaagatgaactttcatggcaattgacacttaaagctgagaatttttcttttggaaactttcaaacaccaaaagtatctttagattctgatgagccagatgctgtttttttagaaaaaatttatcttatagagacatgtctccattttattgatatatgctataaaaattttcttcatgttcgtttgtcttctgaatgggaaatagaaaagaaagaacttatatcttggatttttaagagtgaataa

SEQ ID NO: 9153 - DNA, 615 bp, Lawsonia intracellularis
atgggatttcttcgttcaagttgtagttttacacggtataaaataatagaaaaggtttcttcagaactatggcaaaaaattccagaaaagcttcaacaatatgcctttcaagatattgatgatacaagtcaagagcggtcttggggttggacaaattttgatgatatgcttgatgtaaattggaatataagccatccagaaaaaggagaatatttagcctttgctttacgtttagagacccgtagaattccaccagctgttttaaaaaaacacttagctatagcacttcaaaaagaaaaaaagaatcttcaactcacagggaaaaagtttctttctcaggaaagaaagtcagagttacatgaacaagtacggcttcgtctttttaaacattttttacctatccctgctgtctttgatgttgtatggtcaaccacaactaatatagtatatcttagttctactcatataaagttgattgatttattcacaacttttttcacattgacattcgatttacacttagagttacagacaccatataatttggctgtatcattacttgatacttcttctattattcaaatagatacccttgaacctacaaaatttgtttag

SEQ ID NO: 9154 - DNA, 1128 bp, Lawsonia intracellularis
atgagataccattattctttatcagttattctaaccatacttcttacattttctatggttacgagtacacttgcaattccaaggacagaaaaagatttacagtatattgcaaacaatcttacagagacacctgtaaaatatggtgatattccatctatcactcaacctgaatatatatcagtaaatgatgcaaaccttactcttgaaggacgtgatcctgtatttatagtattcattccaggttcacaaccacgaatctatcctcaaagaattatggtatggcatgaggttgttaacgagtatatcaatgggaaaagttatgtcataacctactctcctatttctggttcaatggctgcatatgagtcaacaatagaaggaatgaatcttatttttgatactgaaggaaaactttttaatagtacaagcgtattaatcgatagaaacacaggaagtctatggagtcaactgataggaatggcctttgacggtccacttaaaggaaaaggattacgatatattgtttcttggtggacaacatgggataaagccaaagagatgtatccaacagccttagtcctagctacaccaagaggaacaaataaaccctatggtagggatccatatggttcatatgtaacccatggcaactattatgacgatgaacgtattgtatatccagtagttcaacaagataaaaaacatcaacttcatcctaaaacaaaggtacttggtattgaaattgaaggcttacccttagctattgatgaagcttatgttaaagagaaaaaagttgttaacttctactttggaccatatgcattagttgctttatatgattctcgattagatatagtgagagtctttaaccgtgaagtttgggataaacaaatattgtttactcaaaatccacaaggacttcttgtagatattgatacaaatacaatatggaactatgatggaatagctatacaaggtaaactaaaagatgcttctatctctgagttctttggtataaatgcattttggttttcttggtatgcttttaatcctgagtctcttcttgtaccaggatcaacggttgtacctagctcagcacttataaaaaatgctttatttctagaataa

SEQ ID NO: 9155 - DNA, 546 bp, Lawsonia intracellularis
atgtttacttttcaacaaatatttcattcattcatattttctcatataatagcattaattgatagtagtagcgttttgatacctacatcaaagattactatttttgatcatactaaatggcatctttatgaaacttctactcattgtatcaaaaaatataggaagatatcttctttgataaagaataatgactctatagagttaaaggaatatcaatctataaagaggaaccttatactatttctttttagttttagtcagacagcaccagaaattcactcagaacttgttgatacacttaaaacattttcctatgcaatacttgttgattatcgtgtgcctgaacgtaacttagatattccttcttttgttataaactatggcctatttttttgtactgcaaagaaaggtttttctttttttcagacgtttataaaaaagaatgctattgaaggaattatttatacatattccctcaatagtattcttagaaagacaatttgtgctgggtctataactatcttgtgtatccagaatataaagtaa

SEQ ID NO: 9156 - DNA, 792 bp, Lawsonia intracellularis
atggatacaagaaagattacagtgcataatctagatattgcatctcataaagcctattttgaatcctttgttaaccaatacataacagtagactcacattatttacttaaactaaagtacgagcatactcagcatgtattagataatgtaaaaatgattcttcaatatgaagagttttctaatatagtgagtaggggagctttattagcggctctttatcatgatatagggagatttcctcagtttatcaagtggagaacatttaatgattgggagtctataaatcatgcaacattaagtgttcaacttttaaaaaagtatggatttcttgaagaagaaataaaaattatacaaaaagtatgtttatcagctatggtactacataatcgtaaattattacctaaacagttagataacaaaattcagctaactgctacaattttaagggatgctgataagttagatatcttgcgtgttgtttcatcacacatggatggtacatcacaaaaaaaagaagtaaccctttttttaaaagatgaacctttaaagtggaaccataaggtaatgcaagatattttggaaggaagaacaccaagttatttagatcttatatatctcaatgattttaaaatggttatactttcttggataagagagttaacatttcctattacaaaaagactatttgcatcttcaagtagcatctctgtattattagacacgcttcctaactgtaatacatttcagaatattcgtaatttatttacaaagatgatagaagaatctctataa

SEQ ID NO: 9157 - DNA, 3510 bp, Lawsonia intracellularis
atgtctaattttgttcatcttcactgtcattcagaatatagccttctagatggtgctattcgcttagatgccctgtgtgcacgtactaaagaatttgggatgcctgctgctgctgttacagatcatgggaacttatttgcagctacacatttctattctatctgtaaagaatatgggataaaacccattattggctgtgaggtatatgtaacaaaagatcatgctgataaactttccaaattttccaaagccaggcatcaccttatcttactagcaagaaataaagaaggataccataatcttgtcaagcttgtaacacgtggatatcttgatggattccactataaacctagagtagataaaacattactaaaacaatttagtagtggtattacagcattatctgcctgtttagctggagaattaccacgtacaattatgggaaaaaacatatttgtagaaaaaggtggtacatttgatgatgccatttctattgctcaagagtacgcttctatctatccaggacaattttacttagaagtacaagcaaacatgttacctgagcaacaaaaagttaatgaaaaactttatgaattagctgaatatacaaacttaccattagtagcaacaaatgattgccattatcttaatgcagatgatgtagaagctcatgatattctcctatgtgttcagacacaggctaagtttaatgatactgatcgaatgcgttttaatgctacagacctatactataagtcatctgaagaaatggagaaagcattctcccatcttccaatagctattgaaaatacaataaaaattgctgaatcatgttctgttgaaatggatttttcaaaaaatctttttccagtctacgagttacctaaaggggtaacgcctgatgatgaattccgacgacttgcacgtgaaggtttacaaaaacgattagaagtatacccaaataaaaaacagttaaccacagaaaactactggaaaaggcttgaacaagaacttgatattatatgtaaaatggggttcccaggatactttctaattgttcaagactttattaactgggcaaaagataataatattcctgtaggacctggtcgtggttctgcaacaggatctcttgtagcatgggcattacgtattacaaacattgatccacttccttacaatcttctctttgaacgatttttaaatatagaacgtattagcttacctgatattgatgttgacttctgtgaagataaacgtggagatgttattcgctatgttatgaacaaatatggtgtaaactctgtagcccaaattacaacttttgggaaaatgaaggccaaagcagtagtgcgtgatataggtagagttttggatatgtcttttaaagagacagataatatcgcaaagttaataccagatgatttgcatatgactattcttaaagcaatggaagttgaaccaaaacttcaagcattatacaatgaagagcctcatattaaaagacttcttgatatctcaatgaaacttgaaggccttgttcgtcatgcttctacccatgccgcaggtgttgtagtctcagataaacctatggatgaataccttcctctatatcgtggtaaaaaaggtgaacttgttactcaatttgatatgaagatggtagaaaaagttggacttgtaaagtttgactttctaggcctacgtacaatgactctcatccatacaactctcaaaacaataaaagaccaggggaaaattcctccaaaccttgatacacttcctttagatgatcctaaaacatatgagcttctttctaaaggagatactgatggtgttttccaagtggaaagttctggtatgcgtcaatacctccgaatgcttaaacccaactgttttgaagatctcattgctatgcttgcactatatcgccctggtcctcttggttccggtatggttgatgaatttattaagcggaaacatggaacagtaacaatcgaatatccccttccatctttaaaggattgcttaaaagatacatatggcgttattgtttatcaagaacaggttatgcaaattgctcaaattgttgcaggatattctcttggagaagcagatcttttacggcgagccatgggcaaaaaaaatcctgaagctatggcaaaagagcgcactcgctttgttgaaggtgccataaaaaataatgttactgaaagtattgcttctgatatctttgatttaatggaaaaatttgctgaatatggttttaacaaatcacattcagctgcttatgcacttatttcttatcatacagcctatttaaaagctcactttacattagaatttatggctgctttattaacatcagaaagtggtaatcaaaacaaaattcttaaatacactgcagcctgtaaagatatgggtattgatatactaaaaccagatatccaaacaagttgccgagaatttatagtaaaagataattctatagtttttggtttatgtgccataaagaatgtaggtgatgatgctatcgagaaaataattactacacgaaaaaaagatggcccttttctttcattactagatatgtcttttcgggtaaacctaaaaaaagtcacaaggcgtgtgttagaaagtctcgttaaaggtggtgcatgtgatagttttggatgctcaagagctggtatgctaacagccttagataaaattattgctagaacatataaaaaaattaaagatgagcagtctaatcaaggctcattattagcatttgcacctaaaatagaatctgtatctcttccagggattggctttacttgtgaagaacaaaatatgcctgaatgggatgaggatgaaaaactgctttatgaaaaagaggcactaggtttctttctaacaagccatccactacaaacatatagacaagaaatttatcgcttaggacttcaaccacttgaagaagtaagagaaatgaatgataaaattactattaaatcagctattattgtcaataatattagagaaattctgaataaacgtggcaatcgtatggcctttgttcgcgttgaagatctcacagcttctgcagaagttacttttttctcagaagaattacaaaaaagtcgtgaattactatcttcaaaccaaccactattactcactgcaactattgattctcgagaatcaacacaaaacgatactattgatgaaagtgacgacacccaattacgatccattaaactcagagcaatttctgtagagagtctatcaagtgcttgccaaaatagtgaactacccatatcctattatgttgataaaaatagacttacaacttctggaatagaagaattaaaagcaatacttgataaacataaaggacaaactgaagtccatctcattttctctcttgataatattaattgtcaagtacgtctcggatcctcttggaatgtttctcctagtccagcatttcaacaagatatgtatcgttggagtatagcaagtgaataa

SEQ ID NO: 9158 - DNA, 381 bp, Lawsonia intracellularis
atgtcaaaaccaacttggcacctaaccgtacgttcagaattttgtgcagctcatgcattacgtcattataaagggaaatgtgaacggctacatggtcataactatggtattaaaattattgtaggaggacatgagcttacttctgacacagagcttcttattgactttacagagcttaaagcaatacttaaagatgtacttgaacctttagatcatagatatctcaataatattcctccctttgatcaaataaacccatcagcagaaaaccttgctagatatatttggcaaaatgttaaaaaacgtctcccaccaaacgtctatatggttcaagctactgttgctgaacgtaatgtccaatctgcaacgtatatggaataa

SEQ ID NO: 9159 - DNA, 249 bp, Lawsonia intracellularis
atgccattatatgatttcatttgtatccaatgtggacacccatttgaagaggtaacacattttgaatctatttctttatcatgtcctaactgtagtagtcagaatacacaacggattctttcagctgctaatataaaaagagttactatatctgactcagactgcaagtctcatttttcaccaaactctataggtggttgtggtagagaagggtgtggttctagagactttccttgtggagcaaattga

SEQ ID NO: 9160 - DNA, 2250 bp, Lawsonia intracellularis
atgaaagatgagcaaaaagaagaaaaagacaaaattatctatacaagtacaatgaaagaaaaaaaacgtcggcatcgtttgtatgaatttcttttagcttttgcgctcattttattaattcttggtggaacatggacacaacttgccttttatggtgttgactcttggatttttattgttcttttaaatattaactccatcttcatgcttatagtgcttttccttgtcacaagaagtattgttaagcttatcatggagagaagacgaaaagtttttggtgctcaattaaggacacgtcttgttcttatttttgtatctttatctcttattcccacagtaataatgtttcttgcttcaaataaagttgtagccacaagtgtagattactggtttactaaaaaagcagaaagctccttacaagcagctcttgatgttggccaaagcttttatgtggctgctgctcagagactaagaacacactctgagtctattcttacaactataaaaaaagataagcttatttggggaggctctggaatagatactttacttcaggacaaacaacaagaatatggattaacgtttataggtattatcaaccctcaaggtatagagcaacattggtatggacaagaaggtacattaagtatctggaaaaaaataagagaacgtattgactggaaccatgtggcaagtaacaattttagttcattactttgggcaacagatcatgcggactacgtttttggtgttcttgctattgataatgggagatctggctatcttattacagcagaaagtattggacaaggattgctcacaaagcttgatcgcatctccaacgggtttgaagaatatacaagcctcaaacagctcaaaaagcctcttaaaatctcattcttactcatccttggcatactgagtatgattatcatttttggttctgtatggtttggttttcgactttcaaaagaaattaccgctcctattctagcattggctgatggaactactcgtattgctcaaggagaacttgatgttagacttatagatgaaggacaagatgaacttggactattaattaaatcctttaatagaatggctaaagatctgcaacaaggtcaaacaaatctcaaaaaagctaatgaacttcttgcagaacaaaaagatacacttgaagaacgtaataaatatattgaaacagtattagacaatattacaactggtgttattacacttgatgtttttgggtatatccttattgctaataaagcagcttgttctatttttaatacgtctcagcattttttaaagggtcgttgtccagctaactttcttcctccccaatataaaaacatcttctattcgatgatcaatcaattacaaaaacatcctgatttacactggaaaacacaagaaaattttattcttggtgatcgccaatggaaattagttatacatgctgtagctattactggaatcgatggcatccaggcatatgttgttgttattgaagatatcacagaactagaaaaaatgcagagaatggctgcttggcgtgaagttgctagacgtattgctcatgaaattaaaaatcctctcactccaatcaaactttcaggacaacgattagataaaaaatttggttctcagattcaagatcctgtttttcaacaatgtacagaacttattgttaaacaagttgaaagattacaagatatggttcaagaattttcttcatttgctaaacttccagaagtaaaacttagttctggtgatattcgtcctgttattacagaattacttgaactttttatacacaaccataatgagatcaagtggaatgtatatattccaaatacacttcctgaaattttaatggatgcatcagcgttacatagagcattgttaaatgttattacaaatgcagtagaagcacttgagtatagtcaaaacattgaaaaaaaatgtatagaaataactataacccatgatcatacaaaagggataatatctataaaaattgaagatagtgggataggtcttgctcccaatgaaagagaacgtatctttgatccatacttctcacgtaaaaaaggtggtacaggtttagggttagctattgttaaagctattattgatgatcataaaggaactattaaagtttttggttcatacttaggcggtttaaatattgaaattgaacttcctatagtaacttcacatgttgattttactcaatcaatataa

SEQ ID NO: 9161 - DNA, 1509 bp, Lawsonia intracellularis
atggcaactgcaagaaaggctgtagtaaaaaaaatgcctgtggggcatggaacaaaaagaggatctatggggaataggacacaaaaatcatccatgagtaatggtgtggtacgtcatgaattattagatgatgtttttgcagaagatgatcttagtcaaaccttacctaagtatcaaatgccactgtatgagcatagacctagagatatttatcaggctgttcatgatgagcttatgctagatggtaatgcacggcaaaatcttgcaacattttgtcagacttgggttgatcctgaaatccataaacttatggatgaatgtgttgctaagaacatgattgataaggatgaatatccacagacagcagaactggaaatgcgctgtgtaaatatgttagctgatctttggaattccccagatccaacaaatacaataggatgttcagctattggttctagtgaagcagccatgcttggtggtatggcattaaagtggagatggagggcacaaagaaaaaaagctggaaaatcaacagataagcctaacttagtatgtggacctgtacaaatctgttggcataaatttgctcgctattgggatattgagttacgtgaaattcccatggaaaaaaatagacttattatgtcaccagaagaagccatcaaacgctgtgatgaaaatacaataggcgtggtccctacattaggtgtaacatatacaggtcagtatgaacctgtagaagaggttagtaatgcattagatgcattacaaaagaagaaaggatgggatattcccattcatgttgatgcagcaagtggaggatttcttgcaccatttattgagcctgagctagtatgggattttcgcttacctcgtgtaaaatctattaactcttcaggacataagtttggacttgcacctttaggtatgggctgggttgtatggagagagaaaactgatttacctgaagatcttattttttgggtaaactatttaggaagtaatattcctacatttgctattaatttttctagacctggaggacaaatagtttgtcaatattataacttacttcgcttaggtcgtgagggatatcgtcgtattcatcaggcttgttatgatacaacagattaccttgccaatgagttgacaaagactggaatttttaaaattttgtatggtggtaaaacaggtataccagctttaacatggacacttaaagatgaaaaaaagtacccatttagtttatatgatctttcagatcgtttaagaactcgtggatggcaagttccagcatattcaatgcctgctaatcggactgatcttgttgtaatgagagtccttgttcgtcatggttttgatcatgatttagccgatcttttagtaaatgatatacatcgtgctattgaacaccttaaacaaaatccaagacgtaagccattgggttcaggtcaagttacaagttatgatcactctggacgttcatctattcctcaaaaaaagaaataa

SEQ ID NO: 9162 - DNA, 1458 bp, Lawsonia intracellularis
atggaaagaaattcagtaaagcatgtaactgttacaactcttgctcttatgacagttgcagctgttgtgagtcttcgtgggctcccaatgatggctaaggaaggcctttcaatgattttttatatcttattttcaactgttatctttttactacctgctgcaatggtatctgcagaacttggaagtgcttttagtagtaagtctggaggagtatatgcttgggtaaaagcagcttttggttctcgatggggctttacagctatttggttacagtggatacaaaacgttgtctggtatccaacagtgcttggatttgcatcatcatgtttagcatatttttttatgtctcctgaactttctgctagtggtacttatactgggattgtcacgctaattgtctattggtgtgcaaccgttgtggctttgaatggatcaaaagcagtaaactctgttgctaaatatggtgttgtatggggaacactgcttccaggagcacttattattgtcttaggtgcactatggatatttcaaggaaatgataatgctttgtttatagaaacaataacattaagttcaggacaaacagttgttgagcatcatcatcctgtgctgtttcctcatatcgtaggtcttggtagtattgcatttcttgcagggattgttcttctttttgctggagtagaggtacaagctgtgcaagtcgtggatatggaaaatccaagccgtcaatttccttttgcaatgcttattgctgctataataatttttattttattcctattaggttcacttgctgtagcttttgtaataccagctgatcaattgagtttaactgctgggcttatgcaggcatttcaagtactttttgctcactataagttaagtattcttacccctatccttggattacttatggcttttggatctattggtggagttatgtcttgggtcacaggaccaagtagaggactacttgctaccgcacaacaaggtgaaattcctccttttttagctaaggtaaataagcatggttctccagtaactattttaataatccaagctattatagtatctattttagcttgcttatattttattatagataatgtaagtgttgctttctttgtattatctgcaatgacagttacactgtatcttgtaatgtatatgctaatgtttgctgctgctatttatcttagaattactcaacctgatcttcctcgagtatataaaattcctggtggaattattggaatgtttatagtagcaggaataggttttttaggagtagcatttgctacaatagtgggttttttccctccaacaaatctacctgttggaaatccagaattatatgtaactcttgttgcatctggaatgatcgtttttattggactgcctttaattataaatagcatgaaaaaactttcatggaaagaacagcgatcacaagaataa

SEQ ID NO: 9163 - DNA, 1272 bp, Lawsonia intracellularis
atgaatatttggaatgttgtttctattggtataggatcaatggtaggagctggaatatttgccctattaggccaagctattcttcttgttggaaaaaatgcttttatttcttttattcttgcaggaattatatctttactatcaggttattcatatgcaaaacttgcatcaagatacccatcttcatctggtattttagagtattataataaaggattttcatcaaaagtgatttcaggaggattttctcttttatacctgtttactcttgcaatatctatttcaatggtagctaaaacttttggtttatatcttgccgtaatgatatctaataactaccaattatctataccagatagttatctttcagacatcttttctacaatcattatcattactattttccttttaaacacaaatattgctaaagaagttggaaaagctgaaacaacccttgttggaatcaaagtaattatcctaagtatattagtcattgcaggtctttcaactatagatattgatatcattattaataaaccatcaagttcttcatttagtataataggaagtgttggattaacattctttgcttatgcaggctttggaatgatgactaatgcttcaggagaagtaaaaaatcctaaaaaaacaattcctagagctatttttattgctatcctttttgtcatgtttctttatactaccttatgtttagttgtacttggtaatattcctttagaagaaataaaaaaacatgcagatacagctattgctattgctgcacggccagttttaggtaatgcaggattctttataatctctgttgtagcgttacttgctacagcttctggtattaatgcaatgatgtttagtgggataaggattgctaaaggtatggctgaaaaaaaacaactaccatctatctttttgaaaaaaacaaaatttataggtaatggtacaattggaatgacatactcaatcataggaattattataataacaaacatttttaacttgcaatcgatagcaaatatggctagtataatatttttgttatgctatttagctgtatttattgctaactggaagcttaggaaagaaactcaatctttaaaattgcttattgttattggtattgtttcaatgtctgctattttactttcatttatatatacaattattcaaacaacacctatgacttctattcttcttttaatatttttagtcttttctttccttttagagtattttttgataaagtatgttacataa

SEQ ID NO: 9164 - DNA, 1251 bp, Lawsonia intracellularis
atgagccttactgaacttaagactatgaatatgccaaagctaatggagcttgcagaggattatactatagaaaatgcaagttctatgaggaagcaagaacttatctttacgcttctgcaggcttgtgcatcacgtagcggtggcatctatggagatggtgtattagaaattttatcggatggatatggttttttacgctctcctctctctagctatatgcctggtcctgatgatatttatgtctccccctctcaaatccgaagatttcacctgagaaaaggagatattgtatcagggcaaatccgcccaccaaaagaaggagaacgctactttgcattacttaaagtaaaagaaattggatatgaagtacctgataatgcaaaacatattgttctttttgataatctaacacctatttatcccaaccaacgattattgatggaaaatagtgataaaaattattcatgtcgagttattgacttgatgtctcctattggacgaggccaacgtggacttattgttgcacctccaagaactggtaagactattcttttacaaaatattgctaattcaattaatgcaaacaatcctgatgtatatcttattgtcttattaattgatgaaagaccagaagaagtcacagatatggagcgtacagttaacaatgctgaagttataagctctacatttgatgaaccaccacaacgtcatgtacaagtctgtgaaatggttcttgaaaaagcaaaacgacttgttgaaagaaaaaaagatgttgttattttattagactctattactcgtttaggtcgagcatataatgctgtaacaccttcttcaggtagagttctttctggaggccttgatgccaatgcactacagcgtcctaaacgttttttaggagcagcaagaaatattgagggaggaggcagtctaacaataattgccacagcccttattgatactgggtcaaggatggacgaagttatatttgaagagttcaaaggtacaggtaatatggagatctatcttgaccgtcaccttgctgaaaaacgtatatttcctgctattgatattaatcgtactggaacacgtaaagaagatcttctattaccagaggatgtattaaatcgggtttggattcttagaaaacttcttgcaccaatgtcgtctattgatagtatggaatttctccttggtaaaatgcgaggaacaaattctaatgaggactttattaacgcaatgagtaagtaa

SEQ ID NO: 9165 - DNA, 1164 bp, Lawsonia intracellularis
atgaatacggttatctactttgacaacaatgctactacacaagtagcccctgaagttgttgaagtcatgatgcctttttttagtgagtattatggaaatgcttcaagcatgcatacttttggaggagctgttggaagatatatccaaaatgcaagagagcaggttgcatcccttattggtgctgaaccagaagaagtcttttttacttcttgtggaacagagagtgatgcttctgctatatggtctgctatacagctccaccctgaaaagaggcatattattacaacacgtgttgaacatgcggctatcctttctgtttgtaacaatcttgaatcaaagggatataaagttacctacttagatgtagataataagggtagactagatttagatgaattaagatcttctataacacacaatacagctattgtttctattatgtatgctaataatgaaacaggaactatctttcctattcaacaaattgctgaaattgtgaaagaaaaagatgtattgtttcatacggatgctgttcaagcagtagggaagatacctgtagatcttaaggccttaaatatagattatctttctttatcagggcataaaattcatgcacctaaagggataggagcattttatgtcaagacaggaactcgatatagaccatatttaagaggtggacatcaagagtttaaccgtcgtgctggaacagagaatgtaccttatgtgattggtcttgggaaagcagctgaacttgctcaggattatttagaaaaaactaatggtgatgatataaaggtgttacgtgataatttagaaaaacagatacttactattacagatacagttgtaaatggagatatagataatcgagttccaaacacaacaaacatttcatttaggaatattgaaggagaagctattctattattaatggatcaacatggtatttgtgcaagttctggttcagcatgtacttctggtagtcttgagccctcacatgtattgcgtgctatgggtgttccatttacatatgcacatggatctatacgtttttcgttgtctcgttattctacagctgacgaagttaatatagttgttaaagaattacctgcaattatagagcggttgagagagatctctccctttaaaattgatacctga

SEQ ID NO: 9166 - DNA, 843 bp, Lawsonia intracellularis
gtaatgtgggaatatactgatactgttaaagagctttttcttcgtcctaagaatgcaggagaacttcctgacgcaaatgctattggtgaagttggaagcctttcttgtggggatgcattaaaactctttttaaaaattaatgaaaatgaagttattgaagatgcttcatttcttacctttggttgtgggagtgccatagcttcaagttcaattttgactgaaatgttaaaaggtaaaactgttgaagaagcatcaaaaattactaataaagatattgtagcacaacttggtggtcttcctagagaaaaaatgcactgttctgttatgggagaagaagctcttgaagcagctttaaaaaattggagaggagaggctactagtggtccacattgtcatgatgaagttattgtatgtaaatgttttggtgtctcagacgaacatattcgtaaaactgtggcagaaaatgatcttaaaacagtagatgaggttactgattatacaaaagctggtggtggttgtggagattgtttagaagatattcaagttattcttgatgaactccaaggtcttttaaaaaaagaaacaacctctaaacctgttcttacaaatgtccaaagaatgcaaaaaattcttcatcttttagatgaagaaataaatccggtattaaaaacagatggtggtagtgtagaacttattgatgttaatggaccattagtaacagtcgctatgagaggtaactgtacaggctgtaagtctcgtcaaattacactttcacaatttatagagaaaattcttcatgagcatgttgattctgacattattgttgaggaggttaatgcatga

SEQ ID NO: 9167 - DNA, 369 bp, Lawsonia intracellularis
atgaagatatatgctttaatgatatgtagtctattttttgcattatgcttactaactacacctgttgcaatagcaaataatgtacaatgtgatttaactggtcgtgattgggagaaatcatcaacaaacgagaagctttcttttctttatggagtatctagtgtcgtcgttatcgaacaagaaatagctcataaagaaggaagaaaaccatctctttttgtccaaaaatggattaaaacttttaaagatgatacttggatgaacatccaacataaaattgataaatggtacaaagagcatcccacacaaaagaataaagatgttctatgggtattatggtatgaatttatggctccaaatacaaagtaa

SEQ ID NO: 9168 - DNA, 507 bp, Lawsonia intracellularis
gtgattagtgttattggtattgatcctggctccagaaatacaggttggggtattgtccatgaggtttctggagtattacatttagtttgttgtggtgttatccaaccatcttgtaatggttcatttgcagagcgccttgcacatatttttcaggaaataagttctattattatgaaatataaacctgttgaagcatctgtagagcaagtttttacagctcaaaatccactaacagcattaaaacttggacaggccagaggtgctgctgtggttgcttgtgcaaatcaagggctattaattaaagattatgaagctacaacaattaaaaagacgttagttggtcatggaagagctacaaaagagcaagtaagctttatggtaggacgctctcttggtgtgaaaccagattggcctatagatacaagcgatgcattagcaacagctatttgtcatcttacaatccgacgttttgaaaatagaactgcaagagtagctaagacattatag

SEQ ID NO: 9169 - DNA, 741 bp, Lawsonia intracellularis
atggccgggcatagtaaatgggccaatattcagcatcgtaaaggtcgacaggatgctaagagagggaaagaatttacaaaagctgcaaaagaaatcattattgctgctaaaaatggtggtgatccttcaggtaatcctcgtttacgagctgcaattgcagcagcaaagtctattaaccttcctaaagataaaatagaggcagctatccgtaaagggacagggcaagatagtggtggagatataacagaaattatgtatgaaggatacgggcctggtggtgtagcagttcttatagaagttgctactgacaatcgtaaccgttctgtagcagatttacgacatataatgtcaaaaaatggtgggtcaatgggagaatccggctctgtaagttggatgtttgagcgtaaaggcgtttttgtttttgaaaaaactgcctattctgaagaagaacttatggaagcagcgcttgcagctggtgcagatgatcttcatgatgaaggagatacatgggaaattcatacttctatgtctgattttaatacagtcagagaagcgtttgaatcagataaactaataatgcagtcagctgagcttgctatgattcctcaaaatatgatttctgtggatatagaaacagctaaaaaagttgttaagcttcttgaagcattagaagactatgatgacgttcaacaagtttattcaaatgtagatatccctgatgaaataatgaatgaattataa

SEQ ID NO: 9170 - DNA, 603 bp, Lawsonia intracellularis
atgaaaccgtatagagactattattttcttaaagctaaacatgaaaaatatcctgcacgatctatttataaacttaaagaaatagataatcgtttttgtttatttcaaaaaggaatgagtgttcttgatttaggagcatctccaggttcatggtcccttggtgctgctgaaaaagttggaaaaacagggagagtggtatcttgtgatattcaaacaataactatccctttaccttctaatgtttctttttttcaagaagatatttttcatcgttcagactcatttaataatatactaataaaagaaggtccttttcatgttataatgagtgatatggctcctcaaacgacaggggtaaaaattacagatcattctagatctcttgaattatgcctagaggcacttgctatagctaagtgctatctattacaacaaggtagttttattgtgaaaatatttatgggagctgatactatagagcttgtaaaagaaatgcggcagcattttgagagagttacatcttttaaaccttgtagctctcgtacaaaaagtaaagaaatattttatgttggattaggttttaaaagatttactacttcttaa

SEQ ID NO: 9171 - DNA, 1581 bp, Lawsonia intracellularis
atgagttctttgtattgtaatataacttacaatgatagaaaagttgtttttgatgagttaggtagaaaaaaaacattggcttctggaaaagacgactttgttgatctttttggtaactctataaaacagataagttttgataatcaccctatattattacttggtattggaccttttcccaatgcttggcaacaactctttattaatcaagaggaaaataaaaaaattttttggatagaaagtcctttgtttgaaaaacaaatgccagaagaatggcataaatgtattccagctcattggaaaaaaatatcccttaaagaactacttgaacttcatacatttctaaaactatcagattgtcgtatctatcgatatctcccttcatatcgccttttttcaacattttggggcatggttgttggaaaactacaattaacacatcttaattatgcaccatctctttcatcttcttctatcattctatcaggaactgaaaaagaacttttaacctacgaacttaatatagcctgtcaacaaattggttttactccactatactttcctcatcaaggaactctatcccaactttgtcaaatagttaaagaacaacaaccaagtttatttctttctattaatctgcaaggacttgatagtgaaggttattttttctacttattacaagcagcaaagatccctgtagcaatttggttagtagataacccatggcatgtactttctaaactccgatcaccttggtggaaagaagcaacactttttactactgatcatagttttatttatgaacttcataagcatggtgcacaaaatgtgtatgctttacctctagcagcatggacaaaaacattactgcctaattctaccaattcaacaattcattctttaaacccattagtatttattggtaatgcttccttccctaacaaaaagaaatttttttctgggttacaactaccaagctcaataatatctcaagcaaaacttcaactaaataacaatgatcctccccatgtccattggtgggttaaaaagcttgctattaaacaatactggcctgataaaaagatacgtttagctggacttggtgctgaggagtgttcactactcaaacgtcaactatggctaactattgctgcagaaaaaggacttacgctttttggtaatcctgagtggaaatatcttcttccccctaaaaccgatgtcaggagtcctattgattactataaaacagtccctcatgtatataatcaggcaaagtatactcttaatgttacaagcctccttcttcctaaaggacttactcaacgacattttgacgtatggatgtttgatggatttcttatcacagacgcaacaccaggattatcccttttcccaaaagaattaaccgaatttattgccatacaatcagcaaaagatcttcatagttgtattgaaagatttgaaaaagatacgactctccgattacatcttatgcatgcttggaaaaagcatttaatagattttcacttatattcaaataggttacaaaatattttatctttattacagattaacatataa

SEQ ID NO: 9172 - DNA, 957 bp, Lawsonia intracellularis
atgtataaagaaaaaatagttgatgtagctattaatgtctttgcaaaaccataccaaacttcactttctatactttctttactacgacattctggatctattattgataaaatctattttcaatttgaaccatatgggtcaaaatatgacttatatcaaccatatattatagctgattatcttaaagaccaagctatttgctttcagccacagcaatggatagctcttagttctgtagacaaaaaccaacttcataatattaattacaggcactcaatacgctatcaatatgcttgggaacatacaaacaaaaaatatctttttattatccataatgatgtctttttttttaaagatattcttacaccacttatacaaaatataggctcacattttgccattggccaacttggacaatgttggaattgtcctgcatctcatatacaaattgtgcaggaaagcatacctaagctttctgcatgtcaccaagagagataccaactttttcgccccacatttatagaacttaaaaaactttatactgtagctaaacaaaagaatatttttgttcgaccctacttagagaattcggagtctatttttcaaatacaaccatggacacttcctgaatgtcgaattaatgaatgggcatgtcttgtaaatatggatatttgtgctccattgacaattcccattggtactgtattaccttttggagctttttaccaatgtggacctatctgtcttgatacttcagttgcttggtttaaaggtatgcatgaacataaccttacagcaaaacatatggatgtaagcaaatatatgcaacattggataggtactggaaaaatgacgcgtattaaatatgtaaaagctgaaaaaaatgcttcttatttactaaaaaaatacttccctcattttgtagattggtgcagaacaaaaaatgtaatcttttaa

SEQ ID NO: 9173 - DNA, 411 bp, Lawsonia intracellularis
atgttaacggagaaaaatgctatgtcaaagcagtttgaaatatataaatgtgaaaagtgtggaaatatcgttgaattgctttttgcctcaagtggtactctttcctgttgtggtcaacctatgactcttatgaatgatagtaatacatctggagctaaagaaaaacatgtacctattattgaaaataatggttcaggttgcaaggtaactgtaagtacagtaatccatccaatggaagaaaaacactggatcgaatggattgaaattgttacaatcgatggacaccattgtaaaaaattccttaatcctggagatgaaccaatagcatactttaactatccattagagcaaattgcttatgccagagaatactgtaatcttcatggattatgggaagtaagcgttaattag

SEQ ID NO: 9174 - DNA, 1209 bp, Lawsonia intracellularis
atgaaacctgttgaaataactaacgatatttactggataggtgctgtcgactttaataaaagaaattttcatggatatagccggtcacctcaaggtacaacatataactcataccttatctgtgatgaaaaaaatgttatttttgatacagtagatgaagaatattcaggagtaatgttttgtagacttgctaaacggctccctgtagataaagttgattatattgttattaaccatacagaaaaagatcatgcaggagctttaagtgagcttgttacccactgcaaaccagaaaaaatttttacatcaaatataggtaaaaaattcttagatgcccaatttgacacaagagagtggcctattgaaattgtatcaacaggagactctatctctattggaaaaagaacaatacagtttctagatactcgcatgctccattggccagatagtatggtatcttatatccccgaagaaaaacttcttataagtaatgatatttttggccaaaacttagcaacatctgaacgctttgcagatcagtgtgatccatcaagtgttaaaaagcgtactaaagaatatttctataacatcatcctccctttttctacacaagttagaaaaacattagataattttaaagaaatacaacttgatatacaaatcatagctccagatcatggtgtcatttatagaacagctgaagactgtgatagagttcttaatctctatagagaaatggcagaacaaaaattaaaacaacgtgctgttattgtctttgaaacaatgtggggatcaacaaaaaaaatggcttatgctataggctcaggttttgatgaagaaaatgtcccctactctattattgatatacaaaaaaatcaccatagtgatgttatgactgctttagctgatgccagtggtattatcataggctcagctacacataataactcctaccttccaggaattgcagatctacttcactatatgcaaggacttcgtcctaaaaatcttattggaggtggctttggctcttatggctggtctggtgaagcagcaaaagatattcaagcaatattaagttcaattggtgtagaaacaccatctgaacctctaagagggacattcatacctaaacatcaactactaagagattgttttaattttggaaaaactattgcacaggcactaaaaaataaaggacaatattaa

SEQ ID NO: 9175 - DNA, 1302 bp, Lawsonia intracellularis
atggatgttgttatgctgtcacggctccagtttgctgtagctgttttttttcactttatctttgttcctcttacacttggactaacggtcattcttgctttaatggaaacaaagtatgtgaagactggtgaagaagtgtataaaaaaatggctaaattctggggaaaactattcttaataaattttacgttaggagtagttacaggtattacccttgaatttcaatttggtacaaactggtctaagtattctgaatatgtaggtgatgtttttggttctttattagccattgaagccacagcagctttcttccttgaatcaatatttattgctgtatgggcctttggttgggataaaattgggaagaaaatgcatcttacggcaatatggttagtagcctttgcctctaatatgtctgctctttggattatccttgctaatggttggatgcaacatcctgtaggatatgtattaagaaatggccgtgctgagttagatgattttatggctgttttcttaaatccatatggttggggacaattttttcatactatttttgcttcatggatgttatcagggttctttgttctaggaatctctgcttggcatctctatcgtaaaaatcaaatggatttcttcaagcgttcagttaacatagctgctccatttacattaatatttgctattattgttgcattattaggacatcagcaaggtcaatctgttgctcatcatcaaccagcaaaacttgctgctatggaatgtcactgggaaacaggaagtgatgtacctatgtatcttcttgtttggccagatgttgaagaaaaacgcaatattatccaagcacttcctattcctggattattaagttttcttgcagacaatacaacaagtgctgaagttgtaggcctaaatagctttccagatgacgaccttcctcctattttacctaccttcctttcatttcgatttatggtagctactggtctactattcattctttttgcatggctagcttggtggtatagagataggcttgaatatcaccctaagctactaaaatgtcttatctatcttattccactaccatacttatcaattatggctggctgggcagtagctgaaataggaagacaaccttggattgtttatggacttatgagaacaaaggatgctgtttcccctattccagaatcttcagtctggatttcccttataagtttcattgtagtttactcatttcttggcattttagatatttatctcctagccaaatacggacgtaaaggtccccaggcataa

SEQ ID NO: 9176 - DNA, 1029 bp, Lawsonia intracellularis
atgcttgaaacaatatggtttgttctttggggactgctttgggcagtatactttgtacttgatggatttgatctaggaatgggttcactcatgccatttctagcaaaaacagatactgaaaaacgtataatttataatgcagctggaccctattgggatggaaatgaagtttggcttattactgcaggaggagctacttttgcagctttccctaaagcgtatgctgtcatgtttagtgcattatatgctcctcttcttattatactctttgccttaattttccgggcagttgcatttgagttcagaaataaaatagatactcccttctggcgtagtttatgggatttatttctatttttaggaaattttattcctgctctactactaggagtagcatttgctaatttatttatgggaattcctattgatagatatggtgtatattatggcaatctactaatgctgttaaatccatatggtatcttaggtggtattttctttgttatcatgttctgtgtacatggagcactatggcttgcactaaagtctgaaggcctacttcatgccaaagctgttgtaacagctaaaggattgtggtttattcttgcagcattaactatagcctttcttgtcatgacttattactatactaacctttatgacaattatgaaattacaccagcgcttcttgcatttcctgttatagctgctctttcacttatctttatccagcttatgcttaataaagaaaagctcttgcttgcatggatttgtagtgcgttattcatcttatgtgtaacattctttggtgtactaggaatgtatccaagtttaatcatctctagtataaatccaacatatagtgtaacaatcatgaatggggcatctagtcctttaacacttaaaattatgttaggtgttgtcattggttgtatacctattgttattgcctaccaggcatgggtttactatacttttgctcataaagtaacatctgaatctatccatgctgatgatcatgcttattaa

SEQ ID NO: 9177 - DNA, 480 bp, Lawsonia intracellularis
atgtttttttttaatgctaacagagcaaagagaaaaaagaaatccaaggtgaaaaaagatcctattttagaaaagtctaaagaactttttttaggtggaaaatttcctgttgttaccactgatacagttgaaggtaaaagaatttcaaaagttttaggattagtttgttcaagagcatatgatgctgatgatgctttttttggtatggcatctcgagctttatctaaaggagcacatgcaattgtaggctatagtgaaaacgttgcgtttcatcctgatggtacaagatatttttcgtgttatggtacagctgttatgtttgcatgggaacctaatgaaaaatatggtgcagctcttatggggagaaaaggacttgaaggccttgctactgaacttcaacttgataaatcctctgctgtacatacacaattaagtgttaaaacatcagcaactgagccgacttctgatactgaagaataa

SEQ ID NO: 9178 - DNA, 3564 bp, Lawsonia intracellularis
atggctgctaagatgaaaaccatggatggtaatgctgcaacaacacatattgcttatgcattaagtgaagtggcatgtgtttttccaattaccccatcatctgtaatgggagaaactactgacaactggtcagcagctaataaaaaaaatcttatgggacaaagagttcttgtacaagaactccaatctgaggcaggagctgctggtgctgttcatggctcactggtagcaggagcactaacttgtacatttacttcatctcagggtttactccttatgatacctaatatgtacaaaatagctggagaacttcttcctgctgtcttccatgttgctgctcgtgctattgccgcacatgcactttccatctttggtgatcagcaggatgttatggctgtacgccaaacaggcttctcactcctttgttcaagttctgtacaagagtgtatggatctggctttagtagcacacttatctgctattgagtcacgtgttccattttgccatttttttgacggatttagaacatctcatgaagtccaaaaaattaatgttattgaatatgaagagatccaaaaaattgtaaattgggaaaaaatacacatattccgtaaaaacgcaatgaatcctgaacatccatatcaacgtggaacagcccaaaaccctgacatctactttcaaaatagggaacgttctaaccccttttataatgctgttcctgggattgttattgattctatgcaaaaagtattttccatcacaggaagacagtaccaactctttgattatgttggtcatccagaagctgacagaatcatcattgctatgggatctgcctgtgaagctattacagaagtaattaatactctaaataaccaaggacaacgattaggacttattaaagttcgtctttatagaccattttcagtagaacatctacttcgtgctattccaccaacggttgagtcaataacggtccttgatcgaaccaaagaacctggagctcttggtgaccccctatatttagacgtttgtactgcgttcatggaaacaagagatgtaaaacatcctcatattatttctggtagatatggtttaggctcaaaagacttcactccagctatgattaaagctgtttatgataatatgttacccaacaatcgtaaaaatcattttgttgttggaattaaagatgatgtcactcatacaagtcttgatatcagtgataactttgatactgtcccaccaggaactatccagtgtaaattttttggttttggttcagatggaacagttggagctaataaacaagctgtaaaaattattggtgacaatacagataaatatgttcaagcatactttgcctatgattctaaaaagtcaggtggatttactgcatcccaccttcgatttggggatcaccctattcgttcaacctatcttgttacccaagctgactatattgcttgtcatcatcctgcctatgtcatacaatatgatgtacttgaaggtatcaaagaaggtggtatttttgttttaaactctagttggaacaccatagaagatttagaacgcgaacttcctccaccaatgaaacgaactattgctcgaaaaaaacttagattttataatattgatgctgttaaaatcgcttctgaagttggtttgggtggtcgtattaatatgatcatgcaaactgcatttttcaaacttgctaatattattccatttgaaaaagcaatagaacttctcaaacaatctattcaagagacatataaaagtaagggagaagatgttgtaaaaataaactatacagctgttgataatactgtttctgccctgaatgaaattcaagttccttctacttgggctgatgcatcaactgaatttgttatacctagatataagaatgtaccagaatatattaaaacctttgttgaacctattcttactgaaaaaggggatatgcttcctgtttcaagctttaccccagacggaatagtaccacttggaacagcagcctatgaaaaacgtgctattgcaattgatatcccagagtggattgctgataattgtattcagtgttttcaatgttcttatgtatgtcctcatgcttgcattcgtcctgttctagccacagaagaagagttaattggggctcctgaaacctttgttacaaaagatgctattggtaaggagcttaaaggactcaaaatgcgtattcaagtctatcctgaagattgtgttggatgcggctcttgtgctgatgtatgcccatcaaaaccaaaatcacttattatgatgccattagaaacacaacgacaggaacaagttattaatcttgattttgcccaaaaacatatttctcttaaagataatctgatgccaagagatacactaaaaggctctcaactccaacaaccacttcttgaattttctggtgcatgtgctggttgtggagaaacaccatatgtgaaattgttaacacaaatgtttggtgaacgtatgttcattgctaatgccacaggttgttcaacaatatggggtgggtctgctcctactgctccatactgtactaacaaagatggacatggaccaacatggggtaattctttatttgaagatggagccgagtatggacttggaatatctttagctattcaacaacgtcgtgctaagcttgcagagcttataaaagaagcattaacaattgaaggtatttctacagaactcactaatgctttgaatggatggttagaacatcaagaagatgtagatctttctaaaaaatttgggcaagatattaccacaattctttcaaatacacctacaaatcctatttttgcacaaatcttagaaagagaagatttatttactaaaaaatctttttggataattggtggcgatggttgggcatatgatattggctttggaggccttgatcatgttattgcatctggtaatgacataaatatcttagtccttgatacagaagtatattccaatactggtggacaatcttcaaaatcaacaccccttagtgctgttgcaaaatttgcagcttctgggaaaagaactaccaaaaaagatcttggtcgtatggctatgacgtatggctatgtttatgtagcatctgtttctatgggggcaaataaacaacaattacttaaagcttttaaagaggctgaagcatataaaggtccctctattattattgcttatgcaccttgtattgaacaaggcattcgtaaaggtatgggtaaatctatggaagaatcaaaacttgctgtagactgtggatattggcctttatatagatttaatccagaattagcaaaacaaggaaaacaaccacttattttagattcaaaagctccagatggtaatttacgtacattccttgctggagaaaatcggtatgcacaacttgaaaaaaatgatccagaaacagcaaacaaacttcatgaagaacttaataaagaatataatgatcgctatcgcctattaaaacaattgtcagaacttacagttacagcatcagaagacccattgttacaaagataa

SEQ ID NO: 9179 - DNA, 2121 bp, Lawsonia intracellularis
atggctaataagctctatattactgctacagaaaaacgtagtggtaaatctgcagtaacccttggcatgatgcagctactcatgcgacacataagaagtgtagcatttttccgtccaattattgctaatatagatcctaataaaaaagatcatgatattaaccttatccttacaacgtttaatatcgccatgccttatgaggatacttatgcatgttcttttaaagaggctagaacacttatagcagaacaaaaatctcctgttctaattgaaaaaattatacaaaaatacaaacatttagaagataattatgactttattctttgtgaaggtactgattatcttagtaatgattccgcatttgaatttgaacttaatatagatattgctgctaaccttaatatgccacttgctgttattgttaatggaaaaaacaaatctattgaagaccttatttcttctactgttacaagctcagagcttatttttgataaaggacaagatattgcttgcctttttattaataaaacaacattagccatacctgaactagagaattgcaaaaaggctattagtactgcaataggctcacaggtccctattgctatgttccctaataattctgtcttaagtcgaccaacagtatctgatataaaacgttggatgaaagcagaagtaatatatggtgaagaatgcctaaataattcagtcgaagattatattataacaacaatgcaacccaataattttttggaccagttacaacaaggtcttcttattataacatctgcagatagatctgatattgtccttgctagcttagcttcaagactttcaatgacatatcctgatatagctggtattattctcacagggaagtttgaactttcctcacatattactcgtcttatcaatggatggcaatctgttcctgtccctattttaaccgtatcccaaaatagctatcaagctattatgacactctcagaactttacggaaaaattaatgtttcagatacacgaaagatacatatagcactcgctatttttgaacaacatgcagacagtaatgctattacgcaacgtgttattgaaagaacttctgacaaagtgtctcctaaaatgttcgaatttaaactcattgaacaagcacgtcgccataaaatgcgtattgtccttcctgaaggaacagaagatcgtatcctcaaagcagctgaagtactttcacaaagagaagttgcagacataactcttttaggagatatccctacaattcataaaaaaatttcagatcttggactgtctctgcataatgttcagttaattcaaccaaatcaaaaccatgctctatttgaaaattatgtacagacatattatgaattacgtaagcacaaaggaataactttagatgatgcccgtgattggatgaatgataccacttactttggtactatgatggtttataaaaatgatgttgatggtatggtttcaggagctactaatacaacagctcatactgttcgtcctgcgtttgaaattatcaagactaaacctggtgcatctattgtttcaagtgtctttcttatgtgtatgaaagaccgtatccttgtttttggagactgtgctgtaaatcccaatcctactgcagaacaacttgcagacatagctattagttctgcacaaacagcacacgtctttggtattcctgtcagagtagcaatgctctcttattcaactggaacatctggtaaaggtatagatgtagatattgtttctgaagctacaaaaatagcacatgaaaaagcacctcatcttatattagatggtcctattcagtatgatgctgccattgatcctgatgttgctaagacaaaagcaccaactagtgtggttgctggtaaggcaacagtattcattttccctgatttaaatacaggaaataatacatataaagccgtacaacgagctgctggagcaattgctattggaccaattctccaaggtctaaaaaaacctgtaaatgatctttctcgtgggtgcactgttacagatattattaatacagttacaattacagctattcaggcacaagcagaacaagggttaataacaatagactaa

SEQ ID NO: 9180 - DNA, 1215 bp, Lawsonia intracellularis
atgaaagttcttgttattaatacaggaagctcctcgttcaagtatcaacttattgatatgcctatggaacaagtgcttgtttcaggtttagtagaacgtattggagaagaagtaggacaaatggttcataagatataccctaatacttctcaggaaaaaaagtatactacaacccagcctttttctactcatgttgaaggaatgcaggctgtagttgctgaacttatcaatccaaaacatggaattctccattcagtaaaagaaatatatgctattggacatcgtgtagtgatgggtggagagacaatgaaacaccctgctcttattaatcaacatgtaaaaaatattattcgtgaatgtgccatcttttcacctctccacaacctttctcatcttgcaggaattgaaactgctgaagaactttttccaggtattcctaatgttgctgtttttgattcagaatttcatcaaacaatgccaaaagtagcttatctttaccccctgccatatgatatttatgacgactacaaaatacgtcggtatggtttccatggcacatctcatagatatgttgcacaacaaacagcaaattttcttaacagacctataaaagagctaaactttataacttgtcatttaggtaatggatgttctatgacagcaatcaaaaatggaaaaagtattgataccagtatgggattaactcctcttgacggactaatgatgggtacacgttgtggggatattgatccagctattgttccattccttatagaaaaaacagaaaaatcagcaaaagacgttgatgaattaatgaataaacaatcaggtctcaaaggcatttgtggaatgaacgacatgagagatatacatgaagcttgtgcacaaggtaatgcaaaagcacaacttgcacttgatatgtttatctatcgaataaaaaaataccttggagcttattatgccatcctagggcatcttgatggtatcatttttactgcaggtattggtgagaatgatactattgtacgtgaaaaggtttgtagtggattagaaaatttaggaatttttcttgatagctcacgaaataatacacatagttccacgctacgattaattagtacagataatagtccaatacctatctttgttgttcctaccaatgaagaattagaaatagcaaaattaacaatacaactggttagtaatacacaataa

SEQ ID NO: 9181 - DNA, 912 bp, Lawsonia intracellularis
atgaactatcgtaaagttatttgtattgttggtcctacaggtgtaggtaaatcagaaatagcctttcatttagctaaaagatatgatggaatcattattaatgctgattcaagacaactatacaaaggtgttcctatcattacagctcaaccaacttttgaagaacgttctttaattcctcataaactttatgcttgtttagacttacatgagaaaatctctgcaggaagatgggcaacattagctgcagagcaacttgattcagtatgtcataccaaaataccattattagtcggtggaacagggttatacttacgtgctttgtttgatgggattgttactataccaccaatttctactgaacttagcttaactatggaaaaacaggctgaagaaaaaggaattagttttttatacaatatgcttaaagtgcatgatcctttgtatgctaattctattcacccaaatgatcgacaaagagttcttcgtgctctcactgtcttttatgaaactggaaaaacttttacatggtggcatcagcaggtaactgaagcatatcctgcaactgttcttagaataggtattaaaattccattaattgaattagcaccattgctagaaaaacgtatagataaaatgttcgttcaaggagcaataaaagaggttataactacttataagcgttactttaataaagatgttcaaaactggtcaggtatagggtatatggaacttttaggtgctataaaaggtgaatatacatttaatgaagctaaagagcgttggttaaaaaatacacgtagttatgcaaagcgacaactaacatggtttaatgcagataagcgtattatctggttttgtcctgatcagcttgaagatatacagaaatgtgttgaaaactggttaagttaa

SEQ ID NO: 9182 - DNA, 519 bp, Lawsonia intracellularis
atggaagacacaaaaatacgtttagctatttaccctgggacatttgatccacttactaatggtcatataagtattattcatagagctaaacatttatttgataagattattatagcagtagcacaagactcaggcaaaaagcctttgttttctattgaagaacgagtatctatgattaatacaacttttttttctgatcatatggtagatgtagaaaatttttctggtctacttgtagattatgttgaaaaaaaaaatgctaaaactattttacgtggcttaagagctgtgtctgattttgaatatgaatttcaaacatcattgatgaaccgtaaactttgtccagagatagaaacaatattccttatttcagactacaaatggctttatattagttcaactgtagttaagacagttgcaagccttggtggtgatgtaacagattttgttccagaaaatgtgttaatatgtttgaaaacaaaatactgtcaatccaagtcaaatttagtaataacctaa

SEQ ID NO: 9183 - DNA, 573 bp, Lawsonia intracellularis
atgcgaattatgacgggttctcttagaggaaggatattgaagacaattgaaggagatggttatagaccagcaacaggtaaagttcgagaagcattattttctatgcttacatcaagaggtattgtttgggatcaaacatatattcttgatctgtttgcaggtagtggaagtttgggctttgaggctattagtcgtggtgctgcagaagtatgttttatagaaaataatcctaaggcagtgcaatgcttatataaaaacatagagaaactcagactatttgagcaagtaagtgtcgttgaacaggatgtaatccaatttctaaatcaagactcactatttaagctatatcagcttgtatttattgatccaccttatggtgggaataggctagaaacaactataagttgtgttgtggaaaaaggatggattgctccagagggttatattattgcagaagtagaaaccacattacgtattaatttttttcagttacatccacagcttgagctattatcaaatagatcctacggtcaaacaaggttacttatatggaagacacaaaaatacgtttag

SEQ ID NO: 9184 - DNA, 1602 bp, Lawsonia intracellularis
atgaaaattacatttttgggtgcagcaaaaacagttactggttcatgctatcttattgaagcatgtgggataatgtttactgttgattgtggaatgtttcaaggaaattcaattattgaaaaacgtaattttgaaatacaacactaccatgcaaaagaattacaatttattttattaacacatgcacatattgatcattcaggccttttacctaaaattgtaaaagaaggttttcatggacggatctactgtacagctccaaccaaagatcttgctactttgatgcttgaagatagtgcacatattaatgaaatggaagcacaatggaagaataaaaagtatgcacgacatggtaagatagaaaaagaggtattaccactttatacagttgaggaagcacaaaatgtttctccattatttactcctgtatcatacaataccatgtttgaaccacatccaggtattcaagtaacatatcatgatgcaggacatattttaggtgcagcatttcttgagcttgtcattaaagaagaaggtaaagaagtacgtttagttttttcgggtgatcttggtcggacagatagtttattaatgcatgaacctatgacccctccacaggctgattttctctttattgagagtacatatggagatcgtaatcataaaattgatcaagcaacttttgatgagttagttgatgctattcattatagttggacacataatagtaaaactattattcctgcatttgctgtaggtagaacacaggaaattttatattgtctttatttattaaaacaacagaatcgtattcctgatattcctatttttttagatagtccattagcaattcaaacaacaaaaatatttgaaacatataatagctatctaaaatttaatgatcatccatcatttaaaaccatattagatggtctctctgtaaaatatacaccaagtgttaaagaatctaaagaaataaatgagttaaaaggatctgctattataatttctgcaagtggaatgtgtaatgcagggcgtattaaacatcatttatttaataatgcttggaaaacaggtgtaagtatagtttttgttggttaccaagctgttggaaccttgggaagaaaaattgtagatggagcaaaaactgttcgtatttttggtgaagatgtagctataaaagccaaagtttatacacttggtggattttcagcacatgcaggacaacaacaattacttgattggattgggagaatgtatcaaccacaaatggaagttctccttgtacatggggaagaaaaggctcaagaagtattttcaaagcttatacaacaaaagtatgggctaactgtgtacattcctagttatttagaacagttagagcttacagcagaaagccaaaaagttattgttagtgaatctaaaaacatacaaccagttgaatggagtaagcttactgatactataaaaaataattttaataatattaatttaaagcttaagaatattgctcaaaagccatgggaaacacaaatttgtatgtacgatcggctagtcgagcttaatcaggaaatagagtcttttttaaattataacaagtag

SEQ ID NO: 9185 - DNA, 1368 bp, Lawsonia intracellularis
atgatttttcgtattatagtaatatttttgtgtagcataatgtcttttacttttttatccaatggatatgttttatctaagcctacagaacaatgtgtttcttcgtatcaaccaggtatgcttaaagatttaatggtattccctcaaagtttgaaagtctattctgacttgttgggagaagtaacacttatttcagggaaaaaattggaggaaaaatataatttttttaaaaaacgtttttttcaaccatgggattctacagaaccaatttttccagttcatgatgcatatattattttttcttatcctaatacaaaatcgcatgctacatggtgggctgaaaaccttcttccatggacagaaaaaaattggaaagcagtggaaaaaaatgctgcacgttcaacgtatccttcatgcaactataagggtattataacagaaagaacagctgttcgtgctgcaccaacagtaagcccttttttcagaaatccttctttagcaggagaaggttttccttttgattatcttatggaagcaaatattcatcttggtacaccagtagttgtaacacatatatctgaagatgaagcttgggtttttatagaaacaccttttgtttctgggtgggtgagagataacgttgttgctaaagtgaattctgatatcataaaacaatttttatcgttaccacaagcttcaattatttatgatggagtattattaaaagatgcttcaggtgtgcatggaggtgcaggttttttaggaactgtactacctatggttaagctaactggtgatactgctatgttgttagttcctgttcgtgatcaatatggtaatgcacatattatcactgcagagactccaaaacataatgttttacctatgccacaagtactaacacctaagttactagcatctattggagagtctttaattggacaaccatatgggtggggaggtctttttggtcgtagagattgctcggaaatgatctcagatctttttatcccttttggagtttggcttccaaggaattcacaacaacaagtacatgaaagacattttatcaacttagaacatgtttcaaaagagaaattttattctgtgatgaaaactcaggctattccatttgtaacattgatagggtttcagggacatgttggcttatatcttggaatgtataatgacacgcctgtaatgctacatgatttatggggagttcatacaatagataacggacataaaggacgttacatccttggacgtgttattatttcttctttagacttaggcaatgagctttgtaatctaaataaagatgaaaccttatttagtagattagaaggaatttctattttgaactaa

SEQ ID NO: 9186 - DNA, 1341 bp, Lawsonia intracellularis
atgagatataaaaattacatagccttttgtatgataagtttatttctttgtctcacaggttgtaagacatttaattgtgtttctccacaattaggcacaataaaagacttagaagtatttcctcaagacttacaagtgtactcatctgttttaccccaagatccactcataacaaaagatagaatgttagatgaatatgctttgtttaaaaaacatttcttccaaccatggagtaaggataaagcctcagtacctgcttctactgtttatagtatttttgatcgtcctaatacaaaagaaaacattaggtggtgggctgaaaatcttcttccttggacagatattcactgggatgaagtgaaaaaaaatgctgcaatttcaacatatccttctcgtaaggataaaggtattcttatccaaagaacatctgtgtatgctgcaccaacacaaagctcattttttctaaatccacaaactgcaggtgaaggttttccttttaattatcttatagagtcaaatcttcatgctggtacaccagttttcataacacatacgtctactaatggggattgggtttttatagaaacagatcttgtatctggatgggttcctgagcatactgttgcattaatttctgataatataagcaagtggttttcttctttacctcaagcagcaattattcatgataatgtagcactaaatggacgttcaggacgtcatgtaacaacaggatatttaggtactgttttacctataataaaatcaacacctacagaattagttctgttagcaccactaagggatcaacatcgtagagctcgtattacagaagtatatgtttcaaaaatacacacaacaattatacctcatgaattaacagcatcttttatagcagatattgggaatccattgttaggacaactatatggatggggtggtagctttggtcatagagattgctctgaacttatgaaagatctttttattccttttggtatttggcttccaagaaattcacaagctcaaattcatgcttggaactatatagatacaacacaacttttagaagatgaagtgtatcagcttatgaaagataaagctataccttttgctacattaatagggtttaaaggccatattggtttatatctaggtatgtataataacacacctgctatgttgcatgatgtttggggtattcgtactatccaaagcggatctgaaggacgtcatattcttggacgtattgttataacatcattaaagccaggagctgaactttgtataacagactcgcttctttttgataaaagaacagggatttctgttttgaattaa

SEQ ID NO: 9187 - DNA, 2199 bp, Lawsonia intracellularis
atggcacaattagatataaaagagcagatagtactgcaaggtatacttgatcgaattgtttttcataattcagaaaatggatatacggtattccgccttaaaccagagaactcagatgatattgatacagtacctgttgttgggtatttaaataatcctcaaccaggcgcttcaatacttgtttctggacaatgggtgaataatacacgttttgggagacaatttcagatgtcaacatttgaaattcgtcttcctgcttcagtagaaggcattaagcgatatctttcttcaggtttgattaaaggtataggtaaaaaaacagctgagagtattgttacagagtttggagaagaaacatttcatatattagatacctctcctgaagaacttcttaaaataaagggtattacaaagaaaaaattagatcaaattactgagtgttggcaagaacatcagacaactcgagaactaatggtgtttcttcaaccttacggtattagtgttacttatgcagtaaagatatataagtattatggtcagcagtctttaaatatagtaaaagaaaatccttatagattagcaatggatattcatggaatagggtttcttacagcagatgcactagccacaaaattaggatttgaaaaagataatcctttgcgagcccaagcaggaatattatatactcttttaaagtgtatggatgaaggacatgtttattatccaaaagaagcttttatagagcttactagtcataatcttggtattgatcatcagtgcatagaggatgctatagaacatcttaagagagaagaaagaattgtttgtgaagcattggatgaacatattggaatttatttaaatcgctatcaccattacgaatctcaaattgcgttttatttacagcgaattctacattcaccaaaatcagtacaatttaaaaatacagatgataccatttcacaggttatcaataaacttaatatcactctagctccagaacagatgagtgctatagtaacgtctactacatcaaagattatgatccttacaggaggtcctggtacaggaaagacaactgtacttaatgcaattatccaagtatttaaagagaataaagctaaaatattacttgcagcaccaactggacgagcagcaaaacgtatgtcagaagctattggaatggaagcaagaacaattcatcgtttgttagagtatagccctagaaatgatggctttattagaaatgaagatatgccattagcctgtggtttattagtagtcgatgaggcttctatgatggacattatgcttacttaccatttattaaaggctattccattaggtgctactgttatttttgttggtgatatctatcaacttccttctgttggtccaggtaatgtacttaaggatcttattatatctcagctgcttcctgttgtagaacttacagaagtttttcgacaagcagcagaaagtcagattgtatgtaatgcacatctaatgaataaaggagaagttccttgccttgaatcatcaaaagaggctctttcagacttctattttatacgtcaatctgatccagataaagcagctgatctcattgtagatcttgtaaaaaatcatataccaagaagatttaagtttgatcctattaatgatattcaagtattaactcctatgcataaaggaacagtaggtgctgcaagtttaaataaaagattacaagaagaacttaatcccacatctcagtttttacagagaggagaaaagatatatcgccttggtgataaagttatgcaaatcagaaataattatgaaaaagatgtgtttaatggagatataggcagaattacatatattgatatggaagaaaaaagtattgtggttaattttgatgaacgacttgtttcttatcctagtgatgaacttgatgaacttgttgcagcttatgctatttcaattcataaatctcagggttctgaatatcctgcagttgttattcctcttatgacacaacattatgtccttcttcagagaaatctagtttatacaggtgttacacgtgggaaaaatcttgttgtatttgttggtgagtcaaaggcattagctatagctataaaaaataataaaactcaaaaaagacatacttggctttcagcaagactggtaaatggaatgttacaaaaactataa

SEQ ID NO: 9188 - DNA, 1254 bp, Lawsonia intracellularis
gtgaacaatcaaaaatacaaaaaaaatatacaaaaaaatatagagtatcacagctcagctgaaaaaactcagaagatatcagctaaatctactttgccctaccctcaaaaaatagcagatcctcctatacattcttttctacaaatgacttctgttgctattccacttatagtaggaggattatttcttaataactctagagcagagaaaaatatccataatttaagaaatgattatgtacctaagtttaactttcattatgaagattatctccagtttgctccaggtgcagctatgttaggattaaaattaggtggtctagaaggaagaagttcatgggcaaggatgctttttgctgatgctatttctattggtttaatgttacctactgtagaaataataaaagtacatacaaaaaagaaacggcctactggttcttcgcaccaatcttttccttctggtcatacagcaaatgcatttatgttagcaacaatgctacataaagaatatggggaaacacataaccgatggtatagcattttaggttatacagcagctacagctacagctattggaagacaactcaacaatagacattggcttagtgatactatggtaggtgcaggtataggtatcatgtcaacagagataggctatcttctaacagatcttatttttgaagataaaggtattatccgacctattagagaaccaaaaactatagataaaaatagaaaaccttcatttttaggtctatatgcaggtattaatcaaatgtcaggcaaaacaaaaatagacagtgtagaaatatctacaggaactggtgctaatgttggtatagaaggagctttattttttaacccctatataggagttgggggaaagttttctgcagcaaaccttcccatattaaaagatggaaaactccaaaaagaaagatacatagatatactttctgggtatgggggactatatttctcttaccctctcacaaggagaattggcttaggaagtaaagttcttgcaggatataattattaccgtcaatccaaatcattaccatcttcttcaatcaaaataggaggaaaaaaagggttaggtatttgtactggagcttcaatacatattcttgctaatgacagcttaagcgtatcatgtttccttgactataattttatacaatcacctcttccaaaagacaaaaagttgagagctacacaaaccttaggtctttcaacaaatattgctttttaa

SEQ ID NO: 9189 - DNA, 837 bp, Lawsonia intracellularis
gtgtcacatcgtactattaaagaaatagttacagggtataagtcagttgatggagctggtgttcatcttgtatgtgttcttggatcattaacagttaagaattttgatccatttcttatgttagatgcctttgactcacgaaatcctgaagattatataaaaggttttcctatgcatcctcatagagggatagaaacatttacatatctcattcaaggtaatgttgagcataaagatagtttaggtaatcaagggagtatacttgatggctgttgtcagtggatgactgctggcagtggtattttacatcaggagatgcctaaggctacagaaaggtttttagggttacagttatggattaacttaccacgtatatataaaatggtagctcctaaatatagagatattactagagagatgatccctaaggtagaagaagatgctggtacagttgctgttgtaacaggtaaatacaaagatgttcctggcgcaaccaagggagaatatgttaatattaatttttttgatcttactttaaaaccagataaagtttggcaagttgcaactgatcctcaacatacagtatttgcatatattgtagagggtgagtgtggctttgagtctgctcttataccagctaagcgtgctattttatttaatccaggaaaagatttatttattcaaacagggttagatggtgcaagagttatattagtttctggtaaacctatacaggaaccaattgcatggggtggtcctattgttatgaatacaaatgatgagttacaggaagcatttatagaactagagtctgggacatttatcaaacatagttaa

SEQ ID NO: 9190 - DNA, 1350 bp, Lawsonia intracellularis
atggataaaaataggttaggctcttttttattttttatggagcagtcattaaatattaaaagaatattgtttatagtattactgttatgtgaaatggcttttttggtaggagcttattggccaggtgcaatgagtattgatagtgtatctcaatatgagcaggcagtaactcatacatatgaagattggcatccccccattatggcatgggtttggtcatgttttattcttgtgtataaggggcctattcctatgttgctattccatacttttatgttttttggagcaacggctttattatgtttaatgtatagtaaaaagaatagaataagttggatttggcttatattacctttattaccttttattgctgggctctcaggagtcctatggaaagatataggaatggcatatgcttttttctttgcctttgctttgtttcatttaggaatacatatccaacgacaatcttattacagttatttactattttttttagcactatgtttttttctatatgctttttgggtaagggataatgctattatggcttctgctccaatagtgtattaccttgtaacgattggttttcctaattggaaaaagatatatatttttggtgttagttgtattattttgatctgtttgttttgtataggaaggggtataaataaatatatgttagatgcaaaatcagaatgccctacaatgcatatgaaaatagatgagattgctgctacttcaagaatagtagggaaaaatcttttttttaaagaaagtactgtacatgaatttcctgtggaagagcttcctatcgtccatttagataaaggatggaaattttattcaatagttcaactaactgataatttattaaaagaaaattggtattctgttatgaggaatgagccatgggcatatcttcaagcaaaattaagactttttaataattttagtcgattccctataaagacacctagatgtgtgtcatattttgtgatgcataaaaataattatggatttacttttgaaaaaggaagggcatcagatatactttattcatatgttaatacaacaaaaaatatattgcccattctttttctacctattttctggattcctctagcaggaatactatttttatatgttttgaaaagaaatgacctacttggtattgaggtaaaaatgctttcaagctctgctgtgtgttattacttaggttattttattgtaacaccaacaccagactatagatttatttattggatagtactagcaactactgtagctaccttccttttattatgtgatagatatagttatacatcttctgaatttagtaatatataa

SEQ ID NO: 9191 - DNA, 1581 bp, Lawsonia intracellularis
atgaagagtgatcctgttataatccttggtgctggtccagcaggtcttacagcagcgttagaattacttcgctcaggaaaacataaagtaattattgttgaattagaaagtcaggtaggaggacttgcgcgtaccattgtttataaaggaaatagaatggatataggagggcataggtttttttcaaagtctgctcaagtcatgaaatggtggttggatatcctgccgttgcaagggaaaagtgataagaaggacttcccttcaagtagccaggaatataacagagatgaagacgttattcatggtccagatcctgaaaaagaagatagagtcatgttgattcgtagacggttatcaagaatattttatctccgtaaattttttgactatcctatttctctaaaatattcgacaataaaaaaattaggtatactacgtgtagttaaaatgggaattggatatataagagtttgtttttttcctataaagtcagaaaaaaatttagaagacttttttattaaccgctttggaagagagttatataaaacattttttcgtgattatactcaaaaagtatggggggtaccttgttcagatatttcgccagagtggggtgcacagcgtataaaaggtatttctatagctagggtattacgtcatgctatccgtaaaatttttcaatctgataaaacaattgagcaaaaaaatacagatacaagcttaatagagcaatttttatatcctaagtttggtcctggtcatttatgggaaactgtagctaaagaagctactgcactaggtgctacacttttattaaatcataaagtagttggcttagatatagaggattctcaagtaacagctgtatatatagaaaactgtaataatggtgaacaatctagagtagactgtagtgcagttatttcttcaattcctttaaaagaacttgttgaaatgtgtaaaaatgcaccatcatcagtacaagaagtaagtaatggtcttgtatatagagattttattacagttggtctgttagtaaaaaatttaagattaagagatgataatgatcgtgaaagtaatcattcagtacctataaaggataattggatttatatacaagaatcagatgttgttattggacgtgtccaaatatttaataattggagtccttatttagtttctgatcctcaaaaggtatggttaggacttgaatactttgctaatgaaggagctcatttgtggagtatgagtgatgatgcgtttaaacagatggccattcaagaacttatttctcttggatttattacatgcttagatgtagaagacgttacaatactacgagtgaaaaaagcatatcctgcttactttggtacctactttagaatagctgaagtacaaaaatttttggatagtatagcaaatatgtatcccattggtcgaaatggcatgcatcggtataataatatggatcattctatgcttgctgctatgcaagcagtgaagtgtttaatggatccttctatagataagtcagtattatggaatattaatatagaaaaagaatatcatgaaacaaattag

SEQ ID NO: 9192 - DNA, 666 bp, Lawsonia intracellularis
atgaacaattttattacttatagccaacctactctcccagctggatttgtagatgtacaaaaagtaatacaaagcatattagttgatctaaaatatgtaggaagcgataattttgtaggaagacccattccagggtataatacaaatcgggtcatattatcaaaagaagctactgttgctcttgcaaatgtacaaactgaattgcaacaatttggtcttagtttattaatttatgatgcttatcgaccaacacaagctgttgacgcatttattaactggtcaaatgaaccagaagataaaaaaataaaacaaaagtattatccaatacttacaaaaaaagaaatatttgatcagcaatatattatgaaaaaatcttctcactcacgtggcagtactgtagatttaactattgtttcatttaataatacaacaaatcaaaataacatgttttatactcctcttgatatgggtggtatttttgattttttcggtaaagagtcacatcctgacttccaaaatattaccccccaacaaaaagcaaataggctatttttacgtacaattatgacaaaatacggcttcactccaatttctaatgaatggtggcatttcaccttagctaatgaacctttcccagaaacatatttcaatttccctatagaataa

SEQ ID NO: 9193 - DNA, 567 bp, Lawsonia intracellularis
atggcagaatatcggactataactactccattaattaaagaagttacacgttctttacatataggtgagcatgttttgatttcaggaactatatatactgcaagagatgctgcacataagcgtatgatagaaacgctacaaaaaggagaaaaacttcctgtttcacttgaaaaccaaattttgtactatgttggtccatctccagctaaaccagggcatattattggttcagctggtccaacaacaggtggaaggatggatagttatacaccagcaatgttacagcaaggtcttacaggtatgattggtaaaggtaaacggtctgcaaaagttttaaatgagttaaaaacttatggagcagtatattttgcagctattgctggagctggtgctttaatttcacaacatattataaagtacactgttattgcttatccagagttaggaccagaagcattagcagctatggaagtaaaagattttccagttattgtggtaggggatacagaaggaaaagatttttatgttgaaggacctagagagtatcttaaacatatagcaagctag

SEQ ID NO: 9194 - DNA, 846 bp, Lawsonia intracellularis
atgaaggaaattcatgtatcagtaatagaagatactgttgctcaattagcaatagatgcttgttgtaaattacctcacccagttttgacagagtttaaaaatggtattcataatgagtcatcaccactagaaagttgtatactacaacatcttgttaataatgcagaacttgcagaaagagaaatgatgcctctttgtcaagatactgggcttgctgttatttttacagagattggtcaagacgttgttattactggaggagattttgaagaagctattaacaaaggtgttagaaaagggtatatttctggatatttacgaaaatctgttgtagctgacccattatttgaacgtaaaaatacaggagataatacaccagctattatacatactcgtcttgttcctggcgatacattaatgataaggtttggagtaaaaggtgctggtgctgaaaataaaagtaaactaaaaatgctaatccctgctgacggtatagatggtgtaaagcggtttgtacttgaaacagtaatggagggaggagcaagtgcttgtccaccactagtagtaggtattgggattggtggagatctggagatagcagcaatctgtgctaaaaaagctgcattacgtgatattgacactcataataaaaatccacaatatgcagctcttgaagatgaattattacaagagattaataagatggggcttggtccacttggttttggtggaagaatgacagcctgtaaagtaaatattgaattttttgccacacatattgcctcattgcctgtagctgtaaaccttaattgtcattcagctcgtcatacagaggtctggttataa

SEQ ID NO: 9195 - DNA, 606 bp, Lawsonia intracellularis
atgttattaattgcagtagctttatgtttttttggtatgtttcttatgtttttttatatagtttttagtcaagatagaatagtaagaacattgaatagaaaatataaagaattctatgaacaacttagtaaaattgagtctgctgcaaatgctatctatttttcttcaaataggccttatccagttgaagacactttttctatgcaacagccacagagtagtcctaaaaggaatgctccacagcctgtagtaaatcaaaatataccctctccaacaatgcctccaaacaatttatctatgaataatcagcagaatgtgccacaggcaatggcacttaataataataataataataataggaatatgcagcctgcccctcagtatcaacaaatgaacgtaatgggtaatggacaaggtcattatcaacaggatgtttcatatgcacaaagtacacctactggagctcatatgggacaaataatgatggaagatgtttttccattacaagaagatatgatagctggaggacctgaaacctctataccagctagacaaggagaacagagaatggataaaagtagtatgctggaactattgcagctttaa

SEQ ID NO: 9196 - DNA, 1050 bp, Lawsonia intracellularis
atgtctttaattcgttcacaagcatatactaatgctggggttaatatcaatgcaggtaatgccttgatctcaaatattaaatcgtttgtttcagaaacaaatatccaaggtgtactttctgatcttggtggttttggtggactttttaagcttaatcttactcaggttgataatccagtattagtatcttctactgatggtgtaggaacaaagttaaaatttgcttttgactttaataagcatgacacagttggtattgatcttgttgcaatgtgtgtaaatgatattttagtgcaaggtgcacgtcctttattttttcttgactattttgctacgtctaagcttgatgtggataaagccactcaagttatttatggtattagcgagggatgtaaacaggcaagatgtgctttacttggtggagaaacagcagaacttcctggtatgtatacagaaggtgaatatgatttagcaggattttgtgtaggtattgtagaccagtccaagataattgatggctcatctattaaggttggagataccattattggattagcatcatctggtattcactctaatggatactctcttgttcgacaaattattaatcagtgtgctattgagcctgacaatattatacctggctctcgggatactttcaaacaagtactattaaaaccaacatttatttattctgatattatttgtaaccttattaaagatatttctattaaaggtatggttcatataactggtggtggtttttatgataatattccaagagtattaccacaatcagttgtagcaaatattcaatttagtagttgggatatacctcctattttttattggttgcaggaacaaggttctttatcttggtcagaaatgttacaagtttttaattgtggaattggatatgtactcataatacccaatgattctgttactcgagctatgaatatcttaaagtctatggaagttagtgcatggattattggttctattgagaaacaaaatgttggtgacgagcaagttatcataacatactag

SEQ ID NO: 9197 - DNA, 378 bp, Lawsonia intracellularis
atgaataaaaaaaaatccctatacctattattcataggatattgctaccaatttcaaataaaacgattactgttgttaatgactattataatagcaaatactatatttggatttaaatatattatttgtatatcacatgcctatacaataacaacaccaaataatccgagtatctttataggaacagatattaaaggtgataaaattattcaagttgtaactccaatatcagatatggaacaacaacctaccccaccacttattataatacctaaagtttctgtcccttgggaaccaactgttccaatagttaaaccacttgatacaattacaccagcaacaccaaaagtccaatcaattaatcccatgaaaaaatga

SEQ ID NO: 9198 - DNA, 957 bp, Lawsonia intracellularis
atgactaaaaatccttttatcactagaaaaaaaaagatacattatgtaaataaaaaaaatttacaatcttgtaatgataaacaaaagaatctaactaaccaagatgaacttactgatagctacaactttttccctgtacaagaagaaccatcttcagatgaagaactttttttacaacatataggacaaacacagaaaatacataacaaaaaatatgtattaccttatcataaggaaaaaatatctaaaaatataactataaataaaaattctaggaataaattaacgttagatacaaaaatagataaaacaaataaccaaaaaacaataagtagtaataaaagcactattcagacttcacaaagcaatattcttttaccaaatgataacctaactgaaaataatacttttcttacagcagttaaagatgttgttcctctttcaggaaaatcacgtattactacctattgtagaccaacaaagtggactcaaacagatataacttctctaaccacaaataaaaaacctattaaatttaatatcgtaaaaaaagaagaacagttagaaggacatatagaaggctttgataaaaaattgtttacacaacttcaaagtggactttttcgtccaaaaacaacattagacttacatggttttaacatacaacaagctttttatacagtagtaaaatttttacacacagcctatataactggtcaacaacctgctctaattatatctggacgtggaaaaaattcacctcaaggtatacctgtgttaaaagaaaaactttatgaatgggttacacaagagcctctaaaaagagttattcttgcattttgtactgcacatgctcgtgatggtggtactggagccatctatattcttctaagacagtacaaaaaaacatggaatattcactgggaacaacgtccactagatccagacctattataa

SEQ ID NO: 9199 - DNA, 2088 bp, Lawsonia intracellularis
atggctacttttattcttgaaattggtactgaagaacttcctgctcgttttcttctagaacttcaatcagagcttggagttcgttttttagattctcttcaatcaatgggttatcgacctacagaagtatctgattattccacaccacgtagacttgttgtatgtattaaagggcttgatatgattcagcctcattgtgaagaggttgttataggtccacctataaatatagcttttgataaagatggcaatccaactaaggctgctgaaggatttgcaaaaaatttaggtataaccataggttcactttcacagatatcaacagataggggagaatatatttcaggattgaaagtaaaaggtggtatccctacaaaagaagttttagctaggttatgtcctgaaattattactgctttacctcttccaaaacgtatgcgatggggaaataatccctttacttttatccgtccaatacgttggattatggctttattagattcagatattgtaccttttgagttagctgggattcattcaaatagaaatactgttggactaagaaataataatgttccatttattgaagtgccttcctctacagattattacatgttattaaaagaagttgggaatgtaatacttgatcctaatagtcgaaaagatagtattcttcaattaggaaataaggaagcacagctcataggaggggttgtcaattggaatgaaaggttgttgaatgaagtcataggattagtagaacatccttaccctttgttaggaactattaattctgtctttcttaacttacctagagaagtgcttttaacaagtatagaaacccatcaaaaaagctttggtatcttagatagccagggtaatttattaccttattttcttacagtgttaaatatgactcctcctgatcttgcattagtgaagcaaggttgggagagagttttacaagcaagacttgaagatgcccgatttttttggaatgaagatatcaatagttcatttgatgaatggcaagaaaaacttactcatcttattttccttgatccacttggtagtattgctcagaaagaacatcgagttagtctactatgtgagtggattgctaagtatataccaactagtaatgctgaagaagctagaaaagctggttcactttctaaagtagaccttgtttctaaaatggttgaagagttcccagaattgcaaggtgtgatgggaggaatatatgctcgacacaaaggagagtctgagtccattgcaacagccattgctgaacaatacttaccttctgggcctgatactgacgttcctgtaacagatcttggtgctattctttctatagccgataaaattgatacacttgtaggctgctttggatgtggtataattccaacaggaacagctgatccttatggattacgtcgatgcgcattaggaattattcgtattttgattgaaaaagaatatccaatcaatttacatcagctttatacaagagctcaagataactttgtaaatgtatcttggaaattagctcctgaggatgtattacaaaagttacatgaatttattatagcacggttaaaaaattattttttggcattagggtatgatacattggtagtagaggctatagtaagtacacagacaagtcaattatggtctataaaagatagattagatagctttattttattgagccaacatgaagacttttcccaattagttcagacaattaaacgtgttattaatatcattaaaaagcaagataaagaaacggaaattgtattaactggacattggaatccctctttatttaaggatactgctgaaaaagtattggcagagaaactaatgatagcagtaaataagtttaatcaagaaagtcaaacagctagtttacctgtttttatgatgttactaaaattacaaccagctattaatacattttttgatcaagtaatgataatgtctaatgacatagaagtaagaagaaatagattaaaccttcttaaagcattacttttgtatattgaaagccttgcagatttttcagttttacagatataa

SEQ ID NO: 9200 - DNA, 885 bp, Lawsonia intracellularis
atgtactttcaagatattatttttatgctacaaaaatattggtctagtagaggatgcgtgattgcacagcctatggatattgaatgtggagctggtacatttaatcctgcaacatttttgcgtgtaataggccctgagccatggagtgtagcttacatagagccatctcgtcgtccaacagacggtcgttatggagaaaaccctaatcgtttacaaagttactttcagtttcaagtagtattaaagccatccccagatgatattattgaacaatacttaggaagtcttcaaatccttggaattgactctacacttcatgatatacgttttgttgaggatgactgggaatctcctacacttggagcatggggattaggttgggaaatatggcttgatggtatggaggttacacagtttacatattttcaacaggttggagggatagacctagaacctattagtgtagagttgacatatggattagaaagattggctatgtatcttcaagaaaaagattcagtctatgatttacagtggaatgaatatgttacatatggtcaaatgtatcatcaaaatgaagtagagcagtcatcgtataattttgatgaaagtgatgtttctatgttacttaaacttttcaaagattttgataatgaatgtagacagcttattaagaaaggttttgtttggccagcatacgattattgtcttaagtgttcacacacatttaatttgttagatgcacgtggtgcaatttccacaacagaacgagcaagttatataagtaaagtccgagcacttgcctctagtattgcaaaactctatgcattacaacgagaaaaaatgggttatcctatgctgctcaagggtagtggagagatttag

SEQ ID NO: 9201 - DNA, 750 bp, Lawsonia intracellularis
atggaatggttagataatgctattattctagagttaggctcatttagagaatcagatgtatgggttaaattacttacttcacagcatggtgttatttcagcctttgcatttggaggtcatcgtagccgtagacgtttctgtgggtgccttggaatattaaatgagatacaagtaagagtccaaacaagtcgaaacggtcgttttttaaacttacaagaagcatcactaattaatgggcctatacaattacgaacaaataaaaatagatttggtgcatttataaattgtatacgatttttggaagttgttggtgtaagttcagatgctgcaccacctgtttatactttaatgaaagaattattctatttctttgaaaaaaatactcaaccttatgaaattatccctattttatttcgcttacgtatagcttctgaacaaggatatgcacctattttttctaattgtgcaaaatgtggtaggctaattaataataaaggtttttttgggatttcagatggaattattgtatgttcaatatgtataaattatataaaaactccaattgctataggatatgaaagccttgaacttctaaaacgtgttcagttagcatcgccatatgattggaaactttctgaaaatacaaagtcagcagcagctcaaaagtatgaatgtacagagataattaatgcgtttgttgaatatcatttaggtattacatggtccaaaggacgatttttaaaagtttag

SEQ ID NO: 9202 - DNA, 1020 bp, Lawsonia intracellularis
atggagaatcatatagataatagccaagaagtacattctgcattaaaagagattggttctcttctttatcaagaaagagtaaaaaaaggatatcgacttgaagatattagtatttatttaaaaatatctattcataccttacaagcaatagaagaaggaacaatcgattcattgccacacttagtatatactaaagggtttatacgttcttatgctcaatttttagatattccagagtatgagttaacatcaattttttatcgaattgagcatactgaaaaaacaaatgatgagggagaggattatccttttaaaaagaaaaagtttttttcgccatatgtttggggaagtatcttaacttttttatgtatattagcaggtagttggttattttattctagtgatataaccttcagttcttttgatgtaatagctcaaatgacagatagtggtaaaaaagaggtattacccaatcaaaaaaaagaagaaaatcaatctgaaggttcattatctttaccacagcagcagagtcaggaaaatataaaaagtaattcttctgtagtagtgacaaaaataccagagaattttcaggatcacatagtaattaagaaagaattagagctatcatctaaagaagatagtagttcccaattatcagcccagttagatgaaaaaagtttttctcaatctactgatatgacaaataagtctgataagtctgatgtatctgataagagtgttgtagaacctgtacatatgaataaacctgggaagaaaaatatagttgttcttaagggattagaagactgttgggtacactctacagcagataagacagaaactcgtcaattttatgttcaacaaggacaactagttgcattatcatttagtaaaagtcttgttttaaaacttggaaatgcaggtggtattgagttaaagtataatggagaaaaacttccaccagtaggtcgctctggtcaagtaaaaacgatcactcttcctttagtttcccaaaactag

SEQ ID NO: 9203 - DNA, 927 bp, Lawsonia intracellularis
ttgcgtttttttatttttttattgttattatttataagtatattacctgtatccgctgaacagtttattaataagactgttgctgttgttaatggagaaataattaccttatttgatctacaagctgaaactgctccagaaatttttagacaacaacttaatcctaataatcctgctgataaagcaaaagttgaacagttagaaaaagctatattagaaggtatgattagtaatcttattcttacacaagaggcagagcgtctccatgttaatgtgggtaaagatgaagttgaaagtgaatatcataactttattgctaagagccaacttactcctgaagagtttcaatatcagttagagttgcaacatctgacagaagatagttttaaagaacgtattcgtagtagtatattacgttctcgccttctaggagcaatggttgggagaaaaattgttgttacaaagaaagaaatagaagattattatcaaaagaatcatgataaacttaaaaataataatcagctacaattagcaatattagtttatcctcctgatattaatgcaaaagattgggctgctcgtattaaatctggttcagtatcttttgaagaagtagtaaaaaaagtatctgttggtccaaaagcaaaagagggtggcgatcttggctctatagatatagaagacttaaatccagagtggttggaacaactttcaactatgaagccaggagaggttacatctttaattgatataaatggattacaaggtcagttaaagcttattaatattataaaaggagagcctcagacacttgaaactttgaccccttatattgaagaaattcttcgtgagccaaaacttgaagaacgattcaaagaatatactgatcaacttcgtaaacgtgcagtagttgatattagatattag

SEQ ID NO: 9204 - DNA, 918 bp, Lawsonia intracellularis
atgtttaactggctgtatatatttattatttttacactatattattgtgtctttccattctctctatatgctgtagaaaattttccatcaggtgtaatggctatagtgaatggagaacctattacactacaacaagttgaagcacttcatgatgtttctggaaatattttaccacttagagaaaaaccagaagttcattttttacaggagcagtatggagatagtttatatacactaattatatatacattaatgtcacaagaattaggaaaactaggtcttaaggttacggagcaagatgtattgcttgctgagaatgaaattaaacaagattatgttggagaagactttgaaaaaagccttcaggaagaatatttagatattgaaacctggcggcaacttatgaagcaacgacttacttttcagcgttttcaacatcatatccttcgtccaaagtttactctttcttcagatgaaattgaagaatactactttaaacattattcagaattttttattccagaaaaagttgaaattatttggtatcaagaggtagaaaacagtcaacagagaaaagccaagcataaagattgtgataggaatgatattgaacaaggggacataataagagttgctttagatcgacttccagcgaaaatgcgccaagatcttatgaaaattaaacctggagaatatactcctcgccataaagaaggtgaaatttatcagtatgcttttttacggaaaagatatcctgcacatcaggcagacattattgaagcatattctcgaatagagctcatccttttagaacaaaagatggaacaagcttatgaagactggttagaacaagttattccacaagcaaaaataaaagtttgtcctcaattccaacctaatatcatatataaagaatga

SEQ ID NO: 9205 - DNA, 3468 bp, Lawsonia intracellularis
gtggagtataaagaatgcctaaaacaactccttcgttgtcaaaataaacgtattgcattacaaaaagcaggacttgctactcaagtaaaacttagtgttgatctcattgcacatggtgcaaaagtattacttatagcacgtaatagagatgagttaggaactttacattcccttatatctgtttttacatcagaagggggacataatgtattaaaatctaataatatatttaacaacacatgggtaacactttctccttttacatcacgctctttaagtaaagaaggttgggctgagcgtcttgctgctctctatgcacttagatatggtaaggtacaaggccttattcttactatagacaatttgcttcctaaagaagttcctctagatttttttgataaccaagttattcaactatcagttggagaagagctttctccagatatcattcttgaacaagctattacttggggatacgatcgagtgtctatggtatcaaatccaggagaagtatcacgacgtggtgatatttttgatattatgtctccaggatatcactatcctctccgcttagacttttttggtgaaacattagaagaaatccgcttttttgatccattaactcaacgatctaaaggatacatcgataatgctattattcttccagtctaccctgtccgttcaggtactgagtatatagccactatagaaagctattggaacaagttgcttaaagagaatgtaattactgagaatgaacattacagtctttttcgtttgcttgaacaaaaagatttttctttattaccaggttgttgttatgaaaatgctactacaatagagcagtgggttaataaagataaggtttggatattaccaagccttcatgaagcagaagatattcttacttccatggagaatagttggaatgatcgtttaaaaagagaaagtggatttatacaacctttagatttagctatacgtaatactcttcaagtaaaggagttatggtgtcaatctactatagttcatactgagtcactagatattgatattgatgatcaggaagaagtagtagagttaccagaaaaggctatttctagtttccaaatgttatttcctacagttgctgaacaggatagaccctggcaacatcttatacaggcaataaaaaagtggaagcaagataagtatcaactaatcctgtctttttcttctgagcgaagtagaaataagttccttaaccttgcagagcaagatggtgttacaccattcctagagtaccatccaacacagcagggttgttttgctattattagtccattccgtgtaggagttgatctttcttggtttaatatccttattttaggagaagatgttctccaaccacacactgggaaaagcagacaggctccagctgaatcttttaaaggacttagtcgatatgatgatctcaatccaggagatcttttagttcataaaaattatggcgttgcccgttttggtggccttattaggatggatataggtaaaatatctaatgactttttgttattagagtatgctggtaatgataaactttatcttcctgttgataggctttctttaacacaacggtttaaaagtgttaatgaatctttccctcagcttgatagacttggaagcacatcatggcaagcaagtaaagataaggctaaaaagtctattgaaaaagtagctgaagatataatagagatgtatgcttggcgtaaagtagcaaagggttttacctacccaccagttggtgatttatacagagagtttgaagcttcttttggttttgaagaaacaccagaccaagcaagagctattcaggatgtcttagctgacatggaaaagagtgaaccaatggatagacttgtttgtggagacgttggctttggtaaaacagaagtagcattgcgtgcagcctttcgtgcagcctctgaaggtcgtcaggtagcattactttgtccaacaactgtcctagctgaacaacattattatactttccgttcacgtctttcagggtttggtataaatgtaggtctattgagtcgatttgttcctcttcaaaaacaaaaagagatttttaaagctgcatcaagcggtcagatagatgtactagtgggtactcataagctcctttctgactcagtttctttacctaacttaggattgcttattcttgatgaagaacagcgatttggtgttaagcacaaagaaaaacttaaaaaaatgaaaaaaaatgtagatgtattaaccttaacagctacaccaatacctaggacattacagttatctatgtctggtatatgtgagctttctgttatagaaactgcacctcctgaacgtaaacctgtagccactgctattattaaaaaaaataaagaaaagcttaaagaaattcttgaaagagagctagctagagaaggacaagtcttttgggtatataatcgtgtccaaggattagaacaaattgtaaactttgtaaaagaattagttcctgaagcacgtgtaggtgtagcacatgggcaaatgccagaaaaacaacttgaggaaaatattcatgctttttggcatgcagaattagatattcttgtatgtactgctattattgagtctggccttgatttcccaagagcaaatacattgattgttgatcaagcacatatgtttggacttggacaactatatcaactgcgtggaagagttggtcgttctgacaggcaagcatatgcagtatttgttatttctgatcttgaaagtctttcagaacaagctcgtgaacgtctaagaatcattttagaacttgattatcttggtgcaggttttcaagttgctatggaagatctaagaatacgtggggcaggaaatatactaggagaagcacagtcaggacatattagtagagttgggattgagctctatttagaaatgcttgaagaagctgttactaagttaaaaggagaaggtgttacatcttatccagaaacagagttaactcttgggttgacagcgcatataccacaaaattatatttcagatagccatgagcgactacgttggtataaagcactatcgtctgctcaaagtgttatggctcggaatgaaattgagttagaacttcgtgatcgatttggtgtcttgcctaatgaacttaaagcatttatagctgtgttaaattttaagcaatttcttactgagtcacaggtaataaaagctgaaatttatgaggataagattaaattagtatggccagaaaaacaaactgttgtatcttttgataagttaatgctatttatttcagcacagccggataaagtaaagctttctccgcctgctacactagaaataaagcttaatacaactttaccaatagaggatagacttatttctctccaagaagagcttagtgttgtatttagttatgatagcataaaacaataa

SEQ ID NO: 9206 - DNA, 1584 bp, Lawsonia intracellularis
atgttaaaggatatagtaagaattattaagaaaatgacgcatacaatggggattatgcttgttgcatgcatttttattggtgctgtatatttattatatcgcgaagttagtaaatatagtttttccgaacttaaaatgagtgttgaaagcatttcttattggagtttgtttttatctgctttgctagctatcttaaattatataattcttgttgggtatgattggcttgcattaaaaggcattcataaaagacttcctttaaagaaggtagcacttgtttcttttgtggggcaagcagtaagttataattttggtgcattacttgggggaagtaccattcgatatagactttattcgtcttggggattttctcctatggaaattgtaaagcttgtccttatgcttgccattactttttgggttggtgcttttggactagcaggactgatttttatgtttgttccaccagctattcctcctgagctggcagtatattttccaactgaagatattcgtccattaggtgttgttttatttgcattagctgcaggatatctttttatttgtaaactgattcataaaccagtacatatttttggtaaagagttttcatttcctccatttaatattgctatagctcaagcagttgtcgctagtgcagatcttgtagcagcgtcagcatgtttatatgtactccttccagaagatgcaggtatatcttttatacaatttcttccaacttacttaatggctatggttgcagttgtcttaactcatgtccctggaggtgcaggagtacttgagatcgtggttattcatttaacaaacactactccccaggctatccttgcggcactattatgctttcgtgttatttattatctcataccattaataattgctgcagctatgtatcttatgtatgaagttaaccaacaaacacaagagaatatcaaattcttaaacaaaatggggagatatataaggatacatattccaacaattacttctgttattattttcactacaggtatcatgttatgttttatggctgtgtttcctgttcgctattataatatgaaactattagaaatgttgcttcctgtctggatgattgaactaggaggcattattacaggggtagttagtatatttttattctttttttctattggattaaaatataaaaggaaatatattctgtattatacattagttttattacttattggatgtgtaagtgtattgacgtctacattaaatttttttattactggttttcttattattttaatagttttattaatctgtataaaaaaatatttttatataaaatcttctatatggaaaatccattttaatataaggtggattattacatctttctgtatagttatatgtgctgctggattaggttttagtctgcgacatattgacgtaacaaatattcgttggttggcttttgtttattttaaagatggccataaacttatacatattctttttagtgaatgtgttattattggtattctgttattaaagtatatacaaatacattatatgaaaaaagtacggaaaaagtaa

SEQ ID NO: 9207 - DNA, 474 bp, Lawsonia intracellularis
atgagcattcctatttcacaacaaggttatcaaaaccttgaaaaagaacttgatcgacttaagaaagaacgtcctgctgttatccaagctattaaagaagcacgggaagaaggtgatcttaaagaaaatgctggatatgatgcagcaagagaacgtcaaggtatgttggaagcaagaataaattatattgagtctcgtatggcacaatttaatattattgatataacaacactttctggtgataaagctatattcggagctacagtaactgttgaagatatcgactctggagaaagaaaagagtttacattacttggccctgatgaagcagactatacaaaaggatcaatttctattcaatctcctgttggtagagctctacttgggaaaaaagttggtgacgaacttacagtcgatgtcccacgaggtcgtattagctatgaaattatagatatccaattcaaacaccaataa

SEQ ID NO: 9208 - DNA, 1311 bp, Lawsonia intracellularis
atgaataacaccccttggacattttcgattgttacatttggttgtaaagtcaatcaatatgaatctcaatctatacgagaagcatggagtaatttacatggagaagaagtagctacaccacagactgcagatattattcttcttaatacatgtgctattaccgcaaatgctattactgatgcccgtcaattgatcaataaacttcaccgagaagcacctaactctaaaattattcttactggatgtgcaacagatttaaccaatgaagccctatataaacttcctggcgtatatacctttattagtcaaaaaaataaaacacaacttctttccaatcttccacttacacaattaaaccaagatcaattacaaactaacactaatacatttccacaattctctatcagtaattttaatcgttctcgaccgatagttaaagtccaagatggttgctctcactcatgtacatattgcatcataccatcaacaagaggcaagcccaaaagtcgatcaccaaaagaatgtcttatagaaattcaacaacttcttaatgctggattcagagaaattattctttcaggaattaatttacgtcaatatacagctactcaacaaggatgcaaagatttttgggaattatattcatttttagataaaaaactctctccaacttggaagggtattgcacgattacggataagctccctagatccagcacagctcactcaacgtggtcttgacatactttctaatagtcatatggggtgtcaacaattacatctttcaattcaaagcggaagcgctgaaatactaaaaaaaatgcaccgttcacattatactcctcaataccttttagatactacaaaaaaactctctactatttggcacaagtttggattaggagctgatttcattataggcttcccaggtgaaacagaaaaacatttccaagaaacagtcgatcttataaaagaactacctcttacctatggacatattttcccattttctgctcgacctaatactattgccgcaacccttccaaaccatattaaaaaatctgaaagtcaacaacgtgctgctacaataagacaactcattacacaaaaagaaaaaatttttcacaaacaactcctcaccatgtcaacattgcatatagctcctgaaggtggaggaaaaacaggaggagttgatgaatattacactcactgtcatttaacagagcctgtcgaaacacgtcaacttctaaaagtaaaacctctatctctgacaaaaaaaggcttattagtagaaatattaccccctcattaa

SEQ ID NO: 9209 - DNA, 882 bp, Lawsonia intracellularis
atgttacgaagtatgacaggttttggtcgctgtgttgttgaagatagtgattggacccaaacatgggaaataaaaagtgttaatagccgatatcttgatcttaaatggcgcttaccacttatagcacgctctttagaacaaaaatttgaaaaaattgtacgtaaatatgcatctcgaggtagagttgaacttaacctcaccatacaacaaatagagtcacaagctacacctctttgttttaatgaatcccaagcattatctatgcttaatgccataactgaattagcaaaaataagaggagatactttttcacctgactatatgcagttactttctgtttcttctttatgggaaaaaatcgaagatgaaaatgataacaatatagaaggcagacttgaagaaggacttatagctgctttagaagactggaacgaatctagagaaactgaaggttctattctttacaaagatctttcacaacgtatttcaaaacttaaagaatggttatcacaaattgaagatcaagctccttgtataaaagaagaacgttttttacaactaaaagagcgaatttcagaagcccttgaaaaagctggaggtttattagaggagactagatttctccaagaaattgttattcatacagataaactcgatgtcacagaagaattaacgcgtctttctagccaccttgatcgactttacgaaatccttggtaaaggttcagatgtaggacgtcgactagactttactcttcaagagtgctttagagaaatttctacatgtggaaataaaatccaagatgcccagatatctaaagttgtggtagaatttaaaaatgaacttgaaaaatgccgagaacaagtacaaaatttggaataa

SEQ ID NO: 9210 - DNA, 639 bp, Lawsonia intracellularis
atgactaaagaaagttctgttttaaaccataaagcttctggaactgctttagtaatatgtgctccttctggaacaggcaaaacaacacttattcaaaggcttagaaaagaatttccctgttttgcctattctatctcctgtacaacacgccctcctcgtaaaaatgaagaagatggtaaagattactatttcattagccaagaagaatttatagctcgaaaaaatgaaaaatatttcgccgaatgggcttatgttcatggatacttttatggaactcctcttgctccaatacttactattcttaataatgggcaagacattctatttgatatagatgtacaaggagccgcacaactctaccttactttaccatatgctaagtatatctttcttcttcccccaaccatggttgagcttgaaaaacgattacgctcacgtggaactgatcgagaagatattatccaacatagacttctttctgcaactcaagaaatacgacaagcacactggtttgatacctggatcgtcaacgaaaacattgataaagcatatgatgaactaagagctacttatttagcatccaaattatctccaaagtttcaaccaactcttattacatctatcttagaaggatggtaa

SEQ ID NO: 9211 - DNA, 690 bp, Lawsonia intracellularis
atggctaagcttatcgttgccttagattatacatatgcttctgaagcccttgccatggctaatatacttaaaaaacatgttgaatgggtcaaagtagggttagagctctttactcatgaaggacctagtatcattcaattattaaaaagaatggggtttaaggttatgcttgatctcaaactttttgatatcccaaatactgtaaaaggaagtgttcgctcagcttgcttaatggatgtagatatgctcacactccacattttaggtggagaacacatgattaaagctgcactcaatgaagttcaaagttctatacaaaaaaaatcacactctcctcttctctttggagtaacaatacttacaagtataaaacaaggagaactcccaggatataatcaagatattgcatctatggtgcttaatcttgcagcatatggtcagcaatggggtcttcatggtatagtttgttctggccaagaactaacaaaaataaaagcattatacccatctttatcatgtttgacaccaggaatccgtatgtcttatagtcaaaaagacgatcagcatagagttatgactccaagtgaagcagttaaagcaggaagtgactttttagttattggtcgaccaataacacaagcagaacaaccaataaaaatagtagaagacattatatccagtataatgtaa

SEQ ID NO: 9212 - DNA, 819 bp, Lawsonia intracellularis
atgagtgaacagcaacaagcaaagcgtatccgtggagttttttcctcacaagaaatccgtaaagttggtacaggaactacaacacgcaagacagttagtaaaatcttctggtttgttgaacaagctgaagatggtaatatttttatacagtcaattaatacaaactatgtacctacggggttacctaaatccataactatggaagaacttctttcaaaatattcccctgaacctgaattttatgtacaatctgttttccctaagatgcaacaacttgcagaatcacttaataaggctgatgaaagtcgtgaaaaaggagaaacatttactgctgaatttgaatatgaaaatgcacttaaacttgatgaagaaaatgttagagcaaactttggaataggacttacttatctttcacgtggagaatcagaaaaagctgataatatctttgaacgtcttgtacatcttgatgctgcatttgaagagcaacataaacatctatttaatgagtttggtatcaatttaagaaaaaataaaatgtataatcaagctgtagattattatactagagcacttgagcttacaaaagcagacgaaaaccttcatattaatatggcaagagcgctatttgaacaaaaaaactacacagcatgtatagatcaactgttccaagcactagagctctctccagaaaacactacagttatccaatttttaacatggttagataataaaaaattagttcctcaaagccatcaaaaaaaagttactgataccatacaatctataacaactaaaaatagttctaaaaaagatgactaa

SEQ ID NO: 9213 - DNA, 1707 bp, Lawsonia intracellularis
atgaaaaaatggcttactgctcctattagttcccaaatacctttacactgggccaatattctccatattccagaacctattcttatcctcctttggcaaagaggtattacctctttagaagaaatgaatatttttctttcccctaaacttcagtacttagcacacccaaaacactggagtggaattgaagatgcagtcgaacttttaaataatgctatagaacaaaaacaacctatcattgtttggggagactatgatgtggatggagttactggttctactgttattcgtgaagtactaacatttcatcaagctcaaattattgtacatctcccagatcgcaaaaaagaaggctatggggttaatatacctgtaatagaacaattagctctagaacatccaaaagcacttctgattactgttgactgtggaattagtgatgttaaagccatataccgtgcacgagaacttggatttacagtcattatttctgatcaccatctccctcctacatctttacctccagcacatgtaatctgcaatccccgtataggagaaaatccttgttcataccttgcaggtgttggtattgcttttttcctgatggcagcacttaataataaacgtgctgagcaaacgggtcagcgtatggatatgagagatgttcttgatcttgtagcacttgggacacttgctgatatggctatgcttagtggacaaaatcgtattttagtaaaaaatggacttcttaaaattgctgaagctaagagacctggaattgcagcattgaaaactgtttctggctttactcctttaacacatttaggtgctgggcaggtaacattccaccttgcacccagaattaatgctgcaggtagattaggtagtcctcggatagcacatgaaatgctttatacaacctcaaaagactttgctattgaacatgcaactcttttaaataagataaatgaagaacgccgtagtgaagaagaatatatttttaatgcagcattagagcaagctcagttagaaaatcaaagacaaggacttgttcttcatggttctgactggcatcaaggtgtccttggaattgttgcatctcgtatcacagaagctgttcataaacctgttcttatactctgtactgatggtaaaatgctgaaaggatcaggaagatcaattgctgattttgacttataccatgggttatctcaatgtgctgatttatttgaacgctttggaggtcataaacaagctgcaggattaacattaccaattaaccatcttcatattctaaaagaacgatttgatactgttgttagaaatttttttggagatacacctattacacctattcttcatattgacatggaactcccttttcaaaaagctactaactttaattttttaaaatctctagaattattacaaccttttggaataggaaaccctgaacctatttttagttctcttcctttacgtatccaacgttgtaatacatttggaaaacataaagaacacattaatatgttagtagtagaagaaatctcaggcatatcccttcaagctaaaggttggagattagcaaaaaatatatcttcatccttacaaaactctcgaatccaattagcttatactccatcactcaacttttataatggtattagtagtattgaacttgaaataaaagattgggttgaactttaa

SEQ ID NO: 9214 - DNA, 1227 bp, Lawsonia intracellularis
atgataacagcattagaacaatttcctataagtgagtatcaatcaaggattcaaaaatgtagagatgctatgaaccagaatttcccacaagtaggtgggatgcttgtttgctcgcgtcttaatatttattatttaactgggacattaggtgttgggcttttgtggattcctaatgataatagagagcctatattacttcttagaaaaggtcttgaaagagcaaaagttgaatcacccattaaacagatttatcaatttaaatcatataaagagattagaacgatttgtgaggaggccgggagtcctttatcttctactattgctatagaaaagaaagcatttacttggacaatggcagaaatgtttcaacaacgtgttcctggtattaactgtttgtcatgtgatggtattcttgaaaaattgcgatcaattaaatctgagtgggaacgtaaaaaaattcgtatttgtggtgaacgccataaacgtattcttgaagatatactccctcaagaattatcttcaggtcatagtgaacttgagatagcccatcttatttggaaacattgttttgaacatggacatcagggtatgttacgttgtaataatcctggagaagaattatttcttggttatgtatctgttggagagtctggtaattatccatcctattttaatggtgctcttacaggaagaggcattcatcctgcggttccttttatgggggatgctggggtgatttggaagaaacatatgttattggcagttgatatagggtttatgcttgaaggatatcaaactgataaaacacaaattttttggtctggtcctgtttcttctattccagataaaattaaaagagctcaagattgttgtaagtcaatttatgaaaaagttttttcaatgttacaacctggcgtaactccagaagaggtatggaatgttgctaaaaaagaatctcaatctatagagagtcctgcaacatttatgggtacaggtaaagatgctgtaccttttttaggacatgggattgggttaaccatagatgaataccctgtatttgcagcaggttttaaagaacctttacaggagggtatggttatagccattgagccaaagataagtcttcctggtcttggaacagttggtcttgaacatacattagaaattacagctactggagtacgttcattaacagggactaatttagatatcatacctgttgaatag

SEQ ID NO: 9215 - DNA, 417 bp, Lawsonia intracellularis
atgcaacacccgtcagatagtacacttaaagatattctctctcaatcaaaaactattgcaattattggagctaaagatgagcctaatacccctgttggtcgggtaggacaatatctcatcaaagtaggatatacagttattccagtccatcctatacgcaaatctgtctgggggatcccagcatatacttctattacagaaattcctgtgcatattgatattgtggacctattcagagcaccagaattttgtcctattcatgcacatgaagtcataagcttattacaaccaccacaacttttttggatgcaacaaagtattattagtccagagtcagtaaatattgttcaacaatatggaattacagctattgaaaacctttgtattatggctgaacataagcgattatttaattaa

SEQ ID NO: 9216 - DNA, 912 bp, Lawsonia intracellularis
atgatccttgataaatattataaaatcttgcatgttgataactctgcatttcttgatgacataaaacgttcttatagaaaattagcatttgctttacaccctgatttaaatccaactattcctcatgctacggctaaattccaacaactaaatgaagcttatgtaatattattaagagcatacaaaagtaatacttctaaatctcattcaaaaactactacaaaacagtctactactaatgctacacaacagaaaaataaagagagggataaagcttatagaaaaaataaaacagagtatataaaaagtactagcaaaaaaactcactctaaaaacccacataagaatagtatatttgaagcatctattgatgaaaactttgatgaaaagcaaaaaatattacaggatattttgaatgacgactttgctaggaatgtatttgaagatatttttagaactatccaaaataagcaaactaaatcttcaaacattcaagattcatccactcaaaattcatcacaaaataaaaagccatcaattataacaagactttttcaaaccataggacaaattactcattcatttcaaaaaggacaacaccccaatacttcatctccaaacaatgtaaaagtcacatatgggggaaaagatgctccaaacacagttaaatcatggttgaaaagtcaaatagatgaagaacaaactattgaacttcctgctaccgcacttaggcctggatcacgaatccgtttaaatattcgacaaggattctcagaaaaattaaaagtacttgatcttacgttaccatcagattttacctttaataagcaactctattttaaaggtatgggtaaaaaacttggacgatggcaaggagatctctatttacgttttatacctaaacgatcataa

SEQ ID NO: 9217 - DNA, 690 bp, Lawsonia intracellularis
atgaatatccttatatttggacctaatggaagtggaaaaggaacacaaggtgaacttatacagaaagcttttggtattacacatattgaatcaggtgttatctttcgtgaacatatctcaaaaggaacagagcttgggaaacaagcaaaatcctatatagataaaggtgaactagttcctgatgatataacaatccctatgattttagaaactcttcaaattaaagggaaaagcggctggttattagatggattccctcgtaacattacacaagcacaaaaacttcatgaagctatgctcaaaaaaggtgtaaaacttgattatgttatagaaatcacactacctagagaagttgcaaaaagtcgtattataggtcgacgtatttgtaaaacaaacaataatcatcctaataatgtttctattgatagtattaaacctgatggaaacaactgtagagtctgtcatggagaactcattgttcgtacagatgatcaagatgaggaagccatcaataaacgacacgatatttattataataccaaaacagggacactatcagctgctcattacttcaaaaatctttctgaccaatatgaaacccactatattcttgttaatggacaaaatactattgaagaaatccgaaaaacacttctagaagatcttggtatatcctcagaagtttcttaa

SEQ ID NO: 9218 - DNA, 1269 bp, Lawsonia intracellularis
atgaaacaacaaatattacgcatactagtagtattacctttttatggtggttctctacctataggacaatactgtactattgccttaaaagatcttggacattgtgtagaagtctttgattcaccttctttttggggatcatttactgcccttaagggtctacatattcgaaatagtaagttagaagagcttgaagcatcatttttacaaaacatttcacaagctatttatgttaaagccacagaaattgaagcagatttagttttgtgtcttgcacaggcaccagtaactcgacaaatactaaaacgctttaaaagagataatatcctcactgcaatgtggtttgttgaagactttaggttatttacgtattggagaaattttgctccttattatgattttttctttgtaatccagaaagagccatttttagaagagcttgcatctgttggtgttgctaatagttgttatttaccaatggctgcacttcctacttttcatcatcctatggatctttctcctatggatcaaaaaaaatatggatcagacatttcatttttaggagctggatatcctaatcgtcgtgtagcatttcgacaacttactcaatttcaatttaaaatatggggaaatgattgggataatgattgttttcttagaccaaatgttcaatgtgatggtaagcgtatctctccagaagatgctgtaaaaatttataatggtacaaaaatcaatattaatcttcattcatatataaaacacaagccatttgtttctaatggagactttgtcaatcctagaacatttgagatagcctcatgtgaggcttttcagctcgttgatcaacgccaactgttatcagaacttttttcagagaatgagatagctacgtttactactatagaagagttaaaggaaaagatacaatattttcttgcacgcccagaagaacgatttgttattgctgaacgtggtaggcgtagagttcttactgagcatacttatcaacaaagaatgagggatttattatcctatatttcagaacatgctgttgattggccaaaagagagagctattatgtcattacctgatgcagtttctacagaatataaagaagaacttaaggagttatttaataaattaaaaataactacagatagcaactttgatgatataatttttgcaataagacaagaatcaggtgtgttgtcacctattgagacatctcttttatttttagatgaatggaggaaattatataaaaaatag

SEQ ID NO: 9219 - DNA, 1221 bp, Lawsonia intracellularis
atgaagcgctatttagtcattcaactagctagatttggtgatattatccaaactgcaagacttatagcttcactacttagagaaggggaagttcatctttgtgtagataaaacacttgttgagttagcagaagctatctaccctaaatgtattgtacatggaattattgcacactacagtggagtacagcaggttattagagataattatagagtttttaatgaacttcattttttggagtttacagaaatatacaatctgaactactcaggtgtgaatatggcttttgctacactatttccttcagaaaaagttagaggttatattgtaaaggatggccaacctgttactgaaaaatggataaagatggggttcagatggacagcacaacgtaaagtttctccactaaatttagttgatttttggggtatgttagctccaaatccagttatacctcaggatgttaatcctgtggcaaaatctggaggaaaaggtttaggtattgtccttgcaggacgtcaagcacgacgctctctacctccagaaatattagctcctcttgtacgtattttttttgagcatacatcaggaaagaagatttatttacttggtagtaaaacagagcgttctattggacgtactttaatgtcatatttaccaagtaaacttatagaaaaaactgaaaatcttgcaggaaaaactaactggaatgagctggttgaagctgtatctgatttggatttagttgttacaccagatacaggtattatgcatttagctgcaagacttggtgttcctgtttgtggtatgtttttgtcttcagcttgggcatgggaaactggtccttatggagaaggtcataaggtatggcaagcagtcatagactgtgctccatgtattgaatctaagccatgcaatttaaatgtaaaatgtttgaaagcatatagtagtcctgaattccataaatctattgttggtataaaggaacagttatcaactacaatggcttgtttggagtcttcttttgatgagttagggcttatctggaaaaatgatagagaaaatacctatgttaaatctgttagaatggctcagagagcattattaatggagtatcaagggattactatagcatcttctaaggagtttccagaaatagctgatggtcgtttagctatgaatctttattcagaggcagactggatgttgccagatagatga

SEQ ID NO: 9220 - DNA, 678 bp, Lawsonia intracellularis
atgcagtattatcctctctttattgatcttacttctgcaaactgtcttattgttggtgctggtaatgttggtagacggaaattgtatagccttattaaagctcatacaaaacatattcttattgttgatcctttaccaccaggacaagaacttaaagcattgcttaaagaaaaaactgtatgttacaaacaacgaacatttattactgaagatatattagaaaagacgttagtttttgcagccacaaatgataaaaaacttaatcaatctattgctacctattgtaatttaaaaggtattttatgtaatattgctgatgcacccagtaaaggaacctttatagttccttcaattgttgaaaaaaatggtatttctattgctatttcaacaaatggtaatagccctgctttatctaaaaaactacgtaaagatattacagaatggcttggagatcgatacacacctatagtcacacttctatcaaggttaagaccactagttcttaaaacatctaatattaccttagataatacaacattatttaataacattcttgattctgcactctctgatgctattcaacaaaaaaatcgtcttcaatgcgaagaaatattaaaaaatacacttcctaaccacttacaaatacatattatggaattacttcatgagctggtctga

SEQ ID NO: 9221 - DNA, 891 bp, Lawsonia intracellularis
atgagctggtctgaattacttccaataatcattgttcacttttatgcactaggcacaatcactattgtatctggagtattatctcaaactaaatggttaactagaattgctttctggcttatctttttaggggttataactcatactgctctactcattttactatgggaaacacctttctctactttcacacaacctgtttacatgtttattctttcatggcttataatctttattgctcttattatttggatttattgtaaatatgaaaccttgcttcttcctatggttccactggctcttctcatatttctatttgcattattattacgccataccaaaatgccacttcctcctgcacttccaggtataacctttgctgtccatattactgctatgtttttaagcattggtctaacatctcttggttttggagctagcattcttttcttactacaagaaaaaagtatcaaaaagaaaatacctctaataggatttcaaaaagatattccagctcttacaatccttgacaagattaatgctttatctgttatgataggttttccattatttagtataggaatattatttggtattgtttctgcccgtctaacatggggtaatctttttgtttttgatcctaaagaggttataagtcttattgcctggtgtttatatgcatggcttttttaccaacgctttactcatggatggcaaggacgtaaacctgctatattagctatttggattttctgtatttgcgttttttctcttgttgtggttaacttttttacagaaacctatcacaatttttacgttgagaagatgctgagaagatatggaacaacatatttatcttataggcatgaaccatcgtacagcaagtattga

SEQ ID NO: 9222 - DNA, 1266 bp, Lawsonia intracellularis
atgaaccatcgtacagcaagtattgatgtccgagaatgctttgcactaacggagcattgctcaaaagacgattgggcaattccattaataaaaggtattcaagaatctcttatcctttctacttgtaatcgtgtagaaattcttgctgttggtgatagtaacacacctgaaattattctttctgcttgggcaaaagtaaaaacacgttctatagaagagcttgttccacacacatatacttaccaagggcgctcagcaatttcacatctcttctgtgtggcttcaagtttagactctatggtgttaggcgaacctcaaatactaggtcaattaaaagacgcatataaacttgcaacaatagctggagcttcaaaaacaatccttaatagacttcttcataaagctttttctgttgctaaacgtgtccgtacagaaacatctattgcttctaatgcagtatcaataagctatgctgctgtaaaacttgccaaaaaaatctttggtactatgaatcaatataaagctatgcttattggtgcaggagaaatggctgagcttgctgcaatgcatttaatgcaagcaggtattcaacaactaaaaattgttaatagaacatatagtcaagcacaagaactagcttctcagtttagaggagaagctattccttttgaaaaacttgttacctatcttgcagaagtagatattgttataagttctacaggagctcctcaaaccatcattcacttcaatgatattaaaaacatactcagtaaaagaaaacattatcccatgctttttattgacattgctgttcctagagatattgatcctaatgttcatcagctagataatatctacctttatgacattgatgatcttaaagaaattgttgaagataatattgtacaacgacaagatgaagctataaaggcaaagcatataatacaagatgaaattgactctttttgtgcatggttacaagctcttattttacaacccactattgttgacttacgaaaacgcttttctacttatgcagaagaagaacttgaaagaacattaaaaaagattggtcctgttgatagaaaaactcgagaagcattagaaactatgatcgatgctctcattcgaaaacttacccatgatcctataagttatttaaaatgtgctcatcgaactattgacactaaccatataaccttagcacggcagatgtttaacctagataaaattcctcaaacaaacaaggctgttaatgaagactaa

SEQ ID NO: 9223 - DNA, 1308 bp, Lawsonia intracellularis
atgggcttcttttcctccttaaaaaatgcattattatcatctaatagtaaggtaactaattctacaaagttaaatatagagctccaaccatccacaacaactgctaacaatggctggaaagagcaacttattatatcattacggcaagcaaaacctcagctctctctttggttagatttaacacttaaagggatcactcatgcaaatgaacaactatgggaacgtgttacctttttacttgttaccttaggagtttctgaaaatgaagccagagcttttactcaaaactttcaacaatggtcaatggatctaggctatacaaaattaagtgattttcgttctgaacttcaatatagattatctctcactcttgaattagaagatgaagaaagtgagcaaaatagattactaaccaaaatacatacaggacttgctaaaacaagagaacatcttagccaaggactaaaaactgttttttctcatcataaaaaattatctaacgacttttgggatgaactagaagaactttttattctttcagatatgggtgtagaaacagcagaaatgttaacatcccgtcttaagatacgggccaccaaagctaatatttctataccagaagagctttctcctttacttgctaatgaattagaaattattttaaaaatttctcctcgtgttttagctatcaatcctcctgaagttatcttgcttattggtgttaatggggtaggtaaaacaaccactattgcaaaactagcatatcgaatgcatttacaagggaaaaaagtcctacttgctgcagcagacacattccgtgctgcagctatagaacaattagaagtatgggctcaacgtattggcattgtattttataccaaaggaacaggagctgatcctgctgctgttgcatgggaagctgtagaacatgcaatccaaaaacagtttgatgttgttcttatagatacagccggacgtctgcatacaaaaacaaacctcatggatgaactctcaaaaattcgtaatgttattgctaaaaaacatcctggagcaccacataggacaattttaattattgatgctacaactggacaaaatgcattacaacaaacaaaagtctttaaagaatccacaggaattgatgaaataattgtcactaaacttgatggtactgccaaaggtggtgtagctattgctgtttctctacagtatggtattcctattacctatgttggccttggagaaaaaatggaagatctacagccattcaacggagaaaaatttgctaaagctttacttaatatttaa

SEQ ID NO: 9224 - DNA, 654 bp, Lawsonia intracellularis
atggcatacattcttcctggatcatctttagatgcagatctttatgcaattacagatgatgcactttcttttaacaggtctgttatagaagttgttaaacaactattagatgctggaataaggattatccaatatcgtgaaaaaaataagtcttcaaacagtatgcttaaggactgtataacgatcaaaaaattaacagaagaagctaatgcatgttttattgtaaatgatcatgtagatattgcagtactatgtaatgctgatggagtccaccttggacaggatgatctcccagttgataaagtacgggagcttataggaaaagaaaaaattattggactgtcaacccatagcccacaacaggctcaaaaagctattgaaatgggcgctgactatattggtgtcggacctctctaccctacaaaaactaaaaaagacgtatgtgaacctgttacaattagctatcttgattgggttgtcagccatatagctattccttttgttgctattggtggtatcaagcaacataatatccaagaagtcattcaacatggtgcaaagtgttgcgcacttgtctcagaaattcttagtgctcctaatatacctttacgtatacaagaattacgtcaagctatactattggctcatacatag

SEQ ID NO: 9225 - DNA, 1428 bp, Lawsonia intracellularis
atgacaattcttcataaaaaagtaggaggagtgttgagtagtggtacaccatgtcttcctgttagtaatcgtatatgtaattttgatgaagttgcaattggatatacagatgaacaagcaaagatagaagcatcaaggtgtcttcagtgtaagagaccacgctgtaagcaagcttgtcctgctcaggtacgtatcccagaatttattgctgcattattaagtggagatttaaaagaagcatacagaattattcgcacaactaatagtctacctgcaatttgtggaagagtttgtcctcaagatacacagtgtgaaggttcttgtgttctaaaggcaaaaggtaatcctgtatgtattggtcgtttagaaagatatgtagcagattctatattaaatatggaagttggattatatgttggtttgaatgaatatgatgcaaagcctcctgtagttacacattgtaaagtcgcatgtattggttctggaccggcatcacttacggctgcaggttatcttatagctcagggcattggtgttacaatttttgacccatgctatgaacatggaggtatacttacctatggtatacctacttttcggttgcctaatacggttgttagtgatgaaattaaagcattacgtagtatgggtgtgacatttagtacacagggtataggggatactttaactattcaacatctttttgatgaaggatacaaagctatttttattggtataggtgctggactatcatgtcagttaggtattcctggtgaagatatttctggagtttttttagctaccaagtatctaaaagatataaaagtcaatcagtcagacaaggaacgtttactatcggtacaaaataattatctaggacgttctgtaacagtttttggagctggtaatgtagctatggatgcttcacgtacagctatccgccttggagcagaaaaagtacatatcatatatagacgtacaaagtcagaaatgccagcaagagatgaagagattgcatatgctgaagaagaaggtgtaaacattatggagttagtagctcctgttgcttttcacaaagataaaaataacaaattatgttctgtaaccttgcaaagaatgactcttggagaacctgatgcctctggccgtagatgtgctatacctataaaaggggagctgtttgaatatacaacagatcttgctattattgctattggaagtaaaccaaaccaaagattattagagaaaatacaaggtcttaaacttacgcatgaaggatatattctcacagatgaggttggggaaacatctattcctaatgtctttgctggaggcgatattgtcactggtgcacagactgtcgtattagcaatggatgctggaaggaaagcagctcaagcaatttcaaaacgactattagaaaaataa

SEQ ID NO: 9226 - DNA, 927 bp, Lawsonia intracellularis
atgaatgaaacgtttactgtatatttagctccacatggttttttacaagaacttattgatgaaataaatacaaatattatttgtagtaaaggtcatcttatacttgtaaaaggttctcctaaaaaatttgcatgggcacaaaatacatggttaagtccaagatttatcccaataagctctattacagatggagcaaaaaaacttttatctattcaaagaaattggtggttacattctgaaaaccatcatcgacgtgcaacattaattcaacaacaattaccttatgtttcagccaaaaagcttcactttggagaaatacctcctcaaacacctcttggaagttggactttatgggaaaaagacatcatcctagcatcaccagactgttcatcagtatttcctgatggagttattacatttcatgaaaataaaatagaaccaccaagtagagcatatcttaaactttgggaggtttttacacgcttttcttttgttccatcttataaagagttatgtattgatcttggggcatctcctgggggttggacatgggttcttgctaagcttggtagtagtgttattagtattgataaagcaccattagcttcacatatatcttctcttcctaatgtagaacattatacaggaagtggctttagatttactcctcttcatattggtaatgttgattggatattctcagatatggcttgttatccaaacaaactttataactttatccaaccatggattattaataaaaactgtcacacaataatctgcactttaaaacttcaaggaaaacctagtaatagtactctttcttgctttaaaaaaattcaatcatcttacctcatacatttatcatataacaaacatgaacttacatggatctattctactaaatacccattagtaatgttgtaa

SEQ ID NO: 9227 - DNA, 927 bp, Lawsonia intracellularis
atggaatcttatctagcaattgaatttctaaataagctaactttatctataggttttcctttgttttttttgctagcttctgcattattgccaattattgtttgttttaccatagtatttggtatagttaaacaaagtaagctctatatacaatgtgcatatcaattaatgtacttaggagttattttaacaagtatctttgttcttatattacttttagttacaggaatatattattctgatattcaacattttcttccaatatatcaatatatattttgggtaacgtgtagtattttttatctaggatttatctttcagcttatttgtattgttttatggtataggttaattggatcgcctattttatatatactattaagttttttatcaggaatatgttattctagctttataatcatctctatatttttatttgggtatatcttttcaggagactttgtagcattagaacgtgagactgattttagtattatagttggattgatttttccatctttgacgagtccattatggcttattgtatttattacacattttattgaagctgctgctgctgctggaattgctttagtttggctatggatacgacgcaataaagataattttggccgtgattactatgtagttgctgcaaactggtgtggtgtttgggcggcctatggtgcttggatatttttaataagtttcatagtatttatgctgtataacgttgtaatatctcttatagttatagggtggcctatagctacagtcagtgttggtttaggcctcatttcagctcttatttggacaaaaattgcattgagtaataatccaatgagacataagttatctatgatttttgctatagtattttttgtttatagcatgacttttggtagtagtgtagtttttattcagtaa

SEQ ID NO: 9228 - DNA, 450 bp, Lawsonia intracellularis
atgtcttctattaaagagcagatagagacatttttattagatttaagtagtggttcagaagaaaaacttttagtggaactatggaggaattggagtatggtaatgggaccatacttagaaggtattgcttatcctttgggtagacgtgaaaaaacattgattgttggtggagaggatacaatggctttacaagaactagcctatatgaaggaagagttacttgagagagtaaatgcctttatggatagaactttttttgataaggttgatttacagttgtgtatgggaaggcagttagtttataaaaaacaagtaaatcaaagaaatatacctagaaaattaaagattccaaggcagcatgctgctgaacaaagtgattctttggttttggatagtaattctcctattagtagatgttataaaacttacctacgtatgggggatacctaa

SEQ ID NO: 9229 - DNA, 2058 bp, Lawsonia intracellularis
atgcgctaccacacgcatgtttcagatcaaacactacaagccatacaaaacaatgagtggctagaaacaaatattttgggagattattcttcaagtacgcttagttttaaaaacactcggaaataccatggattacttattgcaaatcttgaacaaccacatggacgccacttacttgtttcaaccttagaagatgcaataataactaatgacataacttatgaaatatcttctcgtgaacatgaaaatattgtttatccagatggacttaaacaccttatttccacagggataacctattgtcctcaatgtatatatacattagacgatatacaaatctgtcgagaaataatgctccttggtgatcaaaatacaacacttgtacgttataccctctatggtgctaacaataagcgtcatacattaagaattaggcctttattagcctttagaagtatacacaagctatcaactgccaacgacatattacgtaaagatgtagaaacagtctataatggtttttcaataaaaccttatgagtctcttccaacactatttgttcaatcctttgatccacactcatttatttatacaccaaactggtactatgctattgagtaccctatagaaaaagaacgtggctatccttacaaagaagatctttttgttcctggagaattacatatagacttgcaaccctatgctcctgttatcataagttttagtactaaactcctaactacaactgaaaatcccattattttatggaataatgaagtaatacgccatcaacaaattaactcttcagaacactctattacaacgacactatataatgcaggcgaacaactttttacgactatttcaaaagaaaatagcaatattgttgctggatatcattggtttgattcatggggaagagatacctgtattagtttgccaggtctttcattctgcacaaataatattgaacttggtaaaaaggttatcaaaacagctattgattcaatgcgctatggtataatacctaatatttttggtggaaatgacaaatcacatgctttcaattgtattgatacttcactatggtttatttgggccattcaacagtttatgctcactgaacctcaacaacaagaatggatttacgaaaactgctggagtgccataaagtctattattactgcttaccgtgatccaacaatatctggatgtactattgatgaatcaggccttattgctgcaggaaccccaataacacaactaacttggatggatgcatccattaatggaatccctgtaacaccaagaaatggatatcctgttgaaattaatgcactatggtataatgcattagccttttcaggataccttgcaaaactctataaagaaccatttgatacttactatcaaccacttgatactatgcgccaagcttttaaagagcggtttctaacaaaagggatatattactacttaggtgatgtatggaataacaatctattagacacttctattcgtcctaatcaactatttgctatttcacttccttttcctattcttgaaaaagaatatcatgcagatgtattacgtactgtaacaacgacattacttacaccctatggattaagaactctagacccatctaatcctgcctacaaaggtatctgtgagggatctcaagaagaaagggataaagcatatcatcaaggtacagtatggccatggcttcttggtgcatatggtgatgcattactccagtcagcagccttcccagaacttgcattacaacaacttcttttctttcttactccactgtttactattcaccttgaagaggcaggtataggctttatatctgaaatttttgatggagatagcccacatcttccaagaggatgtattgctcaagcttggagcattggagaatgtataagacttctctaccgtagtgaaaaagaattccctactgtttttaaaacatggaagaattatttagcttcttataaagaagcgccactttatgatacaacaaccttaacaagatatttaaaataa

SEQ ID NO: 9230 - DNA, 1341 bp, Lawsonia intracellularis
atgcgtattctcatgtttggttgggaatttcctccatatttaagtggaggattaggaacagcatgttatggaatgactcaggctcttattcgatcaggagccaaaattgtctttattcttcctcgatcagaacacagctcacgctatgtcgaacaaaataaacattttcctaaaatacgttctgctgctgatgtttgtattacacaacataaacaacttggttacttcactcaacaatttcaagaaatctggaagaaaaacttttctatccgtcctattaaagcaacacttcatccatatgtttcctttagtcaaacactttctgcttattattctactcagaatcatttaactgaacacaatgaattctctacagttagttcagcatgtgctttacctccttgttctggtggatatggtccacacttaatggaagaagtattccgttatagccaagctgctgcacaaatagctatggaagaaatgtatgatgttattcatgtccatgactggatgacataccctgctggaatcatagctaaaaaaattagtaataaaccacttattgcccatgttcatgctacagaatttgatcgatgtggtgactcacctaatcaagatattctaaatatagaaaaggttggtcttgagcgtgctgatcatattattgctgtcagccactatactcgtaatcttattatgaaaaaatatcatattccaggagaaaaaattagtgttgttcataatgctgtacttccagcatctggaaattatacatggcagaaaaaaagaaattcaaacaaaaagtatgtactcttccttggaagagttacacatcaaaaagcccctgaacactttataaatgctgcatatcttgtttcaaaaaaattacaaaatgtatgttttatcatggctggtagcggggatatgttaccctcaatgatccgtaaagtagcttcattacgccttgggagtcgtttccactttactggctttttacataaccaacaagttgaacatatatattctcttagcaatgtatatgttatgcctagtatttctgaaccatttggaattacaccacttgaagctataagacatggaacacctgtaattatatcaaaacaatccggagttagtgaagtattaaagagtgcactccaagtagacttctgggatatagaaagacttgctcatttaatttgctctttacttacatatccaaaacttgagaaatcaataatgggactagcttataatgaactacaaagtatccgttgggaaaattcagctcaacaactttgtcacatttactctaaatttaacaaaaatggacaataa

SEQ ID NO: 9231 - DNA, 1287 bp, Lawsonia intracellularis
atgccctctatttgcttttactttcaagtacatcaaccttttaggctaagaaactattctttttttgaaattggcgtaaatcctttctatgaggatgaagaacataaccgccatgtgatgcataaagtagcaagaggctgttacttaccaatgaatagacttttgctaaagcttattcatcaatatgatcaaaaatttaaaataagtttttctatatctggaacagctcttgaacaattcgaacgctattccccagaagttattacaacatttcaagagcttgcagatacaggctgtgtagaatttctaacagaaacttactatcattctcttgctttcatgttttcaccttatgaattcaaagaacaagtgacacttcatcagcaaagaataaaagagctctttaaaattaccccccatgtattccgtaatactgaacttatttacacaaatgaactagcaaaatgtattgaaaacatggggtacataggtattttggctgaaggagctgatcatattcttaactggagaagtcctaattatgtttatcgtcctctgggctgtaataatcttaaacttcttcttaaaaactatagactttctgatgatatagcattccgtttttcaaataaagactggataggatatccattaactgccgaacgctttacacaatggattaacgattcaggaggttcaaatgaaactattaatctctttatggattatgaaacctttggtgagcaccaatgggcagatacaggtatttttgcctttatggaagcactaccacattatttgctacaatcaaataatcaatttttaacacctacagaagttgcgactacattcacaccagttgcagagcttgacataccatatcctgtttcttgggcagatacagaaagagatctaacagcctggacaggtaatgagatgcaacaagatgctattgaacgtctttatcgtttagaacctttagtaagggaatatggatgtgaacaaattcttaatacatggaaacgactacaaacatcagatcatttttactacatgtgcacaaaatggttttctgatggagatgttcataaatacttcaatccatacccatcaccatatgatgcctatattaattatatgaatatacttacagatcttgaaagcagaattaccctacaaccaaatagtaatacttattctaaccaacataccatgaaagcacattataacgatgtaactcctcttttatcacctacaacttgcttcaataatttacaaaacctataa

SEQ ID NO: 9232 - DNA, 4263 bp, Lawsonia intracellularis
atgcagcaggcagttgaacaaacaacactttttgaagttagctgggaagtctgtaataaagtcggagggatttatacagtagtaactaccaaagtccctcaagcaataaagacttttggagacaattattatcttattggacccaacttaggaaataatgcagattttcaagaaacagatgaaccttgctgggaaacattaagccaatcacttgctataagaagtcttcattgtcgttttggtcgttggaatattccaggaaatcctaaggttattctagtcaactttaaagatagatataaccaaaatcaattattatatgaattttggaatagatatggtgtcgactctatgacaggaggctgggactatattgaaccagttatgtttggttcagcttgtggcgaagttattaatatagcagtcaaaacacttgtagaacctgttggtggaacagctgttgctcattttcatgaatggatgtgtggtagtggattactcactattaaacaacttgctccagatgtaggaacagtttttaccacacatgcaactattcttggacgatcaatggctggtgcaggcattgatatttatgaaaatctctcacaaataaatccacaaagagaagctgctgcttataatataactgctaaacaatccatggaatctattactgctcgtgaggcagattacttcacaacagttagtgaaattacagctgatgaagcagaagcttttcttggacgtcgtcctgatattattacacccaatggattagatttacacatcatagctgactttagtaaggacacttctcttactacaacagcaagacaatccatccttagtcgagcttctcaatttattggtcaacaacttcctaatgatacacgtattatgattatttctggtcgatacgagtttcataataaaggatttgatgtctttcttgatgcactaggaaatgtcgaacaagcattaagaaactcaaataaatatgttcttgcattatgtacagctattggaggacatactggtgtcacaaagtatgccctagagaatcatcttgaatcaaatatgattactcctcctatgccactccgtattgtaactcatcatgtttataatatagagcaagatcctattattacaaaatgtttgagattaggactcacaaatcatgaagaagaccatgtaaaaattatatttgtacctgcgcttcttaatggtcaagacggtttctttaatatgcaatatgaacaagtactgccaggatgtgaccttggggtattcccatcatggtatgaaccatggggatatacacctcaagaaagtgctgctcatgccgttcctacagttacaactgatctttcaggttttggaatgtgggtacgtaaactccaagaaaataaccatgttacagatggtatttctgtcatacatcggctgcatatgccatatgacgatactgttaatgcacttcaatctgttatactggaatatgcaacctgttcatcagaaaaacttatgcaacatcgaatagctgtgcgtaaagtctctgaagaatgttcatgggagaaatttttcccatattatattcaatcatatcattctgcacttgcaaaagccaacgagcgtatcagcatacatgaaccacaaaaacaaacaaacacacttgttattacaggtgtatcaaaaacacctaatcttagaatgcttacagcaattaaccaacttccacaaaaacttggacgactcagagaagttgtgaataatgtttggtggacctggcagcctgaagcagaaaccatcttcactttactgagcaaagaactatggaaacaatcaggccataacccactcaaaatgcttgaagatatatgccctgcagcccttatggcagcagaaaaaaatacagaaatacaggaatgttataacgaattgatcacaaaatttgatgaatatatgaagaataaacctcacacaactgatccttctatttcatcttaccatcctattgcatatttctctacagaatatggcttacatgagagcatcccgctctactctggtggattaggtatcctttctggcgatcatcttaaggcagctagtgacttaaacattcccatggttgctataggacttttatacaaaaatggctatttccaacaacgaatagatgctcaaggcaatcaaattgctatgtatcctgaaaataacttctctcttcttcctatttctcttgtaaaaacacttcaaggagatcctgttagaatagagctagatcttttcccaggaagacaactttttgcacaagtatggaaaatgcaagtaggtcatgtaccactctacttacttgacactgatattccacaaaatattctagacgatcgaagaattacagcacgactttatgaatcagatagagactgtagaatacgacaagaaattctattaggaatgggtggtgtaagattattgaatctacttaagattatgccttctatctaccacatgaatgaagggcactctgcttttatgattttagaaagaattcgtaacctgatgctttggttcaatctaccattcaatacagctcaagaatgtgtacgtggtaatacagtatttactacacatacacctgttgatgctggtaatgaacgatttgatcctagtttaatggaaaaatatttttcagattatgcaaaatctgtcaaccttacatggaatgacttcatgagtcttggcagattttccacaaatgatagaaacatgtttgaaatgacactccttgctattcggaatgcaaataaagtaaatggagttagtagattacatagccaagtctctaaacatatgtgggctaataattggaaaggattacctgttcctgaaatacctattggatatgttacaaacggagtacatattgcatcttatgttggagaacatacacgaaaacttctcaaaaagtatgtgcatgaattatgggatagcctacccacatcccatgaggcatggaaaaatgttgcacaaattcctgatgaagaattatggaaagctaggttagaacaaaagcagcctcttcttaatgtaataaaacatctggctatgtcatctaacctctcctataaaatctttgcagaagaacagcagagtattatacaacagctttctgaagatgtacttattattggatttgcaagacgctttgctccatataaaagagctaatcttattcttgctaaccctgacagattacaccatattctgaacaaccctcaaaaaccaacaattcttgtttttgctggtaaagcacatccagctgatcaacaagggattgatcttataaaacaagtaataaactatacaaaagatcctagattttatggtaaaatattctttatagaaaattataatcttgctattgcaaaaattcttctacaaggctgtgatgtttggcttaatactccacgtcggccatatgaagcatgtggtacaagtggtcaaaaagtaggtgctaatggtggacttaatcttagtattgctgatggatggtggtgtgaaggctacaacagtcataatggttggacaattggcaaagaaatcgtagacatattacctgaatccgagcaatgtgactatagtgatgcagaatccttatatagccttttagaagaatctgtacttccactatattttaaaaaggacacaaatagcttttctccttcatggatagcaatggtcaaaaatgctatgcaaacccttatccctgaatttaatgctgaaagaatgcttcatcaatatttagatgattattatcttccacttgcaaaaaatcaggtaacctttagaggtgataactttgctattccaaaacaaattaccaaatggaaacaaggacttgaacaacgctttgctaccattaaaatacgtaatgtccaaattgaaggtttaacagaagatactgtgctttatggagaacctcttactattactgtaacgcttagtcctgaatcaatgaaagttgatgaacttctagttcaacttgttataggtcctggaaaagataatacatttacagaaatgccagatgtgttaacactcatggtatcacagcaatctggtaaagaggttacattctctggagtatataatattaaatataatggacctaatgtttatggaatacgtatcttacctacaatgccagggttactttcaccatatgaaacagggcttatcctttgggtataa

SEQ ID NO: 9233 - DNA, 891 bp, Lawsonia intracellularis
gtggatatggagaaagcaagacttcgatctcatatgttgattgaaagtttaccgtatttacaaaaatttcaaggaaaagtgattgtcataaagtatggcggtcatgcaatgaaagatacattgctgaaacaatcctttgctcaaagtatagcattacttaatcttgtaggtattcatcctattgtagttcatggaggaggaccacagattggcaatatgttatctagattaaatattcagtctgaatttcgtgaaggattacgtgtaacagacaaagccaccatggatgttgttgaaatggtattagctggttctgttaataaagaaattgtaaaccaagtaaatcaagcaggagctaaagctgttggactttctggaaaagatggagcattcattcttgctgaaaaaaatgatttaattcttacaaaagaaaatcaacctcctgaaattatcaatcttgggaatgttggacgagttgttcatattgaaacatcattgctatatacattgattgaaaaaggcttcattccaattattgctcctgttggaacagataataaacaaacatataatattaatgctgatgaagtagcaggagctattgcaggtgctttaaaagccacaagacttcttttacttacagatgtagaaggtatcttagatcttaataaaaagcttattcaatctatttatttagaggatacacctaaactgtttagtgatggtattgtttttggtggtatgatacctaaactacaatgttgtatagaagctattgaacaaggtgtcgaaaaagtggtaattcttgatggtcggttggaacattccattttacttgagttatttactgatcaaggtgttggaacagaaattgtcaaaaaaccagtataa

SEQ ID NO: 9234 - DNA, 1302 bp, Lawsonia intracellularis
atgaatgaacttacaccacgtgaaattgttgttgaacttgataaatatattataggacaagagcaagcaaaacgcatggtagctattgctgtaagaaaccgatggagaaggcaacagttacaagaaggattacgagacgaggtagctccacgtaatattattatgataggacctacaggtgttggaaaaacagaaattgcccgaagacttgctaagttatgtcatgctccttttattaaagttgaggctaccaagtatactgaagtaggctatgttggacgtgatgtggagtctatgattcgtgatcttatggagatatccattaatcttgtcaggaaagaagaggcagaaaaagtacgtgaacgagcagaagttttggcagaagaaagacttttagatttgttacttcctataggagaaaatcgtgatgctacacgtgaaaaattaagaagtctttttcgacaaggtcatcttaaagatcgagaagtcgatattgaagtgcaagaacaaacacagcctattggtattttaaacgttcctggaatggaacaaataggtaatcagatgaaagatgcatttagtcgtatctttccacaaaaaacacatcgtcgaaaaatgaaagtaagtgctgcttgggaacaccttgtaggagaagagtctaaccgacttgttgataatgataaacttacagatttagcacgggaacgcgtagagcaaatgggtattgtttttatagatgaaattgacaagcttgcaagtgcatcacagcatcgctcttctgatatttctagagaaggtgtgcaacgtgacttgcttcctattgtcgaaggaagtgcagtaaatactaaatatggtctgattaagacagatcatattctatttattgctgctggagcatttcatttatcaaaaccttctgatcttattcctgagctccagggtcgtttcccattaagagcagaacttgaagcattaggtaaaaacgaattttatcgtatattaactgagccagataatgctttaacaagacaatatgaagcattattagaaacagaaggtgtaaaaattgtttttacagatgatgggttaaaagaaatttcagcatttgctgaagatgtgaatacacaaacggaaaatattggtgcccgtcgtttacatacaattatggaaaaaattcttgcagacatctcttttgatgcaccagaaaagtttggaactacattggaagtaacaaaagagtatgtcgtttcatatcttgaagatatacgtgctaatacagagttaagcagatttattctttaa

SEQ ID NO: 9235 - DNA, 708 bp, Lawsonia intracellularis
atgtttctagaagtaaatgatttacacgcaagatatggtgcagaagaggttttacatggtgtatctctttatgcaaatgagggagaaattgtaagtattttgggtgcaaatggagctggtaagacaacgacattactttctattagtgggattgtaaaagtaacaaagggttcaattgtttttagaggtaaggatctctcttcattacctagttacatgattacacgacaaggtgtttgtcaatctccagaaggtagacgtgtttttggtgttttgactgtctttgaaaatttacaacttggtgcttttactattcaagataaaaatttgataagaaaaacattagactggatttttgaacttttccctagattatatgagagaaaagagcagttggctggtacgctttctggtggagaacaacaaatgcttgctattggtagagcccttatgggtcagcctcgcttgcttctacttgatgagccatctttaggattagcacctcttattgttaaatcaatttttaatgcagtacagcatattaataaacttggagttactattcttattgttgagcaaaatgctcgagcagcactaaaactagcaaatcgtgggtatgtattagagttaggcagaatagtaatagaagatactgctaagaacttattaggtaatccagagattcaaaaagcatatttaggtaggtaa

SEQ ID NO: 9236 - DNA, 762 bp, Lawsonia intracellularis
atgacacttctttctcttaataacgtaacaaaattttttggcgggttgatagctgtaaacaatgtttcttttgaaattaaacagggaagtattataggtcttatagggccaaatggagctggtaagacaactatatttaatttaattacaggaaactctattcctaataagggagagatttgttttgcaggacaatctattcaaggaatgaagccttatgctattgtaaatcttggtattgctcgaacatttcaatctatacgccttttcccatatctttctgttattgaaaatgttcttattggtaggcattgtagaatgcaatcaggtttctttagctgtatgtttcgtttttcttcacaacgtcaggaagaacaagcagctattgagcgtgctataagtgaacttgaatttgttgggttagcttcctattctatagatcaggcaaaaagtctttcctatggtaatcagcggttactagagatagctagggccctagcttctgacccaaaacttattattcttgatgaacctgctgggagcatgaatgatccagaaacaaatgttttaattaagctcatacatgcaattaaagaaagaggtattactatacttcttatagaacatgatatgcatcttgtaatgaatgtatgtgaaagacttttagtgcttgagtctggaacattaattgcttctggtcatccagagaatatacaaagagatcctagagttatccaagcatatcttggtcaagatgactag

SEQ ID NO: 9237 - DNA, 987 bp, Lawsonia intracellularis
atgagtagaataagacgatattgctctctattactaggagtttgtattgctatcttaccacttttccttaataattattggattgatgttgcttcaaatgttggtctttatgttttacttgcgttatctcttaatgttattcttggccaaacagggatttttcatatggggcactcagcattttatgctgttggagcttactttactgctatttgtaatacatactaccagatccctattctttggctattacctttagctggttttactacagctttttttgctcttattatagtacggcccattctttccttaagaggagattatcttcttattgttagtattggtattgtagaaattgtaagaattgcacttactaatgatatttgtggtattactggtggtgctaatggaatttttggtatatctcgtcctactattggtgatatagttattcgtacaactactcagttttattatctaatatggggtattgttcttttgactatgctccttttttcttggttattttcatcccgatatggtagagcttttaatagtataaaagaagatgaggtagcagctgaaggttctggaattaatattattcactataagtggttagcatttgttgttggtgcattttgggcaggaatagctgggaacctttttgcaagtaagatgactgttatttctccaacttcatttactatttgggaatctgtcattatttttgttattgttattttatcaggtggaagtcaattgggtgtgattttaggaacatgttttgttattgcattgccagaaatatttcggagccttgcagatgcgagaatgcttatttttggcttagcaatgatgattatgatgattgtcagacctcaaggtttattaccaccattacctcgtgtctataatattcgaaatcttttacataagaaacattctgattttggatcacctattgctcctagacagaattag

SEQ ID NO: 9238 - DNA, 903 bp, Lawsonia intracellularis
atgattgaattttttcaacagattattaatggagtagcaatagggggaatttatgccctagttgctcttggttataccatggtatatggcgtgcttaaattgattaactttgcacatggagaactttttaccattggtgcatacataggatttactcttttattttccttaggtttatcaacacttgcagaacctattgctattggtttagtgatgtttactatatttgttatagttgcatttttgggcgttcttcttgaacgtacagcttaccgtcctctaagaaaagcaaatagattatctgctgttgtttcagctttaggtgcatctatttttttacagaatgctattatgcttatttatggtggaaatttttatgtatatccagaaacatttttcccttcacttagtttagatatttttggggtacatatttctttcatgcgacttattattatttctatttcatttttcctcatggtaactttatatttttttgttaataagacatctataggaatggctataaaagctgttgcaattgatcaaattactgcacggcttatgggtattaatgtaaacaaaattatttctcttgttttttttattggtgctggccttggcggtattgcaggtgtaatggtaggtatgtattatggccaaatttcttttactatgggctggctatatggtttaaaggcattcactgcagctattttaggaggaataggaaatattccaggagcaatgttaggagggttattattaggagtagttgaaacattagctgcctcttatctttctattgggtggaaagatgctgttgctttttttattttgattatcattttggttgttcgaccaacaggtcttcttggtgagagggtagcagacaaattatga

SEQ ID NO: 9239 - DNA, 1125 bp, Lawsonia intracellularis
atgaagaaatggttgagaatattattactagctatatgtgttaatatatttgtaggaaatgctttttgtgaggaagtgattcgtataggcttaatgtgtccacttacaggaaagtgggcaaatgaaggtcaagagatgcaaaatattgtaaaattattagcagaaaatgttaataatttaggtggagttaatggaaaaagggttgagcttattattgaggatgatgcaagtgatcctcgaacagcagcattagctgctcaaaaacttgtttcctctggtgtggtagcaattattggtacttatggttcatctattacagaggcaacacaaaatattattaatgaagctggaattgtacaaattgctacaggttctacaagtaataggttaacagataaaggattaccactattttttcgtacaagccctcgtgatagtgatcaaggtatagtagccgcagatgtcattagtcaaaaaggatataagtctatagcaatactacacgataattcttcttatgcaaaagggttagcacaagagacaaggagagaacttgaaaaaaaaggtagctctgttgtattttttgatgcgcttacaccaggtgaacaggattatactgctatattaactaaaatccaaacaacaaatcctgatctgatttttttcacaggttatttccctgaggctggtttattactccgtcaaaagtcagagatgaactggtctgttccaattatgggtggagatgcaacaaataatacagatcttgttaaaattgcaggaaaacaagctgctaaaggatacttttttttgagtcctcctacagcatatgactttaatacacctgaagcaaaagcattttttatggaatacaaaaaacaatatcataagttacctagcgctatttggcctatttttgctggtgaagcatttaatgtgattattgaagctttaaagcaaggaaaagattctcctaaatctattgcattttatttaaaacatacactaaaggattttcctgggttgacagggccaatttcttttgatgagcagggagatcgtatagggaatttttataaagtatattatgttgatgaacagggaacatttattcttgaaaaataa

SEQ ID NO: 9240 - DNA, 978 bp, Lawsonia intracellularis
atgctgattcattgtccacagtgtcatttttatcgtgaacttaatacttcccaaattccagataatgctgttatggcaacatgcccaaagtgtcaaactcgatttcgttttcgtaatcttgatagtgaatatgttgatccaagttcatctaacactattcacctattacagcaagctgagtcaaaaacatttactaatccacctacaaacaatactagtatatctcattctgatacagagtgtttaaaaaactcctctagtgaatacaatcaacaaaacaactataaaaatgtacttgaaaaactaaaaaaatatacattaactaatcaaaccaggcagcctacagatggttatgtagatcttattccatgggaacatccagaaaaatttgattttttttctagtttttaccaaacaatagtaagagttatgtttaaccctgcaacattttttggtaatataagtaatgcaacaagttcattattaagacctttatttttttatatcttagtaagactttttcagacacttatggatggaatgtggtttatggtgagctttcaagctcttgaaccatcaataacagagtcatctctccatgatttattaagctccattgcacaagaaatgacaattccaatgacacttataatgacacctgttacacttgctcttcaacttggaatctatgttttattgttttatcttatgattagattcattcaacctgaacaaacatattttcacacaatattccgtgttattgcttatagtgccgctccaactattgtttgtattattcctattattggctctcttgtaggtagtatttggttttctatatcctgctttattggttgcaaatatgcattaaaactttcatggactaaaactgccttagctcttatacctctttaccttatagcaatggctattgggcttcaaggagcaaaacagtttatacacattgctggataa

SEQ ID NO: 9241 - DNA, 705 bp, Lawsonia intracellularis
atgcgtatagttgtattactatgtgttatacagttatgtatccttggaacagcttgtgaccttacatctaccggaaaagctttaagaaatactatacatataaactcatatggacaagctgaagttattcttgataactggataaatactagtcaaattcaagtatatgtctatccccaatctcctccagttgaacctacaaaagttctttttgttccatttagagtaacacaacaaatggaaaattttttgactgttggtaacaatatttcacgtattatttggcaaaactggttacagaatagcatattttctacacttgaatttctacagaatggaacagcatttcgtccagatgtatccctcactattgctaaacaaaaaggtgctaacttagtggtaggtggatatattacagattttattgatggaggcttaagtggtgatacacgtgtttctattgcaatagaaatttatgacgtatcaacaggtaatttaatatggtcattatcacaagcaggtagtatacaagcagctagtgtaaatgattttattatctttgctacaaaaacccgtatgccaacaaaccctagtgctgcagtcatcaaccttcttgcagaggatatgggtaaaaaaattaaagagtggacaaacccttcatttcaagaagaaacatggcttatgccagaaccattagcattttga

SEQ ID NO: 9242 - DNA, 702 bp, Lawsonia intracellularis
atggaagaatgctctcctattgaccttctctctactaaagaaacatggcgactatttagaattatttctgagacagtcgacggctttgaagcaatgagtaaagcaggcccttgtgtatctatctttggatcagcacgggcaaaacctgataatcctctgtataaagaaacagaagccatttccaagcttcttgtttctgcaggttttggaattattactggtggcggaccaggtttaatggaagcagcaaataaagcagcttttgaagctggtggacgctccattggattacatattcatctccctcatgaagaaggatgtaataactatcttacaatacgtacagaatatagatatttttttataagaaagcttatgtttgtgaagtacgctcaagcctatgtcgtaatgccaggtggaatgggtactatagacgaattttcagaagcatttgttcttacgcaaacaaagcgtatccatcctttccctattatactctataatagccaattttggaatggattagtcgattggatgcgacaaacaatgtctaaagaaggttttattgaaccatcagagattgatgctcttcttaatatctgtgatacacctgaagaagttctcaaaattattcaagaaaaagttcccactgcaataacacataaaaaaaataaacataagcagttacattcatatccttaa

SEQ ID NO: 9243 - DNA, 489 bp, Lawsonia intracellularis
atgtgttgggggcctataccaacaccaccattaggctggacttgggacaacttaatggatgaagcacttattgaagcaaatcaatgtacaaaaaaaaatgaagtacctgttggagccattattgttcataaaaatggtaaaattattggtaaaggtcataatgctccaataacaacttcagatccaacagcccatgcagaaatacttgcattaagaaccgcaggagcagtccaacaaaactatagattacaagattgttttctaattgttactcttgaaccatgtttaatgtgtgtaggtgctattatacaagctaggattgatggtattgtatatggggcagcagaactaaatacaggaagtattacttcctgtattgctggttttgatttaccttttaataactataagccatggcatatgggaggaataaaagcaacacagtgctctcagttattgcataacttcttttataaattacgaaaataa

SEQ ID NO: 9244 - DNA, 288 bp, Lawsonia intracellularis
gtggcgaaatcagctgaagaaattactattgaatatgaagaggcaggtcaaattcttgtcaaagaacttgataaagtcattctttctaaaggagcatggacaactatactctttcgatatcaagagtttgatccagaaactggtggatatgggccagaaaagtatagtattcgtcgttatcaaaaagttgcaggcgaatatcgacaaaaatctaagttcaatatatcaagcatagaacaagcaaaaaaaattattgaagcactcacccattggatctctgaatcataa

SEQ ID NO: 9245 - DNA, 792 bp, Lawsonia intracellularis
atgtggaacgctgaaaaagttaagcagcttgctgagtggtatgtatcaccacaaggttcctttgcattagaacaagaatataaactattccaaaatctgatatctatatggccaagacgtgactataccttacttaatattggttgtggagttggtgcatttcttgaaatgttctgggattatggatttgatgttactggacttgataataatttagaagtattagaactttcttctaatcgactaaaaaatcgtgcagaattccaattaggtgccttagatgatcttccatttgaagatgaaagttttaactacgcatcattagtgactattttagaatatgttgaagatccaaaaaaaattttagcagaagcatttcgtgttgcatctgatggtattattgttggattcacaaataaatggtctataaatcatatcattaatagtacattacagctgcttcataaaaaaccaaaaaaagacagtcaatgggtgagtccttggcaacttattcgtctaacaaagcagctttatcctgaatgtagaatttattgtcgctctactttactaggtcctaagcgtacttgggatgtaacctcttcatggtctaaacttaaccgtattattctttcttttcctatagggacatacgttggaatgcgtattgaaaaacgcccaaagcccacactgactcctttacttctcaaagcaaaagaacaagcagtaaatgtatataatgcattaagtcctgaagcaacaagcactattcaacataatagaactaacaaataa

SEQ ID NO: 9246 - DNA, 1425 bp, Lawsonia intracellularis
atgttttgtaagttaaaggtgataatatgcataactcttatgtttattataactgtggttccaacaattgcagaaagtgccttaccaaactttgtaccccttgtaaaagatgctagtaaagctgttgtcaatattagtacagaaaaaaaaattcctcgtggtcgtacagagttccctatggaaatgtttcgtggtcttcccccaggttttgaacgcttttttgaacaatttgaacctaaagggcctgatagtcagatacataaacaacgttcattaggaactggttttatcatttcttcagatggatatattgttaccaataatcatgtgatagaaggagcagattctgttagagtaaatcttgaaggtacctcaggcaaagaagaatcactacctgcagaagtgataggtagagatgaagaaacagatcttgctttattaaaagttaaaagtaaagactcattaccttatcttatatttggaaattcagatactatggaagttggtgaatgggtgctagctattggtaatccttttgggttaggccatacagttacagcaggtatattaagtgctaaaggacgtgatattcatgctggaccatttgataactttttacaaactgatgcatctatcaatcctgggaatagtggtggtccattaatcaatatgtcaggacaagttgtaggcattaacacagctattatggcaagtgggcaaggtattggtttcgctatcccaagtagtatggcagatcgtattatagagcagttaaagacaaataaaaaggtaagtagaggttggataggtgtaacaattcaggatgtagatactaatacagctaaagctcttggattatctcaggcaaaaggtgcgcttgtaggttctgttgttcctggagatcctgctgataaggctggtcttaaagttggcgatattgtaacacaagctgatggtaaacaaattgatagtgcaagctcattgttaaaagctattgctactaaacctcctttttctgttgtgaaattaaaagtttggcgtgatggaaagagtaaagatatatccattacactaggagagcgtaagacaacttcaagtcaaaaacaaagctcaccagaatctttaccaggtgctcttggattatctgtacgtcctttaacacaagaagagtctaaatcttttgatgttaagcttggtataggcttgttagttgtaagcgttgagcctaataagccagcgtcagaagctggtatcagagagcaagatataatcctttctgctaacttaaaacctcttcaatcggctgatgaccttgcaaatattatttgtggagatgctaagaagaaaggggttattatgttacaattacaaagaaatggacaaacgttttttaaaacattgtctttaactgaagatagcaactaa

SEQ ID NO: 9247 - DNA, 2415 bp, Lawsonia intracellularis
atgaaaaagttttttctgaatattgttattttttgttttggtattattttactatctattataggactaataggtctttatttttgggttagtagagatcttcctaatattacaaagcttaatgactatagaccagctttagtaacaacagttcttgctagagatggaacacttattgggtatatatatcgagagaagcgttttcttatcccattaagcgaaatgtctccttttttgcctaaggcatttttagctgcagaagatgctgagttttatgaacatgaaggtgttaatccgcttgctattatccgggcttttttaataaatcttcaatcagggacaacacgccaaggtggaagtacgattactcaacaagtcattaaacgtcttttgttaagccctgaaagaagttatgagcgtaagataaaagaggcaattcttgcctaccgtctagagaaatatctttctaaagatgaaattttaactatatacttaaatcagacatttttaggtgctcattcttatggggttgaggcagccgcaaggacttattttgctaagcatgctaaagatctttcattagctgaatgtgctcttcttgcaggacttccacaagcaccttctcggtataatccctataaagatcctgaggctgcaaaaattagacaacgttatgctcttcgtaggctacatgatgttggttggattacccaggctgaatatgaggaggctcttcaagaaccactatatttttcttcaatgaaagaagggttaggagctgaatcaagttggtatatggaagaagtccgtaagcagcttgtttcctttcttagtaaagaaaatatttctcagtatggaattgtgctccctttatatggagaagatgcactttatgaacttgggtttactatccagacagcaatggatcctcaggcacaacttgtggcatatgatgttttaagaaatggacttgaaaattttagtaaacgacaaggttggaaaggacctattgagcacatttcttcaacaatgattcagcattacctagaaaatgctacatttacacctgaaaaacttgatggtggtgcatgggctaaagcaattgttagtaaagttagtcaagaaggtgcagaagtattccttagtagcatttataaagggtttgttagtgtagagactatgggttgggcacgtaaacctaatccagaagttcgatcagcttattgtgctcctatcaaagatgcacgtagtgttttaaatcctggagatattatatgggtatctggagttggcccagactctacacataggtatagttctaaaacactagatacttctaaacctattcctttagctcttcaacagttaccacaaatccaaggagcattaatttctatagagccaaatacaggcgatgtgatagctatgattggtggttatgagtttggaaagagccaatttaatagagctgtacaggcaatgaggcaaccaggttctgcatttaagccaattgtatactctgcagcacttgatcatgattatacatctgcaactatggtgcttgatgcacctatagtagaatttatggaaagtggggatatttggagaccaggtaattacgaaaaaaattttaaaggaccaatgttatttagcaatgctcttgcactttcaagaaatttatgtacagtaagaattgcacagtctataggattacctgctgttattgaaagagctaaggctttaggatttaatggtaatttccctgaatttttttctattagtttaggtgcagttgaagtaactcctattcgtcttgtaaatgcctatacagcatttgcaaatggtggtaacttagccacgccacggtttattctttctattaaagattctaataatactgttatttaccgccaggaaatagaacaacatcctgttatttcaccacagaatgcgtatattatggcttcactattaaaaaatgttgttaatattggtacagcaagaaaagcaaaagtacttgagcgtcctctagcaggaaagacaggaactacaaatggggagcatgatgcatggtttattggatttacaccctatcttgttacaggtgtttatgttggtaatgatcatccacagacattaggtaaagatggcacaggtgctgttgctgctcttcctatttttacagaatattcaaaagtagtattgaaaaaatatcctgaaagtgactttcctgttcctgatgggattacttttgcttcaatagatactcagacagggaatagagcaactgctaatagtaccaatagtgttgtattacctttttatgtaggtacagttccagaatattttgatagtaaagataatgaggtgaatactattgaacgtggtgaggatttattaaaacaatttttttaa

SEQ ID NO: 9248 - DNA, 1509 bp, Lawsonia intracellularis
atgatggggagtttgtttattggtgcaacaggtatgaaaacccatagtacagggttgggtactgtctccaataatattgctaacgcaaataccattgggtataagcagcaacaggtagtgtttcaagacctgtttagtcaagatttagcaataggttctactggaagtcaggggccaaaccaggctggtatgggagcacaggttggaagtgttcgcacaatttttacacagggtgcttttgaacctggcaatagtgtaacagatcttgctattggtggaaaaggtttttttcaggttacattagaggataaagtacactatacacgagcagggaattttcgttttactcaagatggttttttaaatgatcctagcggatttactttaatgggctcaagaatatctaataatcctaacataaaaaaggaaacccttgaaccaattcagttagactttaatgatcctacagtagcaaagtctcctgcaaaaacaagtacagcattaaacgctgtggtaaaccttggtgatagtacagataaaacacaaagtgaagctaatccatactttgcacttcttgagagctggaaaggaaatggaacacctcctatttctacatcaaactactcatatgcacaacctatgagagtatatgatcaacaaggaaattctcacgatataactgtatattttgatggagcaccctcttcaacaggaagtaaaacatttgaataccttgtagctatgaatcctagtgaagatggaagtgctgcatcaggaacagatagtgcaggtctcttaatgtctggaactatgacattttcaagtaatggcgaattaaaaaatatgacagcttttactcctactggctctgcaacaaaagatttaaatgcatggcaaccagcaccattagtcaatggtttaccacagttttcagcaaattttgttggtgcaggaatacagcctttaacattagactttggaattaaaagccaacagaatatgtgggcaggagctccagcatccgctgctgccataggtacagatattgggaaattgccatcaatgatgccaatacaaacatccagcggtaattctacagcaagaaatggatcatcttcaacaagaagatatagccaagatggttatcctcagggagatctagtagatgtcacaattacctctgaagggaaattacaaggtaagtatagtaatagtcaggttgttgatttttataatattcctttagcacgctttacaagtgaggatggattaagacgagaagggaataaccattattccgcaacacttgactcaggtgggccagagtttggattgccaggaacatctaactatggaaaacttagtgtgaatcaacttgagacttctaacgtagacatgagcagagaaatggttaatatgattattattcaacgtggttttcagatgaatagtaaatctgttacaacagcagacacaatgctacaaaaagcacttgaactaaagcgttaa

SEQ ID NO: 9249 - DNA, 897 bp, Lawsonia intracellularis
atgcaagttgtaacaaacacagacctcaaagaatttcctctctatagtcgtggtaaagtccgtgatatttactctattgatcaaaatacccttcttattataacaacagatagaatgtctgcttttgatgttattttacaagaacctattccttataaaggtatcatcctcaaccaacttactctattttggatgaaaaaatttcaacaccttgttccaaatcatataatagaaagcaatgtagataactttcccagcaaccttgagccatataaaaatttacttgaaggacgatctgttttagtaaaaaaaacaacgccattgcctattgaatgtattgtccgtgggtatatctctggatctggctggaaagattatcttacaactaattctatttgtggttatcctcttcctccaggactaaaagagtctgaaaaattagcaacagcactgtttacaccatcaacaaaagcagatttgggtcaacatgatgaaaatatttcaatagaaacaacagagcatctcttagggaaagatactactacattagtagcttcactttctctccttatgtttaatgaagcttcggtttgggctgaagatcgtgggattatcattgctgacacaaaatttgaatttggtatacttgatggacaagtcatactaatagatgaagtactcacaccagactcatcacgtttttggcctacaaaaaactatataccaggtaaaagtcaaccaagttttgataaacaatatctaagagactggcttgaaacacagctatggaataaaacatcccctgcccccaacctacctaaagatgttattcaaacaacctatgataaataccatgaagcctatactattttgacaggagaaaatattggtatataa

SEQ ID NO: 9250 - DNA, 765 bp, Lawsonia intracellularis
atgctcttaaaaaataaaaaatgccttattcttggaattgctaataacaaaagtattgcctatggaattgcttcatcttttaaagaacatggtgctaagttagcatttaactatgttaatgatgctatccaaaaacgtgtggaacctatttcacaggagttaaatggagattttatcttccaatgtgatgttagtaaagatgatgaaattaaagaagctgtaaaactggttcaaaaagaatgggggcatattgatgtccttgttcattctgtagcttttgctaacagagaagatttaacaaaacgttttattgaaacatcacgtgatggttttcacttagccttagatatttctacctattctcttatcacattatgtcatgcatttgaaccactctttgtccatggctcttctgttcttacgatgacatattatggtgctcaaaaagtaattcctcattataatgtaatgggtgtagctaaagctgctcttgaatcttctgtacgatacttatctgtcgagttaggcgaaaaaaacatccgtattaatgctatcagtgcaggtcctattaaaacattagctgcctctggtatttctgacttcaaaaaaatttttaatcatatagaagaacattcaccattaaaacgtaatgtaactatcgaagatgtaggtaaatctgctgtttttttagcttcagacctatcatcaggagtaacaggtgaaattctttttgttgatgctggctacaataatttaggtatttaa

SEQ ID NO: 9251 - DNA, 1320 bp, Lawsonia intracellularis
atggctttagttacaaaagaagaagtacttcaataccatagtgaaccccgaccaggtaaacttgaagtatttcctataaaaccatgtaaaacacaaaaagatctctctatggcttatagtcctggtgtagcagaagcctgcctagctatttctgaagataaagatacttcatttctatacacagataaagcaaacttagttggaatcatttctaatggttcagctgtattaggacttgggaatattggtccagaagctgcaaaacctgttatggaaggaaaagctatcctttttaaacaatttgctgatatagattgttatgatatcgaaattaaagcaacagagattgatcatatttgtgaagttattaaagcacttgaaccaacatttggtgcaattaaccttgaagatattaaatcaccagaatgctttgccattgaagagcgactaaaaaatgaaatgaatatccctatatttcatgatgatcaacatggaactgcaattatttcatctgcagcacttcttaatgcattagaaattgcaaacaagaaaattgaagatatccgtatggtcatttctggtgcaggagcagctgctattggatgtggacgtctgtttaaaattcttggtgttactcctgaaaatattgcaatgtttgactctgaaggtcatattaatgtctctcgaacaaaccttaaccaagaaaaaaaagaatttgctacacaaaaaacatatacaaccattagtgaagcaatagatggtgcagactgctttattggttgctctgttcctggagtcatcactgaaagaatggttgaaacaatggctaaaacacctatcatttttgcatgtgcaaatcctgttcctgaaattggttacaatgaagtaaaatcaatacgacctgacgctatcatggctacaggacgctctgattttcctaatcaagtcaacaatgtccttggattcccttttatttttcgtggagcaatagatacatatgcaacaacaattaatacagaaatgaagattgctgcagcttatgccattgcagcacttgccaaagaatctgtacctgaatccatatgtatggcttataatgttaaaaatcttaaatttggccctgactatatcattccaaaagctcttgatctacgtctacttgagtgggttgctccagctgtagctcaagctgctatagcatctggggttgcccgtaaagaacttgatattgccaattatgcattaaccctacataaacgtctatctgcagcacataagcgtcaagaattacttcttaactcatatggcttttatagttga

SEQ ID NO: 9252 - DNA, 318 bp, Lawsonia intracellularis
atgagaaaatttgaaacattattacttttatctccagaactttctccagatgcacgtgaagcactactagtaaagcttgttagtattattgaaaaaaataaaggacaatttactgtaaatcactggggtatgagagatcttgcttatcctgtacaaaaacacatgcgtgggtattacgttcttcttgaatatacaacgtatccaaatattatagaagaattagagcgtattatacgcattactaatggaatatttaaattcatgacgattaaacttgaagaacacattgaagaaaaacaactcgaggaggtagtataa

SEQ ID NO: 9253 - DNA, 522 bp, Lawsonia intracellularis
atgaaagtcattttacgttctgatgtggaaaacttaggccgtcttggagatattgttacagtaaaatcaggatatgggcgaaactacttattaccccaaggtcttgctatgcttgtaacaccaggaaacatgaaagtatttgaattagaatttaaaaagctacaagaacgaatgaatgatatacgttctaaagcagatgaattagctaaacgtatttcaggattaattgttactgtactcatgcgtgctggtgataatgataaactttatggctctgttactacaagcattattggtcatgcactagcagaacaaggtatagatattgatcgacgccgtattttgcttgatgcacctattcgtacacttggacaacatactgtacgcgtacggctacatgctgatgttattgcagaatttattgtaaatgtagcctctgaagaaaaactgtatgacgatactccagacagaaccgaaacagaagaatctacaaaagaactccaagaagaacacgcagagtaa

SEQ ID NO: 9254 - DNA, 1365 bp, Lawsonia intracellularis
ttgcttcgtagagttcctccgcataatgttgaggctgaacaagcagttcttggtggcatttttttacgtaatactgtttttcatacattaatagatattgttagagctgaagatttttatattcccagccatcaaattctttacacaactttttgtgagttatatagaaaaagtgcacctattgacctagtctctgtagcagcttttctaaatgaccaagggttgcttgaacaagttggtggtgcttcctatttagcagaattagcacaaacagtagttagtggtgctaatgcagaatattatgcaacaatagtaagagataaatctcttcatcgtactcttattaatgcctgttcaacaattataacaaactgttttgatccttcttgtaatgtagattcgcttcttgatgagtcagaacaaactattttttctatctcagagcgcacggtaggaaaagcatttaaaagctctaaagatcttatttctaatgtctttcaagaacttgaaaaacggtttgaacgtaaagagcaagttactggaatcacaacaggctataataggcttgataaactcacagctggtctgcaaccttcagatcttattattgttgctgcacgtccatctatgggaaaaactgcctttagtttaaatatggctatgcgttctgctatccagcaaggtactcctgttgctatttactcacttgaaatgtctatgaatcaacttatgatgagaatgttatgtgcatggggtaaagttgatctttctcatttaagacatggatatctaaatagtgatgagtggagtagactttatcatgctgcagatgttctaggacaagcgcctatatttattgatgatacaccagcactatctcctcttgagttacgtgcaagaactcgtagattgaaaatagaatcagatgttggtcttgttgttattgattatcttcaacttatgcgtggtaataaacgtactgattctcgtgaacaagaaatttcagaaatttcacgctcacttaaatcattagcaaaagaaatcaatattcctgtggtagcattgtcacaattaaatcgtaaacttgaagatcggacagataaacgacctcaactctctgacttacgtgaatcaggagctattgagcaagatgcagatgtcatcatgtttatttatagagatgaagtctaccataaacaacaagataatgctaaaaaaggtacggcagaaattattataggtaaacaacgtaatggacctattggaacagctacacttgcttaccttgcaaattacactgcatttgaggacttagagcctggtctttcggcttcaccttctgaaacttatagcaacatagcttaa

SEQ ID NO: 9255 - DNA, 591 bp, Lawsonia intracellularis
gtgggaaaaaatattacttcagaacgattagcaaaaattaaacatgtcctttcgttacgacaaaaaaatttgacacttgtattagcaaatatacatgatccacataacgtatctgctatttatcgtagtgcagatgcttttggcattgatacaatacatctttattacacagatacacctttcccaaagttaggtagtaaaagttctgcttcagcaaaaaagtgggtaaaaactatctaccatcagtctgctaataaacttattagaatgttaaaagaggataactataaagtaattgctacaagttgtacgtcacaagctcaaccattattatcacataattttactggttcaacagctattattatgggtaatgaacatgctggcgtccctccagaacttacaggattagttgacagtgaactttatattcctatgtatggtatggttcaaagttttaatgtttctgttgcagcagctattattttagcagaagcttcacgtcaaaggttatctgcaggtatgtacaatacaccaacatatactgaaactgagtttgcaactaatcttagtttatggataaataaataa

SEQ ID NO: 9256 - DNA, 1998 bp, Lawsonia intracellularis
atgaaaattactattcaaaatttttctaagtcttttggtggacaagatatcttttcagatttttcgttagatattgattctggtattcggttatgtgtttctggtccaaatggatgtggtaagtctacgttattacgtattattgctgaagttgatatacctgattctggaagagtgattattccaaaaggaactcgtataggatatgtagagcaagaattagctcctagtgctctggatgtttctttacttacatgggttcttgaagttctacctgattggcatgacttttgggctacatgggaagaagctattcaagcaaatgattcaaagaagttatcagagctaagtttaaaacatacagagcttgaaactctatatggatatcatcctgaatataaagcaaaagagattctttctggtttaggttttactgataatatgtttgatttaccactttctaaactgtctggtggttggagagaaagggcaaagttagctagagttttagttgctggtgcagatgttcttttattagatgaaccaacaaatcatcttgatattgaatctgttgagtggcttgaagagtttttaagagaatataaagggatactcatatttgtagctcatgatagggttttcatggataatgttggtacacatattttataccttggtggattgaagccagtttttcggaaactcacattttcacaatttatggtgttacgtgaagaaattgaagaacaaaaagcacgagaaacacaacgtattacagatgaaattgaaaggaaaatggaatttgtgagaaggtttggtgctaaggctacaaaggcacgccaagcatcgtctcggcaaaagatggcaaaaaagcttgaacaggagcttgaagaatataaacctgaaatcaagcgaaaagagcttaagtttatatggccaacccctcttaaggctgataaagttattctttctgcagcagcattatcattttcttttccagatggtcgtcaattatggccttctcttacgtttagtcttttaaatggtcaacgtattgcacttgttggtcctaatggctgtggaaaatcaacattgctcaagattattgcaggacaactaaaatctacaggaggttctctaaccctaggatcaggggtacggttaggttattatagccaacatcagacagaaatactaaatacttcaggtacagtccttggagaaataaggagactttctgatcctaaaatgacagaagaagaacttatgagtgttctaggattatttcttcttggacaaggatattttgatcgcactattcaaatgctttctggtggggaaaaggctaggcttgtacttgcgtctctttttcttaataaagcaaactttttagttcttgatgaaccaacaaatcatcttgatttagagagtcgtgaagcacttgttaatgcacttagtaattttagtggtactcttcttgttgtagctcatgatcgttatttatgttctaatgtaacagacgaagcttgggctctttcttctgaaggacttactcgatatgagcaaggttttttacagtatgatgaagctagaaaacaggggttaaagcaagtaacaatagttgaaactcaggataatcaaaaaaattgtcttacccaaaaaaataaaaaaaatagcgttattagttatagtcgtgatgaactaaaaagtttaaaaagagaacaagctaaaaagagaaatgaactgtataatacgataaagccaaagcaaatagcttacaaacgtcttgaagaagagctttctattttattagaaaaacagcataatcttgaacaactattagccactcctgcagggcatggaagtggaatagaaacagcaaaacttcttaagcaatttagtgaagtaaaagatcaaacagacagaattatagataagcttgaaaaacttgaattagaaattaatgcattagaacaacaacgtatagctatttcctaa

SEQ ID NO: 9257 - DNA, 870 bp, Lawsonia intracellularis
atgccagcatatggagatcttgtttgtattataacaccaagaggtaaatctaaactttatcgaattgaaaaaaatcaggatatacatacacaagatggcattcttaaggtggatgacattgtacatgcatcatatgggactgaaatttttactacacttggtacaccctgttgcattcaacgacctactattaatgatattattagaaatactaaaagacaaacacaagtgctttatccaaaagatataagttatatttgtatacgtcttggtgttgggccaggaagaacagttattgaggcaggcacaggttcaggaagtttaactatggcattatcatggttttcaggcccaactgggcatgtacacacctttgaggcacgagaagaattttatactcttgcaaagcataatttacaatgggctggattaggagataatgtaactatgcatcatcaagatatatcagaaggttttggtcaggtaacaggggctgatgccttatttcttgatgtgagaacaccctgggaatacctaacatttattcctaaggcagtatctcctggagcatcgttagctttttttgtacctactacaaaccaaataaatgaacttttacttggtttagataatggtccatttgataatatagagatttgtgaaattttgattcgtcattggaagcctattattgatcgaattagacctgaagatagaatgatagctcatacaggatttcttatttttgcacgtcatcaagagcattcttcttcttggaataaatataaaatattaggaacccgtgagcgaaaacaagaggctgctcgtaacaagagaatgaaagctgacgttcaacatatagatgaataa

SEQ ID NO: 9258 - DNA, 2013 bp, Lawsonia intracellularis
gtgaagaaattttttattatactatttgttattattattctacttatatcaggtatcgccatattcatatataccaataaagataaaattacgttagctatttcaaaggctgttgagtctgccacaggacaaccactttacacagatagtataccaagtctttcttttttccccacccctgggattgaacttggaaaatcctcttggggaaaccctgatactaatgaaatttctgtagagctaataaagtgtgtctttagattttctctcttaaaattatttactggtactattgctattgatgaaatattttttgaacaaccttccattattatacaaaagaaaaatgcacaaaataaaaaaatacaatctacagctgcagtaacttcaactaatgccattaatcctcaagaagataaaaaagcatcctttcaacttccagaaataagtatttcctctgtcaccataaaagatgggatgttaaaattttttgatggacgtaaacagataatacttaccggactacaattaactgcaaaaaatatttatcctcaaagcacaggtaaaatttctatacatactcaagcgttatttcaaccagaaaatatttcctttgtaacagaagggaatgtatcaattattcttgataaaaatatactttctatagaacatataaaatttattattaatcctaaaactggattaacagtctcaactcccataactatagaaggaaatggacgctacctttttgataaaaatttgttagaaaaatcagatatacaagtaaaactagatcaatttaaaataaatgctaatggttcgttagaacttaataaacttcaaggaacagcagtaattaatgcgtctggttcattaaaaaaacttgctagcaccttaggaatgatgcttatcactcctgaaacaaaaatttttgagaacttctctgctcaaagtaaagtacaagttaatggacaatatattcaactaacagatctcaaaattatgcttgatgatagccaagttaccggaaagctagctctaaatcttcctaataaactttctggaaatctttccctaacaactattaatcttgatcaatacctacctatatcttttgctaaacatacaccagtaacaaaaaatctaatacaaacatcatctgtaactactgctcaacatactataaaaaacactcaacaacaaacaatctcttcttcacttccaacattagatcttaagttaactgctgatagtattattatatctaaattacatatagaaaaattaaatagtcaactacatggtaatccatcaaattatgtccttgatccatgtacttttattttttacgaaagtcctatttctgtaaaaggaaaaggaaatcttactgcatctaacccaagatatgaagcaacaattacaggctcacatattaatcttacatcccttcttagtgatatttctaaaacagctataatcaaaaaaggtactgttgatctgtctgcagaaataacaaccacaggatcaaatagtatacagttaaagcaaacattaaatggtaaagccactattgaaggaaaagatattaatattcaatttggtgcattacctgtccaaagcccagaacttactcggatatcacaacaacccttcacagaacttaatggaaaattaaaagctgttaatggaactattaatatagaacaatttattcttaaaggaactccagttgctgcagcagcaaatggttcaattttacttcctaataacactatgaaaattaatgttgatattgctgtaaaagatactgttattccacttcatatatatggtgacttatcaaacccatcatatcgagttgaccctgcaagactattacaaggtgctataacaaagatacttaataaaaaagaaaaggatatttttgataagcttcctttaccccaaaatgcaaaagagtctattcaaaatacagcagaaaaagtctttaacaaaattttcggccgataa

SEQ ID NO: 9259 - DNA, 1374 bp, Lawsonia intracellularis
atgaaattgtctcataaaatacgtccacatagtttaactagggagaatatttctcgactaactgattatacagcagtagcaatttcattaaatcatttaaagaataataaagactttatacatccagcagatatagctgaatacttagaaacactctctactgagaaacaactttctttagtacaaaatcttcctgtagaggaagcagcagaagctcttgcagagttgagtgaggatgtagctggagatatattagaacatcttgatcctgcagatgcagctaaaattatttcagaaatgtctcctgatgatgcaacagatgttcttgatgaaatagataaggagcatagggatgcattattagataaccttgttgaaaaagatgcagaagaacttcgcaagctgttatcatttgacccaaatacagcaggcgggattatgaatacagaagtgtctatgtttaaacaagacattactgttgatgaagctattacacaaattcgtactactatagagtataaagaaattatttattatgcatatgttattgatgaagaaagtagacttgttggtgttctttctttaagggatttaatgttattaaaacctggaactgtattacagcatgctttaaagcatcaagatcttattgttgcttattatgacactgataaacatgatgttgctaaggaaattagtcattataacttgatggctatacctgttattgactatgaaggccatcttcttggtgttgctacatatgatgatattattgatatcattcaagatgaagcaagttctgatcttttaggaatggtaggggcaggccaggatgaaaccgtagataccccatggtatgtatctgtttttatgcgattaccttggcttattgttaatatgttaacttctgcattgtctgcatttgttgtttatttatttgagggttcgattgcacatatggctattttggcagtcttaatgcctatggttgctaaccaagcaggtaatacaggtcagcaggcattagctgttatgattcgtcaacttgcaacagaacgttttgaagttaaaagagcatggcttgctgtttttcgagaaggtaaaataggtattacttcagggttaattatggggctttttgtttcagttattgtaatgtggatgacacaaaatgttgtattgggttgtgtaatgggtggtgctcttatgacggatatggttgcaggatcccttgcagggggagctattcctcttttcttccgttatatagggcgtgatcctgctcaagcttctagtatttttctcacagctataacagatagttttggtttttttatttttcttggtcttgcaactctttttttattatga

SEQ ID NO: 9260 - DNA, 891 bp, Lawsonia intracellularis
atgcattgcccaacattttcaaaatactttcaaggtaaaccttataatcttcttataacaatgctcaaattagctcttgaagaagacgggatagattttacttcaaaaggaatattttcttccacagaacaaatccatacacaaattattgctaaagaacagacatgtgtttcaggactgcctgttatccctattattatgcaattatcttctcttactcataatgactatgtattaaatatccttgtagatgaaggtcaagaagttcctataaatacacctatagcagagattattggccctgcctttactatactccaaacagaaaggactatactgaattttattagtcatctctctgggatcacaactactactaaaaaatatgttaatgctcttaaaggctctgatattatactattagatactcgcaagactctgcctggattacgttatccagataaatatgctgttctgtgtggtggtggcatgaatcatagatgtaatctagaagaattattactaataaaggacaaccatattgataaagctggttcattaacaaatgcagttaaatcattacgtaacacatataacccttgtccgcctattgaagtagaatgtcgaaaccatagtgaagtcattgaagctgttgaatgccaagttaaccgtattatgcttgataatatgtctatagatactctttgctcatcacttatggttatccctaaatctattcaagtagaagtaagtggaggtattactcttaataatctcaaaaatattgtaactagccaatataagcctcactatgtctctgtaggatgtattacaaactctgcatcagctgctgattttagcatgcgtgttataagggagaaaagggtatga

SEQ ID NO: 9261 - DNA, 1056 bp, Lawsonia intracellularis
atgagtcgctttttgaataaagaagaaaaaagtaaacatataacaagcctaaagtcatcacttggaaatcaagtttctatattaggacatcattatcaagaacaaggagttattgatcactgtgactacacaggtgactctcttgagctagctcaacgtattgctcatttggactcagaacatattgttttttgtggtgtttattttatggctgaatctgcagcattacttgcaaaagaagaacaatctgtttaccttcctgaacctgcagccaattgcgttatgtctcttatgagccctgcatatcttatagaacgactatttaaaaaacttactgcttctggaagaaaacttattcctgttgcttatgttaatactgaagtcgatgtcaaagctattgttggaaaatatggtggagcgacttgcacttcctctagtgctgataaagtattaaaatgggctctaaatgaaggagatggtgttttttttcttcctgataaaaatttagcatataatactgcaaaaaatataggtattcctaaaaaaaacttacatattcttgatatccgaaaaaaaggggatgttgcagatcttgaagcatctaaacaagccgatattattgtttggccaggactgtgtgccattcacgcacgattccttatgcaacatatccatttagcaagagaaaattatcctaattgtactattgtagtacatcctgaatgtacaccagaagttgtaaaggcttctgatgcagtaggttcaacatctttcattattaattatgctaaaaatgctcctgatggttctcatattgttattggaactgaaattaatcttgttagtcgtcttaaaaatgaacataaacatagaataaaaaccactccacttagagcaagtgcatgttcacatatggctaaatgtaaccctgataaactttataccacactacatagtattgctaataataatgcaacaccaatatcaattgaacaggaaactaaaacgtttgctcgtgcagcacttgaacgtatgatgcaaattattactgtatag

SEQ ID NO: 9262 - DNA, 1584 bp, Lawsonia intracellularis
atgaatcaacaccgatattactctcaagtacttattattggtggtggcattgctggagtaactacagcacttgtcttagcagatgcaggatttgaaatcacacttattgttcctagtaaagaacttgatggtggtaattctcagcttgctcaaggaggtattgttttccattcacaagatgataacaaacagcttgaaaatgatatcctcaatgcaggccatcaacataactatttaaaagctgtacgtttcctttgtaaaaaaggaccagaagtagttcatcgtctattaatagaacgtataggtattccatttgaaatcgataaacagaaaggaacatggagtgttactcgtgaaggaggacatagctctgctcggattattcattgtgctgatcatacaggaaaatctattatggaaggtcttctaaaagaaatacaaaaaacttctaatattcaaatccttactcatagaacagctatagaccttattacaacacatcatcatgcaaaactgaaagaatatcgttataatcctgagaatcagtgtttaggagcatatgtttttaacgaacagacaaatgaagtagaaacactacttgcagattggacagtattagcaacaggaggaataggacaaatatatcttcatactacaaatacagaggcttctataggctctggtattgctatggcgcatcgtgcaagtgttaaactcactgacttagaatatatacaatttcaccctactgctttatatagttgtaataaaacacaaaaatttttaattactgaagcattacgtggtgaaggtgcaaagcttacgaatacacaaggtaaagcatttatgaaaaaatatgatacacgtgctgaacttgcacctcgtgatatcgttgccagagcaattatggaagaattattacatactggagaacaatgtgtatacctagatctttcaaacgtatcacatgatattaccaaacgttttcctactatctataattattgttatcaacaaggtctttcaataaaaaattctcctatccctgttgttcctgcagcccattatttttgtggcgggattcttactgatacccaaggacaaacctctctttcaagattgtttgctgttggagaatgtagttgtacaggtgtacatggagctaatcgccttgcaagtacttcattacttgaagggttactatggggttatagcacaggattacatatttcccgaaaaaaaaataaaaagaactttttatctacacgtattatcaatgctattccaaattgggagtgtacaggtaatgaaaaaaatgatgatccagcacttattacacaagactggacttctatacgacacattatgtggaattatgtaggaatttgccgaacaggtagtcgactcaagagagcttttgaagaacttagggatctttcaagacatcttcatgatttttataaaaatactcctatttcaaaaccaattatagatctctttcatggtagtcaaactgcttatattataacccaaaaagcacttctcaacacaaaaagtataggttgtcactaccgtataaattaa

SEQ ID NO: 9263 - DNA, 306 bp, Lawsonia intracellularis
atgtttgtttttggaaatattttattaggtattgcaagggttcttgatattattctttctttgtacttttggattgtcattatagctgtattattaacatgggtaagacctgatccatataataatattgttcgtatgttttatgcccttacagagccagttttttataaagttagaaaatttcttccttttacacttgttggtgggttagacttatctcctattgttgtcttgattattatacagttattacaaacaattgtagttcgatcattatttcagtatgcagggatgctagaaggataa

SEQ ID NO: 9264 - DNA, 675 bp, Lawsonia intracellularis
atgtcatataataactcgttatttaaccaagtaaaaaatatatttcctcagggtatagtaggaattatttttgactgtgatggtgttattattgattctaaaagtattaatgtaggttattttaataaaatacttcaagagcttggttatcctaatatgacaaaagaagaagcagattatgtgcagatggcttctgtgcaagatgctatgaactttcttattgcacatgaagatagagaaaaactaaaagaagtaacacaacgtttttcttataaaaatgaagtattaccgcaccttaagatagagccaggattgatgaatttattacattggttaaaaagtagaggaatacaacttggtattaatacaaatcgagtttccaaaggaataaatgatgtgctactttcattagatttaaatggattttttgatcctattataacatctgatctttttcctgcaaaaccagatcctgaaggacttctaacaatactagaaatatggaatactgaaccttctaaagtagcttttattggagatagtttaactgatgaaggagcagctcgtgctgcttctataccattaatagcttattgcaatacatctctttctgcatcaatacatattgagaaattttcagacttatatgatgcccttcaaggtctttatcaataa

SEQ ID NO: 9265 - DNA, 723 bp, Lawsonia intracellularis
atgtatattcgttatgtagtattagttataatgttagtttatcttcctggttgtggtataattgattattttgcagtacctaggcctgaacaaacagcacaagaactttatgaaaatgcaaaagatgcaatggaagaaaaacattatgcacaagcagcagagtattatgaaaaattaaaagataattatccacttagtccatatacagttgaagcagagcgtgcacttggtgatgctcttttttttgatgaaaagtacgctgaagctgtagaagcttataaagaatttgagacgcttcatcctcgtcatccagatattccatatgtcttatatcaaattggaatgtcaaatttaaaaacttttatttctattgataggccaacaacgtctatacaagaagcttatgagtattttcaaagagttcaggaaactttccctgattctccctatgctgaagctgctgtaaatgaaatgaaagcttgtcgattgattatggtagaacatgaactttatattgctaatgtattttggaatatgggtaagtatggtccagcatggaagagatatacctttattttagaaaacttttctgatgttcctagtgtgtctgagtatacaaaagaaagatcgttagcagcatattttttatacaggaaacaagagtcacaagctgaaagagaacaaattcatggtagttggaaaaggttatttaattggttgtaa

SEQ ID NO: 9266 - DNA, 927 bp, Lawsonia intracellularis
atgaagcaatacgacagtattgtcgtaggtggtggacctgcaggtttaactgctgcattatatttatgtcgttcaggattatctgtagcactaatagaaatgcttgccccaggaggtcaacttctgaaaacagaagaggttacaaattatcccggattccctttaggtattaaaggttgggagttagctgactttttttcagcacatctcgacggatatacacttactcgttataatgataatgtaacttcttttattcatactccaggtgaaaataagcttacagtcggtgaaaaagacattattgggaaaagtattattatttgtacaggtgcttcccctaaaatgttagggttgcagagagaaagcgagcttagaggtcgaggtgtttcatattgtgcattatgtgatggaaacttttttcgtgatcaggttgtagccgttgttggtggaggaaatacagcccttgaagaagcgttatatctttctcgtattgtaaaaaaattgtatttaatacatcgtcgtgataaatttcgtgcaaataaacattatcaagataaaataatggctactactaataaaataaagcttattttagatagccgtatcactatgcttcatggtgaaagtgagcttgaagctcttgaagttgaaaatgttaaaacacaagtgatatcaaagattgaagtaagtggtttatttatctttattggttatgagccaaaaagtgattttttaccttcagaacttgctttagacgcaagtggttttgttttaacagatagtgagatgagaacaaatttaccaggtgtttttgctgctggtgacatacgttcaaagcaatgtcgtcaagtggttacagctgttggtgatggagcaacagcagcaacagcagcctttagctatattgaacaattggatgtttaa

SEQ ID NO: 9267 - DNA, 324 bp, Lawsonia intracellularis
atggctgcccaagttacagatacaaattttgatactattgttttaaaatctaataaaccagtgttagtagatttttgggctccttggtgtgggccatgtcgtgctattggtcctattatagacgaaatagctcttgagtatgcaagtgatatacatgtagtaaagttgaatgtagatgaaaatacgataacacctgggcagtatggtattaaagctattcctacacttattctctttaaaaatggtgaagtggtagagcaacttacaggagctgtctctaaaacaagtattattactatgcttaaagaaaaggcgttatcatga

SEQ ID NO: 9268 - DNA, 1068 bp, Lawsonia intracellularis
atgttatgtcttggaattgaaacatcttgtgatgagactgctgttgcccttgttgaaaatggaaaatgtataggttctatcttaggaacacaagcacctttacatgctctatttggtggcgttgttcctgagcttgcatctcgagagcattataggtgccttggaccattatatgataaacttatggaagatgcgaaggttaccttagctgacttagacgttattgctgtaacacgtggaccaggtttattgggagcactacttgttgggttagcttttgcaaaaggtctagcattagcatctggtaagactttaataggtattaatcatctacatgctcatctccttgtggcagctattgaggaacctatagagtatccagcattaggactccttgtttctggaggtcatacacacatttataaaatagatgctccagatatttttattcttttggcaagaacattggacgatgctgctggtgaagcctgtgataagtttgcaaaaatgttagggctaccttatcctggtggagttattattgataaattagctcaacaaggaatcccagatccatatttgtttcctcgaccatatatacataattcagaactagatttcagctttagtggtcttaagacgtctgctgcaatgtatctaaagcaatatcctcaacttattgaagaaggtcaacgttattgttcaaataatagtaaagtagccattaaagaagagctttataatgtttgttcctcctatttacttgcgatttctgaaacactatatataaagatggaaagagcacttcaaaaatatactaatgagataaaaactattattgttgctggagggttagctgcaaattcttttgtccgtcaagctatgcataatcttgctatcaattataataaaaaaatattgttacctgaacaaaagctttgtacagataatgcagtaatgatagcttattatggagagttattagcagagaaaggatattgtcatagattagatctttctgctattccaagaggacaacatattccagatgacatggtgaaagtataa

SEQ ID NO: 9269 - DNA, 1008 bp, Lawsonia intracellularis
atgtcttctgaagttactgtgaccgaacatctccttttgcagcagcagagggctcctcaagcaacaggacattttacatctttatttcatgacttaattttatcagctaaaattatttctcgaagtgtaaataaagcaggattacttgatgtacttggggggacaggtgatattaatatacagggagagaaagtacaaaagttagatgaatttgcagataaagtccttctgtatagaatggaacgctcaggtgtcttatgtgctatggcttctgaggaacacgcagagttgatcaaagtttcagctgcattccctcgtggtgattatatccttatatttgatcctttagatggctcttctaacattgatgtaaatattaatgttgggactattttttctatattacgtcgtaagcctggtaaaactggagatgttgaacttgatgaagtattacagccaggttcagaacaaattgctgctggatattttttatatggtacatcaacaatgcttgtttatactgctggacaaggtgttcatggatttacattagatcctagtgttggtgaatttttactttcacatactgatattaaaataccagacgaaggttttatatattcagtaaacgaaggttattgggattattgggatacacccactcgtgaagctgtaatgtattttaagcagccatcttctaaagaaaaagtacgatcagcaagatatgttggctctttagtcgcagattttcatagaacgcttctttatggtggagtcttcatgtatccatctgataatcgtaaggggaaaatgcatggaaagctacgctatttatgtgaagcttcaccacttgcttttgtagctgaaaatgctggaggtgctgcaactgatggcctttatagaactttggattatgtaccattaagtttacataaccgagttccactagtcataggatctaagaaagatgttgaggctgttgctaacatctatgcaaagtataagtaa

SEQ ID NO: 9270 - DNA, 870 bp, Lawsonia intracellularis
atgtcccgtaatatttttatagttctttgtctgggactaacaattattatcacaggttgtggtattcagagtgtttcaaattcatggaaaaggacaaaaaagttctatggtagctatattaataaaccagcttgtattaattactcagatactgataagttagatgaaaaagatgttattctagcttcaagaatgatgggtattgatacacagcttgaagctcttcaacggtaccttcaaaactcagacaaacccccatctgatgaaagtattatagcattattaaatacatttccttggttatctggagttgttcttattgaaccaaacggagaactaatagcacaagagccagagaatctattagaaaaatctgatttagccaaaattatagaggctaagccaagaggaaagatgttgcgtgatattcgagcagcagttcaagaaacaagtattggacccaaagtatttttttctgtacctgtatatgttgactcagatatgaaagcactttttgttgtatattttgacatagagaagttatcattatattcaccatatagtaaggctctagttatcttttctccagaagctgtattatggtcagggcagttttcatttgaagataccccccttgctaaagaaaattgggaatcattactaaaaaattcggttagtggtagggtatctaaccaaaatggagaatttttttggttatctcactttataggtaatcaagaaatagtttttgcaacacctgtatctggaaagttttttgaagaaactaatcagtgtttccttgttgatttgcaagaaaatacagaaatagaggctcaaaatacgttattagaaaactcagaaaatccatag

SEQ ID NO: 9271 - DNA, 882 bp, Lawsonia intracellularis
atgacccccaaaatcgaatggtttcaggaaatattagaacaagaaccaagctctagagtttttttccctcttgcaaagcttttatttgagtctggagatgttacaaaagcacttgagacactaagacatggtcttgaacatcatccagattttcttgaagcaagactttttttaatacatcttctatatagtattggagatatggaaggttgctcatctgaaagcattttaattgctaatctttttaatcaatatcctgatttttgggcagcatggggacaatctggtgcacaggttggaggtgactttggtctttatatgggtttaatatcagctcttgtattatacccagatttgacgctaaaagaatttttatcttatggtttaaaaggattatctgaaagaaaatcaacagagttttcacattattctaacactaaacagtcatttgcctcactacagacaagctcacagtcatctggtatagttcagtctagtaatgatatagttgacatagaagaagtcggtgatagtgaagagcttttttttgatcgtccggaggatatggcagtagtatctaaatctaaggatgattcttttccagtttgtacacgttcaatggcagaagtccttgctgaacaaggagatattgtaagtgcaataaaaatttatcaagaattagagtctcaagctactaatcatgaagagatagtttctttacatgcaagaaaagtagagcttagtgaaatgttagcacaggctaggaatgcgtctagttttagtagttctactacgaacagttataatatcaatcatcaggctgaagttattgctatgttagaggccttagtaacacgtcttgaaaaaagagcaaaaggttaa

SEQ ID NO: 9272 - DNA, 312 bp, Lawsonia intracellularis
gtgtatagtgtatctagtagatcagcttttttaaagcttggagtattatcgatagctatcttattaaatattatacttgtagttagactagtttggggtgctcacagtcttatttcttatcgggaattgattttgcaacataaatctattactcaagagttacagaaatatgatgatactattgcaaggttaagtcatgagatacaattattgcatagtaatcccagttatattgaaaagatgataaggcaacatctaaattttgtaaaagataatgaaatattatatttaattacaataaaaaaagattaa

SEQ ID NO: 9273 - DNA, 561 bp, Lawsonia intracellularis
atgatttggatgaagataatacttaatctagcaaactctattactttagtcaggactgtttttgttattcccataatagtattactttattttgaaggtccaataacttgttttttagctacattacttttctgtattgcttctgttacagattatcttgatggtcatatagctcgtaaagaaaatatggtgacaagttttggtaaatttcttgacccattagctgataaacttcttatttgttctattcttattatgtttgtgaagttagattgggttcctgcatgggtaactattattatcattggtcgtgaacttgctgttacaggcctaagagctattgcagcagatgaaggaattattattgcagcagataattatggaaaaattaaaacaattcttcaaatggtcgctattgttcctcttcttttacactattccttatttggtatagatttttataagataggactttttttactttacatagcccttattctcactgtactttcaggagtaaagtatttctatagtttttataaaaattggcaatataaataa

SEQ ID NO: 9274 - DNA, 819 bp, Lawsonia intracellularis
atgaatattcctctttcacctgctatgcaagataagcaattaaaaaaaaatatagatactattcagcataaactttttattatgagtggaaaaggtggtgttggtaagagctctgtaacagtaaaccttgctgtttctcttatgcaaaaaggtttccgtgttggtattttggatgttgatcttcatggtcctagcatcccacgtttattaggtctttcaggacatgttgaagttgatgagcaaggacgtatgattcctgttttttataatgataagctatgtgtagtttcaatggattcttttttagaaaaagaagatacagctattgtttggaaaggacctaaaaaagtaggagctattaggcagtttttaagtggagtttattggggaaatcttgattttcttcttattgattcccctccaggaacaggagatgagcatatggctgtccttaattccattccagacgcaaagtgtattgttgttacaactccacaagaaatatctttggcagatgtaagaaaagctttggattttttacgtcaaattaaagcacctattttaggtattgtagaaaatatgagtggtctttcttgtcctaactgtggtcatgaaattgaaatttttaaaaaagatggtggtgttcaacttgctgataaggaaaatcttcttttattaggtcaaatatctcttgatcctttaacagtagttgcagctgactgtgggaagccagtcgtttgtatggaagaacattcagaagctaaagaaaaatttttgcagcttacagaagctacattaaacgcattaaggctcatttaa

SEQ ID NO: 9275 - DNA, 681 bp, Lawsonia intracellularis
atgttgagataccatacatcaaaaaataattttcctttggctagcgatttgaggcgtcagcgtgagcgtatggttattacacaacttgaacaaagaggaattactaactcttatgttcttacagcaatgcgtaatgtacatcgacacttatttgttcctgaagcattacaaagtcgtgcatatgacgactatcccctccctataggttatgggcaaactatttctcgtccatatatcgttgctattatgactagcctccttgagccgactccaggtttaagtgtccttgagatcggtactggttctggttatcagacagctatcttagccaatataggtcttgaggtatttagtctagaacgtgttagggagttgtattttcaaacaaaagaattattttttttgttaggatatagaaaaattagaacttgcctttctgatgggaccttagggtgggaggaacatgctccctttgatagaattattgttactgctggtggtccaaatatccccttaccattacttaatcaactaggagatccaggagttatggttattcctgtcggtcaaaacccacgagaacaagagttgatgtgtataaccaaaaagaataacactgttacatcaacagttattggtaatgttgcttttgttgaccttgtgggagattatggttggtaa

SEQ ID NO: 9276 - DNA, 1314 bp, Lawsonia intracellularis
atgtccaagacaaaacttcttgttataactataggaatagccagtattattcttgccgctgctacttacatttttttcaaaaacacagatccacctattatatctatgattcaacctacacaatatatttctccaagacaaccactaacacttactattacaagtaaatactcgcctctcaaacttattcaaattatagtgaaacaaaatgaatacacaaaaacacttatcaatcaacctatcatcaatggacaccttatagaaacagttgatatagactttaaaaaatcaggcctccaagatggaccttttgaattaatagttaaagcacaagactcgtcctactcaaactttgggaaagggaatatttctaacaaaacatgggatatgaactttgactctcaaccaccacaaattacaatccatagtcctaccccatcactccataaaggaagtgctacagctattgctttcactgtatctaagccagtagcagttataggggttcaacttgaagaaaaattttttccagcatttcagcaggctaatggaacgtattattgcttctttccattcccaattgagttttctccaaaaacatttaatccaaaactttttgcacaggatcttgcaggtaataaatcttatatatctgttcatgttcactcattagagcgctctttcaaaatagatacattaacaatcactgatacattcttagataaaaaaatgcctaactttgaacaaaattttcctgatactcaaacacaagttgaacgctatattaaagtgaatagtatactacgaatcgaaaatgaaaaaaaacttattgaaattagtaaaaaaacatcccctatgatgttatggtcagggaaattccatacactcccacgtgcagctgttaaagctacctttggtgaaaatcgaacatatatgtatcaaaatcagaagattgatcaacaatttcatatggggcttgaccttgcctcaacagcaaatgctcctatccctgctgcaaatgatggtatagtggtctatacaggcgacttgggaatatatgggaacattgttattattgatcatggattaggattacagacactatactctcacttaagtaaaattacagcaaaagaaggtgacgttgtaaaaaagggtgatctaataggctatactggcatgacaggactagctggaggtgatcatctacactttggttttcttgttggaggcattcaagtaaaccctattgattggcttgatccaaagtggattaaaaatactattataacccgactcaataataatgtataa

SEQ ID NO: 9277 - DNA, 876 bp, Lawsonia intracellularis
atggcttatgttagcatgaaacaaatgctagaaactggtgtccactttggtcatcaaactcgacgttggaatcctaaaatgcgtccttatatttttggagcccgtaatggtattcatatcatagatcttcaacagactgtaaaactttaccgtgctgctcatgataaaattgtagaaactgttgctgcaggtggaagtgttctctttgttgggactaaacgtcaagcacaagaagctattgcaactgaagctactcgagcaggacaatattatgtagctaatcgttggatgggcggaactcttactaacttctctacaatacaaaaaagtattgaacgtcttaaccgtcttgaaactatgttctctgatggctctgttaacagataccaaaaaaaagaaatattaactctcaaccgtgaaatggataaacttgagttaacacttggtggtattaaaaatatggaacgtctaccacaactcatttttatcattgatcctcatcgagaaaatattgctgtaaaagaaggtcgtaaactaggaattcctattatggctgtaaccgatacaaactgtgatccagatcttattgactatattattcctggaaatgatgatgcaatacgagctataaaactttttgttacagctatggctgacgcctgtattgagggtgaagctttacaaaaagatactaagaataaaaatcttgaggaagaattaaaacaaatagctacggctgaatgtaataaagaatctacctctatagagcaagagcttattatagcttctgaacaaacagaaacaaaagaaaataatattgaagaatcagtatcagaagtagttattactaatgagtctgaactcatcacagaataa

SEQ ID NO: 9278 - DNA, 885 bp, Lawsonia intracellularis
atgagtatcagtgcatcaatggtgaaaaccttacgtgaaagaactggcgcaggaatgatggattgtaagcaggctcttgaagaagcaaatggagatatggaaaaagctatcgactggttacgtcaacgaggcctctcaaaagcttcaaaaaaagctggaagagcaacaacagaaggtttaattggttgtcaagtacttcctggctcaacatctgctgtacttgttgaggtaatgtgtgaaacagattttgtctctcgagatgaagtctttaaaaaatttgttgatgacattgtttcgcaacttgtggcaaattttcataataatgatgttgatctgcttgatcaaccatctggaaataaaaatcttagtattagagatctgttaaatgaaactattgctactataggagaaaatattgtcattggccgatctataaagatggagttaacacctgggaaaaatggtatgattggacactatgtccatactaatgggaaaattgctgttttagtagaactagcaacagaaacaaaagaaacagcctcatcacctaagttccaagagttagcaaagaatatagctatgcaaattgctgcaacagcacctcttgctcttaattctgaaagccttgatcctttaaaaattgatcgtgaacgtgaagtatatcgtcaaaaagcactggaagaaggtaagccagaaaacatgatagaaaaaattgtagagggagctgtaaaaaaatatctaaaagaagtttgtttattggatcaaccatatattcgtgatgataaactttctatagctgaacttataaaaaaagtttccaatgaaattggagaacctatatctattatagagtttgttaggatccagctaggcgaagaatag

SEQ ID NO: 9279 - DNA, 981 bp, Lawsonia intracellularis
atgcatactttttctaatgctcacgtccttatcacagggggtcttggatttattggttctaaccttgcgattcgtttagtaaaagaaggagctaaagtaactattattgatagtctcatgcctatgtatggagggactatgtataatattcatgacattgcagataaagttagaattaatatctctgatatacgtgatccctatagcataaaagcactagtaaaaaatcaagatattctatttaatcttgcaggccaaacaagccatatagactctatgattgatccatatacagaccttgatatcaactgcaaagcacaactttctatccttgaagcctgtaaaaataacaatccttctattcgtattatttttgcaggaactaggcaaatttatggaatacctcaatatcttcctgttgatgaaaaacatcctgtgtaccctgttgatgttaatggtatcaacaaaatagcaggggaatggtatcatatactgtataataatgtatatggaatcaaaacatgctcattacgtctaacaaatactattggtccacggatgcgtatccgtgatgatcgtcagacatttttagggatatggattaaaaacgtactttgtgggaagcctattgaagtgtggggaggagaacaattaagagactttttgtatgttgatgattgtattgaagcacttcttttagcggctaaaaatgaaaatacttttggaaaagttttaaatgtaggaggaaaagaaccagtctctttacaacatgttgcagaattacttattgaagttgtaggtgaaggaagttatataataaaagagtaccctatggatagaaaaaaaattgatattggtaactattatactgataatacattgatatctgatatcctaaactggaaacctacaacatctttacgtactgcactaaaaaagacaattgcttattataaacctattcttaatgaatacctttaa

SEQ ID NO: 9280 - DNA, 1155 bp, Lawsonia intracellularis
atgactaacacttactctattcctcaagctaaccctagcatttacttccaacagtatcgtgaaactattataaaaaaaatagaggaagtacttaatagtggttgttatattaacggagagcaagttgaactttttgaaaagcaatttgcccaatattgtaatgtaaaacatgcagttggtgtagctaatggaaccgatgctatagaacttacacttcgtgcgttgaatattggccctggagatcttgtttttactgtttcacatacagccgtggctactgttgctgccattgagcgtacaggtgccctccctgtcttagtagatataacacaaaatacatatacaatgtgtcctgtaagtcttgctgaaacacttgcagctgcttataagggaaagtatcctgggaagccagcagccattatccctgtacatctttatggagaatgtgcagatatgaatgaaatacttcatgttgcaggacagttacctgttattgaagattgcgcacaggctcatggagctaaatataataataaaaatgctggtagtataggtattgcaggaacctttagtttctatccaacaaaaaatcttggaacacttggtgatggcggttgcatagtgacttctaacacactcctagcagaacaaataaaagcacttagagaatatggttggaaacaacgctatataagtaactttcctggaattaactctcgtcttgacgaacttcatgcaagtattcttaatatatttcttccagtactcaataaatctaatgaaatccgtagaaaaattgctaagatataccatgctgaactgcaaaaattaaaaaatatacaattaccattagaaaaacccgatagaacacatatatatcacttatatgttatccaagtagataatagggatatgttaaaaatattcttgagtaacaaaggaattactacaggtattcactacccgcaacccgttcataaacaaccagcatatatcaatagacttcccctttcaccacatggactacctgaaacagataaaatttttccaaaaatattgagccttcctctctatccaggcctttctgaaaatgatatattgtatattacatcaactatacaaaaatattttgattcatcctctcggaataactaa

SEQ ID NO: 9281 - DNA, 804 bp, Lawsonia intracellularis
atgtcttcaactaaggatattcctcactcaaaaattaccccttctattacaggccttgttttaacatataatggagaaagactgcttgaacattgccttacttcacttcaattttgtaaccatatccttgtagtagattcttttagttctgatagaacaattgaaattgctaaatctcataatgtgcaatttatacaaaataaatggaatggtcctgttgcacaatttacttatgcttttccccttataaaaacagagtggatcataaccattgatcaagatgaaatatgctcccaagcacttcaaaatactattataacagctattcaaaatgtatctcaaaatgtatgtggtttttatgtcccacgacgttcatggtattatgatcgctttcttaaatatagtggttggtatccagactatcttcttagagtctttagaaaaaatggaatttatttttcccaacaaggtgttcatgaaaaaatacatcctcatacacataccaaaaaacttataggggatatccttcattatccatatagtagtttttatcaacacctcgaaaagattaatagttacgctcaatatggtgctgaagatttagctaaacaaaaaaaatctggtggaatttgtatagctatttctcatggattaggacgatttatacgaatatatatcctaaaaaaaggatttcttgatggaaaagcaggttttatcaatgcaattcatggagcatattatgcatttctaaaatatatcagaataaatgaaggaacttggggagctccatataatcatcaatag

SEQ ID NO: 9282 - DNA, 717 bp, Lawsonia intracellularis
atgtctcaaatgacatacaaaagggtactacttaaactaagtggtgaatcacttgcaggaagacaacttactggtattgatccagatacagtggctgtactttgtaatgaactttcaagcgtaattgaattaggccttcaaatagcattagtcattggaggtggcaatatttttcgtggactatcagcttcagcaaaaggtatggatcgttcatcagctgattatatgggaatgcttgctactgtattaaatgccttagctattcaagatacactagaaaaaaaaggacaccctacacgtgttctttctgctattgctatgcaagaagtgtgtgaaccctatgtaagacggcgtgcaatgcgtcatcttgaaaaaggaagagttattatttgtgctgcaggtactgggaacccatattttactacagacacagctgctgcactaagatgtatggagcttaaatgtgatgctcttattaaagcaacaagagtagatggtgtatatgacaaagatcctttaaaatttgatgacgctgaaatgttcaaacatctaacctatgaagaaacattacgtcgtcatatcaaaataatggattctacagctatcacattagcacaagaaaataatatccctattattgtttgcaatatgtttaatggaagcattaaacgtgctatacttggtcaaaatccaggaactactgttgaaggagaataa

SEQ ID NO: 9283 - DNA, 567 bp, Lawsonia intracellularis
atggatacagataaagataaaatatttctagatagtcaagagcgtatggtaaaagcaattacttcccttgaaaaagaatttacaaaacttcgtacaggaagggcttccacctctattgtagatactatcaaagttgattattatggaaccccaacacctataaatcagttagcatctattgctatccctgatagtagcagcatcactattcaaccatgggataaaactgcatttaaccctattgaaaaggctatccttaaatcagaattaggtcttactcctatcaatgatggaaaaattattcgtatcactttaccaccattaacagaagatcgacgcaaagatttagtaaaacttgctcgtaaatatggagaagatacaaaaattgctattagaaacattcgtcgtgatgctaatgaacaacttaaaagacttgaaaagaataagtttatatctgaagatgaattaaagggatttactgaagatatacaaaaaatgacagataactatataaaagaagtggaaactcactgtaaaactaaagaaaaagaaattatagaaatataa

SEQ ID NO: 9284 - DNA, 723 bp, Lawsonia intracellularis
atgtctaatccaataccaaaacaccttccctctcatattgctattattatggatggcaatggtcgatgggcaaaacaacgtggtatgaatcgcacagagggtcataaacaaggtgcattaactgcaaaatcaattgtaacaacatgcagaaaaattggtatcaaatacttaaccctttatacattttctacagaaaattggggtagaccaaaagatgaaatacattttctctttcaattattggtttcatttttaaaacaagaagttcacttattagaagaaaacgatatttgtcttactgtatatggtgatctcacaaaactccctttactagcaaaaaaagccttacaacatgccattgcaagaactaaacattgtcaaagtatgactgtaaatttagcaattaactattctggacgcacagaattactatatgctgtaaaaaaaatgttaactgacagacttaacgccaacgatcttaatgaagaaatattccgcaactatctttactctaaacaacaacctgatccagatctgcttataagaacaagtggagaaaaaagattaagtaactatttaatatttcaaacagcttatagtgaacttttttttacaaatacactatggcctgacttcacagaagaagaactttatgccatcttaaaagaatataatgaacgaaaccgcagattcgggctcacacaggagcaactacaacaatga

SEQ ID NO: 9285 - DNA, 798 bp, Lawsonia intracellularis
atgaatcaagaaaaaaactttccaaggatcattactggcggtcttcttttacttctcctatttactatgcttatcttatcaggagtttatatttttttactaacacttctatttacactccttgcaatgtgggaattctatgccatgttttggcatggagatgaaggcataggaggacgtttgatctcccttcttatgggaggaatcattctcacaacaggatggcttagccaggaagcattacttcctatcattggtatttcttttatttttattacagtttacactcttatcactagttcacatagtactgctctttatttcaaacaagttggtattcttctttttggtattttctatatacctatccttcttgttcctattctttggtgtacacctttggaacaattctttcttatttgtattgtagctatttctgatagtgcagcttactttgttggtcttacttatggtaaccataaaatttggcctaaaattagcccccgaaaaagtattgaaggaagcgcagcaggtcttattgcatgcattattatatcaagtatattaggagttattacaggtaaagcaaatatactttcatttattattctcacttctatacttgggattgtagcacaacttggtgacttttttgaatcagccctcaaacgtgctacacatcttaaagattcaggtacaattctacctgggcatggtggtattcttgatcgttcagatagtttattatttgtcataccaacatatgcacttttaaaaagttttattgtctacttttga

SEQ ID NO: 9286 - DNA, 1209 bp, Lawsonia intracellularis
atgtttacctatataacatctcttccttctcctgaatgggaaaaaagttttccaagaacaatttccattcttggttcaactggttcaattgggacaaatgcactagatgttataaagtcacataaagaactctttcatattgttgcattaggtggagggaaaaacgttcaactacttgcaaaacaagcaatacaatggaaacccgactatcttgctgttcaagacgaaacttcaaaagaagctcttattcccttactaccaatcaactataaaccatctatatttgttggtcagcaagggtatgtaaaacttgcctctcttcctgaagttacaacggttctttctgctcaagttggtgccgcaggacttcatggaacagttgcagcagcaaaaaacggaaaagttatttgtcttgctaataaggaaacattagtattagcaggaaaactaatcaaaaatctatgcttacaatctggagcagtcatcttacctgttgactctgaacataatgctatcttccaagcactatacacaagaaatcctaaaactgtacaaaacattattcttactgcatctggtggaccatttagaaataaaaaatatgaatttttaaaaaatgtaacaccagaacaagctattaatcatcccaactggaaaatgggtacaaaaattagcgttgactctgcaacaatgataaacaaaggtctagaaataatagaagcacactatctctatggattaccatcagagcaaattaaaattgtagtacacccacaatcatacgttcattcattagtagaatttacagatcactctcttatggcacaccttggtactgctgatatgcgtatgcctattgctcactgtcttgcctggcctaactatcttaatgttggagttgaaccatttgttctttctaaaattggaaccttgacatttgaagagccagatttagattcttttccatgcattaaccttgcaagagatgctcttgttgcaggaactagtgcacagattatattaaatgctgcaaatgaagtagctgttgatgcattcctaaaaaaacaaattggatttatggatatacctattttgatctctaaagcattagaagctgactctacacctgaaccaacgacacttgagtcaatagaagcactggatcaacaaactcgtcatactataagtcaatggatagaggttcattaa

SEQ ID NO: 9287 - DNA, 1125 bp, Lawsonia intracellularis
atggattttttacaaacttttgtttcacaatggaataatgcccttgcggtagttgttgtacttggtgccttaattttcttccatgaacttggacactttatgatggcacggatattaggtattggagttaaaacattttctttaggatttggaccaaaaattttcactataggaaaaagaaaaacaaaatacagcttatcacttattcctcttggaggatatgtatctttagcaggagaagaagatgaagatgaaaataaaaaaatagaacaatcatcacaaataacagatgaattatttttgcctacagaaaaattttctaatcgtcccccatggcaccgattacttgttgttcttgcaggacctgttgcaaacatactccttgcttttttcatttattggggtgtatcatgggtacaaggtagtacatttctactccctattattgggacaatcacagaaaatagtcctgcagaacatgcaggacttcttccaggagatattattacacgtgtagatgggatgcctgtttcccaatgggatcaggttgctgaatatattgctgaaagccaaggaaatgaagttactataacgctttctcgagatgataaactccttgagtttcgcttaacacctgaagaaaaatcacgtacaaatctctttggagaaaaaaagcctgcatggttaattggtatcagtgcacaaggagatatagaaacacgtccactatcctttcttgctgcttcggttactggtttaaaaaaaacatggttttctattagttttacatgtgaaagtcttttaaaattgttccagaaagttgttccattggacagcattggtggacctattcttattgctcaactagtaggtcaacaagcaaatgctggtatcatacctttactcctcttaacagcacttataagtattaatcttggggtacttaacttactaccaatacctatccttgatggaggacatgttgtattccttctgttagagatgatattccagcgtcctattagtcccttcatcaaaactgtatctatgcgtattggtattgttcttcttcttagccttatggtctttgccacttggaatgatattatgaggctcgtttcatga

SEQ ID NO: 9288 - DNA, 795 bp, Lawsonia intracellularis
atgagagatttaactctcactttaggaatttcagaacaacatcttcatatagtttttattaaagatgaagaaatacaatatataaaagaacgttctataacatctaatgggactgagatattaggacctctcatcatagagtcactggaaaaagcacagttttctctacaacaaatttctcgaattgcttgtattgctggaccaggaagttttactggtttaagacttgctctaaccactgctattgctatgagacgtgctttgtctattccattagcaacactgaattatctacatgtgattgcagctagcgcatgggcactcccagagctgcagaacatctcattacttcctagtttacttagagtcattacttatgcacgtcaaaagcttttatatatacaagattttttagtaactaaaacttttcctatgccaatagcaaagccacgaatatcttctatagaagcatccattcaaacaaaagaccctatactttttatgggctcagggatacaatacaactactcgttttttgcagaacatgctcttattaatccaaatatactattatttcaaaaaaaaatctccatttctccatatgcattacttcaactagtaaaaaacattcctcatgaagaatggaaacataatgatcctgaaccactatatcttcggcactgtgatgctgtagacaatttatcttctattagtttaaaacaaggtaaaaaccctgaagatgcttgttcaacatttaaaaaaattgttactcaaccacctctattagttacataa

SEQ ID NO: 9289 - DNA, 885 bp, Lawsonia intracellularis
atggcacaaagtaatgttgtctggtcttcaaatttcacaggtacatttcaactaaaatcaatagcagacttattgaacgaaaattttcaatttcctaaagcaaatcttgtgattggaggctttccctgtcaagatttttctgttgcaggaaaaagagaaggattaaaaactcaaagaggctctttataccactgtatgactgaagtcatacaacaagtttctccagaagcattcattgctgaaaatgtatatggtttattttatattcctggtgtacgtgaaaaaattacatctgactttgaacaaattggatacaccgtcttttctttccttttattttcaaatgagtatggagtaccacaaataagaagacgagtattttttattggtctcaaaactgaagctcttaaaagaaaagtttctattaatgagattattcctcctaaaactcatcaaaaatttgtttcagtgggaacaatttttaaagatcttcaagaaccagaatatactttggataaagaacaacaaatttactcaaaaagcaaattctatggctctcaatgggaaggaaatagagaggttgatttatctttgccttcaccaacgctacgagctagtggcccagaattcagaagattatctaaggaacatggtgggaaacatttagatgaattaaaagatggaaaaattgaacgacggttaactgttagagaatatgcaagaatccaaacatttcctgatgacttcattcttatgtttaataaaaataacgaagaaataatttcaatgacatctgcctatagacttattggaaatgctgttccaccattacttgcataccatgtaagcaaaagactagatgagctctggtttgatattttttaa

SEQ ID NO: 9290 - DNA, 1728 bp, Lawsonia intracellularis
atgcgttggtcgcagtgttatatccctacattaaaagaagcacctggtgatgctgaattgcttagtcataaattattaatccgtgctggaatgattcgtaaacttacttcaggtatttatacatggttaccattggggctaaagacgcttaataaagcgatatctattataagaagtgagatgaatagaataggtgcggaagaaattttaatgcctatggttcaacctgctgacttatggaaagagtcaggccgttgggatcaatatggaaaagaacttcttaggattaaagataggcatgatcgagagtattgtcttggacctacacatgaagaagttgtaacacatttacttagaggagaagttcgttcttatcgtcaacttccaattaatgtttatcaaattcagacaaagtttcgtgatgaaattcgaccacgttttggccttatgagggctcgtgaatttctcatgaaagatgcatattcttttgatcaagataatgaaggagctgatatcagttatcatacaatgtttgatgcttataaagctatttttacatgtatggcattagattttagagcagtagaggcagattcaggttccataggaggaaatttttctcatgaatttatggtaatagcagattcaggagaagatactatcgccttttgtagaaaatgtgattgggcagcaaatattgaacatgcagcaactttacctcctcaaactaaggctttaactttagagaagagcatggaagaggttgttacacctggtcaacatacaattaaagcggtaagcacatttcttactattcctgagcaacaaattatcaagacaattttatacacaatagataataagcctgtagcagtattagtaagaggtgatagagaggttaatgaagtcaaagttaaaaatatgctggatgctacagtaataactatggcaactcctgaacaagttcatcagtggacaggagctcctgtaggatttgctggacctgtaggatttactgctggacctattatcgcagatcatgaattaatggtttataatgattgggttgtaggagctaataaacccgataaacatattcttcatgttgacttagctagagatgtccagaatattacttttgctgatatacgacttattacagatgcagatggttgtccttcatgtggtagagaaattgctcttacaaaaggaattgaagtaggtcatgtttttaagcttggaacaaaatattctaaatcaatgaatgctttttttcttgatgaaaatggagaagagcaacttatggttatgggatgttatgggataggcgtatctcgtgttattgctgcatgtatagaacaaaataacgataagtatggtattatatttcctcctccattagcaccatttgaaattatgttgatcaatcttgatcctagagatgaatcagtggttatgaaagcatcagaaatatatcaattttttttatcagaagggatagaggtttttttagatgatcgtgaagaacggcctggaataaagtttaatgatgctgatctgttaggttttccaatacaagttattattggagctaaaagtcttgcaaatggtattatagaagtaaaaaatagaaaaacaggcgagaagtcttcattttctttagaaagattttttacagacttttactcttggcgtgatactgtctatgtaacttggggactatcttaa

SEQ ID NO: 9291 - DNA, 897 bp, Lawsonia intracellularis
atgaacacatggaataatcttgcaatgcattttcgtcggcgacttggatgtcgtggtcagaaaattcctttagatgttggaagttcttgtccaaatagagagcgttcaaattccaacattggatgtgtgttctgtaatgtgtctggctcaggatccggccttggtttatccggtatgtctataactgaacaatggaactattggcacaaacacttttctatttccaatcaatatatacgttttatagcctacctacaatctttttccaatacctacggaccattaagtaaattttcttctatcttagctcaaattaagggtttacaggatgttgcaggtatttctgtaggtactagacctgattgtttaacaaataaaaaattatctttaattgtagaaatgccttatttagaaaaatgggtagaatttggtgttcaaagtcttcatgatgaaacacttataaagattaaacgtggacattcttctaaatgctcagaacaagctattattcaagctgcaaatgcaggccttcaagtttgtgcacatgttatgtttggtcttcctggagaaacccctacccatatgttgcaaacaatagatagactaaatagtttacctattcatggaatcaaattccataatgtttatgtttgtaaaaatactatacttgaaaaagagttcaatgcaggtaactattatccattaactgaagcagactattctgatcttgttgttgaatcattatataggttacgtccagatattgtgattcatagagtcgtagctgaccctcttccagaagagcttgtagcaccagaatgggcacgatacaaaagtgctgttgtccgtggtattgaaaaacgttttcgagctcgacgttcaactcacaatatttaa

SEQ ID NO: 9292 - DNA, 1041 bp, Lawsonia intracellularis
atggcaaaaatattggattttattctaggagcattctccaacgatctcgccatcgaccttggtacagctaatacatgtgtttatgtaaaagggcaagggatagtccttcgtgaaccatctgttgttgcagttaaaaaggaacaccgtggtaacaacaaagttcttgctgtaggtcaagatgcaaaaagaatgcttggacgtactccaggtaatattgaagctattcgacctatgaaagatggagttattgctgactttgaagtaacagaagctatgttacgacactttatctcaaaggtacataactctcgccgacttgtacgtcctagaattatgatctgtgtacctactggaataactcaagtagaaaagcgtgctgtaaaagaatctgctcaaagtgcaggagcacgtgaggtctaccttattgaagaacctatggctgctgctataggtgctcatcttcctattcaagaaccaacttcaaatatggttgtagatattggaggtggaacaacagaagtagctgttatttcactctcagggattgtctattcacgttctgttcgagttggtggcgataaaatggatgaagctattatggcccatgtaaaaagaaaatataacctattaataggtgaatcttctgctgaagagattaaaattaaaataggttctgcacaccctatggatcctgaacaacaaatagaggtaagaggacgagatcttgtcacaggtatcccacaaaatattataattacgtctgaagaagtccgtaaagctatttcaggtcaggttgatagtataattcaagcagtacgtattgctcttgaacaaacacctcctgaacttgcagcagatattgtagatagagggattgtccttacaggaggaggagctctattaaaaggtttagaccaacggctacgtgaagaaacatcacttcctataactgttgttgaagatccactctctactgttgttgtaggtacaggacttgctttagatagtattagtttcttacgagaagtttgtattgactaa

SEQ ID NO: 9293 - DNA, 882 bp, Lawsonia intracellularis
atgccccctaagcgtttattgctcatttctgccttaattctgcttatttatttaggaggctacagttggaaccagcgtacgcacttcctagatacaatagtaactaatgtaggattagaaacttcagggtatgtcattaagtctgttttgtttgtacaagatgctattttagatgcttggaaaaaatatgtagatcttgtcaatgttcgtgaagaaaatgacaacttaaaaaaagaactttctaaaacaaaaagagagctattccttgcatcagaggagcgagcagaactggatagactccgtgacctactgaagatttctcctcctataggttggactatacaaggaactcgtgttcttgctggaagaatgggctccaatgctgctcttgccaccatagtcattgatcgtggatatcttacaggggcgataccaggaacacctgtaataacacaagacggtatagttggacgtgtatttcgtgctggaccaacgacttcaactgtactccttcttatagatccaggaagtcgtattgctgttgtaagtcaaaaaaatagagtacaaggtattcttgtcggctctggagcaatgtcacctttagaggtacgttttgtttcacgaaatagatctatagagcctggagaacttcttgtcacttcaggcctagatgaagcttttccaaaaggtatccctgttgccaaaatatcaaaagtaactgactcagatatgtctccatttcaaacagttgaagcaacacctctagtgcctatcctaaatattgaagaattactccttcttcaacaaccagtataccataaccaaaacttttcctctattgatgatgtacaacaaactgaaagtgtgagtgtgctaaaatga

SEQ ID NO: 9294 - DNA, 471 bp, Lawsonia intracellularis
atgaaattccgcaatactctttggtgggtactctttttcattataagcatattattacaaaaaacattcccaggtattgatacccttgttataggactacttatatcactagaagaaagaagtcccttacaaactttatgggtattacttaccattattattatccaagaaggatgtggaacacttgattttggggtatcaattttatggtatagctgtgtaattggactattttttatcgggtgttggttatttgaaacaaaaaactttttattcattattctattaagtattgccataggaataacaaagttttttgttattactttaatgagtcatctacaaaaccttcctgacaatactagcttaatcattaatgaatgtatgctgcaggcactctatatccctattgcctggaaacttatttcattaacacgttcatgggtgactaaatatgaagctgaagcttga

SEQ ID NO: 9295 - DNA, 1794 bp, Lawsonia intracellularis
atgaagctgaagcttgatcctgaaggttatcaaccaccaagaagtggaattttacttttacaattccttatcggagcacttttttttgtttttgtacttcgtttttggtacttacaaattcataaaggtacagaatttgctcggcaagcacaaaataacagacttcggaatgaacgtgtctatgcctctagaggacttattaaagataaaaatggtatattacttgctgaaaaccgtccagcttttggtcttgcattagtgagagaagactgccctgatatcacaacaacccttgcacaagttagtgtttggatggatacaccccttgagcaactaatagcaaaatttaatcaagataaaagaaaagttaaaccatttgaaccaatcctgttgtttacagatattccttttgaacaagttgcaaaaatagaatctcagcttatgcattggccagggcttataactgtagctcactccaaacgctattaccctcaaagccatgaatttgcacatatacttggttatgttgctgaagctaatgaaaaagaacttgctatggataaagtactctcattaggagatactataggaaaacaaggtcttgagtatatccttgaaccacgtttaagaggagaaaaaggtgaatatagtgttgaagtggatgtactaggaagagctttaggaaaagtattagttaaagcaccccagcatggtgaggatattcagcttagccttgatgcacaacttcaacaaaaaattgtctcattactagatacacatgctgcttgtgtcattgttatagaacctcacacaggaagactccaagcacttgttacgactccagcatatgacaacaatctttttgtacgtggactttctcaaaaaaattgggaaatcctaagagataatccacgtcatccactacaaaataggactattcaaagtacatatcctcctgcttcaatatggaaacttcttatgataggattattccttgaagaaggtattgccccttcaactcatataacctgtacaggtagtgttactcttggagatcatatatttcgatgttggaaaaaacacgggcatggctctgttgatatgaagcgctctcttactgactcctgtgatgtttacttttatattcttggagaaaaacttggaattgataaaattgaaaattttgccaaagcctgtggatttggttctctcacaaaaattgatctcccttatgaaaaagtaggacttgttccttcacgctcttggaagcgtagccggtttggtgataattggtacaaaggggaaacactaaatacatctattggacaaggatacaccttaacaactccattacagatagctgtttttgtttcatctcttattaatggtggtaacttaatgaaaccattactgctttcagaagataaaccacaagttttagggaaaatcccattctctgaagaaacactagcttttattaataatactatgagacttactgttgaaaaaggcacagcaagagttctaagacgtaatgacgctatcattggtggtaaaacaggtacagctcaagttgttaagcttaaaatggttggagaacgaagactcaaagcagatgaagtaagttacatggagagagatcatgcatggattgcctcatgggggaaaaaagatgatcaagaggttgtcgttgttgttatgatcgaacatggtggaatggggagctcaacagctggtccaattgctcgcaaagtttatgatattcttttttcaacaaaacaagagcatagttaa

SEQ ID NO: 9296 - DNA, 1116 bp, Lawsonia intracellularis
atggagccaatagatcgtagactcattacacatataaactgggggttattagcctacacaggaatactttttttcattggaacaagtaatctttattcagcaagtggtatccgcttagaaaatggaatcacactttccccattttaccaacgtcaaattgtatggggaggatttggtttacttgccatgattgtatctatgagttttgattatagaaaactacaaagtcttgcccttcctttttttctttttacactttttcttctaatacttacacctattcttggaaaaactatttatggtgctaaaagatggataccacttggtttattcaacttacaacctagtgagttagcaaaactagcggttctaattatgggagcaagaatgctttcacttgatggagcacctctttcatgggctcaactaataaaaatgttaattattggagttattcctgcaggccttattgctctacaaccagatttagggactgcactcacagtttttgctattcttggaggcatggtttgctatcatggtcttcaacctcatgtactgcgtatttgtcttattattattccattattaattcctcttagctggtttttccttcatgattaccaaaaacaacgtattgttacttttttagatcctactaaagatcctcgaggatctggataccacattattcaatcacagatagctattggttcaggacaattctcaggaaaaggttttcttcaaggaactcaaagccaacttcgctttttacctgagaaacatacagactttgctattgctgtatttggagaggagtggggatttttaggctgtataactcttatgggattgttttgtcttttcctattaggtatttttaacacagtaaaaggtgcaaaagatcgttttggaagtacattagctgccggaatttttatgtattttttctggcaattctttgttaatattggtatggttcttggtcttatgccagtagttggtattccattaccatttctaagttatggcggtagtgcaacgcttgtaaactttattttaataggccttgtacttaatatttcaatgcgtaggtttgtattcaaaagttattaa

SEQ ID NO: 9297 - DNA, 348 bp, Lawsonia intracellularis
gtgagtaaagaagaaatcaatgcatttcttggttctggaaccacttatcaaggaaatcttattttccaaaatgctgttcgtattgatggatcctttaaaggtgaaatacaatctgaaggttccttaatcgtaggaaaagaaggctcaatagaaggaactcttgatgttggagaactcattctcagtggcttttttatgggcgaagtccgtgcaacaagaaaagtgacagtccataaaacaggaaggcttcaaggaacactagtgtcccctgccttgattgttgaagaaggagccattattgatggtcaggttgtaatgcaatcacctatgccagaactatctgaataa

SEQ ID NO: 9298 - DNA, 423 bp, Lawsonia intracellularis
gtgatagagcttaatattacgttactcattcaattaattaattttctaatagcccttattgggattaactatattcttgtccaacctattagaaatagtatataccaacgccaacaagtattctcatcaaaagaggtatacattagtgaacttacacaccaagtaaataaagaccttcttcagtatgaatttataattacaaaaactaaagaagaagctatctcctactataaacatgaacaagaaaatactgaacgtttgaaaaatactatgttaaatgaagcacaagaagaagcaaaaaaacaaactaaagaaacacaaattacaataatgactgaagcacaagacgcaaaacaattactagaaaaagaaatcgttccttttgctcataatattgtaacgaatttactaaagaatgtataa

SEQ ID NO: 9299 - DNA, 579 bp, Lawsonia intracellularis
tctttgaacaccttcttctcctttattctttctaaagatggtattattacaattgcagggattatactatttagtattcttattcactttaaagatccttatcatccctggataaatcttttagggagatttggaaatcttagtatatttctttatattctctggcgtgcagcaggtaaaaaaattattcaatttttttctcaacaaaaaaacaatattattcataaacttcaaacacttgaattacaaaaaaatgaggtagaaaaaaacttagctgctatacaagcacaaatggctctccttaatgcaaaacaagaagctattcgtgaagaaagccgtattcaagccgaaaaactcaaaaaatatatgtttgatgaaacacaaaaagaaattgaacatattcataaacaaacacagcaaattatagaaacagaatcaaaagaaatagcttataacctaagatcacaacttgcagatcaaatagtaagtaaagctgaaaaagaattaaaacatcaattggatatggctagtcacttcaaactaattgataatgctttaacaaaggtagtactctcttga

SEQ ID NO: 9300 - DNA, 567 bp, Lawsonia intracellularis
ttgattggagatatcattgcacaacgatacgctcaggctttatttgatcttgggaaagagcaaagtcttcatgaagtggaactgtatgatacagcactttcacaaattgaagaattacttatgacttcaaatgagttaacctattttcttcatgcccctatatttacaatatatgaaaaacaaggcgttctattaaaattattagaactaattgatgcagcacaacctatcaaaaatttttgtttgcttcttgcagagaaagaacgtttacctcttcttacgcaaattattaatagctttaaagtacttcttgataatgccaaaaacattgttcatggccaacttataacagctattactttagatgaaaaaaaacaatctgaacttcttatctcactagaaaaacaaacaaatagaaaacttgaattactgtttcaagtaaatcctgacattcttggtggcattgttcttcatattggagacaaggtttttgatgccagcctccgtactcaattagaatgtataagaaatactatcaagaaaggtgaaacgaatcatgcatattaa

SEQ ID NO: 9301 - DNA, 1521 bp, Lawsonia intracellularis
atgcatattaaagccgatgagattagtacaatcatcaaagaacaaatccaaaattacagtcaacgtattgaaactacagaagtaggaacagtattatctgtaggtgatggaattgcacgtgtatatggtgtgcaagacgtcatgtcaatggagttgttagagttccctggtaatctattaggtatggttcttaaccttgaacaagataatgttggagttgcacttcttggtgatgacacaggtgttgaagaagggtcaacagtcaaacggactggacgaatcttttctgttcctgttggagatgctgtaactggccgtgttcttaatccattaggtcaacctcttgatggtttaggtcctctcaatgcaactgaaaaaaagcctgtagaagtaaaagcaccaagtattattgaccgtaaaagcatttatgaaccattagttacaggaattaaagccattgatgcaatgactcctattggccgtggacaacgtgaacttattattggtgaccgccaaacaggaaaaacatctatttgtattgatgctattcttgcccaaaaagagtctggagtacactgtttttatgtagctattggacaaaaagcttcaacagttgcacttgttgcagacacactacgtaaacatggtgcaatggaatatacaactatcattgctgcaacagcctctgatcctgcacctttacaatatatttccccatattcaggttgtacaatggcagagtattatagagatcatggacaacatgctttaattgtatatgatgatctatcaaaacaagctgtagcttatcgacaaatgtctcttttacttcgccgtccaccaggacgtgaagcttttcctggtgatgttttctatcttcactctagacttcttgaacgggcagctaagcttagcgatgaacttggtggaggttcacttacagcacttcctatcattgaaactcaagctggagatgtttctgcatatattccaacaaatgtcatttctattactgatggacaagtatatctagagccaaatttatttaatgctggtgtgcgtccagcaattaacgtcggtctctcagtatcccgcgttggtggtgcagctcaaacaaaagcaatgaaacaagtttcaggtacaatgcgtcttgatcttgctcaatatagagaactagcagcttttgcacaattcagttcagatcttgacaaagaaacacaaacaaaacttgaacgtggtgcacggcttgtagaactattaaaacaaccacaatatcagcccatgcaacttcctgaacaagtaatcgttatgtttgctgcaacaaaaggctttatggatgatatacctattgatcacatccaaaattttagcaaaacacttattgaatatatacaaactatgaatccaaagattcttgagaatatctccacccaacaggcactaaacgaagagttagatcaacagcttacaacagcaattacagaatgcaaaaaaacctttttacctatgaataaaaggtaa

SEQ ID NO: 9302 - DNA, 870 bp, Lawsonia intracellularis
atggcatcactgaaagacgtaaaaataaaaattgctggtgttcgtaaaacaaaacaaatcacaaaagctatgaatatggttgcatctgcaaaacttcgtggtgctcaaataaaaatagaacactttcgtccttatgcagaaaaatttcaagacgtcattagtaatcttgcaactcgttcagatgaaacagtgcataaacttcttgaaaaacggactaatggtacatcctgtatttttattcttataacatctgatcgtggcctttgtggtatttttaataccatgcttattataaaagcacttgaacttgcaaaacaaaaaacaacaaaagggaaaaaagttagttttatctgtattggaagaaaaggaagagatgctatcaaaaaaacacactatcctattctttcagattatagtgataaattcacacgtgactatcaacttgcatctcacataagtgaaaaagtgattgatggttatctaactgtcaatatggatgaagtagtacttatctatggacagtttattaatgcaatgagacaaattgtaggtttctctactttattaccaatccatccaaaaccattagataaagaacaactagaaaaatatagtgaatatatctacgagccaggagtagcaatacttttatcagaattactaccaaaatttgtaactactcaaatctatagaggattcctggacacagatgcaagtgaaaatgctgcaagaatgacagctatggataatgctacacgaaactgcgatgaattaataggaaatttaacacgtctctataataaaacacgccaagcatcaattacaagtgaacttattgatattgtaagtggtgcagaagctctgaaataa

SEQ ID NO: 9303 - DNA, 1416 bp, Lawsonia intracellularis
atgagtgaaaatatcggaaaaattgttcaagtaattggagctgttgtagatgtaagttttccaaatggaaaacttcctcctattcttactgcattagaaatacataatcctaatagtattgatgctccaaaacttatttgtgaagttgcccaacaccttggtgatgatatagtcagaacaattgccatggatgcaacagaaggccttaaacgtgggatggatgttttagatactggccatcctattatggcccctgtaggaaaagcttcccttggccgtattatgaatgttgttggtcagccaattgatggacttggagttattgatacaaaaacataccttcctattcatagaaaaccaccaagttttctagatcaaaatacatcagttgaaccacttgaaacaggaatcaaagttattgaccttcttgtccctttcccaaaaggtgggaaaatgggactctttgggggtgctggagttggtaaaacagttattttaatggaaatgattaacaacattgctagacaacatggaggaatttctgtctttgctggggttggagaacgaacaagagaaggaaatgatctttatcatgaaatgaaagaagctggggtacttgaaaaagctatattagtatatggccaaatgaatgagcctccaggagcacgttcacgtgttgctttaactgcattaacttgtgctgaatacttccgtgatgaagaacatcaagatgtccttctttttattgataatatctttcgttttatccaagctggatcagaagtttcagcactacttggtcgaatgccctctgctgttggttatcagcctaccttgggcactgatcttggatctcttgaagaacgcattacatctacacataatggatcaataacctctgtccaagctgtgtatgttcctgctgacgacttaacagatcctgcgcctgcaacaacgttttcgcaccttgatggtacgcttgtattatctcgtcaaattgcagaactaggtatttatccagctgtagatcccctagattcaacatcacgtattcttgaaccaaactttgttggggaagaacactatacagttgctcgtggcgtacaaaaaatacttcaaaaatataaagaactccaggatattattgctatattaggtatggatgaattgtctgatgaagacaaactagttgtaagtcgtgcaagacgtattcagcgttttctgtcacaaccatttcatgttgcagaaactttcactggaacagcaggagaatatgtaaagcttgaagataccattaaaggttttaaaggtattcttgcaggagaatacgatcatctctctgaaagtgacttttatatggttggtaatattgattctgccgtagctaaatatgaaaaacgaaaagaatcaaaatag

SEQ ID NO: 9304 - DNA, 402 bp, Lawsonia intracellularis
atggagcaatcactccatcttgaaattatctccccagatcataccattgttagtgatcgagttacatatgttaacttacctggagttaatggtgaactaggtatcttaccaggacacatccctttaatggctgcattagacattggaaaacttcactatcaacaagattcaaaaaattattatgtttttatttccgctggatttgctgaagtctctaataataaagtaacagttcttactgaagctgcagaaaaagccagtgaaattgatgtggctcgtgcacaagcagctaaagagcgtgctaaagctcgtctcttaaaagctgaagaagatattgatatggcacgagcagaagctgctatgcatcgtgctattatacgattaaatatttccagcctttag

SEQ ID NO: 9305 - DNA, 1443 bp, Lawsonia intracellularis
atggctgaaatcttaagtgttcaagagctaacatataaaataaaatatgctgttgagacactattaccctatgtttgggttaaaggagaagtaacaaactactcctgcccaacatctggtcatatttacttttctttaaaagacaacgagtcatatctccattgtgtttggtttaactctatgcagcgagagacagaaacatttgatcctcttacaggagaagtctttcaaaatggtcctcgtttatcccttgctaaaacaattactaatggtcaaaaaattatttgtgctgggacaattggtgtctatccacctaaaggtggctatcaactacttgtagactttgctcagtcagaaggagttggagaatggtatagtgctttagaaaaacgtaaaaatgaattacaacaacaaggatattttgatcttagtaggaaacaaataattccacataatcctaaaaaaattgttgttattacatctccagctggtgcagctattcaagacttcctacgtatagctaaagagcgaggaacagaaaagtatattcgtatttatcctgtcacagtacaaggagaagaatctatccatcaaatagcccaagctattcatacagaaaataattccaactgggctgaagttattgttcttatacgtggaggaggagcttctcaagatcttatggtatttaatgatcaacagttaatagatgctatctacacatcaaaaattcctatacttgcaggtattggacatgagtctgatatctcttttgctgaacttaccgctgatcttagagctgcaacaccaagtcatgctgcacaattactatggtcagaacgaacacagttaaaacaacaagtacatgatatggaaatagcacttactaaagctgctcattttcaattacagaaaattcaatatgtattcaataaattgaatactaccttacaatggctttcacctttaaaaaaacttgaacgtaatgagttacagcttaactctatctatgaaaaactaaatgctatctttaattacaaattgaaattaaaaaatcttgaccttatacaatatacacaactcccctcatattctattgtaaaaaaaatatcatattataaagaacaactatcttttttacaaagaaaactttataggtatatccattcaattttattaacaaaaaaacaaaatactaataataacaaacaattactaataaataatttctttcaaaaatatcaacaactactatataactatgaaaaacttcatgttactcttaaaatgttaaaccctcatcttttactaaagagaggttatgcccttatatatcttcctaatggtcaaatccttcatagtatacaagaagctccagagcaaacaatacttacaataaaacttcctgatggattactctctgtgaaagttatttcagcatga

SEQ ID NO: 9306 - DNA, 870 bp, Lawsonia intracellularis
atgagatacttgcaacaacatgtttactatatattattttttctcctacctttttgtatagttacaaaagtttcagcaaactcgtcacttcaaattcaaatccctaataaagtccaacaaggaactgctattttagtctctgttatttctcctattcctgagtcaaatgctatcttcctatggcttaataaaagtataactgtcccatttaaaaagaaaggacgacattgggaagcgcaaacactccttcctatcactgttgatatggcaaaaagtgaaatcttagctgttcgaacaagtaataactatattcaacaatctatccatatagaacctgttcactggccaaaacaatatattagtctagggaaaaagaaacaaaagtttgttactccatctaaaaagcttgtagctcgccttgagcatgaacgtaaaatgataaaagaagctttatcaaatatatcctgtaagcaatactggtcaaaaccttttgtacgaccagttaaaggaatcattacaagcccatttggaggtcagcgtatatttaatgggaaaccttgctcatatcatcaaggtgtagacttacgtggtgccataggtacaccaataaaagctatggctgcaggtaaagtcaccctttcagcagacttatattattttggtaaagctgttttcattgatcatggacaaggtatttatactctctatggtcatatgtcacgacgtgacgtccaagtaggagatatgatcaaggcaggccaaaaaataggtcttgtaggagcaacaggaagaacaacagggccacatctccactttggattaaaaattcttggacacccagttgatcctatatcactctttcctgaataa

SEQ ID NO: 9307 - DNA, 903 bp, Lawsonia intracellularis
atgaactttctccatcacaactatcaaagtatattaaaacaacgtgttacacttattgaagattttcttaaaacatgtattcaagaaaataatatctcttctacccttcaacacgctatgaactatagtttacttgcaggaggaaaaagactaagagctgtattatgtatttcttcagcagcactttttgatcttagccctacctctattttaccttttgctgctggcattgaaatgatacatacttactcactaattcatgacgatttgcctgcaatggatgatgatgattttcgtagaggtaagccttcttgtcataaagcctttaatgaagctttagctattcttgcaggggacgcactattaacagatgcttttaccttcatgagtacattaaactctatagtaccatctaacaatatattagttgccattcatgaaatagctcaagcagctggaagtaatggaatggtaaaaggacagtcgatggatatagagcatactggtgtatccgatgtgtcttttaatacactatgcataatacatgaatataaaactggagccctatttcgtgcatcatgtactacaggcgctatgttagctggagcaaatgaatctgcaatttatgctttaaaatgttatggggaagcactaggtgcagctttccaaataactgatgatatcctaaatgttactgcagatagtataacccttggaaaaccaactagaagtgatcaggaaaaagggaaaataacatatccttccctactaggacttgaaaaaagtaaaaaattagctgaagaaaaaatacatcttgcaatatctagtctagatacttttactggcgatgaagttttatttcttaaagaggttgcaaatagtcttttaacaagaactcactaa

SEQ ID NO: 9308 - DNA, 1914 bp, Lawsonia intracellularis
atgacacaccctcctgacactatagtaaaatctatcctttctcatatatcaaacccttgtgatatacaaaaactatcccttcaagataaactcactctagcagaagaactccgtagtattattataaaaactgtctctaataatgggggccatctcgctccctctcttggagtaattgaattaaccctagctctgttagctacatttaatcctgcagaagataaactgctatgggatgttggccatcaaacatatgcttggaaactgcttacaggccgtgcacataacttttctacgttacgtaaattaaatggtctcagtggatttcctaagataacagaaagccaatatgatcactttggtgcagggcatgcagcaacatctatttctgcagctcttggtatggctatggctagagacctacaaggccttaaacatcatgttattgctattattggagatggatccttaacagctggtatggcttttgaaggcctcaaccaagctggtgctatgggaagaagactcattgtagttctgaatgataatgaaatgtctatctccaagaatgttggtgctctttcactttttctcagtagaaatatggagcgaggttgggtaagaagagttcgccatgaaattaaagattggcttaaatcaattcctagtattggtgacgaagtagcagaatatgctagtcgtactcacaggagtcttaaaacagtttttacaccaggtattctttttgaagcatttcgtttcaactatattggtccagtgaatggacatgatatagaatcaattgaaaaacatttagctatggcagcttctatcgacgatcagcctgtcctcctccatgttcttaccaaaaaaggaaaaggttatgaaccagcagaaaaaaatcctgctagttatcatggattaggagcctttgatatccaaactggaattcctaaatcaaattctcaaaattcaccacctacgtatactgaagtttttgggaaaacactttgtgaacttgcagaaaaagataaacgtattgttactattactgcagccatggccagtggtactgggacatcactatttaaagcaaaatttcccactcactttactgacgtaggtatatgtgaacagcatgctgtaacctttgctgctggattagcatctcaaggatataaaccatttgttgctatttattctacttttgctcagcgtgcttatgatcaaattatacatgatgtctgtatccaaaagctaccagtcactttctgccttgatcgtgcagggattgttggtgaagatggagctactcatcatggagcttttgatatatcctttctaagatgtataccaaatatttcaattttagctcctcgagatgaagcagaactccaatctgctatttacacagcactctcttttaatagtccattggctatacgttatcctaaaggtaatggtgtaggagtaactttacctaatgagtcaactcctcttccttttgaaggagaattattaaaagaagggcatgatgctattatcatagctataggaagtatggttatgcctgcgtatagtgcagcacaacaacttcaagaagagaaaaatctttctattgctgtttttgacagtcgatggatttctccattgcctcaacaccaacttattgaattagctaatacatttaacaatattcttttaatagaagaaaatgctcttgctggaggattttcttctgctgttgtagaactttttgcagacaaccaatgtctccatggtcaacgtatacaacgaataggtatacctaattactttattgatcatggttctcaaaaagagctcaaacaatgtttattgctaaccgttgatggaatcaaaaaaatgcttttacaaatgttacaaccagaataa

SEQ ID NO: 9309 - DNA, 1026 bp, Lawsonia intracellularis
atgatacataggaaacttcctacttctcttcaggatctcccttcagaacatgctcgtctttgtttatccattaaaagatttttggaagaaaatctttctcagaatatacagggtactgttattgttggttgttctggtggagtagactccatggctcttgcattaatattacattgtttaggtatagatgtcgtctttgcacatatggatcaccagttacgagcagagagcaaagatgatgctaatcatgttaagtcttttgctgctgcattagatcgccgttgtattatttctagagttgatatttctgggttagcaataaaatataaaaaaggtattgaggaaacggcaagacaagaacggtattgttttttagaacaagtaaggaaagaatatggtgcacagtggatagctacaggtcatcatttaaatgacttgtcagaagatatattactccgattattgcgtgggactggttggccaggtcttgcaggaatgaaagcagtggataaaaagcgttatttactacggccattacttactactcggcgaacattgttagtatcttttctttcctcacaaaatattagttgggtagaggacaattccaataaggatataacgtttaaaagaaatagaattcggcatactattttaccattatttgaagaggaaaatccaaaattttccaatgttgctcatatgctatggtcattagctaaggaggatgaagagttttgggataaaatgattacagatgttttttccaagatagaaggttcaccagaatatttttggataccaagatcagaattaataactttaccaaaatctttaagacttcgtgtgtatattgaagctatccgtagacttaatattggtcaaggtcgagcaagcaccttatttttattagataatacattaatgaaaggtgaaagaaaaaaattttttcaatttcctggaaatgttttagtaaaattagaacaagataaagttatttttacagcaactataaagaatacatag

SEQ ID NO: 9310 - DNA, 780 bp, Lawsonia intracellularis
atgataaaagcagcatttgacaactacaagtctatatttatcccatttattatgggtggacaccctaatttagaagtgtcaacaaaagctattatggcccttgcacgagctggtgctgacataatagagcttggggtgccattttctgatcctattgctgatggccctgtaaatcaaagagccgctgaggtagctatgggaaatggtatgaactttggtgaagtattaaaacaagtacaagtaataagggggatgggttgcaaaacgccaatcatactttttacttaccttaatcctatcttggctttcggctacgataaatttcttcaccaagctaaagcagctggggtaaatggagtgctaattatagaccttcctccagaagaaggagaggatttttatgctatgcttcaagaggttgggttagaaattgtgttgcttgtatcgcccacaacagatctagcaaggctaccgatttatataacgctccagccaagttttatttattatatctcaagactttctgtaacaggtatccaacaagatttatcgaatactttagaagaggagttgtatagtttatgtaaggccttacctaatacaaaaatagcagtaggatttggcatatcatccatagaccaggccagatacgtgagtcaaattgctgatggtgtgattatagggagtaaactggtttcaatacttgaaacctccggggtaggtgtattcgaagataaagcaagagaatttgcggatattatacatggaggtaagttatga

SEQ ID NO: 9311 - DNA, 1170 bp, Lawsonia intracellularis
atgtcaaataaaaaaggatacttcggtgaatatggtggtgcttatgctcctgagacattaatagcgccacttgcagaattggaagctgcgtatctaaagcttcaacacgaagtagcttttaagcaagaactacaagatttgctcactcactttgtaggaaggccaacgccactatactttgcaaaacgtctaacacagcaccttggtggtgcaacaatatatctaaagagagaggatttgactcacacaggtgcgcataaaatcaataatacggttggccaagggttacttgcaaaacacatgggaaagcgtaggttgatagcagaaactggcgcagggcaacatggcgttgcaactgcaaccatagcaagtctacttggtatggaatgtgttgtttatatgggagctattgatatggagcggcagcaccttaatgtagtacggatgcaaatattgggggcggaagtgcaggcagtgcataatggttctcaaactcttaaggatgcaacatctgaagcaatgcgcgattgggttagcaatattaaagatagctactatgttctagggtcagcactaggtccacatccttatcctacaatagtgcgagattttcaaagaatcatcggaattgaagcaaggaagcaactattggaaatgattgatgagttaccagatgaattagttgcatgtgttggtggaggtagtaattctataggtctatttcatccatttttacaagatttgcaagtaaaaatgactggagttgaagctggtggtattagtctgtgtcttggagagcatgcggccagatttaatggtggcaaaccaggtgtgttacaagggactaagagctatcttttgcaagacgaccatgggaatgttagtaatacgcatagcatttcggcaggacttgattacccaagtgtagggccggaacatgcttatttgcatgatatagaacgtgttcaatatacttatgcaacagaccaagaagccttgaatgcggcttttacacttgcaaagctagagggaattattccagcattagaaagtgcgcatgctatagcttatgctattaaagtagctccatttttaccgcaaagttacataatgctcatagtcctttctggtagaggggataaggatgtagaaaccttagcaacctattag

SEQ ID NO: 9312 - DNA, 618 bp, Lawsonia intracellularis
ctgaggtgtgtaataaaagctaaaatttgtggaatcactaatctagaagatgcattgtttgcagcaaacaatggcgcatgggcgattggatttaatttttataaaaattccccacgttatgtttcattggaaaaagcaagagaaattacttcgcaattaccaatacatgttataaaagtaggaattttgatcgattattctcaagatgagatgttagatgctttagagtttcttgatctgatccaaatatatcaactacatttcaaattacctttggataaaaagcgaatcatactagccttgcaagcatcatctaaagatgagttacctgaatcttcaatattacaagagtatgggtttatattacttgatgccccaaaacgacaagatggtttacttggtggtactggtaggcttgctaattgggacttggccagagaacttaccgactacaagcttattttagccggtggattaaataatttgaatgttgatgcagcaataaaacatgtgcaaccatttgcggttgatgtagcaagtggggttgaagaacggcctggaatcaaaaatccgctagctataaaagaatttttaatgaggtgtaaaaatgtcaaataa

SEQ ID NO: 9313 - DNA, 723 bp, Lawsonia intracellularis
atgcctgatagcctcgtagaaatgccaaatacactagatttctgcaagatattcaccacctcttcaaaacctatcattattagtgaggtaaaattttcaagtccttcttgtgggcagatatatcaaggtaaactaaaccatgtcgatattgccggagattatcttaattcaggtgctgctgctctttcagtattagctgaacctgactatttccaaggcagcatatctttcattaaagatatcagaggtgctcatcttaattcttatatattactcaaagactttgttttaagcaaaaaacagattgcacaagggcttttatatggtgctaatgccgtattgcttattgtggccttcttgaataaagatttattaaaagagctttatgattattctttagatttaggccttacaccgattatagaagtgcatgatggttttgagttagaacaagctttgcagctttctcctcaaattattgggattaataatcggaatttacaaacattagaaatcagtttggataccgcttggaacttgataaagtatataccaaatgattgttatgctatatgtgaaagtgggatagataatgccactcaaattcgagagatgatggatattggatttgatggatttctaattggttcgtccttgatgaaatatgagaatcctggagtcgaactacaaaaattgatatctgaggtgtgtaataaaagctaa

SEQ ID NO: 9314 - DNA, 987 bp, Lawsonia intracellularis
atgatgaaaaaattattacacttaaaaaatttaactcaggaagaagcttatgagttatttactgaatttgctgaatatgaaccagaaaaacagtctgctgttttaacattgctccaagctaaaaaagaaacagctgaagaaacacttggtgcattgcaatattttagcaagcattcagccaagataacacatgaccttgaagttgtagatattgttggcactggaggcgatagtaagggcacatttaatatctctacagctgcaagctttgtaattgcaagctgcggcattatggttgcaaaacatggtggcaggagtgctacaagcaaagttggaagccaggatgttatacaagctctaggtatccgaatagctcagactgtggaagaaagtttaaaaagtttgcaacagataaactacacatatttatgggctcctttatttaataaggaacttaaaaaatatggagcattgcgtcaaaaacttggattcccaaccatttttaatatactaggccctttgcttaatcctatgcgaccaaaaagatgtgtcataggtgtatatcgaagggatttagtacaaaaagtagcagaagtactagcaactcaaggggttaatcatgcgctagttgtacattcagatgatggcttagatgagttcagtataagcagtaacactcatataattgagcttaatggtacagatataaaagaatatagcctcaatcctgaggattttggtttttctaaagcacaactttctgatgtaagaggaggggatgctgccaaaaatgcaacccttatttgtgacatattatctggtacaattaatggtcctaagttagatattgtacttctcaatgctgcagctggattatatgttgctggaaaatcttctagtattgcagaaggtatattgcttactaaagacgcaatagaacaggggaaagttactaccttattaaataaaatgagaggttcaatttga

SEQ ID NO: 9315 - DNA, 1137 bp, Lawsonia intracellularis
atgttagtagataagtttattttacctgaatgcaaagtttatatgtgtggacattctttagggcccagccttaaaacaacttcagatgcagtttgtagcacgctacaagattttgcttcatatggggttagtagttggaataaaagtggttggattgatttatcatatgcgttaggagccaaaatagctgcacttgtaggtgcaaaatttgatgaggttattgtatgtgattctacagtgctaaatctttttaaggcattaaaagtagctatgagtctacaaaatggacgtaacattattctcactactgatgataatttcccagctgatttatatattgcacaagggatatctgaggtaaagtatataaaatctaatgaaatatacaaaaatatagatgagacagtggcagtacttatgttaactcatgttaattacagagactcttctgtgttagacatgaaaacaattaatgaatatgcacacaaatatggtgttctaaccgtatgggacttgtctcacagcatagggatagttccagtggatttagaagaaagtagcactgattttgccgtaggttgtacatataaatatctaagcggaggccctggaagcccagcatttatatatgcaaatagaatgtatcatgaacacatgcaaagcccgattcaagggtggataggacataatcagccattttcttttgaaaaagaatacacctcttttggtgtacgaaagtttatgagcggaactcctgctatattaagtatgaaagccttagaagctgccttggaaatatttgataaggaggtaatagttaaatcttattctatagccaaggaatatagtaatatccttataaaatcattaaagagtcatggtatagaagtctatgctccacaaaatagaggtgggcatgttgctttcatgcataagcatggatatgcattctcgcgtgcacttatagatgcagggtttatctgtgattaccgcgcgccagatttaatacgcctatgtgtgaatccgttgtatatttcactccgcaatattgagtcttgtattgagcaaattcaattcattatggaaaggtctttgtatttaaagccagaatataaccaaatgcagaaggtaacatga

SEQ ID NO: 9316 - DNA, 819 bp, Lawsonia intracellularis
atgtcaattgagcttctctacaccggagtattacaagggttaatattagcaattattgcctttggtattatgattccatttcgtttcctcaattttccagatttaacagcagaaggagcttacccacttggaggggcggtatgtgcaagcttaatggttgcaaatatgccgcaaatattagctatgatggctggtattatggctggaggattactggcagtgggcacatcgcaagttgctttaagactgaaggttaatagtttacttgctggaattatactcagtaccatggcttatagcattaatcttaggattatgggcaagccaaatatagcattgtttgatatggatggcatacattttgattttatatcgctgattattgttggtatgttttgtattgtaccttttgccttatttttacacactgattttggcctacgttttcgaacagtaggtagcaatcctaaattcgctataaaccataagattagtataaataagtatacaagcctaggtttattcattgctgggtctatgtttggtcttgcaggcagcttaatggtgcagatgcagcaattcatggatataggtatgggagttggtatagtgatccatggcttggccagcctgatgattggagaatcaatagtgggtaatagcacgataccaaagcagttagcagctcctatcattggatcacttatttatcaacaaattcagggagtagctctatctttgggccttgctccatcagacttaaaattctttacaggaagtatagtgttgattgtgcttgctatacaaaaagggaagtaa

SEQ ID NO: 9317 - DNA, 735 bp, Lawsonia intracellularis
atgattaatattataaaagttacaaagtcattcccaggactttttaggcctgtaataaatgatataagtctatatttagaacgtggagatttttgtgtttttattggggctaacggatgcggtaaatctactttacttaagttgataagctcagaatatcaggctgattctggtgcaataaagctaagtggtgacgtggcacaagttgtacaagatgtaaatttaggcactgtgcctgaaatgacactgcttgagaatattgctttaagtgaaataataaaaccaaaattgttgttttataaaagatataaagatcaaatccttcaaaaactaaaagagttagatggtggtttggaggattatatcaatcaacctctaaaaatgttatctggtggacaaaggcagatgattgcaaccctaatggcaatcatttctggtcgacaaattttgctgttagatgagcatacatcagcgcttgatcctaaaatgcaaactttgcttatggaatatactcatcaacaagctataaatcatggactcactactataatgatcacgcataaaatggatgatgctataaaatatggtaatcgccttattatgctccaccaaggcaaaatagtgttagacattcatggggctcaaaagaaggccatgactgtgcaggggttgcttacgatgttccatcaatatgaagatcagcttctagtatctggaggtggaaatgtcaattga

SEQ ID NO: 9318 - DNA, 972 bp, Lawsonia intracellularis
atgaagaaaaatttcttctattttattgctgtagttataactttagtaatagcatttattacttataataataaggtaaacaataagctgcctgttgtagcaatagctaattatgggccacatacatcgcttgatgctgttatagctggtttcaaagagcagatgcaagtagaaggctttaccgagaaccaaactatccgctatgaaattgcagatgtcggctttgatcacgctctcataccacaaacaatagcaagcctaagagctcatcacccaaaagctatggtagtgatatctacccccattgcccaatttgctaaaggtaaaatcaaaaaccttcctttaatttatagctcagtcacagatcctgtaggtgttggtttactccaagagtacaataaatcagatgataatatgacgggtagttctgatatgcaagaccttaacagcctacttcagtttgcaaaatttttattacctaacgctaaaagcataggtttattatatgcaacttctgatagcaatgacacctcattggtgaagatgatgcaatcagcagcttcagagtacgacatgtctgttgttgccataccagttgaacaagcaagagaggtgcctattaggatgcaaggatttaaaggtaaagtagatctaatatatgtaggcgtaagcgggccaatacagccaacactaccagcaattgcagtagaagcacacaaaatgcgtataccagtgttcaatgctgatattcaagctgtgcgagatggattggtaatagctggtcttggggtagattactatgcggttggtagaaatacaggaaaattagtaagtgcgatattacatggggaaaaaattagcgaattagtaccaatttacccaagtgctcaggatcaccatggcgtgatcaataaaaaacttgcaatagaattaggtattgccattccttctaatatagaaattgtggagtga

SEQ ID NO: 9319 - DNA, 836 bp, Lawsonia intracellularis
atgaatatgataaaacactgcttaatacttattatttttttagtaactacattacatacccatctatatgctcaccaggcaaataggactatacttattacagcatccactggtgctattggagaagctatatctactctactagcttcagaaggatataacttagttattgctggtagaaatagcaataaacttataacccttcaaaaaaaattacaaacaaagcataaagatatttctgttcaaacagttattattgatttttcaaatattgaatctatagaaactgctgtaaaccaagttcaacagcttcatggtattgttctcattggtccaagaccatctttaaagaaagaagatatccctagtaaagaagaatggaataaagcatttaatgaaacttttattaatccacttgaagtacttcgacattttaacccaaaaatagcagataaaagtagcatagttattatttcaggtaatacttctaaaaactatttcccacaatttcctaatacaaatgttatacgtgttgcttgggttgctgaagtaaaaaatcttatatacttttttgcaaaacgacatatccgtgtaaatcttgtctctcctggaattatcttaacagaacatcataaaaaagttatccaacaaaaagcaataacacataacatatcttttaaagaacaacttaccagagaggtctcttctattcctctaaaaacatatggaacaactgaagatgttgctcaactagtatcatttttactttccaataaatctaaacacttgaatggagcaaatattacccttgatggtggagaagctacttcttatta

SEQ ID NO: 9320 - DNA, 969 bp, Lawsonia intracellularis
atggggttattttttattatgcgtaatgattggacatttaaagaagcaaagcaaatttttaatcttcctttgcttgaacttttatataaagctcaaacaatacatagaaaatattttgatcctaataagattcagattagtatgcttttgaacataaaaacaggcaactgtccagaaaattgtggttattgttctcaatcttctcactataaaactgatcttcaaaaagaacctttagtggatattgatactttaatttcagaagcaaaaaaagcaaaagaacttggtagtactcggttttgtatgggagctgcttggcgtagtcctttagataaggatttgaaaattgtctgtcagatgattgaagaagtaaaaaaattaggtttagagacatgcgtaaccttaggttttttaaaagaacatcaaattgctatgctaaaaaaggcagggcttgatttttataaccataatatgaatacatcacctgagttttatgagcacattgctacaacacatacctttgatgatcgtcttgctacattaaaggctgtaagaaaatttggtattaaactttgttctggtggtataatagggttaggtgaaactattgatgatcgtatctccatgttgctattacttgcaacattagaagaacagcctgaatctgtccctattaataggtttgtcaaagttgcaggtacacctcttaaccctcaaagtgatattgatccatttgattttgtaagaataatagctcttacaagaattttgatgccaaaatcttatattcgacttgcagcaggacgtgaacaaatgtctgatgaattacaaacgctatgctttatgggaggggcaaactctatattttatggaggaagacttcttacaactgatggaccacaaccagaacaagatgatcttttattccagaagattggattagaaaaagttcagaccatatgtcattaa

SEQ ID NO: 9321 - DNA, 1146 bp, Lawsonia intracellularis
atgtattacagatataaacaatatatatctcatcttcatgatacaaaaaaatatcgtagcttaccagtcattcataaaaattacaaaaaagatatccttgatttttctacaaatgactatctacaattagcttatcaccctaaccttattaatgctgcaattatgacaggtagtacctatggagtaggatccacaggctctagacttctttcaggaaataatgaactatttgaacgtctagaaactactattgcacaagataaacatactgaaacagctatgctgtttatatctggttttcaaacaaatgtaagtgtattatcagcattattagatcaccatgtattaaaaatgcaacctcttgtattttttgataagttaaaccatgcaagcctctatcaagctgtttttttaagtaaagctgaacttcttcgttattatcacaataatatggaacacctatcatcccttttaaaaaaatataaagatgataatagacctaaatttattgttacagaaacactctttggcatggatggagacatagcaccccttacagatattgtttcactttcatcgcaatatcaaacatttttgtacttagacgaagctcatgctacaggtcttacaggtattcatggatatggcctatcaacaacagtaaatctcagtcatataccacatatagttatgggtacttttagtaaagcacttggatgtagtggcggatacatagcttgtaagcaacttattaaggattacctaataaataaagctactggctttatttattccacagcaggctctcctatggttttaggagcagcacaagaagcatggaatcttataagaacactagataaccaacgtgcacacctcaactctttaagtaaagaattacgagatgggtgtaaccaactaggatttaatataggaactagttcttcacatattattcctcttattttaggctcagaagaagatgcatctcatgttcataagaaacttttagaacaccatatccttacctcttatatcagacctccaactgttcctccaaagacgtctcgtattcgtattgctcttaatgttggtcataataaagcagatatagagcgtctactacaactactttcgaccttatga

SEQ ID NO: 9322 - DNA, 639 bp, Lawsonia intracellularis
atgaaaaaatattttatattttgtcacggctttggttataataaaaacttttggaagccgcttttacccttttttactaatgaaaaatgtttagtattagatctaggctattatggaaatcattctttattaacaagtgatattagaaataaaaaactcataggtattggacattcattaggtttattaaaacttttacaattaagtataaactttgagtatcttattggattaaacagctttataaactttcttggtaatgatactcaactagctctaacaagaaaaactgaactccaaaggttgaccaaacattttctcgtctctcccctaaaaactctatataactttcacaaacgatgtggtgtacctattaaaaaaaatatattaactacctttaatttttatacattatatgaagatcttacactcctttcatctttatcaacaatcccatataatcaaaaaggacttattataggctctcaaaatgatcctattgttcctccgcagctcatctatgataattttaaaatatatcctaatatgactataaaaataatacctagtggtggacatggactaggatttctatatcctcaaaggatatatcaatatattaaagacgttttaatgtag

SEQ ID NO: 9323 - DNA, 639 bp, Lawsonia intracellularis; identical to SEQ ID NO: 9322

SEQ ID NO: 9324 - DNA, 744 bp, Lawsonia intracellularis
atgataaaacaaaaaatacaatccagcttcgacgttgctagtgatacttatgacacagtagcccatatccaaaaagaaagtgcatatattttagtaaaaaatctacataatacaatatctacattctatcctaaaacaattttagacttaggaactggtacaggttatatccccgagatattattatcatattatccttatgcttcttttatgcttaatgatattgctccaaaaatgattaataaggttcaacaaaaatttaataaaactagcaatatttccttttacataggagatatggaatctatacaaattaaaccatatgatcttattatcagtaactttgcatttcaatggatcgaaaaattagaaactatgctaaaaaagttatataataattcaaaagtattagcattttcttgtttacttgatggtacatttaaagaatggaaacaaatcttacaatcttataatatcccatcacccttaaaacaatatccacaacaaccagtattgtataaatgtatatcagcacttggtagtaccactcattaccttgaaacaaaatgttttcagctaccatttactggtgcacgttcttttgtaaactatttaaagcaccttggtgcagctgtaagtaataaacctcttcccacccaaaaagtaaaaaatcttattacaaactataatgaatcatttcatgtaacatacaatgttttttttggaatcatggagagaaaatag

SEQ ID NO: 9325 - DNA, 612 bp, Lawsonia intracellularis
gtgcaattttttattataggaactgatacaaatgtcggaaaaacaatagtgtcaagttggttatgcctgcatacagcatatgactactttaaaatgatacaaacaggatcaattaatggtaccgacagtgatatattaaaaaaattgacatacagtaaaatacataaagaagcttactgttataaagaaccactatctccacacttagctgcaaagcttgaacaagacgaaatcaacattaataatattatactaccaaatgcttctaatctagttattgaaggtgcaggaggactacttgttcctattaatcagcaatatttgcttcttgatatcattagttaccttatgttacctgttatactagtcacacattcacggctaggtacaattaaccatacactccttacattacaagcactcaaatcaaaagggatagaggtagtaggagtaattgtaaatggtaagcctaaccaagataactgtgatgcaataacttggtatggcaaaacaacaatacttgctcaatttcccttcttatctacaataacaaaaacaactttaagaaacattccattaacacaagaactaaaacaactctttatagtataa

SEQ ID NO: 9326 - DNA, 1278 bp, Lawsonia intracellularis
atgctttcccttacagaacgtgataaaaaaattatatggcatccgtttacacaagaaaaaactgcagatccagttataagtattagtcatgctaagggttcatatgtttttgatgaaaacggaacagcttatcttgattgtatttctagttggtgggttaatcttcatggccattcacatccagatattgcacaagctatctatgaacaagcactaaaacttgaacatattatttttgcaaaatttactcattcccctgcagtagaattgtgtgaacaacttacatccattcttccactaacattaacaaaatgcttcttttcagataatggttcaacttcagtagaaattgcattaaaaatggcataccaatattggtataacaaaaaacatcctgaaaaaacactctttttaagttttgaaggtgcttatcatggagatacatttggtacaatgtctataggaagctcaggctttcataacattttttcatcattttttttcaatgtattacgtattccatacccagatacctgggatggagataatgaaatagaaaaaaaagaagcacatgcactccatgtcttagataaatacttattggaatataaaaacacaattgcagctattgttattgaaccacttatccaagctgcaagaggtatgagaatatgcagacctgcatttttaaactccattattaaaaaagttcgtaatgcaggaatattagttatttttgatgaagttatgacagggtttggaagaacaggaacctactttgcttttgaaaagctagatgtaattcctgactttttatgtctttcaaaaggactcacaggtggatttttacctcttgcacttactatcacaactgacgaaatttacaatgcatttttacatgaagaatggaaatatgctcttgctcatggacattctttcactgcaaatcctttaggttgtgcagcagcacttgcttcattaaaactattattacatgaaaaaacgacattagctatgcagtccatccaccaggcacacatagatggcatctcatttttacaaaaatcctgttcaaatgtaaccaaaacacgtgtattaggtactattagcgcctttgaacttcatgatactactcatattaaacagatagaatcctcttttttagctaatggattactattaagaccacttcataatgttatttatataattccaccatattcaacaaattataaggaattaatggatgcttataacaaaatatgtaaaattttataa

SEQ ID NO: 9327 - DNA, 576 bp, Lawsonia intracellularis
atgctaaagttatttcatactctattaatattgtttattttaatagttcatgcaaatgctcatgatttatatatagtttataaagataatatttgccaagcaacattagatgaaaaaacatataagtgtagtataggtaaaaatggtacttcaaactgtaaggtagaaggagataaatctactcctttaggaaagtttccattgcgtaaagtattttttagagaggataaaataggaaataacataaaaacaggattacctagtagaaaaataaaaaagaatgatgggtggtgtgatgatccaacatctattcagtataataaatttgttgatttaacatgttttaacaattcaataagtcatgaaaaattatatagagatgacgatgtttatgatcttattatagttgtaggttataatgatagtccacctattcctagtaaaggtagtgctatttttattcatgtggcaagggaaggatttttaggaacagatggttgtattgcctttgcacaagatgatttagttgaaattttaagtaagctagataagacaagtaaagttattatacagtaa

SEQ ID NO: 9328 - DNA, 1368 bp, Lawsonia intracellularis
atggtagagaaacaaaaacgagatagttttacatctaaaatcggtatactggcagcaacgcttggatctgcagtcggattaggaaatatatggaaatttccaactgtaataggacaaaatggaggagcatcatttcttcttatctatattattgcaactattgttgcaggtcttccaattatgattgctgaaattgctattggccgctctactcgagcaaatgctgtagaaggattcaaaaaactttcttcaggttattggtggttagttggatttgcaggtacactctctactgtctttgtccttggtttttatacagaagtagcaggctggatatatgcttatatttttaaagctgcaaatggctctataaatacaacacaacctgttgttgcaggatacatttttcaagaacttcttagtaacccatggcaaacactattatggcaatggcttgtaattattcttgttgctacgatagttttacgaggtgcatcaaaaggtattgaaaaagctgcaactatcctgatgccgattctctttatcctacttatcattatatgtatccgtagtataacactacccaacgcaatagaaggactacgtttcctttttatgcctgacttctcaaaaatagatggtagagttattttacttgcaatgggccttgcattttttaaactctcaattggaatgggtgtgatgctaacctatggtagctacttcaaagatgatgttaatattccttatatggctacaaaagttatgctattagatctagttgtatcacttctctcagggatagctatcttcccagtagtattttcttttggctttgaaccaagctctggaccaggattactttttataactatccctgcagtatttgattcaatgcctgctggacagatttttacaggagccttttttatccttgcagcagttgcatctacaggagctatgctctcactttttgaaacacctgtagcttgggcaatcgacacttttaatctttccagaaaaaatactacaattattattatgttattctttatagcctttggagcacctgttgcactttctgaaaacatattaaaacacataacaatctttgggatgaatttctttcagctttatgattttctttcctccaatatccttatgccattaggaggctttttcctctgtatctttgtaggatatgtttggaacaaacaaatggtaatgcatgctatttcaaatggagggactttacataatcaaggtcttatcaaacttcttttgtttcaatgtagatatgttactcctgttattattcttataattatgctacatgggttcaatttatttgcatatatatttaattaa

SEQ ID NO: 9329 - DNA, 1071 bp, Lawsonia intracellularis
atgtatactaatataaaaacatattccttccaacttggagtattaggggaaaaaaagtataatcgtattatacctatttttttaccatttgaaggatgtccacatcgatgtatattctgtgctcaagataaacaaacaggcttaggatatggaggaagcaagatatctctttctgataaccttgccaacctttttactcgcttgaaaaaagaaaaaaatacattttctagtgaaaaattacttcctgagattgctttttatggtggaacattcacattactacctacagctagcatgcaactatgtttaaatatggtaaagcagtgtcttgcagaagggcttatatctggtgcaagatgttctactagaccagatgcagtaagcccagcaatacttactaaacttaaagctgcaggtatcaatcttattgaacttggagtacaaagtttttcaaatatagcattaagtcttgtacggcgtggttatacacaacatattattaaagaaggatgttataacatattatctgctggtcttaggttaggaatccaattacttcctggaatgcctggaagtacagcagaagtttttcttaatgacgttgaacaatctttggaacaaaatcctgcatgcttaaggttttatccatgtttagttgttgatggtacacaacttgctgatatatggagaaagggcttatatcagccatgggatattaatacaacagtaaaaatattgggcaagggattagtaagggcgtggtctaaaaagatccctgttattcggttaagtttagcccctgaagatacattggaagcttccattttagcagggccaagacatcctgcattaggaagtatgattcagggggaagcattatttcatcttatttatgagaaagtaaaacaaattggtcaatctccatcttctgtttgtttaccatctttttgtaaaggttttttttatgggcatgcaggtatgcttaaaaagcattgggcttctattggtattaattctgtaaatattcagtggagtaataccattaactatggaaagctgatttttttatag

SEQ ID NO: 9330 - DNA, 441 bp, Lawsonia intracellularis
atgagtatgtcaaatcaaacagattgcattttttgtaatatcatacaaaaaaaaataccctgtgtttccatttataactctgataactttattgcattgttagatataaatcctgtgaataaaggacatacacttattgttccaacacaacatgtagaaacaatgtttgatatagacccatcactagggacagatttgcttagtattatgcaacatattggccctgccattatgaaagcgacaaatgctgagggagtcaatgtaatacaaaataactatgtggctgctggtcaagaagttcctcatcttcactggcatattataccacgctttataggagattcacgtatacgctgggaaaaaggaaaatataaaaatcatcaagaaatgatagatattgctacaaatattaattccataatttataatgattattcataa

SEQ ID NO: 9331 - DNA, 291 bp, Lawsonia intracellularis
atgaacaatgtactaactaaagtagatatcattgatgctatttatgaaaaaataaataacaacaaagctgatattaaaaatattgtagaaactctgttatctatcatgaaacaagccattaaaacagataatacattacttattagtggttttgggaaatttgaagcttatagtaaacatacccgtaaaggtagaaatccacaaacagatgaagctattactctaccatctaggaaagtcattgtttttcgattgtcaaaaaaatttcgtacagaacttaataaactgtag

SEQ ID NO: 9332 - DNA, 651 bp, Lawsonia intracellularis
ttgccaatcagttctttagttccattaacagaaataagacagtattgtttacagttaggtttttccctttcagatcaagagattgaatcattaagaggttatctttgtttattgacgaaatggaataaggttatgaaccttgtaggatttacaacttggaaaacaatatgttcaaatcttattatagatagttttcatctggcaatatttattcgttccctaagtctacctacagatcctctttgttgggattttggttctggtgctggtctacctggtatccctcttagaattatatggaaagaaggttcttactggcttgtggagtctcgagaaaaacgtgcaatttttcttaaaacactattagcacaatatcctcttacacaaacatatgtttattgtggtcgtgtagaggaatttatgttagcaaactgtttgtctgatgttgcattaattgtaagccgtgcctttatgccatggcaggctcttcttaagttaatagaaaaaaagatatcttttaaaggagttattgttctacttttaaatgatattcctaagaatatagatagttgttggtatatccaaacaacatacccatattctataggaggtgaaaaacgattttttgtagcattaaaaaaagctagttaa

SEQ ID NO: 9333 - DNA, 1839 bp, Lawsonia intracellularis
atgcgacagtatcgtattatttatctactattattttactttattttttgtttgtcgataagccatccagtagcagcagacataacatattcaccattagatgtaaaatttgcatatgctcttgatacaggaacttctcctgaaactgttattattaaaatggtattaacagtagatgataactattatacatacactcataatgaaaaagaaggacttccaacaaaagttgtccttcaaaattcatcaggaactatccttcagagtagaattttttatcctgaaggagaaatccatgaagatgtttcttctggtataagcataaagaaagtttatagtggcgaattccctatttttttgcaggtgcagagagatgcattaacgcctgagtcagaagtacagttatctttattattatgttcttctaaacattgtatgcctgttaatcgtactattccaattacacttcctaaccctttacctagtattgatgaagttccatgggaggatacatatctattatatacaaatcctgttgttcatacagcagaatcagaacacttgatagactctacagaacaaacaacagatattgcagaaagtcttttcccatgggatttgcatcctcgttattttcagtctgggcttgaacctacacgtattgagcttgcactactttttggattccttgcaggacttattttaaatattatgccatgtgtgcttcctgttttaacactaaagttttcttttattctttctcatcttgggtataaaggagagcattgtttccgttatgttagggagcaaaatttattatttgcagctggaattctcagttggtttgttatgttagcattaggtgtggaagttcttgaattagcatggggtggcttttttcaaagtgtaccagttgtttatggtttaatgcttattgtttttattttagcattgtctctctttggtttttttacacttcctattattgatttcaaaatagaaacaacaagttttccacgtattcaggcctattttacaggtgttatgacaaccttgcttgcaactccttgtagtggtcctttgttagggggtgttctaggttgggctgtgttacagccattttatataatatttattgtatttttagctacagggctaggtatgtctcttccatacattatttttgcctttaagcctcaagccattcgatttttacctagacctggtgcatggtgtggaactcttgaacaacttgtaggctttttccttttaggtaccactatttatttactttctattttaccagaaacaatgttaattcaagcaatagtaactcttctaatagcagcttttgctgtatggtgttggggagttttgggtggactttctgtatctagtactcaaagagtggttgtaggggtagtagttagttgtatgattgcaatgtctgtgtggtggagttttcatcctgctgaaaaagcacattggctgtcatattctgatacaaagtttaggaaagaacttggtttaactccaatgcttgtagagtttacagcagattggtgtccaacatgtaaactacttgaaaaaacagtattaacaacatcttttcttgaacagttggttaatgagtatggtataaagcttataaaagtcgatttaacaaataagcatagtgaagctgaagcattattaagagctttaggtagtgtaagtattcctgtgacagccatattcccatctggtgaaaaagcaaatcagcctttagtccttcgtgatgtatacacatcagaacagcttgaaaaagctcttcagttagctattaaaagttctgaatag

SEQ ID NO: 9334 - DNA, 1191 bp, Lawsonia intracellularis
atgctatatttttacattatggctataacaactccaaaatcactattttattcaacgccagaatgtttaagaacaatacaagttattaatgttcgatggttcaatgcaacagcctggtatgctcttgagttatcacgtcttcttataaaagctggacataaaacacttgttttgactcttaataatactgaaacacactataaagctgttgaaatgggcctttctcctattccacttccattaaatacaaaatgtccttttattttttttaaacttattcaaagtatatatcaacaaattaaggtgttcaagccaaatatcgtaaactgtcatagaggggaggctgtttttttatgggggatattaagaaagaaaggtaactatgcactagtaagaactcgtggtgatcaacgtttaccaaagagaaatatttttaataaacttctttatagaagtatgaccgatgccataattactacaaatacaaaaatgagttctcatattacgtcattacttaatgtaaaagaatcattaatagatactattattggtggtgttgataaccaacgtttttatttttctgaattaggaagaagaatagtacgttctaaatatggatttacagcaaatcattttgtcattggtttattagggcgctttgatagggtaaaaggccaaaaagagcttattaatgctatcgcattattgattcaagaagggtatacatctattcgcttattacttattgggtttcctacaactataagtaaagaagaggttgaagtttggataaaagaagctaagattgaaccatatgtaataattacaggttatgtacaaagtattactgattatttatcggcaatggatcttggagtaatagcttcactaagttcagaaactatagcaagagctgcactagaaattatagcttgtaaacggcctcttatatctacaaatgtaggtgtaatgccagacttgcttcctttggaggcactggtagaaccaggaaacatactagcattaaagaaagtaatacaaaaagctattgttaatagttcatggcgtaaatggttagtagatatttcttcaaatagaatgaagtcacagacaagtgaactttttttatcagaaactttagaaagttatagtaaagcgttatctaatagatttcatgcagtttatggatag

SEQ ID NO: 9335 - DNA, 1233 bp, Lawsonia intracellularis
atggctcatacaaataaacattatcttgatttacctggctcttatttttttacagagatcaaccaacgagttaacacatataaaaaaacacacccagaaaaatcaattattcgtttgagtattggtgatgtaacacgtcctcttgtccctgcagttattaaagcacttcatgatgctactgatgaaatgggacaaccttcttcttttcatggatatggtccagaacatggatatgaattccttataggcgaaatcatagctaatgattatacgtctagaaatgttcatattgaagcagatgaaatatttgtaagtgatggtactaaatgtgatattgctaacatccaagaactctttgacccctctgatacagtagctattattgatcctgtataccctgtgtatattgattcaaatgtgatgtctggaagacttggaaagcttataaatggtatatggtcaaaactcatctatcttccatgtactatagaaaataattttatccctgaacttccaacacaacatccagatatcatctatctttgttatcctaataatcctacaggaacagtattatcaaaggaccagcttaccatttgggtaaattatgcaaaaaaagaaggagctattattctttttgatgctgcttacgaggcgtatattacagatcctactattccacatagtatctatgaaatagatggagctaaagaagttgctattgagtttcgaagcttttcaaaaacagcaggatttactggattacgttgtgcttatactgttatacctaaagagcttaaagcaaatacaagagaaggtaatgaacaataccttaatatgatgtggaatcgtcggcaaactacaaagtacaatggatgctcatatattgtacaaaaagctgcagctgcaatctatactcctgaaggacaaaaacaaatccaagaatctatccaatactatatgaaaaatgccttaattatacaaaatgcaattacacaaatgggtattactgctgttggtggtataaatgctccatatgtctggataaaaacacctgacaacctaagctcatgggatttctttgatcttcttttacagaatgctggagttgtaggaacgccaggagtaggttttggacctcatggtgagggatacttccgactcacaggctttggatcatatgaagataccaataaagccattgaacgtattcaaaaggctcttttaatataa

SEQ ID NO: 9336 - DNA, 849 bp, Lawsonia intracellularis
atgtctaaagtctttcaagaattttatcaacaatataaggaagttcaagagatacagaaagaacttgaaaaacctttaggactcattgtagatattttaggtccatgtcctaaagaaacctgcaagaagtatggattaccagaaggatgtactatcttagatattcctagtagtgttttttttaataaaaaaaagaagaaattaaagtttattggaggattgcattttgcttctgtggcaacagaatgttttttatttatgcaaggagaatggccaaggggtaatcaaactaatttgaacatatcttatgaacaactagaacagctttaccctatttataatacgttatctaatattgtaaacaggcttcctgagatggctacaagtagaggaagtttattattgaatgcaattgctgatgcattaacaagctcagatgtagattctaatattaataaagcaaaattagttatattttcagggcatgagggtaatatacaatctattgcagggctattaaacttacagtggaagatacatggttatcctccaaatgggacacctcctggggggatgttgatgtttacattatgggaaactcctaatggtaacattgtaaaaattcattatgtttgccaggagttagaagcaattgtaagtccagtagggtatccacaaaagttttttaaacaacagttaaaagttattccttatacgtcatcttcatatacaaatactgagcagctagagtgtagtgagaagcagttcagagattggatagataacgtagttgataaaaatttattaccaaaacaaaaagttcttctgaaatctaaacgtgttctatga

SEQ ID NO: 9337 - DNA, 552 bp, Lawsonia intracellularis
atgtataacttttctttatttctcttactagtagggttaattttaggtacgtttcagccaatagcagcaaaagagcaagatcaagaaaggttaatcaagatggttgtcctatctcgacatggacttcgttctccaatagttccaaatagtgagttagatgagtggacacaaaaagagtggccatattggcctgtaaataatggttatcttacttctagaggaagtattcttattagtaatttatgggaagcattacgcgaagacccttggttaaatgagttacttcctcaagatatatgtcctaatcctgagctaatatatgttcgtgctaatactgctgagagaacacaggcaacagctgttgctattttaaatggtcttgcaccaggatgcggccttaagtatttttttttgactctaagaataaggatcctctttttaattcaacagaaacaggagattatcctgttgatatgtctaaagtctttcaagaattttatcaacaatataaggaagttcaagagatacagaaagaacttgaaaaacctttag

SEQ ID NO: 9338 - DNA, 1326 bp, Lawsonia intracellularis
atgtataatagagttaattttattatatggttaatagcaacattttttatagtatttttttctatagctgaagaggtaaaggcagaagaacgactaataaaaatggttattctttcaagacatggatttcgtcctcctgtagagacgcatgaatttttagaagaatggtcagaaaaacaatggccatattggcctgtaaaagatggttatctcactcagcgtggaagtgttcttattagtatattatgggaggggttacatgaagacccttggatgaaagaattgtttccacgtaatatatgtcctgatcctcagtcaatttatgttagatctgatactatggagcgtactcaagctacagctatagcaattttaaatggttttgcctcaggctgtgattttcaatacagagtactagatactacagaaggggatcctttgttcactcctttggagactggatgttgttctttggattttaccaaagttattcaagaatttaatcaacaatatgggggagtccagacattacggaaagatttggaagagcctttgaagatagttgcagatgtattaggatattgtcctgaagctacgtgtaaaaagtatggattatcttctgagtgtagtgttcttgatattcctgatacaattattttgaataaacacaatggggtacatctaacagggggattaggtatttctgctttatctgctgcactcttttttcttgaactaggagaatggcctaaaggtaatttaagtggtattaatgtttctcaagatatagttaagaaagtttttcctcttcaaacaaaaatatttaatgcaatacatcggataccagaaatggctacagttaaagcaagtggaatacttaaaacaataacagatgctctaactaactcagatactgattctgacgttaataaagcaaagttagtcatatttgttggccatgatactaatattgctaatattgctggtatactgtctgtagattgggatattcctgggtatccttctggcgcaactcctcctggaggtatgcttgtttttactttatgggaaacacctaatgggaatatagtgaaagcacattatatttgtcagtccttagaaacagtaacaacaccttctatatatccacaaaaaatttataagcagcagttgtactctgtttctccaacaacgtctaaaaaagtcaataaagaaccttttgaatacagtgaaaaacaatttaaagaatgggtttatcgtttagttaagaaagactgtataataaaagaaactagaccattaatatcaaaacgtactttatattaa

SEQ ID NO: 9339 - DNA, 1257 bp, Lawsonia intracellularis
atgaactacccaccggaaactcaatatgaagcattggaaaaacgaggtgttagtcgtcgtgactttctaaaattttgttcctttgcagccgtttatttaggccttggcccaacaggacacctagacatagcaaatgcaatggaaaataaacctcgtcttcctgttgtttggataaacgggttatcatgtagttgttgtacagaatcttttatacgctcagcgcaccctcttgcttctgatattgtcttatctatgatttcattagactatcaggatacaattatggctgcagcaggacatcaagccgcagaagtttttgaagaaacaatcacagaatataagggtcgctatatccttgctgttgaaggaaatgctcctctagctgaccagggtatggcatgttttcaagaaggaagaccttttcttgaaaccctcaaacgtggtgcagaaggagcaagtgctgttatttgttggggaacttgtgcctcatggggatgtgtacaagctgctcatcctaatcctacccgtgcaacacctgtacctaaacttatccatgataaacctattatccgtattccaggttgtccacctattcctgaagtaatgagtaatgttgttgcatatattcttacctatgagagacttcctgaacttgactctcaaaaaagaccagccatgttttacggtaaaaccgtacatgatcaatgtgttcgaagagctcattttgatgcaggtcaatttgtagaatcatgggatgatcctgcagcttctcttggttattgcctttataaaatgggatgtaaaggtccaacaacgtataatgcatgtcctgttactcgatggaatgatggtgtgtcatatcctattgaatctgggcatggctgtattggctgctctgagaatgacttttgggatagaggctcattctatgataggataaccactattccacaatttgggacaaatactactgcaaatacagtagggttagctgctgttggtgctgttggtgcagctgcagcaacacatgctgctattagcactgccgtacatttaaaacgcaaagctaatgcaaaagttgaagaagaaaatgctcaacctcatacttgctgtcactctcatcagtcaacagataatacaactgctcacacctgttgtagtaactctgctgatgaaaaaacacaaaatactacagcctgctgtcatagtaaaaatgtaatgaactcaggtaattctaacgaaactactgatagttaa

SEQ ID NO: 9340 - DNA, 1809 bp, Lawsonia intracellularis
atgagctatcaatatagcactcaaggatatgaagtaactgacgcaggaaaacgtattgttgttgatcctattacacggattgaaggacacttacgttgtgaagttaatattaactcatcaggaataattacaaatgctgtttcatcaggaactctttttagagggcttgaaattattcttaaaaatcgtgatcctagagacgcttgggcctttgcagaacgtatttgtggtgtttgcacaggaactcatgctctaacctctatatatgcagtagaaaatgctttacaaattgaagttccagcaaatgcaaactttatccgcaatatgatgcaattagcactatggtgtcatgatcatattgtacatttttatcaacttgcaggacttgattggattgatgtcgtttctgcagcaaaaggtgatcctaaaaaagcttctgaactagctcaaagtatctcttcttggccaatgtcttctccaggttattttgctgacatcaaaaaacgtcttgtagatattattggctctggtcaattaggtattttcaaaaatgggtattggggtcaccctgcttacaaacttccaccagaagcaaatttaatgcttgtggcacattatatcgaagcactcaacatgcaaaaggaagttgtaaaaatccacactatttttggtggtaaaaaccctcatcctaactggattgtaggtggtatgcctttagctctaaacttagatgcaaaaggtggtgctgacgttataaatatggaaagattggagtatgtccagcgtattatcaatatttgtaaagactttacttcaaaagtacttatgcctgatactatagcacttgggaaattttatcctgaatggttgtctattggtaagggtatatctcatctatctatactttcttatggtggattcccaacaattagcaatgacttttcaaatgacagcttacttgttcctaatggagctattatcaatggtaacttcaatgaagttcatcctgtagatctttttgcagaagatgaagttcgagaagaagttagtcattcatggtatcgttatcctaatgatataacatcactacatccatttgaaggagaaaccattccagaattttctgttggacctaatacaaaaggaacagaaactgatattaaagaactggatgaacgtgcacgctattcttggataaaaacacctcgttggaaagggcatatgatggaagttggccctctacctagagtgcttattgcatattatatgaagagagaagaaacagtcacagctgttgatgagatatgtcggcaacttaatgttcctgtcacacatatgtgttcaacacttggacgtattattgctcgtagtcatgaagcagtatgggctgctgaaaaacttcaatacttttttgatcgccttatagctaatacaaaggctggtgatttaactgtagccaatactacaaaatgggaacctagtacatggcctaaagaagctaaaggcgcaggttttactgaagcacctcgtggagctttagggcattgggttgttataaaagacacaaaaattgatcgctatcaatgtgtagtccctactacttggaatgctgcacctcgaagtgatagtgaacaattaggtccttatgaagcagcactaatggatacacatcttgctgaaccagaaaaacctcttgagctattacgtactatccatagctttgacccttgtctagcttgtgcaacacatattattggaccagatggaaatgaggtactaagtgtccaatgtaatacagctggatgttga

SEQ ID NO: 9341 - DNA, 705 bp, Lawsonia intracellularis
atggaagaaactccaccaccacaaaaagctaaatatattattgaactacctgttagaatctggcactggagtattgttatctgtattgctacactgattcttacaggatactatattggatatccctggcactctatagatggacacccaacctatctctttcttatgggatatatgagaatagtacattttagcgcaggctttatacttgctattggtatatttttacgtcttatttatgcattctttggtaataactattcaaaacaaatttttgttattcctatatggcaaaaatcatggtggcatggcctcataggagattttagatggtatttatttatagataaaactccacatgtccactacgaccataacccattagctcaagtaggaatgtttggctgtatttttcttattttcttcatgacattcactggaatgggaatgtttataatgagttctgacaatccatggcttgtccatacatttcattgggttcttgatgttgcatactgggttggtgggaatggtatagatctccataactggcatagacttggaatgctctttattattgcatttatcattatccacttgtacatggtaatacgtgaagaaataatgggtaatacaacactagttagtgctatgtttaatggatttaaactagttcgacttataaaacaacccaaaaagaattaa

SEQ ID NO: 9342 - DNA, 537 bp, Lawsonia intracellularis
atggaatctattattgttcttggattaggtaacattctatatggagatgaaggttttggtgtacgagtagctgaacagctttatactcgttatgatttccctgataatatagaaatcattgatgcaggcacgcgaggtcaagcattattacaatatgttgaaaaagcagatagattacttatccttgatgcagtagattttaatatgccaccaggaaaaattatttttaaagataacaatgaaattccctcttaccttacagctcataaaatgagcttacaccaaacaagcttttctgagattattgggttagccagcctacaaaaactattacctaaggaaatggttttactaggtgtccaaccaatatctttagagtatggaacctctttaactccagatgtttttcatctattggataaagctgttgaacttgcattgaaccaactattaaaatggaatattacgccacaaccagcagtaacaaaaaaagtattccaagcagcaggaatttctttatcaaattttaatttataa

SEQ ID NO: 9343 - DNA, 405 bp, Lawsonia intracellularis
atgaacttttctaatgaactaaatatacttaagattaacaaattttgttttagaaaacgtaagaaggcataccaacatatgcaagctattgctgttagcttatggcgtcttgcattacaaaactctttcccttcagaatatgaaattatttttggagcatatctctgtaaaaaaaactctcatattccaataaataaacaaggtatactagatccatactttcaaaaagtcctacaatcttatattgaaattcttaatactcatggtgatagcgatttcacagaagttagctctcaccttattaatatgttacaactttccaaagtaaacaatgacgcaataaaactaaaattagccctcacaattagaactatgtataatgatatctttaaaaaacttatttag

SEQ ID NO: 9344 - DNA, 1071 bp, Lawsonia intracellularis
atgcaaattcttactataacttcttctaccaataggagtggtggtactcgtcaagcaatatatcaaactcaagaatttgcaaagcgtgggtataatgcaaggctctgcttaccccatgactcaactttttgggagttaccaaaaaaagaacaaaatcctctttggattgcattacctgaaaatcattcaaaacaaaaaatttttatagaaaaattattatctgaaacaagccctacagttattcatgcattccataataaagctattaaacgtattgcatggtggggactttcatggaaatataaaaatgtaacatgtgttgcacaccgaggtgtcatttatcgacctaaaaaccctctgccatacctatcccctgcaataaaagcttttatacctaattctaaagcatgtgctaaggcactccgatggcattgtcctcgtaaaaaaatctatattgtacctaacgggttaccagccgaacgtttcactccaacaatatctcaagaggaagctctcaagcatattggaatttcttatattcctaaatttttatttggctttgttggaaataacaaaccacaaaaaggtttcgacatattattagaagcgttttcaaaagcacatatagctgatgcacacctcttaaccatgggtgtaaaagaagaatactggcgtcctctatgcgaacaatttcatattgcagaacaagtacactttcttgaccatgtagaacatatttctaactacttacaactctgtgatgcttttattgttccatcccgagcaatggaatcttcacctaatactcttattgaagcaatgtctatgggacttcctataatagctacaaatgcaggagggattcctgaactagttaaagggaatggaattattgttcctgtagccgatgcaaaaagtatggccaatgcattagctcatatgctctctaatcctgcacaaagggaagaatggtctaaacaaagccgtctattaagtcaacaatattcaataactacacgttgtgatacactagaagggatttatcataagataggagcatggtctaactaa

SEQ ID NO: 9345 - DNA, 471 bp, Lawsonia intracellularis
atgagattagttattcaacgtgttcatcacagtcgattgtatattgatagtaacctcactacagaaataggagtaggtcttgttgttctaattggttttggtcttgttgatgagtgttcattacctaataataatatttgtttattatttgtagaaaagcttgcaacacttcgaatatttccaaataaagaagggaaatttgctcattcacttgaagatatcaatggggagttactattagtacctcagtttactctatatggagattgccataaaggaagaaggccatcttttcatttagctgcatcaggaaaggttgccaaacagttttttataacattttatgaacaactgtgtatacgtttaccaggaaaagttcaaaagggtgtttttggagcagacatggacgtatattttgaaaactggggacctgtaactattttaatagactcagaagagtatacatcatag

SEQ ID NO: 9346 - DNA, 1200 bp, Lawsonia intracellularis
atggagacttgggctttaattttagcagcaggacagggtagtcggttattaagtacaataggtatagcaaaacaattttttgtatggaaaggcatacctctttactggcaatctgtgctgcagtttatgcattgtgcaagaatccgtggtgttgtgttggtctttccttcagaagtaaaagataatgaagaaaaagttgttgatagattagcagctcagtatgatttaagacttccatatatagttatttctggcgggaaattgcgtcaggactcagttaaaaatgcattgaacactctcccaaaaaactgctctcatgtccttattcatgatgcagctagaccttttatctctccaaagttgattaataatgttattgaagtattagaagctggagcagttggagtagttccaggtatatctgttacagatacaattaaacaggttattcaaggagaagttatagttacacgacctagggaacaacttattgctgtacaaacaccacaaggttttcatttaaaaacaattgttgaagggcataatagggctacattagaaaagtggactgtcacagatgatgcatcacttcttgagttgtgtgggcatactgtacaagttattaatggtgaaatagaaaataggaaaataagtttccctcaggatttattatatatggtcgaacaaccaaaaactacagttcctatagtagggtatggctatgatgttcataaatatgtaactgaagatcaaataaatcagccaattcgttctatgagattggggggaatatctattcccaatgcaccaaacgttgttgcacactctgatggagatgtattactacatgcacttatggatgcattgcttggctgtattggaggcggagatattggccttcattttcctgactctgataagcgttacgatggaataaattcagctattttgcttgatcatgtgctaacaaaagtattggaatcttctataaagattgtccatatggatgcaacaatagttgctcaacttcctaagattagtcaatatcgtgaagctattagaagtaatctttcaagattattagatcttgatctagcaaatgtaaatataaaggccactacagaagaaggtttaggttttacaggagaatgtaaaggaattaaagccattgttattgtaacagctattcgaatatcataa

SEQ ID NO: 9347 - DNA, 294 bp, Lawsonia intracellularis
atgggcgactgtcattcatctaggaatatagttacctatattctcaagcaacctacccaggaacattggccgggtcagcctgttcccctatttggtcttgcttcaaacggggcttgcctagctcgctatatcactataacgactggtagactcttactccaccgtttcacccttaccactattattaataatggcggtttactttctgttgcgcttgccgaagatcactcttcctgggtgttacccagcgttttaccctatgaagcccggactttcctctccataaatccataa

SEQ ID NO: 9348 - DNA, 765 bp, Lawsonia intracellularis
gtgagtctgtatataaaccaaatatgtcaacttgtatcgcttcaacatgtagatgatgctatttatattgtagaagaagagcttatacaagcacccaaagaattagaaacacttgctgctaagtttgaatcagtagatagccagcgtactcttgttatagaaaaactagaacatcttaaagaaagggaaaagcgtattcatcatgaaattgaagatgatgagggacgtataaagagaagtaaaggcaaattaatgcaggtttcaaactctcgtgaataccaagctatggcacgagaaatggataatatggagcgtcttaatcgtactcgtgaagaagaacgcaatacattacttgaagaaaagcaacttcaagaaaccactcttgcagaaatagagtctttatggacggcaataaaagaagaacttgaacttaagaaagcaggtcttgatgaatatttaaaggatgcaaagaatcgtttagcagagctagaaagttcacgttcaacgactacaagtgatattcctcgtcctatacttgagcgctacgaatttattcgacgtcgtttatcacatcctgtgatagttcctgtcacagatggtgtttgtggtggatgtcatattgttgttcctcctcaaacatacattgaactacaaggaggacacaagattattaattgtcctaattgccagcgcctaatttattggagtaagcattttagtgaagaagagattaagcaggagcctgttgaagaaatagagagttaa

SEQ ID NO: 9349 - DNA, 798 bp, Lawsonia intracellularis
atgaactataataatattattaatataatagaagaggtggctccattatcagttgctgctacatgggataactcaggtgtacaagttgcttcaagtcaagatgaaattttttgtcttgctgtatgcttagatccaactccagaatcggtttataaagcatctgagttaggagcaaacatgattttatcacaccatccattagggttgaggcctcgattcccaactattattgataattattatagtgtgttaaagttattgttatctaaaaatattttgctatattcagcacatacatctcttgatgcaaatctttacggtcctgcctcatggcttgctgaagtattagagttacatgaatgtagtgtgcttgaatctattcatacgactaatggggtgtcgtctcaatatggttttggtcgtattggtcatttttcttcacctgtacctgttgaaaatttttgtcaacgtatatatccattgataggtgaagctgtaccaagattgataggtgaacttccaagacaaatatatagagtagctttttgtcctggagctggagcagagtatgctgctgaagcagctagacagaaggctgatattttgattactggagatgtgaagtaccatcaagcgttagagttttctttacctgttttagatgttggacatttctgtcttgaggaagaaatgatgcgtcgtttttctcaatatttacagagtgttcttttagatgtaactgtggtatttgtaccaactcaagatccattacgttctttttgtataaaagaaaattag

SEQ ID NO: 9350 - DNA, 825 bp, Lawsonia intracellularis
atggcacaggttaatgctttagtaattactggatatggaacgaactctcataatgaaaccgcacatgcaataaggcttgctggtgcagattatgttgatattaaacatttttcagaagttgttgcagctgaagtttttcttgatagttatcaactgttagtttttcctggcggttttttagatggtgatgaccttggtgctgctcaagctgctgcacaacgttggcgatatctatctgataaaaatggtgtttcattacttacaagcttaaaaaattttatagcaaaaggtggtcttgttcttggtatatgtaacggttttcaattattagttaagttgggtatgttaccatctcttgatggaaagttgtttgatcgccaagtatcacttagtcataatgattctgcacgttttgaagatcggtgggtttctttaagagtaaatcaagatagtccatgtgtgtttactcgtggtttgagtgaaaagaatttgctttctatgcctgtaagacatggtgagggtaaatgtattgttagggagcctagcattctacaacagcttattgatgggcagcatattgttcttcagtatgctgaccctactacaggtgaggctacacaagagtatccttataatccaaatggctccccatttgctattgcagggcttacagatacttcaggaagaatttttggtcttatgccacatcctgaggcttttcatcatagaacaaatcatccaggctggccacgaggagaacaaactatattaggaacaataatatttcaaaatgctgtagatttttgcagaactattgataaataa

SEQ ID NO: 9351 - DNA, 1653 bp, Lawsonia intracellularis
atgaagacaaaatttatcttcattacaggaggagtactatcctcacttggtaaaggtctttcagctgcttctataggagcactactgacctctcgaggtatgacagtcactattcaaaaactagatccttatatcaacatagatcctggtacaatgaacccataccagcatggtgaagtttatgtcactgatgacggtgctgaagcagatcttgatcttggacattatgaacggtttcttggtacctcgctttcacaaaagaataactccacttcaggagccatttattacaaagttattagtaaagaacgtcgtggtgactatcttggtgccacagtacaggttatcccacatattacagatgaaattaagtcaacaatattaagccttgcaaaaagttccatagacaataatactccggatattgctatcattgaaattggaggcactattggggatattgaaggacttccattccttgaagctatccgacaattacaaactgatcttggtaggcaaaactgtctttatatccaccttacattagtaccctaccttgggacagctggtgaacataaaacaaaaccaacacaacatagtgtgaaagagcttcgttctattggaattcagccaaatatcattctttgtcgttgtgaaaagcctatccctgatgatatcaaagcaaaaatctctttattttgtgacgtagaaaaagatgctgttttttctgctgctgatataaataatatttatgagttaccactcaagttttatacagaaggacttgatcaaaaaattacaagttttcttaacttacctactaaacaagccaaccttaaaccatgggaacaacttgttaacacaattaataaccctaaaggaaaagtaacaatcacaatcgtaggtaagtatgtaggacttacagaagcatataaaagcctgcatgaagctctttgtcatggaggaatagcaaatgagattacagtagacttacaatatgttaactctgaaattatcacagaagataatgttaatgaaatttttaaaggtgttgatggcattcttgttccaggtggatttggttctcgtggtatcgaaggcaaaattgaatctattcgctatgcacgccaaaaaaatattcctttctttggcatatgtcttggcatgcaatgtgctgtcattgagtttgcccgtaatgttgcaggaatagaaaaagcaaactcagaagagtttaatcctgtagcagctgataaagttatttatcttatgaaagaatggtacgatttccgcaacaatgccatagaatatcgtgactcactatgtgacaaaggaggaactatgcgtcttggttcttacccttgtactcttataaaaaatactaaagcttttaaagcatatcaaacagactctatagaagaacgtcatcgtcatcgatatgaatttaataatatatatagagaccagtttgctgaaaaaggaatgatatttagtggaacttctcctgataatacacttgtagaaattattgaacttctcaatcatccttggtttattggatgtcaatttcatcctgagttcaagtcataccctatgaaaccacatccactatttaaagactttatccatgctgcttgcaaccataataaacaataa

SEQ ID NO: 9352 - DNA, 807 bp, Lawsonia intracellularis
atgactacagatgatctttatcactccctggtttcaaaacattttatttttgctggaccatgtgtactagaatctaaggaacttgcgtgcaactcagctactattattgccgaacaagcttgtaatacaggactccttgctgtctttaaaagctcttgggataaagcaaatagaacttctaactcatcttttagaggtccaacgtttaaagagggtatggaatggttatatagcgtcaaaaaagagacaggattacctattgttacagatatacatctcccagagcaagcagctcttgtcgcagaagttgctgatattatacaaatccctgcattcctttgtagacagacagacttattaaaagaagcagcatatactgattgcattattaatgtgaaaaaaggccaatttcttgctccatgggatatgaaagctgtccgtgataaaatttttgcaacaggtaacaaaaaattactctttactgaacgtggtacaacttttggttataataatcttgtcgtagactttagatctattcctattatgaaggaacttggagtacctgttatcttcgacgcaacacattcagtccaacttcctggaggaaaaggtgaatcttctgatggccaaagacaatacgtgtcaacgcttgcttatgctgctgcagcaacaggtgttaatggaatttttcttgaatgccatccaaatcctgacaaagccttatgtgatggtcccaacagttggccactaaatcaactggggacattgcttgctcagttatcagctatatggagtgttgtaaaatga

SEQ ID NO: 9353 - DNA, 612 bp, Lawsonia intracellularis
atgagctttaataataataataataataataaaatagcaaataaaactttagaacatcagtatactcatacatcttttcaagaacaactattaaaagaacgtgcacatagtatacgtctccttatccttgatgtggatggtgtcatgacagatggtagtctttactatgaggatacaggattatgtatgaaacgattcaatgtactagatgggataggtattcgactagccaaagaggcaggattatcaattgctattgtttctggaatggatgttccatgtgtagagcgtcgcttaaaggatcttggtatttctgactatcaccctgggattaataataaacatgcacacattgataagctgcgtactcaaaaaaatcttcaatggagtgaaattgcatatgttggagatgattgggtagacttagctcccatgacttctgtaggcttacctattgctgtggataatgctgtacctgaagtaaaagaattagcactttatattactaaacgtaaaggtggagatggagctatacgagaagttattgacttattgctcatatatcaaaataaaaaagaagctcttcttcatacatggatgaatcttaaatga

SEQ ID NO: 9354 - DNA, 546 bp, Lawsonia intracellularis
atggattctttattcactacagaaaaaaaacaggctggaaatgagttgttaaatatcaatgatagtgacccaacatcagtagatcactctctttctcttgaaaactccttaggtttagcattaaaaggtgtaaatctttcccaaggagaaaatggaattgagctttggcgtcttaaggcttcttgggctcgtctctcaaaagatagagaatctatacaagtagatagtcctattgttcaatatctacttggcgatggtttgaataatgatgctatcacagtacgtgcagataaagggaaaatagtagaaaatcagaatactattatactttgggaaaatcttcttattgcacaagataataaaagcataacaggtccctatatggtatatgatacaaaaaaacgacatatatattttcctaatggagctcaatttacaagtccacaagctacaagtgcagcaggaaaagttacttgggatcttaaatcaaatattattagtggtaaaaatgggatcaaagttactatccatgcaaaaaatatataa

SEQ ID NO: 9355 - DNA, 570 bp, Lawsonia intracellularis
atgaagctatattttgtctcacaagttttattacttataggactaatatacacctataatcaacctacattatatgcacaacctataaaaaaaggttcgcttggtactgttgaaacaaaaattttttctgatgaattaacttatgacttagaaaaacaacaaattacctttaacaaaaatgttcatgtacaacgtccagactttcaactcacaacagatacattaactatttatttagcaccacaaaaaaaatctcaaaaaaatgaagatctatctacaaaccctatttcaagtaaaatatctgctggcgagttaaaacatattgtagcaaaaagaaatgtctgtattaaaggggataaatatacaggtactgcaggaaaagtcacctatacagaaaaaacaggtatccttcttttagaggattcgccagttcttactgatggagaaaatactattacaggcgatagtatccgttattatatatatgagaatcgaagtgaagttattagaggaaaaaacaaacgtgttgaagctacatttatgcaatattcaaatgaaaaggtaaaataa

SEQ ID NO: 9356 - DNA, 723 bp, Lawsonia intracellularis
atggcaacacttaaaggtgttgagctacaaaaatggtatggaaaccgtgaagttgtttgtggtgtctcaccagttatccatcaaaacgagatagtaggtcttcttggcccaaatggtgctggtaaaacaacttcattttatatgctcaccggaatcattaaaccatcaagtggaaaaattttctttgaaaatcaggacatcagttcatggccattatatcaacgtgcacgtgttggtatttcatatctcccacaagaaagttctgtttttcgtcacttaactgttaggcaaaatttacaaattatattagaatatacaacatattctaaaagtaaacaaaaacagaaagctgatgctcttcttgaagattttggtcttacttatcttgaaaactcttatgctgtacatctttctggtggtgaaagacgtaggcttgaaatagctagagcacttatccgacaaccaaaatttattttacttgatgaaccatttgcaggaattgatcctttagctattcatgatatacaaagtattattcagctccttcgtgaaaagaatattggtattcttatatctgatcataatgtacgagaaacactaaatatttgtgatcgagcttatcttatggtgaaaggccaagttattcttacaggaacacctgacgatattattaatagtaaaaaagctagaagtatgtacttaggagaaagtttctgtttataa

SEQ ID NO: 9357 - DNA, 1422 bp, Lawsonia intracellularis
atgggactagaactcaagcaacagcttaaacttagtcaacagcttgtaatgactccccagttgcagcaggcgatccgtctattgcaactatcacgggttgaattagctgaaacaattcaaaaagaattgttagaaaatccatttctggaagaatcgcaggaagaaatagcttctgaacgtcaagaaacacggacagaacatgatccttctgaagcctacgatcaggatgtatccaacactgcagactgggaagattatcttggtgaatttgcaagcacaccaaaacaacttcaatctcgtgaatacgaactttctgaagagatgtcttctcttgaagcaagatatgcctctcgcccaacacttgaaagtcaccttatgtggcaacttcgcctttcaacgcttactgatgaacaaaaaaatttaggtgaagctattataggaaacctatcttcatcaggctaccttcaggcttcacttgaagaaatagcaaatagcgagcacacagatatagaaaaacttaaacctgttctccatgcaatacaaagatttgatcctgtgggggtagcagctcaatctcctcaagaatgcctacttatacaaatagaagtcttaggctatgatagagatcctatcttggtagaacttatacaaaaccatcttgatgatcttgaagcacaccgatataaacctcttctacgtaaactccacattactatggaggaacttaaagaatatattgatataattcaaacacttgatcctctacctggagcaagttatggagagggagatcctacttatgtgagccctgatgcatttgtctatcaagttgataatgagttcattatattacttaatgatgaaggattacctaatcttcatctaaaccaagcttatgaacatattttagaagaatcaagtgacaaagataaagagtatttttcagaaaaaattcgttcagctgcatggctaatcaaaagcttgcaccaacgacaaagaacactatataaagtagtagaaagtattgtaaaatatcaacaaaccttttttaaagaaggtatcacaaagcttcgtcctcttatattaaaagatattgctgatgatattggtatgcatgaatctacagttagccgaataactactaataaatacattgcaacaccatttggaatttttgaattaaaatttttctttaatagtgcacttggtgttgatgatggtagtcaagttggctctgaaagtgtaaaagctattataaaaaaatgtatcaatgaagaagatcctaaaaatcctctttctgatgaacgaattggtgaaatcttgaaagaacaattaaaagttaatattgctagacgaacagttgcaaagtatcgtatgtctatggatattccatcttcatcacgtagaaaagtacatttctaa

SEQ ID NO: 9358 - DNA, 537 bp, Lawsonia intracellularis
atgaatattgtatttactttcaaaaactttgaaccatctgatcatttgcgtaaatatgcacgacgtcgccttgaaaaacttactcgttttgtaggaaaaaaagtatctcttgaaatacaacttcttatggatgtcgataaatttcgacaaaaagtagaagtacaagtagtaggagaaggacttaacatatcagcagcagaaacaactgaagatatgtatggctctattgatctagccattgataaaattgaatctcaaataaaaaaatatactgcacgctatagggaacaaagacgcagtggtcgcaataaaaatattgatattttcccatttgaattaattgatgaagatggtgtacggacaattacaggacgagaacatttttctccaaaacctatggaccttgatgaagcagctatgcaactagaaacttcaggatttgaattccttgtgtttctaaatgcagaaactgatcgtgttaatgtcatttatcatcgaaaaaatggtgactttggtttaattgatcctgttatttaa

SEQ ID NO: 9359 - DNA, 966 bp, Lawsonia intracellularis
atgactttaaaaaaaataatacctaacctacaaaagacacaaaataataataataatagtatttcttctccattattacctcatacagttcaagaatattttccagtaattattattgtaggtatgtctggtgcaggtaaaagtactgctttacatgtatttgaagatctccagcttgtcacagcagatggtattccaccgtcactagttacaagtatgattcatacagttcaaagttcttcactagaacacgttcaagggttagctttaggtattaatcaacatagaatacatacaatgcaagagcttgaacatacttttcaagaaatgcgtagccaacatatttactttacgcttctctaccttgaagcagatatgcccactcttataaaaagatatgcagctacacgaaggcctcacccattagaacaataccatattggtcttgaacatgcccttgaagaagaagctaaacgtcttatccctataagacaaacagcagatattgtacttgatactacaacatattctattcatgacttacgaaggtttctacaaaaatcttggaacccttatccagaaaaaatacgatctattaaaattaacattatttcttttggatttaagtatggtgtacctaacgaagcggatttactattcgacctaagattcctaccaaacccatactttgtagaagagttacgtcccttatctggaatggacaaaaaagttgcaacttatgttcttaattctgcttcaggaataaaatttaaaaaacatcttattagatttctttcattccttcttcctctctatgatgcagaaggtcgttatcgtattactattgctcttggttgcacaggtggtaaacatcgttctgttgctatttcagaactattattacatgaacttactaaaaaaaactatactgtttctatagagcatcgtcatatggaactaggataa

SEQ ID NO: 9360 - DNA, 552 bp, Lawsonia intracellularis
atgaaaaaactgattctaacttttgctttattattagtaacaaatataactacttttgcttctgagccttttactctatcaagcccacaaatgaaaaatggaactattgcaactaatcaagtttataatagttttggatgcaaaggaaaaaatatttctccaagtctagagtggaaaaatcctcctgaaggaactaaaagctttgctataactatgtttgatatagatgcaccaacaggtagtggatggtggcattggatagtttataacattcctacatccacttcctcattagtactaggagcaggaaatgatcctaaaaaacttcccaaaggtgcagttcaatcaataaatgactttggttttattggatttggaggaccttgtcctccagttggtgcaaaacttcatcactatatttttactatctatgctctcaatgtagagacaatggatttaccagcaacaactatgcctgcagctattggattcaatattcatatgcatatgattgacaaagctacttttactgctacttattctcgtaagtaa

SEQ ID NO: 9361 - DNA, 1497 bp, Lawsonia intracellularis
atgaaaaaagtgcttattagtgcattcctttttgttggaacattgcttacagcatcgctttcagcagaagctattgattttaaggcaaagggtgtgtgggacttcaattttgagtggcaacaatctagttttatgaagggcgatggagatcaacgtttttcgcctaaacaacgtttacgtactcaaatagacattgttgcatcagagagtcttaagggtgttgtattctttgaattaggtaagactatctggggacgtggtgttgatggtgcttctattggaacagatggtaaaaatgttataaagctccgttattcctatgttgattgggttattccttacacagatgtgcaagtccgtatgggtttacaaccttatgtccttccaggatttgttgcaggttctacaatattagatgctgatggagcaggtgttactgtttctgctgtatttaatgattatttaggtgctacagctttctggatgcgtgcattgcataaaaactatgatagtaattatggaatatcaaagctacctaactttaaaggtacaacattagatgtagttggattaactattcctgtaacaatatctgatataaaaattgctccatggggtatgtttgcttttgcaggtaagaagagcttattaggggaaagctatggagatattgaagatgtaagagcaggtcttttaccagcaatgccagcaggatttggatatagctggggagctggtaatccatttggagatgtttttccaaataaaaagcgtggtaatgcatggtgggttggtttatcagctgaacttgctggctcaagtcctttgcatatagctgttgatggtgcttatggacgagcagacttaggaagtcttagaaatgttgttattggtgacttcttactagataagattgatttaaaacgtcaaggttggtatgcagcattattagcagaatataaatttgaatatgtaactccaggggttataggttggtatgcctcaggagataaagttgattcacgtggcgcctctaaaagaataccaacattagttggaaactggtcagcaacaagttttggatatagtggagcctatggtataggcaaagattctgtttttggaaatactattgctggctcatggggtgttgtagttcagttgaaagatatttctttcttagaaaatctaactcatgttatccgtggagctagaattcagggtacaaataataaagacgttcctgaacacttaggtttatcatacgttactaccatttatgacacacgtggtggtgataatatgctttacttaacaaagaaagattatgcttgggaagtagattttgatactgaatataaaatctataaagacttaagtgtagctcttgaactgtcatatattcgtcttgaacttgataaaaaactatggaaccttcaaagagaagttgataagaatgcctatcgtgctggtttaaatatgaagtatcaattctaa

SEQ ID NO: 9362 - DNA, 1398 bp, Lawsonia intracellularis
atgaagaaagtcgttacacgttttgccccaagtcctacaggacaattacatattggtggggcacgcacggctttgttttcttggttgttagctaggcattttgatgggatatttcatttaaggatagaagatacagaccttgaaagatctaagcaagaatatacagatactattctagaatccatgtcatggcttggtttgaattgggatggagaaattgtttatcaatcaaaacggaatgagcgttaccatgaggtcatagatatactcttgcagactggtcatgcatattggtgtcattgttctattgaacaaatagaaaagatgagagaggaagcccgtcaaaaaggtgagaagcctcgatataatggttgttgtagagagaaaaagttatctgctaatccttctggtgtggtgcgtctaaaagttccttctgcaggtcaagttacctttaatgatcttgttaaaggacaagttacagtccaaaatacagagcttgacgatatggtcttacaacgttctgatggaacaccaacatatcaattagctgtagttgtagatgatcatgatatgcaagtgacacatattattcgtggagatgatcatgtttcaaatacaccaaaacagatcttaatttataatgcgctaggttgggaaatacctatatttggtcatattcctatgattcttggttcagaccgtcagaagctttctaaacgtcatggtgcacgtgcagttattgaataccaagaagatggctttttaccagaagctatgctcaattaccttgtccggcttggttggtcgtatggtgatcaagaaatttttactcttcaggagttgataagtttttttgatggaacaaatcttcatagcgctcctgctgcttttaatatagagaagttactttggcttaatgctcattatctaaggagattaccagtctcccagattgcaaaccttatgttaccttttgttagaaaagaaggttttactcatataacaaaagaacggattgaagcagtgttaccattgtatgtagaacgagctgatactcttaaggaattagtttatcttatgaaacctgtgcttattagtgcttcagatcttacatataaagaagatgatataaaaaaaattgtcactaatgaaagtaaagagcatttagatagattacgtaatttattagaagctgaaataaactttgaaccattatatattgaacagcttatccatgagtatatcacaagtaacaatctgaagtttaaagagattggtccaattcttcgtttagctgtatctggtgttttaggaggaccaagcctacaagaacttattgtagtaattgggaaaaaagaagtcctagctagattagataagttacgctttcagttataa

SEQ ID NO: 9363 - DNA, 1251 bp, Lawsonia intracellularis
atgaatattagtaaagcaagacttaattacagtaggggaggaaaaatttgtaagttagataaggtgaggaataaacagcaacagccgttatttcaaccaattatttcagatttaacaccttttacaaaacaattactagagattttaccttacattttggataagactcttcatctttctcactcacagagaatagcattacctgatgatattcataacctttcttgtttattaacctctgaaagaaaaggtttatataaatcatattggagcaatgcacgtttttgttcagcttatttatggtattttttcccgtggaatcttatacgtcttacgtctctaatatcaaatcttgcattacctgaacctaaatctgaagtcgttattatggacttaggtagtggtcctttaacgttacctgtggccttgtggctttccaaaccaacctggcgtaattgcaaaataaagcttatttgtgtggatactgcaattcaacctatgaatatagggttgaaactttttaaacaaatagctgcacaactaaaagaatcttttgtgtgggatgttacattgatacgtggtaattatacccaagtactaaaatctattagttcccctttgcaccttattatgtctggaaatatgcttaatgaattaaagggaaaaacaaatcatcttattagaagccgtatggaacaaatggtaatgctcataaataatgttttacactctgatggagcagcattgtttgtagagcctggaacacgtttgggtggaaagcttatgtctacattaagagaagttgctatacaagatacatttatttctattgctccttgcacacatacagctttttgtcctttatttaatagtacaaataatctttggtgtcatgtcttgtttgatgtagatgcaccacaatggttattaaaccttagtcaagcagctaatttatcaaaagttaaagtaagtttttcttttcagttattaaggtatagaaagaatactttgaaactattagataatactacttcttttttaactgggagggtcctttctggaggatttcctgttttaggtatgggaacagctcaatatgtttgtacaaaaaaaggtttagctcttatgtcttatacacgtggtattccatcaggtgcaagagtattatgtaagcctttaccaggaaaccagagagatatacgttcaggtgcattaaaagttgaatgggtatctactttagagaaagaataa

SEQ ID NO: 9364 - DNA, 1341 bp, Lawsonia intracellularis
atgcatatgtgctccatgtctgaacttaacttacaaggaaaacaaattgtattaagagaagatctgaatgtaccattaaaagatggtgttattaccagtgataagcgtattcgtgcagctttaccctctattaagtttgcattggaaagaggcgctggtgttgtgattctttcacatcttggccgaccagaagaaggtaagcctacaaaagaagcttctcttgcacctgttgcagcaaggctttctgaattgttaggtatggatgttcccttgattacagattacttaaatggagtaacagtatctccaggaaagtgtgtattgtgtgagaatgtacgttttcttgtaggtgaaaagaaaaattcagaagagttagcacgtaaattagctgcacttggagaaatttatattatggatgcatttgctacggcgcatcgtgcacaagcatctacagaaggtgcaatccgttttgccaaacatgcatgtgttggtccattgatggctgctgagttaaaagctattagacatattcttcatcgtccaaatcatcctttagtagcaattattggaggttccaaagtttcaacaaagcttcaacttattgaaaatctttctcgaaaggtggatcgattgattgttggtgggggtatcgctaatacatttttaaaagctgctggttttgaaattggtttatctttatatgaaccagaattggtttcaacagcagcaaaaattatgagagaaacacatcgacatgtatcaccttttgatcatttggggggtaagttgatggcaaatgcttataaacaaggtttcccttttgaaactttaggagctaaagtgatagagcaggtttctcagcatatgtcaccatttgattctttaggtgaaacaacgcggaaagaagattctaggggaatatcatctattccattgcctagtgacgtagttgtagcaactgaacttagtgagaaagcaactgcaataatacgtaaagttgatgatattaagcctgatgagaaaatttttgatataggtcctgaaacagctcagaggattgctgaatacataatgaatgcaggaactgtggtatggaatggtccagtaggtgtttttgaaattgatcagtttggtttaggaacaaaaattatagcccatgcagttgcagaaacaaaagcatatacagttgttggtggaggagatagtattgctgcacttgagaaatatggatatttagataaggttgattatgtttcaacagcaggaggagcttttcttgaaatgttagaaggcaaaattttaccagctgtagctgcacttgaggcatctgcttcatcgtga

SEQ ID NO: 9365 - DNA, 885 bp, Lawsonia intracellularis
atggatttacatattattactgaacctctcattgatctttacgacagagttgcttttttttggcaatcaccaaaaacacaaaaaatatcttctattattattttagtcatctttctctgtgcactagctagtatagaacttaatcgagaaggataccttcctaaaaatctatcaattatagtaccaacaaatcattttagagctattagcttagcgttcacatgtatattatgtattgaacttattgctttggtccttagtatttcacaatctctttcaatctctgtaggaaaacagcttgaaattatggcactgattttattacgcaatgcatttaaagagttagcatatttatcagaacctattaatatgaatgatagtgcatatcacctatatacaatttgtcttgcagctatcacatctcttggaatttttatatgccttggattttatcaacatatgccaaaacttacaaaatatatttataatcctagagaacggttaggttatattaatgcaaaaaaaatagttgccctttttctcttatgtcttctcacagttatagcaattcgtgacacatatcaacatcttattacaggaaaagatgtagctttttttgaaacagtctatactgttttaatctttgcagatatccttattgtacttgttgcacaaaggtttatgccaacatttagtgccatttttttacactcttcctctgttgtagcaacattaattatgaggctttctctgtctgcaaactcaccatggaatgcaataggagctatgttctcaggactatatattcttgctgttacctgggctataacatactttatgaaaaaaccattctctataagaaaaaacaaacatatagtagactaa

SEQ ID NO: 9366 - DNA, 993 bp, Lawsonia intracellularis
atgaaggtaattgttactggtggagctggctatattggaagtcatacatgtaaagaattagcacgtcagggatataatcctattgtatatgataatttgtctacaggtcataagtcccttgttcagtggggtgagtttgaatatggagatattttagatctttctagattacagtctgtttttcataagcataaaccagatggcgtgatccattttgcggcaaaatctattgttagtgagtctgtgagcaatcctgggtattattttcgtaataatgttacaggtacactgaatcttctagaaacaatatacaatagtaaagttaagtatattgttgtttctggaacatgtgcagtttatgggcaaccagaacaaatgcctattcatgaagatatgccaaagctccctgtaactacttatggagtaagtaagcttgttatggaatctatgctgaagtcttttgaagcagcatacggtctttcttgggtttcactacgatactttaatgccgcaggttgtgatctagatggggaaacaggagagtggcatgaacctgaaacacatttaattcctttaatattaaaaactattacaagtaatactccattaactatttttggggataactacccaactgaagatggtacatgtgtccgagattacattcatgtttgtgatcttgcacgtgcacacgtgttggctttaaattatttagctaaaggtgaaacctcagaggccataaatcttggtactggaagtggtttttcagtaaggcagattattgatagtgttgaaaggattacaggtaggtcagttccatatagactgggccagcgtagagaaggtgatcctccatgtttaatctcaagtaatcaaaaagcagcctccttacttggatggaggccacaatattcaaatattgatcaaattattgcaagtgcatggaattggcactccaacttttgtaacaccactttttataacaataggtag

SEQ ID NO: 9367 - DNA, 777 bp, Lawsonia intracellularis
atgaaaaaagttttttatatcagtatacatttagtagttttttggggatgtatagttttttttataccaccaaattttgctaatgcacaaaaaagcataaaaggtaagtctatggaggaatctcttaacaatgtagaagcagtaaaaatattagaagaaggttttcgtcgttttcaaaagcttcacttttgtaatcctgactcaccatataaaaaagaattgagtgaaggacaacaacctagagttctttttatttcttgtagtgactcaagggttgatcctgctattcttacagaagctaagcctggagatttatttgtagttcgtaatatatctaatttggtccctccatgtactaaagaggatggaagttatcatggtgtcacttctgcaatcgagtatgctgtagagcacttgcatgtagatacaattattattatgggacatgcaaaatgtggaggaattcatagtttattgttaccaggaagctatactggaaaaagtttcattgatagatggatgagtattgctaagcctgctaagatacttgctgagaagaaatttcctaatgctccttttgaagttagacaaaaagcatgtgaacagtttagtgttgtaaattctatgaataatattttgacattcccatgggttaaagaggctgtaaaaaaatcaaacctcaaagtttatggttggtattttgatattgtatcaggtgagttattacaatatgatcctataaagaaagagttttttgttttagttccttcttgctaa

SEQ ID NO: 9368 - DNA, 1359 bp, Lawsonia intracellularis
atgtctaacaaaagcaaaatagatcctattattactgtaaaacaactttgtaagtcatacccactatataccaaaaaacaggatcatcttcttgaactttttgatccttttagaaaacagcgtcatacactttttcatgcacttaattctatctcattttcaatttataaaaatgaaagtattggtataatgggtattaatggttcaggcaaatcaactcttttaaaactattaacaggtgtacttacaccctcttccggggaaatatccgtaaaaggaaaagtatctgctttactagaacttggtgcaggttttcatccggaaagaacaggtcttgaaaatatctattttcaaggagcacttcatggacaaacaaaacaagagatagactcttaccttgcagaaattatccagtttgctgatattggagagtatatccatcaacctgtaaaactttactcaagtggaatgtttatacgattagcatttgctactgctattcaaggtaacccagatatcttgattatagatgaagcattagctgtaggagatgtacgtttccaacgtttatgctttcaacgtattgaagaattaaaacaacaaggggtaactttcatttttgtttcacactctagcgatcaaattgtagcacactgtagtagagcattactacttggaaacggtcaactcattatggatggagaaccacgcaatgtagttaatcgctatatggatattttatttaatcgtaatgataaattaagcaacacaataaaagcaaatgttactctccctgagagcataagcaccgttacagaaaaaccaactgagcttactactaattatgacctaaaagataaagaaaaacttaacgacccttactcattacatccctggtataatccttatgaataccgatggggagatggtcgtgcaactatttcagatattcatattacctcatctggaaatataaataatgttcagcctggtgactacttatctattcaactaaaaacagtatttcacacatccattattagacctatttttgggtgtaccataaaaacacatgatggtattattgtatatggctcaaatacagagctaacaggttctgaaatattatatgaccatgtttctgctggatccataacatttgttacttttactatgcattgcaatttagcaccaggagactactttttctcatttggtgttgctgtaatggaaaaagatactgtacctcttgatagacggtatgactctcttcttttaactgtgcatggccctgcaaacttttttggtcttagtaatttaaatatgataattaggaattcagggattaagcatgtataa

SEQ ID NO: 9369 - DNA, 1875 bp, Lawsonia intracellularis
atgtataatgtcttatcacaactatataattatcaagctgaattgaatatttggcagtgtgacactccaaaaatatttaattattctgatggagatgaaatagaagataggttgtataccatactaaaacaagtggaagataaaagtatcctctctgatgaactacaaactttccaaaaagattgggccactacctatcatttatctgcctccagagccaacttattacgcccaattgaaaaaacattgttaaaagatgccactgtattagagttaggttgtggttgtggaggaataactcgctaccttgcagaaacatgtgcacatgtatgctctgtagaaggaagtcaacgtcgtgcatcaattactgcgttacgctgccaagacttaactaatataactatcatatctgactctatttatgatctgtctcctaaaattgggtcttttgatattgtaacacttattggtgtattagaatatgctcgtctttttggtggagaatatgcagaaactcgtctattaaaaaaagcttgctcttttcttaaaccaggtggtgctcttattattgctattgaaaacaaacttggactcaaatatattgcaggtattcctgaagaacatctaggaacatcatggactggtgttatggatggatatacttcagatggtatagttacattcaaccgtaaagaattagaagatcttcttatccaaactggcttttcacaactccaacagtttatccctttacctgactataaacttccaactactgttttacacccagaaggtattgtagcagaggaaaaagaatttcaacgtgcaccactaattgctgcttcctctagatcatttgaagaaaaacccctttttaatattcaacaagtttggaagggtatctgtaatactaatatgttagctaacatggctgactctctatgctttattgcatggaaaacttatgaatcagataaaactatacatagctggcccaaaaatattctagcttcacattatggaacattcattcaaaaacaatacgccaaagaaactcaatttattcgttcagatgatggtatacaagtattacgccgacacttaataccaggcttacaaaagcctaatgctatcttttcacaactattagaagaagaaccttacataaaaggagaactccttatagaaaaagtgagacagcttatggtaaaatataactggacaattgaacaaattgcagctgtattacaaccttggtttagttggctttgttcacaatgtattcctggtacaactgatttaccagccgaactacaagatatagcaccttttaatgttgtccttgataaagatggtgctatcaatcctatagatatagagtggacaagcatacaatctatccctttattaacaatgcttgtacgaacactatcatcaacattcatccgtataggtcaagttgctcctcctgcaactaatgtccctttgaagattattcccctacttcatcaaactatttgcatactatataaaccaatatcaatggactctattcatgcagcatgggaagatacagaaaataaagttacatgttatctaggagtagattgtccatgggaaactatgatccatgctgagttgtcagttattcctaatatgcccctctccatgattcaatcattaaagacagacctatgttctctctcagaagaaaataaaaatcttagagaagaactaacttcatgttataattcccgctcatggaagcttacaaaaccattacgtttttttagtaacaagttacacaattatcgtgcagttattaaaaatttttttacttttaacatgttactttttataattatcacatattag

SEQ ID NO: 9370 - DNA, 615 bp, Lawsonia intracellularis
atgccattatttacccgttcttactctactttttggctaactcttaatttagtttttttattactacctgcttgtggaactaaagaaaaatcacttcaatcaaatgaactcctctcacaacccatagaaagtcaagataataccacctcaaagacagaactacctaaaattagtcttatcaaacctacacaagggaaacatatttcttctgaatttggaatgcgtagtcatcccataaaaagaagacaacttctgcacaccgggatagatatatctggaaagcgaggggacaaaattatagcttcagctaatggaactgtcgttttctgtggacgtagaggctcatatggtcttacaattgatttagacattggaaatggtgtaatattacgatatgctcatcttgatagattacatgtcaaaaaaggtgtagaagtttatcaaggacaatgtattggaaaacttggaagaacaggtagagcaactgctcctcatttacattttgaagtccgtgtaaataatatccctgtagatcctatgcaatttattataccaacacaccactggacaaaaaaacctcaaccacccagtactacaacaaaaaaagaaatgtaa

SEQ ID NO: 9371 - DNA, 1104 bp, Lawsonia intracellularis
atgactcaaagcctccctgtattaatgtatcattatatatccaattatcctagctcaataagcgtatctcctcataattttgaaaaacattgtcaaggaatggcagaaaatggttggagaggaataactcttcaagaagctgaatctttttttctaaaaggagaaaaacttcctcctaaatctgtgctcattacatttgatgatggttttttagataactttgtctatgcatggccaatattaaaaaaatatgaacatagtggtgtcatttttactgttactgaacgtattctatctgaacaaattgttagacctacactttttgacgtctgggataaatctatttctaataaggttctttatgaacttgtagatatgcctataaaacaaacaaaacttggactcaaaaaaagacaagatgtatttctttcatgggaagaatgtcgtataatggaaaaaagtggtgtaattagcattggtgctcactctgcccatcacctttctgtttttgctaataacacatggaaagatatatatattccttcagatcagcatagaacattctataaaattgatgctcctatagtatggggaatgccatgttttaaagaaaaatctgccttacactgtaaggcatttattccttcgaataaacttactgaacttattacctatcatgtaccacaacaaaaacaacaagcctatgaatactttcaacaacctcataatataacaagcctgaaacaaaaaattcaaacactttcctctaactctcttggaagttttgaaacatggggacaacagcaaaaacgtcttatttcagactttgaacaatgtaaaaatactcttgaaaaagaactaggacataatgtgcaatcattctgttggccatggggtgaaagttcaattattgctcaacgtattgggaaaaattttggcttttcatatttttataaaacttctatgggagcaaatccatcaaaaaaatatacggctattaatcgttttaaagtcagaaataaaggatggaactggttacgttggcgattagaaatatattctcgtataatgcctgcaactgtgtatgcaaaaatacgtatctaa

SEQ ID NO: 9372 - DNA, 1041 bp, Lawsonia intracellularis
atgacacgaattctctcactattgagtataggcgcttggtttttacttttatggccttttccagttactacatttttagctacaagtatggcttgtgtttcatatccatattttcttaagcttactcagaaaatttctcgatattgggcaattgtaatttacactatatgtcttagcctattaattttattacctttaataataacgatatctcttattgtccctcaggctgtagcagggttaaaaattcttgaccaattacgtgaacctggttttttacagagtattaatgctgatcaaatgttagattctattgataggtggttaaaagaaattcctggtcttgaaggtggggttaaacagttggcaagcagcatagcaggtattgtagggtcagtaacaaggtctgtgttagctggtggtttaggaatcgcaggtggagcttttcatgcagtattaactatatttatatttattatggttactgtattatgtattacaaatgcagaattactttatactatgattcgtattacttctaatttttcttatgaagtacttaatcgatttattgtaacaataagaaatgctatttttggtgtattagtaggtatagttttagtttctataatacaaggatttctatgtggtattggctttgctgtggctaatgttccacagcctgctttttggggactcattacagcttttgtagcaccaatcccttttgtgggtacgtcattagtctggatacctgtatgtatttggctttggcttcaaggtgagactgtagctatggttgccatgattatttggtgtgttattgttgttgcaggcgttgataacttattaaggccgttttttttgaaaacaggtatagatgcaacacttattgctcttattttatctattttgtgtggtcttgcagcgtttggacctgttggaatagtagcaggacctattcttgtagcaatagctatacaggcatcaaaagaaagtttacaagcactacaaataacagatagaagttgtaataaatag

SEQ ID NO: 9373 - DNA, 3267 bp, Lawsonia intracellularis
ttgataggtactaacttagtatatttgttaataatacttatttttttttatccttcacctgttgtatcgcaaggttcaatagaattacctcctattgaggcctttattgcaaaatgggcgccttctggaggaagtgaattaggctcttcgcaatcttttttacttgaactttgtgatctccttgagatttcacgtcctgaatcacctagagctacacttgttgataacacatatctatttgaaatgcctgttattttaacagacaaaaatggaaaaataacaacaggaaggatcgacttgtacaaacgtggttgttttatttgggaaagtaaacaaggtagctataaatcaacatctcaaaataaaggtctccacagacgtggaacagctattagaggtacccatgcttgggatgctgctatgattgctgctcgaatccaagccgaaaggtatgcctatgctcttcctgctaaagaaggacatcctccatttatcattgttgctgatattggtcatacaatacaagtctatgctgattttaatgatacaggattctatgctccatatccatcagcaagagaaaacactatcctccttgaagatctaagaaagcctgaaatacgtgaacgtcttagaaagatttggacggatcctctttcattaaacccttcaagagaaaatgaaaaagttacctatcagcttgtgttaacattatctgacttagctcaatccttagaaaatgaaggacatgacccagatgttgtggcattatttattatgagactcattttcacattatttgctgaggattgtggcttactaccttttaattcttacacacaattattggctagacttgaaaagactccagaacaatttgcatcagctactacagacgtatggaaagctatgaagacaggaggaaactcaacagctttgggtaaacaagtagtatgcttccatggccatttatttgaagacgctgaggcattacctttaaataaagaacaattagctataatctataaagcagctaaagctaattggagtggcgttgaaacaagtatctttggtacattattagaacgtgccttatctccaaaagataggtacaagctaggtgcccattatacaccaacagcctatgttgaacgtttggttattccgacagtggttgatcctgttagagaagattgggaaaatgtaaaactcttagccttatctcatgttgtcaaagggagtcataaagaagccattcaagaaatagaagttttccataaacgattaagtgaaaccattgttcttgatccatcgtgtggaagtgggaattttttagctgtttctatgaatgtattaaaagatattgagggtgaggtagtacaatcccttaaagacttagggttatctgaaaatgagatacaaaagaaaggctactctataacaccaaaacagtttaaaggtattgagtataatcctcgtgctgcatttatatctgagcttgtggtatggataagttacttacaaagacattataaagtatatgggaatgtccaaccaccagaaccgattatggataacatccaattcatagaatgtagggacgctattcttacatgggattctatcaaaaaaggaaaagattcattaggaaatattcaagaaacatatataaatcctagaccagcagatccttggcctaaagcagactttattgttgggaatcctccttttatcggtaataatcgtataagatctgcactaggagacggctatgttgaagcattacgttctgcttatccaatgttaccaaagaatatagactatgtgatgtattggtggcatcgttcggcattgttacttagggagaacaaagtacgccaatttggatttataacaacaaacagtattaaaaatccgtctaatagaaaaatagttgagtcttatctagagaataagcctcaactatcaatagtgatggctatacctgatcatccttggactggagcaaaagatgctgctcgagttcgtattgctatgacaacctgctctttaggtgataaacaaggtatattatatacatccatacatgagaaacaacaagatggctttgtagaggttacttttaatagctcacaagggaaaatacatgctaatctttctgttgatgttgatactacaaaacttgtacctttaaaggctaataaaggcatagcatggtcaggtgtcagtattagaggaaaacactttattattacactagatgaggcaaaaaaattaggattaggaacaatcccagggttagaaaagtatattaaaccctatatgaaaggtagagatttagcagggatatcaaagaatacatatgtcatagatttatttggactaagtattaatgaagtccaacagaactatcctactatatatcaatggattgctactaaagtaaaacctattcgggaaaagaatagacttgcatttcgtaggaatcactggtggttatttggatcgcaaggaataggcttacgaaatgccattaataattttaaacaatatatagctactccaagaactgctggtaggaggtattttgcctttataaataaactagtagtacctgatgatagtctgactgttattgctagcgatgatccatatattttagggatactctcaagtaaattccatagcgtctggttgactgtcacagccacaagtcgaggtcttaaacctaatactaatgacgtatataataaaatctgttttgatacttttccatttcctcaagctacagaacagcaaaagaatcgtatccgttctattgccaacatgttagatacacaccgtaaagaaagacaaaaacaatatccttatttgacacttacacatatgtatgctattatggagaaggtacaacataatgttccattatcttctaaggagtcaaagataagccttcaaggagatatctataatttattaaggctccatacagaacttgatgaagctgtggctgaagcctatggatggccaaaggatattaaaactcatgaagcattatcacgattaatggagttatataacatacaagcagaagaagaaaaggctggaattatacattggctaatccctgagtatcaaaaacaatatgatggtttagtaagtataagtgactattctcagcttacatctatgactaaacaatttttacctttattcgatatgaatatagaaaaacatataataaaaggaaatcaatatacaaattga

SEQ ID NO: 9374 - DNA, 405 bp, Lawsonia intracellularis
atgggagcattacctaatcccctccgaccatcaattggtattcaacttgctccaccactagttgcttgtgaagcatatctttttgtgaatggaggacatacagatatattttctcaaattttgtttggatatggtttattacagctgatctttttactatggctattattgtggacttttgaacaacctttttctgtatctttttgggcgttttcatttggtgtttcagctctttctgtttcatctttgcatttttttatagagaatcctgaaagtgtcgttgggcaaatggcaataccaatttttattttttctaatggtgtcattgcacttttgattcttgggacattgttacgtataattcagggtaaatttttattgtctacaccagtagcatcaaagtaa

SEQ ID NO: 9375 - DNA, 399 bp, Lawsonia intracellularis
ataaaggaagttattatgctagaacctttttctccaataaagacatttcctattccagcagcatatttgggtatggttcttggtatttcaggtatgggaacagcatggcgtatagctgcaaaaatatggcagatatccactttgtggggagaatgtctaatgttacttgcaggggttgtctggttagtattagctataatatatattactaaatggatttggtatcgtccagcagcattggcagaagtgaatgatcctatccaatgttgttatattagtttatttccagctacaactatgttaataggtgcagggatatatccgtattttcatacagtagcgctgtggtttgtagtcgttgggactataggacagttaggttttgctgcatatcgtagt

SEQ ID NO: 9376 - DNA, 2751 bp, Lawsonia intracellularis
atggaacatccagaggtggccttctcacttgcagctatgcaagttattcgtcgtaatggcgatattgtatccttcaaatctgaaaaaatagcagctgcattaacaaaagcatttattgcagttaaaggtgaacaaagtccattatcttctagccttcgtgatgtagttacacatctgactgaaactgttattagtgcactcacacatcgctttccagatggaggctctatacatattgaagatatacaagatcaagtagaacgtgccctaatgcagtctggagaacacgatgtagcacgagcttatgttttgtatagagaaaaacgtgcagctatgcgtaatacatcagaaaaaaaagctgtattgcatctagtagataaaggcgagaaaaaagttctagaccacacatggttaatgaatatatgccatgtagcttgcaaaaatctaaccagtgtttcttcaatctctatatttaataatacattaaaaagtttatatgatggtatgtctctagcagatgtatatagctctctaatcctctctgcacgcacaatgattgagtatgaaccagaatataataaagtaaccgcaagattgttacgccttagcttagcatatgaagttcttgatcaatccacagaattaatggatttacatcaacttaagatagcaacaatctcatatttccctaaattcattgagcttggaataaatgctggtttattagatcctcgcctttctacatttaactattcttatcttgctcaagcattagtcccggaacgtgacgaactttttggatatataggaattcaaactctttatgatcgatattttctacatatcaaaaaacgtcgtatagaactcccacaactcttttttatgcgtgtagctatgggactagctttaaatgaaaaaaagaaagaagataaagcaatcgagttttataatttactatcaaactttgattttatgtcttcaacaccaacactctttaatagcggaactatacgcccacagctttcctcatgttttcttacaactatcaatgatgacttagaaaatatctttcaatctataaaagaaaatgcattactacaaaaatatgctggtggaatcggaaatgattggacacctgtaagagctttaggcagtcctataaaaggaacaaatggccaaagccaaggggttattcccttcatgaaggttgctaatgatacagccttagctgtaaatcaaggaggtaagcgtaaaggagctgtatgtgcttacttagaaacttggcatttagatatagaagattttcttgatttacgtaaaaatacaggagatgatcgacgacgtactcatgatatgaatactgctaattgggtaccagatctcttcatgaaacgagtcctagaaaatagtgattggacgcttttttctcctaatgatgttccagaattacatgaaaagtttgggttggaatttgaaaaattttatactcattatgaagcaaaaacccttactggtgaaataacattatttaaaaaagtctctgcagtacaactatggcgtaagatgttaactatgttgtttgaaacaggacatccatggattacattcaaggatgcctgtaatcttcgttcgccacagcaacatataggggttatccatagctctaatttgtgtacggagattaccctaaatacatctaaagaagaaattgctgtatgcaacctaggatcaattaacttatcatctcatttaattaatggagaagttgatcaaaacaaactatcacaaacgatcgccactgctctacgaatgttagataatgttattgatataaattactacaattctcctaaagcctcctatgccaatcttcaacatcgccctattggtataggaattatgggatttgctgactgtctatataaactaggtataccttatgcttctcatcaagctgttgagtttgcagatcgatctatggaaatagtttgttattacacatattgggcatctacagagttagcaaaagaacgtggtgcatatagcacattccctggaagtctatgggatcgtaaaattttacctcttgactctctggatcttctccttaaagaacgaggtggatttcttgaggttgatcggtcttcacggttagattgggatgctctaaaggatcgtatagctaaatatggtatgagaaactccaactgtgtctctcttgcgccaacagctacaatttcaaacattataggtgtatcacaaggtattgaaccagcatatcaaaacctttatgttaaatcaaatatgtctggagaatttaccattgtaaacgaatacttagttaatgatctaaagaaacttaacctctgggatgaagcaatggtagctgatttaaaatattttgatggatctgtggcttatattgatcgagttccagactcactgaaaaaactctatgccactgcttttgaaattgatcctgtatggttaattgaagctgcatctcgaagacaaaaatggattgatcaagctcaatctctaaacttatacctagatactccttctgggaaaaaaatggatgaaatatacaaacttgcttggttacgaggattaaaaacaacttactatttacgttcattaggagctagtcaagttgaaaaagtaggaacaaactcgcaatctgtattaaagaaagatacagtcttacgagcatgctctattgatgatcccgaatgtgaggcctgtcaatga

SEQ ID NO: 9377 - DNA, 1002 bp, Lawsonia intracellularis
atgcctgttaatgcctctgacaaacgtatcgttaatgggaaaacggatattaaccaacttcttccatttagatatccatgggcttgggatttctttcttaaagctaaccaaaaccattggactccacttgaaattagtatgtcacaagacgtttatgactataatcatacacttacaacaaatgaacgtcatgtttttgacaatgtcttagcttatttaacgacatctgacattcttgctatgcgtaatattggattagctgttatggaaaaaatgactgctccagaattacagatataccaagcacgacaagtttatgaagaagctttacatacctggacataccaacattgtattgaaagtttagggctagaacaatcagaaatatataaccgctatagagtagttccagaaatttatgggaaaatacttctatccaataaaagattagaacaagttttacgttctgatataaatttatcagataaagataatttacatgaattcataatgtcttacatcttttttgcagctattttcgaaggatgctggttttataatggattttctcctattttctctttacagcgtagaggattaatgaaaggaactgctgaacaatttcaatatatcctacgagatgaagttttacactgtacatttggtataactgttataaaaggattaatagaagaagaaaacataacacttgatcctacggctgtacgccagttatgggacgaagttgaagcagcagaaatagcttatgctaattatattttacatgaacctattattgggtataatgcagatttacatataggacaatttcgctttattgctaatcgtagatctcgacaattaggtatgaaagaaccattccctggagcaaaaaatgtattaccatggttagatgagcagtcaaatcttagaaaagaaaaaaacttttttgaaacacgggttactgagtatcaaactggtggtggactaaaatgggattaa

SEQ ID NO: 9378 - DNA, 1149 bp, Lawsonia intracellularis
atgcttgttatgccaggtttaattaatgcacatacacatgttgctatgacattttttcgtggattagcagatgatttacctcttatggagtggttaaaatcatatatctttcctatagaacgtcatttaactccggaaactgtacgctggagtagtttattaggatatgctgaaatgttgcggacaggcacaacagcttgtttagatatgtacttttttgaagatgttgtttttgaagctgcaatcaaagcaggaattcgatgtacaggtggagagagcatttttgtttttccgtcagtttcatgtgatacagcaaagacagctttagagcatactaagaaaatggcagaactctattctgataatacacgtataaatgttgtagtaaatcctcactctgtctatacaacaacgcctcaagtattatcacaatgtattgaagttgctgaagagtgtagtttacctttacatatccatctttcagaaacaactacagaaacacaaatatgtttgcaaaaatatggattacgtcctgtttcttattgtcgtgacttaggaatactcactccacgtacgacattagctcatgttgtagatgttaatcttgaagagttaacttgtcttgctgaacatggatgtgtgatttctcacaatccttcttctaatatgaagcttgcttcaggtgtatctcccatccctgaaatgataaaacgtaatctttctgtaggccttggtacagatggggctgctagtaataattgtcttaatatgtttatggagatgggacgttgcgcactactacacaaagtctattggaataatccaacagctctttttgcacaaactgttctagatatggctacattaggtggtgctgcagctatacatcaacctaaattaggtgtccttgcacctggacatcctgcagatcttattgctttagacatgagtatgcctaatcttcaaccaatgtttaacccaatttctcatcttatttatgctactacaggaatggaagtttttcttactatggttgaaggtgaaattttatattataatggtacattcacacgctttgattatgatagcttatctaatgagatgaaaaaagtgagccattgggtaaaagaaaagttacaattgttgtaa

SEQ ID NO: 9379 - DNA, 1437 bp, Lawsonia intracellularis
atgaattttgttacacttgaattttgtatcttttttcctattgtactattcatactatacctctcttgttaccatcttggaatatataaaggagcacttcttgctggtaatatattcttctatgcttatgcaggattaacctttttacctcttctttttactgttattattcttaactggtgtactggcaaatttcttttttcttctaaaacaacttgttccaaaaaaattatcattactatcaatataattctccacattctcatacttgcttttttcaagtattatgaatttattatcctgtctcttgagtcaatcttttcactgggaagatcaatacctattaccttacctatgatagatattttctttcctgtaggattatcattttatacatttcaaggtctttcttactctatcgatcaataccgtaatccaacgtcccacccagaatcttttattaatgtgagtctttttatatcttttttccctacaatattagctggtcctattatgagagggcatcaatttttcccccagctaggaaagtgtaactatatatcagatgaacttataacaggctttgctttaattcttagcggtctttttaaaaaagtagttcttgcaagctatctgtcagagcacattgtccgtgatgtatttcaatcaccaggcatctattcttcatggacaattcttacagctgtctatggttactccatccaaattttttgtgacttttcaggatattcagatttagctattggaattggagcacttatgggttatcgtattcctcaaaattttaatgcaccatacctagcgtacaatttacaaattttttggcatcgttggcatataacactctcacagtggctaaaagactatctttatatcccactaggtggaaataaaaaaggaaatcgttacattaaccttatcatcacaatgtttattggcggtctttggcatggttcccatcttcgttttcttatttggggatttttacatggcattggacttgctttagtccattttataaaaactgtatgtgcttcacagacaaatgttcaatacctacttaacattccctttataaaaacaatacactatattattagttgggctcttacattccattttgtgtcttttctttggatattttttcgagctgaagatgtcccttgtgctttggaaattataaaacgtattattatttttggacaagaaggagagggttttccaattcttgttattcctgtcattttaacaggcttattaatacaggttgttggtccttatattttaactagctttactaaattccaaaaacgactgcattggattatccagacttttgttcttgctttcattgcaggtattattcttaaaatgggacctgatggcattatgccttttatttacttccaattctaa

SEQ ID NO: 9380 - DNA, 1962 bp, Lawsonia intracellularis
atggttaaacaaaaaaagattacatcaacacaattaacaccatcacgtagtattattatctacattgttactctatttattctgttattgttagatacaggacgagtaattccaatactaaaccgtcttagcagtgacttcccttcaataagtattgctgctcaatttattcaaaaaacagctgagatatcaaaactaacagaactttcagcatttgaatcaacgattataaaacaagtttctttaaatacagtcataggagaaatccctgttcataactcatatcctcaacaagagaaaggagaagaggatacttctcactcacaccctgaaaagtttgaagaagcatgtaagatgcaacaagatgctgtaatggatcatacagaacctcatctaacaaatgaactttctccaccattaacttctactccaaacttagaaggcaataagtcagaaacattatctacatcacctataaatactatagatcagtctatccctactaataataacaatacaatacttatcataggcgactctatgataaatgaaggacttggaccagttctacaaaaaacgttacataatcagtacccatttaaagttatccgtgaaggaaaatattcaactggactttcacgaccagattattttaattggccagaacgtctgacttttttagtaaacaaacatcaccctaaactcattattctctgtttaggtgcaaacgatgctcaagatatttttgatgataaaaatcatagataccatcctggcagtcaagaatggaaaaaaatttataccaatagagcaaaacatcttttaaacatagcaacatcacaaggagcttatgtaatttgggctggattaccaattatgggtaaagtaccatatgcaacacgcatacagtatgtaagtgaatgtcaaaaaaaagcttgtgatgagacagtaaatacacaatttatagatacacagtctgttttagctactcctcagggcaagtatactacatacacgcaagagtcaaacaaacatattcgactaagagctaaagacaaaattcatgtaacagaagcaggaggtagacttcttatgaatcacctcatgccatatataaaacaatctttggagactataacagtaaataatacaaaagataataaacaagatctttatacctcaaatgcagagaacgatatagttatttatattccttcatcaattcagcaagcatctataccatgctcagtatttattcctcaaaacaaaagtcaagaaaaataccctgtattactgctattacatggtgtaggatgtacaaatgaaatttggaaacaaatgactggagatctcctgcaacaacttgcaacttttcatagtattgtcattattgcaccagatggaggtaaaaatagttggtatgtagatagccctcttattcaaacaagtcaaattgagtcatttattataaatgaacttaaaccaacaatgcttgaacagctacctattatagataaatggagtatagcaggaatctctatgggtggtcatggtgctattactcttgggctacgtcaccctatgttatatacttcaatgagtgctattaatggtgtccttaaccttatggtacatcctcatgaatgggggataaaaaatgttctaggtgaactatctgattctcaacaactatgggaatcatattcagcatatcatcttattgataatatctcaaaagaagatgtcccaccaatgctaattagcattaatctaactgaccctgcattagatgaaaatcgatgttttttccataaagctactaaattaaatcttcctatacaatatagtgaaacatctagtgatcaatattgggattactgtctttatcaactccctattcatataggttttcatgcaaagaaattacatcatcataatgaattatcgcaaaataatgattag

SEQ ID NO: 9381 - DNA, 378 bp, Lawsonia intracellularis
atgattaaagataaaaagctagtcattgttattccttcagagtttcctggtggactagctgcacgattaagtccacattttgcttactgtgaaacatatacactcactactattaagaataatgtagttttacatgtcacaactagacctaatatcattcaagaaagtaatgtaaaaagagcaatacaaaatattgctgagctacagactaatatacttattgttcgaggcataggtcttcacccacttgctatactacaacaaaaaggtattaaaatttattactctaaaaacttacccacagtttctactgttctttcatcctttctacaaggaatgcttataccctacaatcaaagccctcatacctcttcataa

SEQ ID NO: 9382 - DNA, 849 bp, Lawsonia intracellularis
atgtatattattattggatactttattgttattgcttccattattggaggctaccttatggctaaagggaatcttgctttactctttcaacctgcagaacttgttatcattattggggcagcattaggtgctttttttgcttcacagacgaaatattcatttactctggtcattaaaaatttatcacacatttttggcgatccaaacagtacaaaaataaaataccttgaaacacttgcccttctctatggacttttcttaaaaatgaatagagaaggtgtcattagtatagaaagtgatatagaaaaacctgaatcaagtcctatctttagtaaataccctacaattgtaaaagatactaaagttgttgcctttattgcagatacattacgagtttatctgacaacaggtgcaccagaagatatagataacctcatggaatctgacatgaaaattacacacgaagaagaattattacctgcacattccatcagccatatggcagagtcgctaccaggaatgggtattgttgctgcagtattaggtgttgttattaccatgggaaaaattaatgagcctccagaagtccttgggcattatattggagcagctttggttggtacatttataggtattcttttctgttatggtttttttggacctatgggttcaaagcttgaaacctctgcagaagaagcacatttttattataattccattaaagaagctgttgcagctgctatccgaggttctacaccaatgatagcagtagaatatggaagacgtgccatacctaatacatttcgtccatcattttcggaaatggaagaacgtctaaaaacaggataa

SEQ ID NO: 9383 - DNA, 714 bp, Lawsonia intracellularis
atgtctggctcatggaaagtggcttatgcagactttgttacagctatgatggctttctttctactgatgtggattcttgcaatgacaccccctgaggttaaagaaggtcttgctgcatatttttcttcatctgatgctacatttaaaacacctgatagttcgccaatctctaacaatcctcttatcaaccaaatagataaacttgatactcgacaattaaaaattaatgaaacagaacaatctcattatgctcttgctaataaattaaaaaaaatgttaatggctgatgctatcccacagtcagcaacaggaataagtgctgacgatgttggtgtattattacgtgtaaattctaattccacgtttcttcctggtacagcaactcttacacccgaagggaaaaaagttatgggaactgtcttagccgttctccgtgaatataatctttaccttgtgatacgtggccatgctgatattggtgaaataacaaaaggcagcccttttgcttctaactgggaactttcaggagctcgtgcagctgcagctgcacagtatcttgtagagcacgggataaaggcttcacgaattcgctctgtaggatatgcagatacaagacctctagaacctagttctcctgaaggaagtacaaaaaatcgtcgtatagaattctattttcatcggccagaagttatgtcttatggcgttgtatattaa

SEQ ID NO: 9384 - DNA, 1707 bp, Lawsonia intracellularis
atgtcgtttttgtgggaaaaagcatttagccagggagcgtttccatggaaagatgttgattgtttttcttgcaagattgatattgataatcttgagacatttaagcattaccttgattttgtacaaataaaattttgcctgttaaaagagtggagcacacagccacaatatcctttaattgaacatagagaattattaccttcttttgaagcagaacttttagaatataaagagttaccaggattttcgatggtagcctttgcccgtcctcttgaaagttttaatgaaattttccaatatgatattttacattcatgtgatccattaaattctatccctggaaaagaggaaaaagaagcagagttaaagtgtattgctcataatatacagacatttttaactcggttacctaaaaacaatcaagatgcttttaaacaacgctttcaacatgtagacatatcttctttggattattatccagcaatccttccatacttatgtcatatggatcgagctcatgtatttgctacagatccactaggatactattatcttgctggaatatttgggtcattcccttcagatatagatggtgaaataaaacgatatggccttaaaattcgtaagtttcagcttggtaataacagcctttatgagcaaaacagactatttgtatatcagtttttgatggaactttatggctttcctgttgcttctgagcgtagaacatcagctgctttattctctcgccgtcttcataaaatgggtgaacattttatggttagagtgttaggtcaatctgatagagtaataacaacaatatggaataatggaggtaacagattataccccagagttgaaaaggttgcgcttattcgtgttgagcctggtcagaaagaagttatagaacgtctttcaaagggaagttattttgttgatccaaagaattatattgccattattcgtatcaaatataaacaacatcgctataatcatgataatgttaggcaagagcgtgcactttctgttgagagtcaagaaattattcatcctttaacaggtgaaatattagaagatgttaatattataaaagatactagcacaattattttgcacttaaatgatattgtccgtggtgaatatgttggacgtatagtttataaacgtaatgagttgatagaaaacacagaaacagaagaaaaacgacttaaatttttatttgcatggctttcaaaaaatcaacgacgacttgttagctatagtgatgaattctttacttcaatggtaaaaattttagaaggttatcttcatgcaccaaaccataaagatttatttgaagaatatggtgacctttaccatgaggtaatgaataaatatgcgtatattcgccaagcacgtatggtcaaacatctagaagatattatgtcacgaaatgttaaaggagtgagaattagttataataaaatgttgttagaagctgtaaaaattttaagagaattaaagtttgagcttgtaacatattttgatcaaattacagctactgttattcaccatatagaaacaatattagatgatagatacttaagacgtacttatattgagaatccaaaaaaagaattgacacctgcaggatatgaaatacgaaaaaattatggaaggttagttagtcttcatgacacatttatttcaatccagtcttcacgttag

SEQ ID NO: 9385 - DNA, 1155 bp, Lawsonia intracellularis
ttgataaaatataaagtgcttttttttagtatatctttattagttgttatgggagtgactattcctttacctgtattgcctgctattgctcaacgttttatgttaactacagagcaagttagttgggttacagttgcttatacatctcctggtatcattatggctcttattgcaggagttttagcagatagacttggaaggaaagctgttttagtccctggtgtccttctttttggaataggtgggttattatgtgccttttctcttaattttactatgctaattatatttcgtgttattcagggcatgggagggggcgttattggagtattatatgctaccttgccagctgatatgtatcataaagaagatcttccaaaaattatgggccaaatttcagctgtagcaagtattggtattgctattttccctactgtaggtgggcttttaggcgaaattgtttggcatgctccgttttgggtaagtatccttgcttttcctgttgcttggcttagtttttaccttcccctagttaaaggaagtagctcagttaagtggaaaaagtattttatagatacaaaggagattatcactaaccagaaagcattaatattatttagtttaacttttttatcttattgtatttattacggccctgtgaatacatatttccctatgatggcacatatacgtttttatgtatcacctgcagaaataggaaatatttttattatacttgctataggtattggaatgagtgcttttagtttaggatggttgaataatcatgttcagtttaatatattactacttatggcaggttttgggtattttttggctcaattttcatttattataatgccaagtatgaagtggatgatcgtccctttaatttttgaaggtcttgctcagggtattactttaccaattgttgctgaacgcattgctattttagcgcctacaaataatagagctgcagttatggctgtaaatggaagcatattcagatttagtcaaagtgtatcacctttaatctttgggttagcttggacactttggggatggcatggaccttacatcttaggggtactattttctatccttataatatctattgtactctttattgtaagaaagaagtttaatactatttga

SEQ ID NO: 9386 - DNA, 753 bp, Lawsonia intracellularis
atggatatagctacgttactagggattgtatttggttttacccttgtgctggttgctatttttataggtcctgtaccaggaaaatttattcatgttcctagtatgattattgtttttggtggagtaagcgcatcaattttaatatcttttccgtttgaagatgttcgtcaagccatttctgcaggagtcaaagctttctcttcaaaaaaaacaaaagcttctgacgtagtaacaacaatggtcaaaattgccgaaattagtcgtagggaaggaacacttgctcttgaacgtattcaaacagataatccacttttaaaaaaagcaacacaactcattgcagataatgcagacccctctctaatccatgacacagtagctatagaaattgcatcattaaaacgaagacataaagttggcattaatgtattccaaaaattaggctatcttgggctagcatttggaatgataggaacacttattgggcttgtacaaatgttagcaacaatgaatgatccttcagaattaggagaaggtatggctgtagctatattaactacattttatggatctattatagcaaatcttgtttttatccctattgctgacaaacttaaagcaaaatctctacaagaagaacttattctatttattatttttgaaggtgctaaatctattttagagaataataatcctaaacttgtttatgaaaaactttcatcttttttaccaccaaaggagagaattcgtgcttga

SEQ ID NO: 9387 - DNA, 621 bp, Lawsonia intracellularis
atgtctagccttgataaagaaaaatttgatagctcctttagtgcaattagagatacctttggtggagatcaacaaaaaaacattacaactaaacaaactataaaagagtcagaagtagcagacttcttaaaacttcgtgaagaaatgattgctgctcaaaaaaatacatttgatgctattagaagcttcattacagagcatgccctaggagataacataaaggctactttcgacaatgggatcattacattaaggttgcctgatgaagttctatttgcacctggctcagagcaacttacacctcaaggagaaaaggctttatcgcagcttcgtgatctatttcttaagaatcgtgagcaatctattaatattaaaggatatacagataattcgtctgtatctgaaggtgcacgctttcacaataactgggaattatcagcgcttagggcggttaatgtccttaggaagcttctccaaggggggattgaagcaacacggatgaccgctacaggtcttggtgaccttgatcctcttgcaccaaatgatactcctgaaaatagagcacaaaatagacgtgtagaatttacccttgaaagaaaagtaaccaatcctttacaataa

SEQ ID NO: 9388 - DNA, 1419 bp, Lawsonia intracellularis
gtgaaaaaaataagacataaagtcctaattgctaaccgaggcgagatagcagtacgtattgctcaagcatgtcgtaaactaggacttgattttgtttgtgtctatacagctgaagatttagcatctggtcatgtattgatggctaaagagtttggtacttctcaatcattatacaaaattgcttcttatcatgatgcaaacgaaattttatcaatagcagatgagtcaggagcaacggctattcacccaggatatggtttttttgctgaagattttcgttttgcccgccgagttacaactcgtactcgaaatcttattttcataggaccatcatggagagtcatccgtgaacttggagacaaaattaatacaaaacgtcttgcaagaagtttaaaagttccaactgttccaggctcagacaaaccaatttatgatgaaatggaagcagaaaaaatcgcaaggattttatatagcttccaagtacaacaaggcattcaacgacccttagtccttgtaaaggcctctgcaggcggaggtgggatgggtattgaagaagtctatgatatagaccaatttcgtgcggtatatcgtcgtatccgtaattatgcactacgacagtttaaagatgaaggtgtcttaattgaacaacgaatttgtaattttagtcatcttgaagtgcaaattattgccgatcaatctggcaaaaaacctgtacactttggaacaagaaattgtacaattcaatctactggattacaaaaacgtatagaagtagctccaggattttatccacaaacaataaaatacaactttaatgctgcaaaagttcttgaagacattacaaactattctcttaccatggcacaaaaagtaggctataataatgttggaacttgggaatggattgtaacacacaaagggaatccatttctaatggaagtcaatacacgtatccaagtcgaaaatggtgtttcagcacgtattgctagaattcatgggaaagacggtgttgaccttatcgcagagcaaattcgtatagctcttggcgaacctttaggatatactcaaaatgatatatcatttgaaggagttggaattgaatatcgacttattgctgaagatcctgactgtaaatttacaccatgggtaggttgtattgatactttttcatggaaagatcaaccatggcttaccatgcatactcatgttcctacaaacaaaccttatgaaattcctgtagaatttgatcctaaccttgctttagctattatttggggaaaagatcttgctgaagcccaacaacgtggcctgaaatttcttaaccaactatcattaaaagggaaaaatcaacagggagagacattaaagtcaaacatacaattccttaaatcaaatacagaacgtatcctccaattttaa

SEQ ID NO: 9389 - DNA, 2247 bp, Lawsonia intracellularis
atggatatagaaaaacaaatatatcatcttactgaacgccttaattatctaaaagatatttttgcagggaagcacgctaaagttattgaattattacaaggccggctagcaacttttaccaatcgtaccaatggagaaactcaacaagacccaagtgcagaaattggaacccttgaagagctattcacttttatggaacataagcttgaaacaaagcttacccctatggataaagtgcgtattgttcgtcatcctcaacgaatttgccttcatgatattttagaaaatgtatatgataacttcacagaaatagctggtcaacaagaacatagtattgatccaagtatgttgattgcacgtgctactatcactcgtcgtaggggaaaaaagacatataaccaatttattatggtcataggtcaagaaaaagggcatggagaagagtttcgtaatggtggatcagtaaaaccatggggtaactctaaggctttacattatatgaaagttgcagaaactgaaggtatcccaatccatacatatgttttcactccaggctcataccccattgaagataccccaggtgcagcacaacaaattgcaaaaaacctttatgaaatggcagatctttctgtccctattatttctattatctctgaaggaggatctggaggagcagaagcaattgcacttgctgataaacgacttatgctttcacatggatattattctgttatttctcctgaaggagctgcagctattgaaggcaaattaaaaccaggtgaacgtgctacaccagaacttattgaattttgtgctaatcaacttcatatgacagcaaaagataatttatcgtttggctttattgatggagtgatacaagagccagatttaggagcacgacctcatcattatgacttttttcgaaaactccgccaagaagtcattcgtgctacagatgaagtagtccttggtgtaagaggccttgggttattccgtagaatagctcttaataggctgggaaaagaggacattaatatagatgaaatgtatgtaggttggaatttaaatctcaaatcttgtgctcgccttgtttctaaacgtcaaaagaaatttataactttatcaaaaaactcatgccttgatcaacgtccattttttaataaatttcataacttattaaatgactctataggaacacttgtctcaaaaacacgttacttcttctatacaaaatgccaacgtaaaattagatttgtctttgatgaaattacttctgaactccacttagttaaaagtcgtttaacagccccactttgtagaataaggcctcccaaacgtcaaatagaagaagctgtagttcaccagctaacaactctctctgattgggatgatacagaatctcgaaagggtagatggtcatatattagtccacgagctacagaagatcgttctatctcttgccctaatgcagcaacacatggatgttttgatctttgggctccagatctctttggtgaatttgcaggagtatgtacatcatgcggtcatcactttcctatggaatatcaatgggttgctaaaaatatttttgatgaaaattctatacgagaattcaatacagaaatagaagctatcaacccgttaaaatttacaaaatttgatgaaaaactaatagaagcccgtaaaaaaacaaaactaaaaagcggctgtattacctttgaagctactattcatggaataaaaacaattgttgctatttttgttggcagtttcagaggaggttctgttggagctgcagaaggaacaaaatttgttaaagcaataaaccgtgcaacaaaaaaacgttatccttttttagcctatgtacatggaactgcagggattcgtattcaagaaggaacacatggtcttgcacaaatgcctcgttgtacagtagcagtccgtcgctatatcaatgctggaggactttacatagttttatatgatacaaactcttacgcaggacctgttgcaagttttcttggttgttccccatatcaatatgctattcgatcctcaaatattggatttgcagggagaggtgtcatcaaagaaaccacaggcatggatattcctccagactatcacaatgcttataaagcattagctcgtggacatatccaaggtgtatgggatcgacgtgaagcacaagcgaatcttaaacaactattacttactgttggtggacgtaatctttattatagataa

SEQ ID NO: 9390 - DNA, 651 bp, Lawsonia intracellularis
atgttggacatcacaaccttacttgaacatattaaaaaatctccatatgaagaagtcactatctcttcccctcatacagggatagtgacatttaatactcttaatattggtgataaagtaaatggtccttctggaacttggaaagaaaaatcaggtacccttttagctacacttacaagggaaagaaactctaaacctatttacagtcaacaaaaaggatatgttgctacaattcataaagaacttgaaggaacatttgtacaagcaaaaacaccacttttagttatccgacactttctgtcaaaagatgaagtacttcaattgattcttcagaaagctcttcatattttttcagcaccagaacgtgcaaaatattactttacccaacaagttgatgcaaaaattagaacagctggttgcaaatccgttatggtatacgatggaatggagctttttattgtttcacgaatgaaaagagaaaccccactccattactctggaccagaaggaatcatctatgctacatactttcaacataatgaaaatgtaaacgtaggaagccctcttattggtatttgtccacaaaatcaacttcaacaaattgaagatgttattctgaaagtacaaacggaatggcaagaacaagagtaa

SEQ ID NO: 9391 - DNA, 345 bp, Lawsonia intracellularis
atgggtaaaattcttcaaatacgtgtttcggcttggacttatagggaagaagatgttgccataacatggcctaaccttacagaacttacatggcccactccaccataccatggagaaaaaagaggggttttagaacttgttgactcattagaaaatcaactttcttttggagattggcctacaacaatcaaaaatactcttcatcaagggattcagaatcttgtccaaactaaaaaaaagttagaattagcactagcagactggaaacctaaagaagcaaatgatctaagtaatatattagaagatcaattaacagaacttaatcaaaaagttttacttccttaa

SEQ ID NO: 9392 - DNA, 456 bp, Lawsonia intracellularis
atgttaaataaagttatgattattggaagacttggaagagatccagaaattcggtatactcaaacaggaagccctgtatgtagtcttaatattgcaacagatgaatcttatactgatcgagatggaaataaagttgaacggacagaatggcatagagtttctgtatttcaacgtgcagctgaaaattgtggtcaatatctgagtaaaggaagcttagtttttgttgaaggtaatcttcaaacaagaaagtggcaagaccaacaagggcaagatcgctatacaacagagataaaagctcaacgtgttcaatttttagatagaaaaggagcagacttaggacaaggactatatcaacaagaacaacctgtaagtagtactaatacacaacaaaatggatttgaagatataagcccattcccttctgaagctagtggtatggatgatgtacctttttaa

SEQ ID NO: 9393 - DNA, 1698 bp, Lawsonia intracellularis
atgaagaaagaagatatttcccataacgttataatagggaaagattttttacgtgctcgtattattcaagatatagaatcaggacgttttgataagcgtgtccacacacgatttcctcctgaacctaatggttatcttcacattggtcatgctaaatctatctgtcttaattttggtattgctaaggagttttctgggcaatgtaatttacgttttgatgatacaaatcctataaaagaagaggtagagtatgtagattctattcgtgaggacgtaaaatggcttggtggtgattggcaaaatagagagttttatgcttctgattattttgaaacattatatagcttagcagagcagctcatttctttaggtaaagcatatgtagatagtcagtccgctgatgaaattcgagaaactcgtggaacacttacgactccaggtattgaaagtccttatcgtaatcggagtgttgaggaaaatcttgatttattccgtcgaatgcgtgccggagagtttcctgatggtttacatgttttgagagcaaaaattgatatgtcttcacctaatattgttatgagagatcctacattataccgtattaggcatgctgaacaccatcgtacaggtaatgattggtgtatatatcctatgtatgattttacacattgtatttcagattcacttgaaaacattacacattctatctgtacattagagtttgagaataacagagagttgtatgattggatccttaccacactaaatatgtatcatcctcaacaaatagagtttgctaggttaggattaacatataatgtgctatctaaacgtaaacttattcagcttgtccatgaaggacatgttgatgggtgggatgatccaagaatgcctacaatttctggtttacgtcgaaggggttatactccagaatctatacaaaatttttgtagccgtattggtgttgccaggtctgaaaatcttgttgagtatagcttattagaattttgtgttcgagagcatttaaatgcaacatctccccgtgtaatgggtgtgttaaatccattgaaggttgttattgaaaattatcctgatgacaaaatagagtggatagatatgccatatagttcagataatacaattcctggtagtaggaaagtaccctttacacgagaattgtatattgaacaagatgactttcgtgaggatcctcctagtaagttttatagactttatcctggaggagaagtacgtttaagatatacttattatattacatgtacagaagttatcaaagatagtgaaggtaaagtaattgaacttcgttgtacatatgatccaaactcaaaagaagttgaaaaaactgataagaaaaaagtaaaaggaaagattcattgggtttctgcttctcattctataccagttgaagttaggctttatgaacatctgtttacacttgctgatccttctacagcttcagaaggaactcacattagtgaacttataaatcctgattctaaacaaatagtaacaggttttgttgagccttcattaaagggtagtaagccaggagaaaaggttcaatttgagcgggttggatatttttgtgtagatccagatacacaaggagatagacttgtttttaataggactgtgacactaaaagattcatgggcaaaaattgaaaaaaaagatacttaa

SEQ ID NO: 9394 - DNA, 378 bp, Lawsonia intracellularis
atgaagaaatggatggtaatatgttttttggtatggtttgtgtctcctgtaatggcaggaagccgttttgatgacattgatctaaataaagatggctacatttcttgggaagaatttcaaacagtatttccaaatcttaaaaaagttgcttttgatgcaattgacacaaataaagatggtaaaatttctcgtgaagaatgggaacgtttccaaaaatcacatgaacaaaatgtgcaaagtgaagaaggaaaaaaggaaatggataatgtgaagatgcatcaaagatctcctgaggagttaacagattctgaacaacctaagactacaagtacaaagtctcatatgaagcctttagttcaaccaccagtaactaaatag

SEQ ID NO: 9395 - DNA, 1137 bp, Lawsonia intracellularis
atgaaaatacaatattcttctatatcaaaatcatcccttagaagagtacttcatgttactccatcactatctttaggtggtacagaaaaaacagcacaactttttgccacttatttaaataaaaaatatttcaatgttgctgtttggagtccttcaagcggcccacgtgctgacattcttaaaaatgcaggtatacctgtttggattaatatacctcttgaagctgtcttatatcgatttaaacctcatattgttcatctccatcgtgcaggatggccagaaccaaaactcatgagagctttccgtggaactcactggttccatcatggagtaaaactaccaaagattattgaaactaatgtatttggtagacatgatcctagtcattcaggacgtataattgataaaacactatttgtatcacatttttgtgcagaacgtttcagtaatgcttataaagaaaaagttcctagcaatcggtacaatgtgttatataatcctgtggatgtaatgtttatagcaaaacatacaactccgccagaaaaaaaaaactttaggaatgctgtcattggtcgcttatcaagagcagataaaggtaaatggtcaatatcttttggcttgcatataattccaacaattatctctcaaataccagacttacagtattatattgttggaggtatacaagaagcatatgactttgttactacacaaaatctttctaataatattagttttttacctgaaattactacagaactagagttagctaattatctagataaactttctatctttgtccatgctaatgatacaggggaaagctttggactttccattgctgaagccatgtctgcaggattacctattgtcacacacccatgccttaatttcaaagataatgcacaaacagagcttgtagaacatggagttacgggtcttattgcaactactccaaaagaatatgctgactttataatcatgttgttaaaaaatccagatattgcccaacgtatgggtatagccggacaaaaaaaagcattccaactttttgatgtttccctccttactcataaacttgaacatatctatcataacctttgtccacctaaccttgcttgtgctatacctagttaa

SEQ ID NO: 9396 - DNA, 1140 bp, Lawsonia intracellularis
atgaaatttgctgtaatgtttggcactattcttactattatattgttatatggagcaatcatacctagccatgcatctgagccaattaaaataggtgtatacctcccacttactggtcaaaatgcatatggtggtcaacttgaactagatggaattaaacttgcccatgatctaaaccctgttgttcttaataggcctgtacaactttttattgtagataataaatcagacaaggttgaagctgcaaatgcagttaaacgtctaatagatcaagataaagtgtgtgttattattggaagttatggttcttcactttctcttgcaggtggagaagttgctgaacaagcaaaaattcctgttattgggacttcttgtacaaaccctttagtcacacaagggaaaaaatactatttccgtgcatgctttattgatccttatcaaggcgcagcagttgcaacctatgcaaccaaaaatcttggagttaaaaaagcagctacactaactgatgtttcaagtgactactctgttggactgacagctttttttaaaaaagcttttgtccatcaaggaggagaaattgttgctaacttaaaatataatgctggagatcaagactttacagcacaacttatggatcttatagccaaaaaacctgacctattatttgtaccatcttacttttctgaaggagctattattattaaacaagctaaagaacttggagcaacatttattttaatgggagctgatgctatggataaccctgatacattagaaattggtggacaatctataaatggttttctacacacgacatttccatacgatatccatatgccacatatgagccaagaagcaactaagttcacacaagcttggcgaaaaacatttccttataaggatcctaatgtaaattctgcccttggatataactgttataatattgttatagatgctattcaaagagcaaattcatcaaatccagaagctattactcatgcccttgaaaatacaaaaaatttacccacagctcttggtatacttactataaataaacatcatgatgcagaaatgcctgttggtattattcaatatcaaaatggcaaaagggtatatcttggagaagttactggagaatag

SEQ ID NO: 9397 - DNA, 894 bp, Lawsonia intracellularis
atgattctgaatatattttttcaacactttttcaatgcactaactcttggatcgctttatggccttatagccattggatacacaatggtctatggtatattacgttttattaactttgcacatggtgatcttttaatgctaggtgcttattgccttttctatggaacaacactcttcctcctcccatggaaaatttctatcattattgctatttttggagtaagccttattggtatgcttattgatcaagttgcttatagacctttaagagatgcaccaagaacatctattcttataagtgcaattgctgtatctttttttattgaaagctctgctgttgtacttttttctgggctaccacgacctgtgtttcagcctgaatggcttatatctcctttttctattagcaagataaggattcttccattaacactgattgtccctattgttagtttctttcttgtattagccttactttggatcatttataaaactaaatttggtcttgctatgagagcaatctctaaagatattgaaactacaaggttacttggtgttcctattaaccgtattatagcgctaacatttgctttaggctctgctcttgctgctgcctcaggtattatgtggtctttacgttatccacaaatcaatccatatatgggagtattcccaggatttaaagcttttattgcagcagtacttggtggaattgggtctatccaaggcgcactgataggaggactcttacttggttttattgaaattatgacagttgcatttttacctacactatcaggctatagagacgcatttgcttttattattcttatattagtgttactaattaaaccaacgggcatctttggagaatacgtagaggaaaaaatatga

SEQ ID NO: 9398 - DNA, 1044 bp, Lawsonia intracellularis
atgaactcttctactcgtaactatattttcaacgttcttactattggagttatagtactttttctcctttgggcagaatctacttttaatgggtaccaaattcaacttctaaacctcattgcaataaatactattttagccctctctttaaaccttgtttatggttttacaggaatgttttctcttggtcatgctggatttatggcaattggagcatatatatctgcacttcttattctacctgctgaacaaaaagaaattatgtggatacttgaaccaatcatatggccattttcagttcttgaaacacctttttggttttctattcttgctggaggactagtttctgcattttttggactccttattgctttatcagtattaagactaggtggtgactatttagctattgctaccttaggattttctgaaattattcgagttatccttataaacgttgcttcaattaccaatggttcccttgggataaaaggtattccatctcatacggatctctttgtaacatatggatggttatttcttactctgtttttccttataaaattgttacaaagtaattttggtaacatatttaaatccataagagataatgaaattgcagcaaaagttatgggtattaatactcttcactataaaacattatcttttaccattggagccttttttgctggcattggtggagcactcctcggaaatttacttacaacaattgatcctaaaatgtttacttttttactaacatttaacattcttatgatcgtagtagcaggtggtcttgggtctataacagggagtatattaggaagcattattattactatccttcttgaatggcttcgtgctgtagaaagtcctttcaattttggaagttatcaaattcctggtatccctggaatgcgcatggttattttttctttaatacttttgggaattattctctatcgacgagaaggaataatgggaatgaaagaaatcagttggacaaacataactaaatttttctctaggaaaagagatatatga

SEQ ID NO: 9399 - DNA, 807 bp, Lawsonia intracellularis
atgaaagaatatgttcaacaaaaaaatcaaaattctatccttgaactacaaaatattgttatacaatttggtgggatcactgcagttaacaacttaactatgaatgttgaaaaaggttctattgctgctatcattggacctaatggtgcaggaaaaactacagcctttaatatgataagtggattttatacaccacataaaggaaatattttttttaaaggaaaaagtataactggacttcctccatacaaaatttgtcaactagggatggctagaacattccaaaatattcgtctcttttcaaatgaaacaaccctagaaaacattatgttaggatgccatgtacgacgtagttcatattggtggatgccagttataggtgttccttctgcgattcgagaagaaaaaaaaataaaaggacaagcaatggaacttatccaacgctttaaccttgaattatatgtaaatgaaaaagcatcttcacttccttatggagctcaacgtagacttgaaatagcacgtgcacttgctacctatccagaacttttattacttgatgaacctgctgctggaatgaatccacaagaaagtattgaacttatgcatcttattaaaaatatcagagatgaatttaaattaactatcctcctcattgagcatgatatgaagctagttatgggagtatgccaatatatttgggtgcttgaatatggacaaattattgctgaaggtattcctcaaaaaattcgaaatgatcccaaagtaattgaagcttatcttggaggtgaagaaactcattatgcttaa

SEQ ID NO: 9400 - DNA, 723 bp, Lawsonia intracellularis
atgcttaacatttctcatcttcatatttattatggtggtatccatgctgtacaaggggttacattatcggttccaaaaggaaaaattataacacttattggtgctaatggtgctggtaaaagcagcataatacgttcaatatctggcttaataaaacaagttacaggtagtatagtatatactaatgacaatatttctatgccacagcagctcttagaacatagtcctgaagatattgttcgtctaggaatatcaatgagccctgaaggaagacgtatcctccctcatctaacggttttggaaaacttacaacttggtgcctatatacaaaaagatgcaaatgaaatacaaaaagatattaaatgggtatattctcttttccccagattacaagaacgttcttggcaaaaaggaggtacactttctggtggcgaacaacaaatgcttgctctagggagagctcttatgagtagaccttccttacttatgcttgatgagccatctcttggccttgcaccccgacttgtaaaagaactttttgatatcattcttcaaatcaatgcagaaggaaagacgattcttttagtagaacaaaatgcatttgctgcactttcaatagcagattatgcctatgtacttgaagttggaaatattgttatggaaggtaacggtcaagagttattaaataaccctaaagtaaaagaagcatatttaggaggatga

SEQ ID NO: 9401 - DNA, 2076 bp, Lawsonia intracellularis
atgttcttatcattttctatagtaatagcatgtggtctttatgctctatattatgcctacaccacctctaaacaggtcttttctgctgatataggtactgaagaaatgcaacaaattgctggagctatacaagaaggagctcaagcatatttaaaccgccaatatagaactattgctattgttggtatcataataactattcttctagctatctttttttctttcctagtagcattaggttttgttattggagcatttctttcaggtcttactggatttattggaatgaatgtatctgttcgtgcaaatgtccgtacaacagaagcagcacgttctggccttgcacctgcattaaatattgcctttaaagcaggggctattactggaatgcttgtcgttggacttggtttacttggtgtagctctctattatggcctcctttcaatgtttggagtagatcaaaaatctatacttgaagcattagtagcattaagctttggagcatcacttatttccatttttgcacgccttgggggaggaatctttactaaaggtgctgatgtaggtgctgaccttgtaggtaaggttgaagcaggtattcctgaagacgatcctaggaatcctgctgttattgcagacaatgttggcgataacgttggtgattgtgctggaatggctgctgatctctttgaaacatatgctgttacagttgtagcaagtatgcttctagcagcaatttattttacaggcaaactccaatcaattatgatgatgtatcctttacttattggtggtgtctgtattattggttctattataggaacaaaatatgttcgcttaacaaaagacaataagattatgaaagcactctatcgagggcttattgcaacaggaattacatctgctattttaattacattggtcactacactccttttctgggatgtaccaacaatgtctgcacaaggaaaatcttttggtattataaacttattatcatgttcatttgcgggattaatcattacagcattattagtatgggtcactgaatattatacatctacagtgtttcgtcctgttcgtagtattgcttatgcatcaactacaggacatggaacaaatattatccaaggattagctatagccatggagtcaacagcattaccagtactaattatctgtgctggtatcgtcttcacttatgctaatgctggtctttttggcatctctatcgcagctacaacaatgcttgctcttgcaggaatgattgtagcactagatgcttatggacctgtaacagataatgctggtggtattgcagaaatgtcaaatcttcctagtgaagtacgtactgtcactgacgcccttgatgctgtaggaaatacaacaaaagctgtaacaaaaggatatgctattggctctgcaggacttgcagcccttgtgctttttgcatgctatactgaagaactaggtcgatttttcccttctcttaatatacacttcagcttacaagatccatatgtcctcattggtttacttataggaggactactaccatatctttttggttctctaggaatgatggctgttggaagagcaggtgctgaagttgttgttgaggtacgtcgtcaatttagttcaattccaggaattatggaaggtacaggaaagccagactatagttctgctgttgatatgcttacaaaagcagctattaaagaaatgattttgccctctattctacctgtatttgcacctatcattatttattgcattatttattggattggaggacaaaatgctgcgctctctacactaggagcaatgttaatgggaactattgttactgggttatttgtagcaatatctatgacatcaggtggaggtgcatgggataatgcaaaaaaatatattgaggatggacaccatggtggtaaaggttctgaggcacataaagctgctgtaacaggtgatactgttggtgatccttataaagatactgccggaccagcaattaacccaatgataaaaattattaatatagtagcactgcttcttcttcaagctcttgcttaa

SEQ ID NO: 9402 - DNA, 1185 bp, Lawsonia intracellularis
atgagttttaatactggagagttcgaatattcaggaccaccacctggcaactcctcaagcttatggcttaagctattattaattatttttgttatatttatttgtgttattggatttattggatatcaaattttttcttttttagatacgcctggttctactcctggtaaggagatagaaatagctattcctccaggaacaaagtttcatgtactgtctttatatcttcaagatataggtgcaattacagacgtaaataagtttgaaatacttgctaaatggaagggaatgagtgataaagtaaagagtggtcgattccttattaatacaggatggacgccacaagctcttcttgattaccttgtaactggttctccacttcttaatagaataactattccagaaggacttccttggtgggaagttggaaaacgtctagaaaaagcaggatttgttcgttttgaagattttaaaacagtcattcatgaccctgagtttctgagatattgggggataccatttcataatgcagaaggttttttatttccagatacatatctcttagcacgtccatttaaacaaaacgttgaatctgcgaaaattattgttggaaggttaattgacacattttggaggaaaacagctccactatggccaaatgggatgcgtccaagctttagaaatgcttctgttattaagcagccattaattcttgcttcaattattgaaaaagaaacacatttcccaggtgaacgtcgtaaagtatctggtgtttatacaaataggcttgctgtgggaatgccattatatgctgaccctacagttatttatggcttaggggaaaactttgatgggaaattacgtcgtagtcaattacaagataagaataatccatataatacatatgtgaataaaggattacctccagggcctattgcatctccaggtcttgatagtattcgagcagcattaaatcctgaagagcacaactactattattttgttgctcgtggtgatggatcacatgtttttagtacaaatttggacagtcataatagaatggttaaaatataccaacttcctttaagaaaaggagatactggttcattaattcatggaggtgtagctccttctaaagttcaagaagatcttttgcctctaaaagaaacagtaccaccatcttaa

SEQ ID NO: 9403 - DNA, 429 bp, Lawsonia intracellularis
atgaaatatgttgctattgattatggaacaaaatatacagggatagctgttagtgactctatgggggtttttgcttttccaaaacaatcaattataatgacaacacaaaaagagttttttataaaattagttgaactaatttatgtagagtctccagatgcactagttgtaggcttacctgttttatttgataactcagaaacacttattacacgtcaggtcagaaattttatcaaacgattgaaacataaaataatgcttcctgtctttttaatgaaagaaatattgagtagttacgaagcaaagttggatcttcagtctgtcggttacagaaaaaataagataaaatctgttcttgatcaacaggctgctgttcgtattttacaatcatttttggaccaatctgaaagtgagcgtgttcaagtatga

SEQ ID NO: 9404 - DNA, 783 bp, Lawsonia intracellularis
atgcaagatgatacttttcagctcgggaatgttaaattaaaaagtcgattattccttggaacagggaaatatggtaatgatgctataatacctgatattattaaatcctctggagctgaagttataacagtagcactacgacgtgtggaactagacaataagaaagaaaattttctttcttatattcctcgtacaatacaactacttcccaatacctcaggagcacgaaatgctaatgaggctatacggatagctcgtatggcacaagctgctggctgtggaaactggataaaaattgaagttatctcagattctaggtaccttcttcctgatggatatgatacagcaaaagcaactgaagttcttgctaatgatggatttattgtattaccatatatgaatcctgatctctatgttgctcgagatcttgctaatgcaggtgcagcagcaataatgcctttaggtgctcctattggcacaaatagaggattaatgacaaaagaaatgattcaaatacttattgaagaaataaaacttccaattattgttgatgcagggataggcaaaccttctcaagcttgtgaagcaatggagttaggagctgcagcttgtttagttaatactgctatagctacatctgatgatcctatactcatggctaaagcatttgggaatgcaatacaagcaggaagagaagcatggcttgcaaaaacaggacctgttcttacaggcaaagcttctgcatcttcccctttaacaggttttttagatgactcctattaa

SEQ ID NO: 9405 - DNA, 1092 bp, Lawsonia intracellularis
atgttcaactctgttacagagtcacaagtatcgcatacattaaatctagcagaaagaggtctatcactctccatagaacacttattaatattactatcgcctactgcaacttcttttctagaaaaaatggcttctattgctcaagaacagacaatccgatattttggaaaaactatacaactttttactcctctctacctctctaatttttgcataaataattgtaaatattgtagttttagcgcaactaaccgtataaaaagaatacagttaacaattgaagaaatcgaaaaagaagctgctgctattgctgcaactgggcttagacatattttactcttaacaggtgatgctccatctaaagcaactatagcttatcttaaagaagctattcaatgtcttaataactattttcctagcgtaggaatcgaaatttatgccattgaaaaaaaagaatacgaattgcttgaatgtactggagtagattctatgacgttatttcaagaaacatataacgaaaaacgttatatggcacttcatactaagggaactaaacaaaatttccgttttcgtttagaagcacaaagtagagctgcatctgcaggcattcgctttataacacttggtgcactattaggcctagaccactggtggagagatatattttatgtaggcctccatgcaaattggttacaaaatgaatatcctggagtggatcttactatctctgtacctcggatacgccctcatgaaggatatttctctgattactatcctgtatctgataaaaaccttgtacaagctattcaagctatacgactatttttaccaacatctggtattattctttcaacacgcgaaaaaccctctctcagagatagattaatatctcttagtgttacaaaaatgtctgcaggagtttctactgctgtaggagggcatactgatcatcatatagcaaaagataatattgcccaattcgaaattgcagatacacgctctgtagagcaaataattacagcaataaaagcaaaaggttatcaacctatttttaaaaactggataaaattatctaatgcacctatgcattaa

SEQ ID NO: 9406 - DNA, 621 bp, Lawsonia intracellularis
atgtctacctttcattggaaaaatgttatggatgagcacttacctgaatcactgcaaacaaagctttctaatgctactataggtatagcaggtgctggaggactaggttcaaactgtgcggtattacttacccgaacaggaataggtcatttagtcattgttgatcatgatattgttagtgtttctaatcttaacaggcaacagtatttaccatctcatattggtatgccaaaagttgaagcactaaaagaagttcttcttaacattaatcctgggttaaaacttacaatatatcaacaatacatgaatcctaacaatatcttaactctatttgaagactgtcagtttgttatagaagcagtagacaatgctatcactaaaaaaatgcttgtagaaacacttattactgtagattatactgttatatctgcatcaggtgttgcaggatggggtgggctacctatgacacaaaaacagctaggcaaaaaactcttagtagttggagatcatacctatggagtatcttctataaatcctccactagcccctcgtgttaatatggctgctagtatgcaggcagatgctatactttgtgcactgctcaatactaaaaacgactaa

SEQ ID NO: 9407 - DNA, 1155 bp, Lawsonia intracellularis
atgtctatagccaagtcaccatttattcttggcggtacatcaccagaacatgcgaaagtctttaagagaacttcaggacaaaaaattgacaatgaatctttttcagaaatggttggaaaaacttctgaagtaacagtagaaactcaagaaaatagtaaagatacaaaagggttaaatgtaatttctcgcctttttgctaatggattggcaatgggagaggctcaacatcagcaaaatgaaatggtgatgcagtctatattacctcaaaatcaacaacataaaaatagtgtaccattaactcaagctgtatctgggataccacttcataaagaaaataaagggatcccttttagtaaagggattcctcttgatgccaaaagagatattattttttctgcccgtaatatagcattaaatagaaaacatgggggaatgaatactcaacagacaataagtagaagtaaaacagaattaaatacagctaatataactctaaataaaactatacaaaatgaaacaaggatagggcagctttctgctcgatttgaatctggaaatgaaggtatttctgctataggttatgatcgaactggtggaacttcatatgggaagtatcaaatagcatcaaagccaggaagtatggatcaatttataaagtttcttgagagagaaaatcctaatatagcagcacggttaaaaagtgcaggacctgctgacactggtagtcgtgatgggaaaatgccgcaagtatggagatctatagctcaagaacaacccgaactttttgaggatttacaaaaacgttttatttctgaaagtcattatcaacctgccttaaaaggtattaaagcagcaggatatgaagtagaatctttgtctccagcaatgcatgaagttttatggagtacagcagttcagcatggaccttcaggtgctgtaagaatttttactcagtctgctaatatggttggtatttctgaaggacaatctattggtgaccaagaggaacaacaacttattaaaagtatttatgagttgagaggtacactttttggctcttcaacagctgaaatacaagcatctgcactacgtagaatgcaagatgaaaagaatctggcattagctatgttacagcctaataagactatagtttaa

SEQ ID NO: 9408 - DNA, 1374 bp, Lawsonia intracellularis
atgaaaaaacagtattattttagagagttaaaaactcaaattcaacttactattccaatagtccttgcacaaatatttatgactgcaatgggatttgttgatatggttatgacaggatatgtaagtgccatggatatggctgctgttgctttaggtagttctatatgggttcctttaattcttttttttcaagggatactacaggcattacatccggttatttcacagtggagaggtgaaggatacactgaacatattggtcatgtcctacgtcaggggatatggcttgctacttttttatctttaccattgttctttattgcatatattctttcttttcagatggggaaattaggattagaggaacaattagctgatctttcaggtcaatatttaagggctattgcctggggaactccaggctttttatattttgttgttatccggtgttattttgaaggtatggcatttatgaggccatcaatgattggaggttttataggccttctttttaatgttcccttaaactatatttttatttttggtaagtgtggtctacctgctcttggtggtgttggatcaggctttgctacaggtatagtatattgggtaatgttttttgttattttttgttatgcaatgactctaccagatgttcgaagatttttatcgtttaaaaattgggttgaatggatagataaaaaaacacaatggcaattgttacgtattggtttccctggagctcttggtgttttttttgaagtaacatcttttgctattattgctttattggttgctcctctaggtgttacaattattgcaggacatgaaatagcactaaattttagtgcacttctttttatgattccattttcgcttgctattactgctacaattcgtacaggttatagtattggcaggcattcatatgaaatgttacattgtgtcagctttgtctctctaagtttgggattatttattgcattatgctctattatatttattcttacacttcgttatgaaatagcaggaatctataataatgatgttgaagtattaaaagtagcaacttctttaatgatttttactgctatcaatcaatgctttgaagcattacaagcaatcacaatgggtattattaaaggatataaagatacaaagacagtgttctatataacactttttgcttattggttttttgcaatacctgtaggatacatccttgggagaacaaattggtttgttgagccaatgggagtaactggtttttggttagcactattaggagggctttctttagcaggtgttcttggtttatggagagtaaccattcttgagcacaaattttataagaaggtaagtaagggattataa

SEQ ID NO: 9409 - DNA, 1434 bp, Lawsonia intracellularis
atgtcctcaattgtatatttttttctttcgttaattgccttgtttttagggtatattatatatgggaaggtagtagagcgtatatttggtgcagattactctagagttacacctgtatataaaatgttcgatggtgttgactatgttaagatgggaccatttaaaatttttttgatccaattgttaaatattgcaggccttggaccagtttttgggcctatccttggtgctctttatggtcctattgctcttttttgggtagttattggttctatatttggtggagctgttcatgattacttttcagggatgatgtctttaaggtacaatggtaagtctgttccagatattgtaggatataatcttggttctacaattcgtatccttatgcaggtattctctgttgtattacttatccttgtaggggtagtttttgttgctggtccagctgggcttcttgagaaattgacaggtattgatgcaatgttttttgtatctattatttttgcatattattttcttgcaatgatattgccaatagataagcttattggccttatttatccatactttgctttattacttgtttttatggctattggtcttttagtgatgttaatagttaaaggatatccgttttatccaagtattaacttgattaaccaacatcctgcaggattacctatttggcctatggtttttattacaattgcttgtggggcattaagtggttttcatgctactcaatctcccatgatggcaagatgtcttcctaacgaaagatatggccggcctgtattttttggagcaatgatagccgaaggtgtcattgcacttatttgggttacgttaggaatgtctttctatgaaaattcttcagcattagctgctgcactaggtcctgaaggtaatgcagcacttgttgttgacgaggtttcaaaagttttgttgggaacagttggaggtaccttagcgattcttggtgtggttatactcccaattacatcaggtgatacagcttttcgctctgcaagattaacaattgctgatgcatttggttttgatcaggcatcaggtaaaaatcgtctactacttacaattcctatttttgctattggtgttgctctgaattttatgtcttttggaattctttggagatattttggttgggctaatcagacacttgcggcaattgttctttgggctgcagcagcctacttactccatcgtgaacgttttcattggattgctactgttcctgcaatgtttatgacagcagtctgtgtatcttatatttgttttgaggaaaatatgggatttggtatttcttatgacttgtcaaatattattgcgatcacatttagtgtattatgtgggataacattactgacagtaggacgtaaacgccaaccagatgaacctattgatagttaa

SEQ ID NO: 9410 - DNA, 981 bp, Lawsonia intracellularis
atgctaggtgaatattccattacagaaattataatttttttaataattatagtaagttgtttatggtttgacttacatgcacataaatctgataaagttatttcggtaaaaaatgcttttttatggtctagtatctggatctctcttgcgcttttatttgctatctatattgggtgtatgtttggccttgaaaaagcacaactttttctaactggatatttacttgaagagtcactctctgtcgataatctatttgttattatggctatttttgcctctttttctataaaagatgaaatgcaacatagagtactttactatggaatacttggtgcattagttatgcgacttctttttgtggctgtaggcagttcacttgttacactctttggtccttatgcattagctagttttggtatttttgtactatggacagcatggaaaatgtggaaagagcaaaaaaagaagcatagtgagataatagattactctaagcattggtctgttaaaatagcacgttggttaatgcctgttcatcctcagctagatggacataattttttcataaaagtttcagagcataatagattgatttggaaagctacaccacttttcctttgtcttcttgtaattgaattctcagatgtgatgtttgcttttgactctattccagctattattgctattactcaagaaccattccttatatatacaagtaatatttttgctatactaggactacgttctttatattttcttcttgcagcagccaaacgctatttacgttaccttgaaaaatctattattgttattcttgcctacattggatttaaaatgttacttgatgtcgtaggaattatacatatttcaccactagttagcttaggaattgttataatttgtttaactattggcatactagcatctctgttcattcctcaaacgactactctttctcataacaatactattcatacataa

SEQ ID NO: 9411 - DNA, 483 bp, Lawsonia intracellularis
atgcagtattggctttttaaaagtgataccgattgttactcaatcaatgatttacagtctgcaccaaatcaaacaacaagttgggatggtgtaagaaattaccaggcaagaaattttatgagagatgaaatgagaataggagatcttggctttttttatcatagtgggaaattacctgaaattgctggtattgttaaagtggttaaagaaagttatcctgatcatacagcacaagatccagaaaatgatcattatgatccatcagctacgccagaaaatccaagatggtatatggtcgatgttcagttggttaaggtatttcatccaactattccaagaaatttattgcgattacagcatgatctctcagggatggaacttttgaaggcaggaagtcgactttctattcaacctgtttctcaagaacattttaataatattattagactggctgacgaaattcagaaagctaacactaattga

SEQ ID NO: 9412 - DNA, 1446 bp, Lawsonia intracellularis
atgattaaggtaaaaaagttttttttaaacttcacgacaaggcgtacactaatattagtatgctcagactgtatagcacttttaagtacagttattattgctgcatatatacggaatatttttacaccagtcgaattttcacaacattggaccttattattattccttcttgtagctatttttgttaattatatgaaggaactttatgatgctacgcctccacctcttcctgaagaggtgaaaagtttgagtctttcagtttcattagcttatttttgtattgctatttatttattcttttttagagcagatcttccttctcgtcttgtttatatggcctcttggatggcaagtttaattgttgttcctgtcattcgttgtaatgttaggcagtatttttcaagaaaatcttggtggggaataccaacaatttttttgggcaatggtagtattctttcattgattcaaaaatatttagtaaaacatccagaatttggtttaacacctatgggctatgcgtattctataaatcaaacaatagaagataaagaggataagacttccgatggatatttaaaaccttctttaatgtaccttgagacagagcaaaaaattaaacaatttgtatctaaccatccaagaagctgtgcatttgttcttttatcaaaagatgacatataccatacaaagcttgagaaggtagccacaactttgttttcttccattatccttgtttctgaagatttttttaagtgtggtattcctctatgggttcgtcctttagaaattggttctttcctttgtttgaaagtaagacaaaatttgcttgatccacgaaagctagttgttaaaaggtgtatagatcttattttatctattattataggtattgctactttcccactcatttgttttattgcaatttggatacggttggaatcaccagggcctattttttttaggcaattacgtattggtcgagagggtaagcctatttggatagtgaagtttcgtactatggtccaaaatgcagaacaagtcttacaaaaaactttagatgaaaatgaagaattaagaaatgaatggaaagctgatcaaaagttacggtatgatccaagaattacaaaggtaggtaagttgttaagacgaacaagcttagatgaacttcctcaaatatggaatgtactactaggagatatgagtcttgttggcccacgtccaattgtagaagaagaggtagcccgctatggcgatgcttatgctttgtatataaaggttcgtccaggaattacaggattatggcaagtatctggacgaaatgatttaacatataatcaacgtgtacaaacagactggtattatatttctaactggtcagtatggttagatattgttatattagctcgtacaattcctgttgtagttaaacgtaagggtgcatattga

SEQ ID NO: 9413 - DNA, 1104 bp, Lawsonia intracellularis
atgcggattgctattgttcattattggcttataggaatgcgaggaggagagaaagttattgagtctctttgtcgtctttaccctcaagcggatatttttactcactgtgtagataaggatcaactttcacctttattaaaaaataagactatttatactacatttattaatagtcttccttttgcaactcggtactataagtattatcttccgcttatgcctttagctctagaacagcttgatcttcgggggtatgatttaataatttccagcgaatccggccctgcaaaaggacttattgttcattcttctgctcgacatatatgttattgtcatactcccatgaggtatttatgggactgttatcacacttatcttgagaataaaggtatagtaacacgaactatcattcgtcctatttttcattacttacggatgtgggatataagttctgcggtacaccctgatattattcttgcaaattctcatacagtagcacaacgtgtgcaacgttgctggggacgttcagcttctgttatttatccacctgttgagcttgacctatttaaacccacaagagatgttggtgattattacctatgttttggtcagcttgtagagtataagagggtagatttggctattaaagttgcatcggaaacaggtcgtaaattaattgttgctggtgatggagatgcatatacaaaacttaaacaactggcaggtccaagtgttatttttataggtaaaatttctatggacgaaagggctaaattactagctggttgtcgtgcactactcttccctggggaagaagattttggtatagttcctatagaagctatggcatcaggaagacctgtcattgcttatagcaaaggaggggcatcagaaacagtttctgatggtataacaggttttttctttcatgaacaaacaccagaagctttattaaaggctattgagtattttgaaaaacatgaacataccattaatactcagcagcttgtaaaacatgcctctaaatttagtgagactcaatttcatcaagcgttttcaaaagttgttgataacttatgtgctagtaaggataacatacaataa

SEQ ID NO: 9414 - DNA, 1422 bp, Lawsonia intracellularis
atgaagctattccatgttctcttcctagtacttacaatattattcttcataccatttagtgtattagctgcaactggacactacgaattacatggcacagaactttcaataatatgggtaataccttttatttgtatgcttctatcaattgctcttggacctcttataattcctcacttctggcatcataactttgggaaaatttctgtcttctggggacttgcctttctcattccctgtgctgttatatttggaatacctctaacagcttatcaactcttacatacaatattccttgagtatattccatttattgtcttacttcttgtactctttacagtagcaggaggcgttcgtctcaaaggtcaccttattggaaaaccaatagtcaacacaggacttctttttattggaactatattagcaagctggatgggtactactggtgcagcaatgctacttattcgtccactcattcgtgcaaatgaacatagaaaatatgttatacattctgtaatattttttattttccttgtagccaatataggaggttccttaactccactaggtgatcctcccttatttttaggctttcttaaaggtgttcactttttttggacaacaacacacctctttcctatgacagttattctttctatccttttacttactatctattttatacttgatagtatattatataaaaaagaaggctctcctttacctcaaaatatatcagataatccaggtcagttaggaattgaaggaaaagtaaatcttatacttttactttgtgtagttcttactgtattaatgtcaggagtatggaatcctgatatatctatcaacatctatggaataagcatagctctacaagacctctctagagatattatactcctattattaacaggaatatctctcaagctgacaaaaaaagagtctcgaaaacttaatggattttcttgggaacccatacaagaagttgcaaaactctttataggtatttttattagtatgattcctgcaataactatccttagagctggagaacatggtgtccttgctccggttattgaacttgtttttaaagatggacagcctgttaatagtatgtttttttggcttacaggtattctttcatcctttttagataatgctccaacttatctagtattttttaatacagccacaggtgatgctactcatctaatgggggaatgggcaaaaactttatgtgctatttctgctggctcagtatttatgggggcagttacttatattgggaatgcacctaactttatggttcgttctattgctgtaacacatggaatatctatgccaagtttctttggatacatgttatggtctatttgtatccttttcccatgttttattttacttacatggctctttttttaa

SEQ ID NO: 9415 - DNA, 975 bp, Lawsonia intracellularis
atgaatatctatactacttatatagaacaagagctgccttacattaatgctgctataaaaaaaagcatagcagaactcccttcatctattcagcctgtagctgaacatattcttctctcaaaaggtaaaagattacgtccaatgcttactatcctcctctctcgactttttggttataatgaggatgatatctatccattagcaatttcagttgagtttcttcatgcagcgacattactacatgatgatgtattagataatgcgctattaagacgtaatactattacagctcataacctctttgggactgtttctactatacttgcaggtgacgcactgcttgcaaaaggcaatttacttgtagcaacctatggatgtcagaaatgtatcctaacgatatcccaagctctttaccaaacagcacatggtgaaattcttgagatatataatcaaggggaaatatgggaaaacaaaaatatttatttagaaattattactggaaaaacagcttgggttattcaagcagcttgtaaagttggtgcactgaaagcaggtgctactccacaacaggtggatgttgctgctttatttggctataatcttggtattgcttttcaaatcatagatgatgcattagacttcttaccttctaaagatacaggcaaacctgaaggaggagatatacgagaaggcaaatttacaccaccacttttttactatttaaaaacactttctttagaagaaaaaaatatatttataaaaaaatttcaaactcataactttacagatgaagagatacttactattaccagggtcatccatgaacaaaattttgatcaaaaaacacgggaattagccaatgtttattttcaaaaagctttaacaaatttagaattattaactaatgttcccaagcctgaatacaaaaccatactcatagaatgcctcaattacatctctacaagaacctcataa

SEQ ID NO: 9416 - DNA, 2979 bp, Lawsonia intracellularis
atgcttcatcgtattagcgtgggattattatcccatatcgatgatactattggccaaaaaatagcttcatctatttatcaaacactttcttttcctgttactacagctaacttaataaaagtattcacaatagaagggatacagaaagaacaggtaaaccaacttattactcaaaatgtattacatgatcccatcttacaatatgcttcactttcaccttcagaaagtaatgcagattggataatagaagtacgtttccgtcctggagttactgataatgaaggtcacacagctagagatacctctgcacttgcattaggaatagagaatcatgaaatattagctgtatacacatcaaaccaatatcatttatatggtacacttacagaacaacaagtacatcgtattgcaactgaattattatctaatacacttattcattgttttgaaataaaaagtcgacaaaattggaaaaacaatccaggattcccagctaaaacagcaaaagttacaggtatagctaatgatacagtcataactattccactttcttctatgaatgatgcaatgttattacatgctagtaaagaaagaacattagccttatctcttgaagagatgcaagtcattcaacgttggtttatgcagcctgaggtaaaaaaagaaagagttgctattggattaacacctgatcctactgatgtagaaatagagatgcttgctcaaacttggtctgaacactgcaaacataaaatttttgctgcacaaatatcttataaagatttagaacaaaattctcaagaagttattaatagtctctataaaacatatatccaaaatacaactgacattattagagctcaacttggtgacaaagatttttgtctatctgtttttaaagataacgctggtgttgttgcttttaatgatacacatgacgtctgtattaaagttgaaacacataatagtccctcagcgttagatccttatggtggtgcacttacaggtattgttggtgttaatagagatcctatgggtacaggtcttggtgcagagcttgtttgtaatactgatgtattttgttttgcttctccctttcatagggagcctcttccacctcgcttactacacccacgtagaatttttgaaggtgttagagagggtgtggaacatggtgggaataaatccggaatccctactataaatggctctatcgtatttgatgatcgctttcttggtaaacctcttgttttttgtggcactattggcattatcccttgcataattaacaataaaaaagggtatgaaaaaaaagctaatgtaggcgactatattattatggtaggaggacgcatcgggaaagatggaattcatggagcaacattttcttcagaagaactacatgaacaatctcctgttactgcggtacaaattggagatcctattactcaaagaaaaatgtatgacttcattttacatgtacgagatcttgggctctactcagctataacagacaatggtgctggaggcctttcttcgtctataggagaaatggctcaagatacaggaggatgtcatattgatctttctaaggcactattaaaatacgatgggttatgtccatgggaaattttactttcagaagcacaagaaaggatgacaattgctgtaccaaaagaaaatattcaaaaactttcttctattgcaaaacatatgggtgttgaaatttccatcctaggtgaatttacaaatagtggatattttcatgctacatatggttcaaagactgttgcatatcttaatatggaattccttcaccatggagtacctcaactaacactcaatgctcaatgggaaaaaccttattatcccaataatagaatagaatctgtaggtattgaccaatctatgttccttcataccatgcttggacggcttaacatctgtagtaaagagtatgtcattcgacagtatgatcatgaagtacgtggaggtagtgttataaaacctcttatgggtgtaaaacaagatgcacctatggatgctggtgtattacgacctattttaaattcagaaactggacttgttattagtcatggtatctgtcctaagtttagtgactatgacacatattggatggtagcaaacgctattgatgaaggaatacgtaatgctgtagctgttggagctgaccctgatcgtatggctggtgtagataacttttgttggtgtgatcctattcagtctgagaaaacacctgatggcttatataaacttgctcagcttgtaagagcatgcaaagcgctatctactttctgtttacactatggtgtaccatgtatttcaggaaaagattcaatgaaaaatgattatataggagggggaattaaaatttctattccaccaacattacttttttctgtacttggaataatagatgacatcaataaagctataacatctgactttaaaaagcctggagatcacatttatattgtaggcgatacagcatgtgaacttgctggaagtgaacttgctagtgaactacatataagctgtagtagtgtacctcaagtacatgctattcaagctaagtctaactatcgtaagatatatagcgccatacaaaaaaaatatattacatcctgccatgacctatctgatggaggttttgctgtagcacttgcagaaatgtgtataggtgggcgcataggatgtcatgttgaacttgatagaatacctactattgaaaatctatcagtaacagaactgttatatagtgaaacagcaagtagactcttacttactgtttctccagataatatagcaccatttgaacagctaatgggtggcagtgcaaaatatttaggaagagttgtcgagcattcacaattgattataacaaatggcaatactataattattgatacacctgttgaacaacttgcagtatcatttaaatctacattaaattggtaa

SEQ ID NO: 9417 - DNA, 1773 bp, Lawsonia intracellularis
atggggaataacgttaaagaaatccaacaaatacgtacacttattgctaaaggtaaggctgctggttttgtaacttttgaagaagttaacaaagctgtaccaatagatatgaacacaccagaacagtttgaagagatcataggtatttttgatcaacttgaaattgttattgtggattcagagaaggaaggaaaaaaaataacagtaacttcccccgaaacagatggggatacttcagaaaattgttttgatttagttgatacagaggatgtagcagatttttcttctcgaagtacagatcctgttcgaatgtacttacgtgaaatgggtgctgtgcctcttttagatcgtgatggtgaagttgttattgctaaaaaggttgagacaggcgagcaagatgtattgtatgctcttgtagaagttcctgttgctgttgaagaacttataagtgtaggtgaagatcttaaacttaatagaattaaacttaaggacgttgtcaaaactattgaagaagatgatcctagtgaagatgaaatgagccaaagaaatagggttattcttctgttagaagaaattcgtcaaatttttaaaaagaaacgtaaggtttatcttaaacttgacgagtgttgtacactggaacgtcgtgtggcaggtattcaaaaagaaattttacaatttaaagaagaaattgttactcgtttacgtgatattaagttagaaaagacacttatagatagaattattgaaacagttgaagattatgtccgtcaaatgcataattgtcaaagggaactttcagcatatcttctttcaaccgggaaaacacaagatgaaattaaagacttgtttacaaagttagatgcacgtgaattaagtcctagagatgctgcattattactcaatatgggtgtagatgagcttttctcttacaaagaaatgatacttgggaaaatagaaatattacaacgtttacaggaaaagtgttgtcacaacgttgtagatcttgaggaggtgctttggcgtattaagcggggtaataatgctgcaatgcgtgctaagcaagaacttattcgttcaaatctccgtcttgttgtaagtatagctaagaagtatacaaacagaggattacagtttcttgatcttattcaagaaggtaatattggcttgatgaaagctgtagataaatttgaatatcaacgaggatataaattttcaacatatgctacttggtggattcgtcaggcaattactcgagcaatagctgatcaagcacgtacaattcgtattcctgtacatatgattgagactattaataagttgatacgaacttcacgctatcttgttcaagagttcggaagagatccaaccccagaagagattgcagaacgtatggactaccctttagataaggtgaagaaagtactaaaaatagctaaagaacctatttcgttagaaacaccaattggtgatgaagaagattcaagtttaggtgattttatcgaagacaaaaaagctgtagcaccttctgaagaggttgtaaacacaaagctttctgaacaaattgcttctgtccttgctgacttgacacctcgtgaggaacaggttttacgaaaaagatttggtattggagaaaaatctgatcatacactagaagaagttggtaaactctttaatgttactcgtgaacgtattcgtcagattgaagcaaaagctctacgtaagttgcgtcatcctgtacgtagtcaagtgttacgttcattttatgatagttaa

SEQ ID NO: 9418 - DNA, 1731 bp, Lawsonia intracellularis
atgagtcagaaaaatgttcaggctattcaagagattaagtcacgcctgaacatagtagatattgtccgtcaatatgtgaaacttcatagaaatggttcacgttgggttgcaccatgtccttttcaccaagagacaaaaccttctttttctgtgagtgaggaggatggatttttttactgctttggttgtcaagcctcaggagatatattcacgttttatagccaaataaatggattaagttttcgagagactttggaacaattagcagaagaagcaggtgttattcttactagattttctacttttgggaatgaatcacagaaagttcatactaatagacgtcaactattaaagatatatgaatttactacaacacattttgtaaataatcttcatagtgaaataggaaaagagtgtagagaatatatgaaaaaaaggggaatttctgatgaaatttctcaatattttcgccttggatggagttcatctgattgggatactttagtaagagctttaaaacgtgcaggatttcatgaacaatttggagttgaagcagctttagttggtatagcttctaatgggaagttttatgaccgtttccgtgggagattaatgtttcctatttctagtttatcaggaaatattattgcatttggtggacgtattattggagatgaagatacagcaaaatatattaatagtagtgattcattgctttataaaaaaggagatcaactatatggcttacaacaagcaaggcaaagtatcagttcagggaagtctatattaattactgaaggatatatggatgttattacacttcatcaatatgggtatactaatgctgtaggtgtgttaggaacagctcttacttctgaacaagtaaaacgtatttcaggttttacatcaaatattgagattttatttgatggagacgctccaggtcgtaaagcagcactgcgagcttgtgaaatgtttttgacaaaaggtttaaattgtaaggttgttttgtttcctgaaggtgaagatatagatagtgttataaaaaattatggaaaagaattttttgagaagttaaaaaatgacgcgtctgaagggctacagttttgtatacaatcacttaaaactagggctcctcgtgatgttatcgattgggttaaaaattttttaaaacaagttgaattaccagaaatagtaagtcgttttacgtcaatactatcaacaggattaggtctggcagagagtgaattaagagaatatgtggcagatataaagcattctattaagaagaaggtaacacagtctgcagcaatatctcattctttagttcaaactacaccaagggataaacaaattttaatgtttctagtgcgctatccccatatgttagacaaactaaaagagcagggagcacatcttgttcttaatacaacttgggccaaagaattatggggaaaagtagaagaatattctgaggataatataatgcagtatttaaactcacaagaaaaaactttttgggttcaatgtcgtacaggtgatgttccacctttagataatgaggagggagagtttgaagctattcaaactatgttagaagcattgcatatgactgttcagtctgcttctgtttcagcagcattaaagcttggaaaaacaagtagctttgaagctgatttgaaatatttacgcgcccttcaggaaactttggagaggacacatggggaataa

SEQ ID NO: 9419 - DNA, 468 bp, Lawsonia intracellularis
atgagggcacatatgtctcttatagagcatatcgaaaaaaattatttgtctgcatataagtcaaaagatcaaatacacctgaatgtattacgcctgctaaagacagcacttaaacatcttcaagttgaactaaagcgtcctatcactgatagtgagctgcttaatcttattcaaagacaagttaagcaaagacaggatgctatagagcagttttatgctgctggaaggttggaccttgttagtaaagaatctgctgagcttgatattcttaaaacatatttacctgaacaattaacttctgaagagttagagcaggttgtagataacacattaaactttttaggtgttacaaaaatgtcagatatgggaagagttattcagtatattttgtctcagtacaatgggaaagttagtggtaaaatggtaagtgaagttgtaaaagttaaatttcaggctatgtttcaataa

SEQ ID NO: 9420 - DNA, 363 bp, Lawsonia intracellularis
atgggatatcatgtgggagaggactatggattgcctcatgtaacaacatactattctactttttactttacagcatcttttaatgcttttcctggacgaaattttactacctttgatgctggaatagtaatcatttctcctgtacgtggattacgtcctttacgagctttacgagattccacagaaagtgttgcaaatccagttaaagttaatttgccttccttagccaatacttcttcaatacttattaatgttgcattcaatgtacgctctgctgcagccttagtaatattaaccttagatgcaatttgggcaacaagatctgcttttgtcataatccttctccttttccgtttaatctag

SEQ ID NO: 9421 - DNA, 816 bp, Lawsonia intracellularis
atggatcaaacctttcggcctaaaaagagtcttggacaacattttttgaaagatacagctattgcttatcgtatagttaagctattggatatccatgaaggtgagaatatttttgaaattggccctggtcagggtgcattaacaaggcatatatatggctataacccaggtcagttgttacttgtggaaaaagattcttgctgggtagattatcattcttcagtgaaacaacagaatgtatcaaaagttacaattcatcatttagatgcattgaagttttcttgggaaacactttgtggctcttggaaagttattagtaatcttccttataatgtaggctcggcgttaatttgggatattgtaagtagggtccagtcaatgtctagagctgtatttatggttcagaaagaggttgcagatagattatgtgcatgtccaggaactaaatcgtatggtgttctgtctgtatgggtacaaagctttgctaaagtagaatggggttttattgtaaagccacattctttttatcctcaaccaaaagttgactctgctatagttactctttacccaaaacctagagaagaacaacctaaaaatagtaaaacatttgcttggattataaaacagtgttttcaacataggagaaaacaaatgcaatctattttacgaaaaataggttttttgaactactatgaatcattagaacgtattggcatttccccttcagcaagacctgagtcgctttcaaatcaattatttcagcagttatctcaggagtttttactccaacttattgactttccaaaaaaaacatga

SEQ ID NO: 9422 - DNA, 1161 bp, Lawsonia intracellularis
atgcacgtcatatttattaactatgggggataccttggatgctctggggtccatattcattttcttgcacaaaccctcacacagcaaggaatacgctgtactgtttaccttcctgtaacaataaaatcaaaaaactactttggccaagcagattatcctatttttacacataatgatcttgttgcacactctcatactggctactttaaagactctattattcatgcttggaccccgagagaagttagtcgaaaattaactatatatgtagtcgcccaaacacatgttccctattttgttcatctagaagacaatgaaatcactataatggaacaaatgtttaataaaccatttattcaactacaacaagaagctttagaaaagcctgcactctttaaagatgtacaatactgtcacccactctattttcaacaatttcttaataatgctactggtgtcacatgtattattaataaacttgaagaacatgtcccttctcatgtacctcgaatgactttttggcctgcctgtgaagaaacttttttccgtcttccagaaaaaatacctgagtccgtctataaagaattaggattccctttaaatactatatttgttgtttatcctgggaatatacatgaatacaacaaaaaacatgttagtaatcttatcacagcaattgactatgttaacaaaaaaggacactcaataaagatcctcagatgtggagaaacagctataccaatggagcaacttgctccccctcatgcattagcacatatcattgatttagggacacctgaagctcataagcttcataactatattagcttagcacacattcttgttcaaccaggatgtcctggagattttgatgattatcgatttccatcaaaaattcctttattccttgcaagtggacgacctgttattttacctaatacaaatattggattaaacatgacacatgggaaaaactgtttacttctaaaaacaggtagtgcagaagaaattacaaagtatctatgcctacttatagaaaaccccaaaatagcaacatccattggaaaacaaggaaaacaatttgcttatagtacgttcagttgggaaaaatcagctaaaaaacttatacagttttataaaaagtgtttaccaaacttataa

SEQ ID NO: 9423 - DNA, 420 bp, Lawsonia intracellularis
atgatatttccactttggatcattggtgttataactattgcggaaactatccttgttgtgatggtttttttgttttttttaagattgagacgttctgaagctattttagcccagctacaaagtaatcaagaacatgtccttgagagtatttatcgtaatgcagcattagaacaggagcttgtggatagttttagccaaagacaagagcagttaattatattaaataaagggcttgaagagcgtattagagttttacagaagcttattgatcaagcaactagtataagccgttccccacaatttttacgtgaagttattttagctggaaagaaaaaaggacaaacacctgctcagattgctcgttctactggactagctgtagatgaagtcgaacttattttgtcacgtatgtctaactag

SEQ ID NO: 9424 - DNA, 345 bp, Lawsonia intracellularis
atgccaatagaacccatagctccacttctctttatacagcaaatgggacctgcaggaaagataataaaagatgaagctacacatccagaaacatcacaaacaacatttcgtcaagtagtagcagaggcattgagtcagcaaggaagccaagtacaaggtatagatggtataagtctccttatatcgctagatgaagaacctcatagtaataataagaattctgataaaatgcttaaggagtataaagagaaagagtcagctaaggaagaagtcaaagaggaagactcagaaatttttcaagatgaagtagatcaccttggcaactttgtgaaccgtaaggtttga

SEQ ID NO: 9425 - DNA, 729 bp, Lawsonia intracellularis
atgttaagagatggagttaaaggagaggattggatggacactgaatcaccagaggaaaaacaatccaatatcaaagagttacaatcatcagacaccacacagagtaaaagtcaaaaagttcagctagatattgaggatgcaccttttcttttagatacagaagaagaagctgtaccacttaaggctcctggagaaatatctcactctttaacagataccctggctagtgaagaagatcaggatagtatacttagaagaaaaaaacttagaaaacagaaaattgctgttattatattatctatttttattattgtaattgctataagttggtttctttttttccaagatgttccaccagtagaagaaccaacattacctgaaccaacagttgttattgttccttcagtagagaaaattacaggaccacaagagtacaaaattacctttgagccgtttactgttgcacagcctagcggtaatagtgtaaaatttcttaaggcaacatttgttggagtttctaaagatgaaaaagtcataaaagaatctaaaagtaaagagcttgttcttcgagatgctatatactattatctaagtaataagacacatggatatcttattgatccaaagaatactttagtgattaagcaagatttacttgatattgtaaacagttaccttattagtgggaaaatggaggatattcttcttgaaaattatattgtaaagtga

SEQ ID NO: 9426 - DNA, 381 bp, Lawsonia intracellularis
atgtcatatgacttgaatatgaaggttctggttgttgacgatttttctactatgcgtcgtatcatcaaaaatattttacgtcaacttggttttaataatgttgttgaggctgatgatggtactactgcctgggaaatgattaataaagaaaaaatagattttgttgtttctgattggaatatgccacaaatgacaggtatagagttattacgtaaagtccgtgctagtgaacaatatagcgaacttccatttcttatggtcacagcagaagcacaacaagaaaatattattgaagctgttcaagcaaaagtctcaaattatattgttaaacctttcactgcagagacaatgaaacaaaaaattgataaaatttttgattaa

SEQ ID NO: 9427 - DNA, 840 bp, Lawsonia intracellularis
taaaagaggttgcagaaacaattcaaagttggggtgtaccggtggcccttgatggcaatatcaaatttttctggaaaaagttccttttcagacaataaaccatgggaaaagcttgaatctggttctgttacttggccagacttttctgaccttgatcaggaggctattgtttgtcattatgcacctaagattcgttttcttgcatcacgccttaaagctaagcttcctaagaatatagaactttcagatttaattagtgctggatctttaggattaatggaagctctaggaagatttcgtcctcagctaggtattcggtttgaaacatatgctgagaatcgaattaaaggtgctatgcttgatgagttacggaagttagattggttttctcgtacgttaaggcaacgtattcgtcaaattgatggggcctcatggaaaatagaaaatgaaaaaggtcgtccagcaacagaagaggagctacatgaagttactggattagctattaaggatattcgaataggacttgaagctcttcagaataatgcttttttatctttagatgttattcaagatacagttgcacatcatacttccgaaaaggagggtgctccatatgaagatacagctgctacagagatagcagatagagtttcgaaactcatagacacattgacagatagagagaagttggtattatcgctttattatagcgatgagctaaatatgagtgaagcagcgtctgtaatgggtattacagaagggcgtgtttctcaattgcattcacaagcattaacaaggctcaggcgagagtttttaaaccagtatggtaaggttgactaa

SEQ ID NO: 9428 - DNA, 816 bp, Lawsonia intracellularis
atggcaaaagattttcctttggtgttttctgtgacatctggaaaaggtggtgttggtaaaacaaacattgctgtaaatttagcctattgtcttgcagcacttggtaagaaagtgcttttattggatgcagacttaggacttgccaatgtagatattatgcttgggatgtcacctgaaaaaaatctttttcatttatttcatgagggagcttcgttagaagaaataatagttgctactggttatgggtttagcattcttcctgcgtcatctggtgttatggatatgttaaatttatctacaggacaaaagttagatctactagagtctgtagatatgcttgaaaaagaaattgattattttattgtagatactggtgcaggtattaatgatactgtcctttattttaacttagctgtacaagaacggatagttattttaactcctgagcctacttctttaacagatgcatatgcattaattaaagttataaatcaccatcatggtgttgataactttagagttttagttaatatggctcaagatactaagtcagcaaaagaaatatatgttagacttcatatggcatgtgaacagtttttaaaaagtatatctttagatctcattggtattataccccgagatccaaatgttcggaaagcggttattaatcaaaagccattttgtttagaagctccagaaagtgcagcttcacttgcagtaaaagaggttgcagaaacaattcaaagttggggtgtaccggtggcccttgatggcaatatcaaatttttctggaaaaagttccttttcagacaataa

SEQ ID NO: 9429 - DNA, 1062 bp, Lawsonia intracellularis
atgcaggtaaaaacatttataggtccaagtactcagtccgttcttgctcaggtaaaagcagaattaggtccaagtgctattattttatctagtcgagatttccaaaaagatgggcaacggcaatatgaagttacagcaggtatagatcgtcctattacttcaggaggtaataatagtaataacttgaatggtgagagccctcctcagggttgggacgagtggtttagggactggacaaaagttaaagagcatctctatgccctcatgcaaccatctatacagtgggagcgtctttcttcaagacagcgtacagcactagagtatttacagcgtgaagaagttgatgatgctgtcattatggagttatatcatagattatcttctgttccgggtagctctccttttgaagcattgtcagaaattgttcctataagaccttggtcggcagagagctggccagagcgtatacaggggataacaggaccttttggtgcaggtaagacaacgtctgcattacgtatggcattattattacgaaaaactgatccatctataagaataggttttattaatgcagactgtgagcgagcgaatagcagacttgtgttaaaacactgggcagagttatccgagtttggatacttcgaggcaagtgatccagaatctatggaaaaagtaatagagcaaaatgaggataaagactatcttttcattgacttcccaggtattagtaatccaaaagagacattaacaatgcaattatccgcattagggctttctagcatggaatttgttgtgcatttagctttgcctccacattatgctacacttcaaaatcaagcttttctttcaaaatatcaaagtcaacatcttagtagtattgtatggacaaagctagatgaagcagcaacatatggctctatagttaatgtcgcaatggcaacaggtctacctatttctgcattgagttatggtatagggttaagtgatacactatcttcggcttatgaatctgttctttggaagcttgtttttaagcatcaattacctggtcaggtatag

SEQ ID NO: 9430 - DNA, 2091 bp, Lawsonia intracellularis
atggcaagtggtccaagtataaattacagccgttttgctaagcaaggtgatatattccttggtgcaggtgttgttgtcattcttcttgttatgcttgtccctcttcctacgtttttgctagatgtgatgctttcccttaatatttctctttctattttgattcttttaacagcaatgtttatgacttctcctttagagttttctattttcccttcattacttcttgttacaacattaatgcgattagctttaaatgtagcttctacacgtttaatccttcttaatggcgatcaaggtgcaaatgctgcaggtaatgttattcgttcttttgctgagtttgttgtaggtggaagttatgttgtaggtgctgttatctttttaattttatttattttgaataaagttgttattacagctggtacaacacgtattgctgaggttgcagcacgctttactcttgatgctatgccaggaaaacaaatggctattgaggcagatttaaattctggattaattgatgaagaagaagcaactaggcgtcgcgaaaatattagaaaggaagctgacttttatggtgcaatggatggtgcaggtaaatttgtacaaggagatgtaactgcaggactgtttattacccttataaatttgattggtggtattcttattgctgttgtgcaaaaaggaatgagttgggatagtgcccttatgacattttcccttctctctattggagatggacttgtttctacgattccttctattattatttccattgctgctggtcttattgtttcacgtgcagcagcagaagctaaaatgggtgaagaatatattgcacaactaacatataattcacgtgttcttaagttaacatccgcagttctttttatatttgcccttgttccaggtttaccaactattccattcttgttcttttcagcttccttatttatagtttctcgtattgtaggtaaaaattcagatacaactgcacaagataaaaagaaggctaaaggtggtagtgctgctagtgagcctgcaaatacaccagaggaaatgcaagatttactacctttagatacattagagctagaggtaggatatggtcttatccctcttgttgatgaggaacaaaatggaaatttactttcaaggatccgttcaatacgtcgtcagtttgctcttgatatgggtgttattatcccatctctacatttaagagataacttacaacttaaaccaggacaatatgttttacttataaaaggaaatcaagttgctactgctgaaattcttattgatcattacttagcaatggatcctggtaatgcattacaccagatagaaggtattgaaacaagagaaccagcttttaatttaccagctatatggatttctgaaatgcagcgcgaagaaacaatgcttgcaggatatacagtagttgatccttcaacagttattgcaacacatcttacagaggttttaaagcgtcacttagcagattttcttggacgtcaggaggtgcagggtttattggatacattagcaaagcactctcccaaagctgtggaagagcttgtacctggaattttacctcttggttctgtacagaaagtattacagaatttagtgagagaaaatgtttctattcgtgatatgttaactattgttgaagcattaggagattatggtggttcagttaagaatcctgacacacttacagaatatgtacgtgagcgtcttggtcggagtattactaaagcatatttagatagtgatggtgttctccctgtgattactttaggctctaagacagagcaaacattgcaagaggcaatacgacaagtagagggtggatcataccttgcacttaatccatccattgcacaacagcttattcataatattaatatggctattgaaggagctgtaggaacagatggtcaaccagtgttattagctactcctattgtgcgtccacatttagcacaattgattactagatttctccctaatgttcctgttatttcccaaggtgaaattccaccagatacaagacttcaagctgtagggaatgtggagattgattaa

SEQ ID NO: 9431 - DNA, 1074 bp, Lawsonia intracellularis
atgtctgatgatcccagtaaaacagagaaagcaaccccgaaacgacgtcaggaagctcgttctgaagggagtgtccctaaatcagaagaggttactaaagcattgactactgcagcagggatgctggggcttgctatttattcaggcgtaatgggacgtcattttgaaacaattttctactatatttttacagaatcatttcggtttgaggttacagcacagtcagtatatgctttatttatttatgttgctcaagagatagctattttattgatgccaatattactttttattgctgttacggcatggatttcattacgtgtacaagttggtgcattatggactacaaaggtttttaaatttaaatggagtaaatttaatataataaaagggttgaaaggaatgtttgcttctcaacaaacacttgttcgacttttacgtagtttagttcaagtaattgttataggtattgttccatatatgattataaaaggagagttttcaaactttttaccattatattatgcaagtccttcaggtgtggcagattatatgcttaatacaggaatagtacttgttttatatacgctaattcctatgacaattattgcagtcgcagatcttgtatataatagatatagttatgaagaaaatttgaaaatgacaaaacaagaaataaaagatgagtcaaaacaacaagaaggagatcctattgtaaagcagaaacagcgccaaaaaatgatgcaaatgatgacaaacagaatgatgcaagatgtacctaaagcagacgttgttgttacaaacccaaaacatattgctgttgcgcttagatataatgctcttgaggcaccagcgcctttggtattagcaataggtgtggatcgggttgcagagaagattaaagagattgctagagaaaataatattcctattagagagaatgtccctttggcacgggctttgtataaagcagtaggtgttggagagatgattcctgaagagctatataaagctgtcgcagctatacttgcaagtgtctggcgtttaaaaggaaagatgcctggacctcaataa

SEQ ID NO: 9432 - DNA, 789 bp, Lawsonia intracellularis
atgaatttatttaattttgatcctagtatgtttcttagttttttacttacatttttacgtattagtgttgtcttatttatgcttccttttttttctattgatggttttcctaatatgttaaaagcatcaatagctcttattctaactatagttctttgggggcgtctttctctttcaggaacacaaatgccagcgcatcctttcgatctagtattgttaatcataagcgaggtttttcttggtattgtattggggcttgcggtaaactttttctttgcaggaattcaagctgggggagaaattcttgctacacaaatggggtttacaatgattacgcttgcagacccattaactggtaacaccacaggttttattgcacattttctttatatggttgctacattagtttttcttgctcttaatggccatttgtttcttataaaagcttttacatatacttttaaaatggttccagcaggaggacttgttgtaagagaaattttattgagtgaacttcttaatatggcagggatgatttttgtttttgccttacatgttgcggcaccagttatgtcagctctttttttagtagagatctctttaggacttatggcaagagctgctcctcagattcatattatggaagttggatttcctgtaaaaattggtgtaggattttttttcattggactattatttactatcttatcaaaagaaacctatcgatttattgcaggcctagagggactattttttaacttacttactgtaatgggtagtggaaaatag

SEQ ID NO: 9433 - DNA, 591 bp, Lawsonia intracellularis
atgaacagtgctgcactaatagaaactattacccaacttatatctcctcttattacagcacaagggctaaaactttggggtattgagttgattaatatacctcaacctattataaaaatttttgtagatacaatagaaacaaacaggttgcatgaaaataatataataaactctaagtctgagcaaataacaatagaacaatgtgcttcactttctcgtctaataggtttaactttagaagttgaagaacttttccctaacaaatggacacttgaggtctcatccccagggttggaacgctctttttttactatacaacaacttagtaattatattaatcatgacattgatgtcacacttaaagaacagcatcctttgtggccaaaccgcaaaaaattttatggaacgcttattagtataacagacaatacatttatgcttaatttatcattagcacaccgcaaatctgatgagccagaaaatgttagtattaactggcagcaagtacgtaaagcaacacttgtacaccatttctttcagccaaataaaaaacttggatcaacaaaaggtctcaatggaggcactacatga

SEQ ID NO: 9434 - DNA, 1323 bp, Lawsonia intracellularis
atgaatctagaattaaaaaaagctcttgatcaaataagtaaagataaagggcttgatcgtgatatgcttgttgatacacttgaagatgctgtaagaacttcggttattcggagatatggagataacctagatgttgaggtaagctataatgatgacacaggagaaattgaagtctatcaatttaaaattgtggtggaagaggtaacagatcctatcacacaattgtctattactgaagctaagactcatgatccttctgcacaactagatgacgaaatgggattccgcttaaaagttgaagacttagggcgtatagctgcacagtcagcaaaacaagttattattcaacgaatgcgtgatgcagaacaagaaattatttatgaagaatataaagatcgtattggagaaattgtcagtggtattgtacaacgccgtgataaaggaggttggattataaatcttggccgtacagaagctttacttcctaaagatgaacaaatccctaaagaacattataaacgtggagatcgtgttcaaggtctaattatagatgtccgtaaagaaggacgtgggcctcaagttattatttcacgtgcacatcgagactacatggctgctctctttcgccgagaagtccctgaggttgatgatggcacagtacaaattatgggtgttgcaagagatcctggaagtcgagcaaaagttactgttctttcacgtgaacgtgatgtagatccagtaggcgcatgtgttggcgttcgtggatctagaatccaaaatatcgtccaagaacttcatggagaacgtattgacatagttatctggagcccggaaataactacatatgcccgtaatgcacttgctcctgctattatttcacgtattactgttgatgaaactgaaaaccttcttgaagtaacagttccagatgatcaacttacaagtgctattgggcgtaaaggccaaaatgttaaattagcagcaaagcttctaggatggaaaatcgatattttcactgaaacaaggtataatgaatcaaatgctgttggacgtggacttgaacaagtcgcaagtgttgctgagatatctatagaaactttactccactctgggcttaacactcttgagcaaataaatgaaacatctgacgaagaacttattgaaaagttaggtatttctgaatctcaagttaacgacttacgtgcagctgttaactttcttagtacaacagctaccgtcgatagcaataaaaagaaaaaagaagtagaagcagaacaagcaaaagataacgaaaataacccagctgatacagcagattactag

SEQ ID NO: 9435 - DNA, 2886 bp, Lawsonia intracellularis
atgataaatgataaaattaaagttaaagatcttgcaatagagcttggtgtttcaactaaagatcttttacgtgttttacgagaacttgaaatttctgcaaaaagcacaataagtaatatatcaatagaagatttacctaaaattcgtgcacaatttaatactcctaatacaaataaggaagaagaacgaagacaaatacaacctggtgtaatattaagacgtaaacgtcaacaaccttctactaaccagacagatattaaacttaatccagttgatactaatgttagtgaatctactatacaaacagaaaatcttatattagaaaataaaaatacattatcccctcatatagaagaaacaactgaaaaaatacctgctacaacaaatgaaatattatataattctcaaatagcaaaaatagttcaataccctacacctagtgtccctaataaaactttaacaacaacaccacatcaaacaaaaaaaaatcattctgaaaaagatgtgttagagagtcatgactcttctaataaaaacatcaaacaatcttcatctcaaaacacagaaaaaactaaccgtaaacctgcggcttctgctatccctgaaggatcttcagctccaagtttactgcctccagtttctgaacaaatacgtcgtttacacgatgaagagactgaaaactcttctagtgaagaaaaaaatgttgatatacaacaaaaagaaatcccatcaacacaagtgcgggttatttcaaagcctaatattacacagtcccactcttgggatgccaataatacacgttcttctagtgggcaacggactgaaactgaaaaacaatcaaatactgcccctcatactgatagtagagaacatactggtcataataaacgacctgtttcataccaaggacaaaatagaaataattttattgctactcctgatacaattcctaatgtagaacatgatggacaaaacaagaaaaagcgtcatactagccgtaggtcaacagagtttaaccataaatttcaatataataatgaagatgatgatatatcacgccaaaatcgtggaagaaaacgtcataaacaaaaaacaacatctcaggtaacaacacaaccaataaaactaacaaaacgtaaaattcgtgtagaagaagctattagagttgctgatatggcccatcaaatgggacttaaagctaatgaaattataaaagtgctctttaaccttggtgtgatggcaacaattaatatgtcattagatattgacacagctactcttgttgctgctgaatttggatatgaagtagagaaaattggatttacagaagaagattacttagtagcaacagcacctgaacaatcagaatctctaaaacgtcgacctcctgttgtcaccattatggggcatgttgatcatggaaaaacatcacttcttgatgctattcgaaaaaccaatgtcactggaggtgaagctggaggtattacacaacatattggcgcatatcatgtaacaactaaaagtggtgaaattgtttttcttgatacacctggacatgaagcattcactacaatgcgtgctcgtggtgctcaagtcactgacattgttgtgcttgttgttgctgctgatgatggtgtcatggaacaaacccgtgaagcagtcaatcatgcacgggctgcaaatgttcctattatggttgctgtaaataaaatggataaacctgaagcaaatccagatcgcgtcttacgtgaactttctgacatcggccttgttcctgaagactggggaggtgacacaattgttactaaagtttctgcaaaatcacttgatggtattgacgaacttttagaacttcttgctcttcaaacagatatcctagaacttaaagctaatcctgacaaaccagcaagaggccacattgttgaagcaaagcttgataaaggtcgtggtccaatagctacagtccttatccaagaaggaacgctgcatcaaggtgatacttttgtttgtggtgtctttagtggccgagtgcgagctatgtttaatgatcaagggaaaaaagtaaaagacgcaggaccatctatgcctatagaagtccaaggatttgaaggagtacctgaagcaggagaagcttttatttgtttacctgatgaaaaacttgcaagacgcattgcagaaagccgtgcaataaaacagcgagagaaagaacttgccaaagaatctagggtaaccttagaaaccttcctctcaaaaacatctaatgaaaaagaagctcaagtgcttaatttagtagttaagtcagacgttcaaggttcactggaagcaattcttgaagcactacgtaaacttagcactgctaaagtacgtattaatattattcatggtggtagtggtgctattactgagtcagacatcttacttgcctcagcatctgatgcaattgttataggttttaatgttcgaccaacagcaaaagtgaaagaagtcgctgagcaagagaatgtagatattcgtttctatgatattatctataaactagtagaagaaataaaaagtgccatggctggccttcttgcaccaattagtcgtgaagtatatcttggacaagctgatgtacgtgaaatttttaatgttcctaaaataggaaccatagctggaagccatgtttcggatggtaaagttctacgtaatgcaggagtccgactattacgtgaaggagttgttgtttatactggtggtattgcctccttacggagatttaaagaagacgttagagaagtccaaaaaggctatgagtgtggtattagtcttgaaaacttcaacgatatcaaacttggtgatgttattgaatcatttgaaacagtggaagaagctgctagcttatag

SEQ ID NO: 9436 - DNA, 999 bp, Lawsonia intracellularis
atggctaactatcctccatctgctgaagaaattgcttctcttatacaacgttatgatcgtatagtagtaacttcccacattaaccctgatggtgatgctattggtgcttgtggtgtggtttcctacattcttaaagcacttggaaagcgttttattatatataatgcaacaggtattccatatcatctagaatgggttcctttaccaacaaaagttattacaaaactaatggatattccatttaagccagaattatttattattttagactgtggtgatatttggagacttggtagagaattatcttcctgtcttttagaataccagtcaataaatattgaccatcatataggaaatccaaattttgggacattagctaattgggttgagccaaaggcagctgccacaggtcaattagttgcagctattgctgaagttattggaatcccacttacaggagagctagctcaatgcttatatctctcaattgtgacagatacaggctcatttgcatatagtaatacaagcccaggagtattacacttagcagcaaagcttattgaactaggtcttaacccctcccccataagagaacagcttgataatcaatggcctcttgcaaaatttcacctatggggaaaacttatgcaaaaaatacagttagaatatgatgggcaaattgctatttctgctgttaccttaaaaactattacagattttggagctacaaaagaagatttagaaggctttactgaacaaatacgaaaaataaaaggagtacgtgttgctgctcttgtaagagaagatcctggagaaagttgtaaagtcagtcttcgttcatcaggaacagataatgtacaagctgttgctatacagtttggtggtggtggacactttaatgcagctggagcaacaatccatgaacctatagaaactgcagtaaaacaaatattagaagctatacaaaaaattacattttcaacaactgatgtagactag

SEQ ID NO: 9437 - DNA, 651 bp, Lawsonia intracellularis
atgtttggtgttgatcctctaataatcattttaggtttaggagcacttggactagctccgtttgttataatgatggttacatcatatgtaaagatagttgttgtaacttcactgatccgtaatgcattaggtgtacagcaggttcctcctgcaattgtaatgaatggattagcaattattttaagtatatttattatggctcctgtatatatgaagatggaagacttgtatcttaaaacagcacttccctcatcgccagcagcactagaagttataaaagctctttatgatgcaaccccacctttacgtgaatttttaatacgtaatgctgatgagtctactattagaggcttaatggtgacggctaagcgtatttggcctaaagatcagcatgaaactatttcacgcaataatttacttattattattcctgcttttacaattacagagttaacaaaatcttttcaaataggttttttactttacttaccatttgttgcaatagatcttgttgtatcaaatattttgcttgcaatgggcatgatgatggtttcaccaatgactatctctttgcctttcaaattattgctttttgttacattagatggctggttaaaaattagtcaaggtttaatgttaagctatagatag

SEQ ID NO: 9438 - DNA, 1083 bp, Lawsonia intracellularis
atgtctaatctggggtcacagggagatatacaactatttacacctcctttgttgtcaaaattagcaatgaggttactgaatgaagttacaactctcacaccaccatggataattcctcttggtgaaacaagttgcattgttcacttagggcaaccttctttatatgttgctgaaaaagtctttctacgattccaatgtgaaaatgatttgatacaaatagcattagaagatttaagtattctatggttacatccagctttatcttctgtaagatatgatagtccattatcagatgttgttattttacctatactagaagctttatttgccccattaaagcataagttacagaatatattacatgtacctgtaatatttttaggttttttctatgaaccattagtagattatcagtttggatgtgtgattacattaatatttgattctacaaagttagaagagaataaatcatatacgggactaatgagatcaaatattcctctcaggatttatattccagaaggaaacagtgcaaaaaattttttaatatatttacagacattgccaaagaataatgtaatgccattagcactacccttagaaatgaatataagagttggatatagcttattaacaattaaagagttaatgcaacttacaccaggtgatgttttattcccttatgattatcctatcctgagaaatagattatccttggtatttttggataaagaaattttttgctctgtagagggaagacacataaaggttcttgggtggaatggaacgacgttattctctcagaagtcaccagtgatatggagttcagagtccacaataaggaataaaagtatagagcatccactggaagttcctatttcttttgaaataggaaaatataatactacactgagtgagttagagcattttatagaaggacatacatttacactggagttagatattcattcacctgttatactttcttttgaagataaaactattggtacaggtgtattaatgaattttaatggagttattggtattcgtatattagaattttcaacaactattgatgaatag

SEQ ID NO: 9439 - DNA, 498 bp, Lawsonia intracellularis
atgtccaaatatccattagctccgcttctttctgtccgagagcataaggaagagttggcacaacaggcagtactaagagctgaaaatgcacttgttgaggcaaggaaagatttacaaaaagctgaagaagactgtaaaaattatgaagaatggtgccaacaggaaattaatagatactatagtgaaattataggctcattagttctttttaaggaattagaattattaaaagtaaagacaggtattttattagataatgtcaaagaaaagtataagcttgtagataaggcaaaagattatgttgaagcttgtatagaagcaaaagagagagctattaagaatcttacagaattaaaaaagcagacagcaaaactcgcagaacataaaaagttatgggaagcagaagaaaaaattcttgctcaacaacgtgaagaagttgaacttgaagacttcaaaatgcctgaacgtgaagaagaacaagaagatatagatgaataa

SEQ ID NO: 9440 - DNA, 1317 bp, Lawsonia intracellularis
atggcgcttgaatatattgcttcactccttgaagaggctgtgcagaatacaagtcctgtagaagttagaggaagggttgaacaagttattggtacaataattcgtgcagttgtcccaggcgttaagattggtgaattatgtgaactacgtaacccatgggataattggaccttacaggctgaagtagttggttttgtaaaacatgtagctttacttacacccttaggagatctccaaggtatttctccctcaacagaagtaattcctacaggaatggttcatgctattccagtgggaagagagttacttggtcgtgtattaaatggacttggagaacctatagatgggaaagctccattacgtttacggacatactatcctgtatatgcagatcctcctaatccaatgttacgtcgaattattgagaagccaatttcattaggtcttcgtgtattagatggaatattaacttgtggtgagggccaaaggatgggtatttttgctgcagctggtggaggtaaaagtacacttttatcaagtattattaaaggcacaactgctgatgtttgtattttagcattgattggtgaacgtggtcgagaagtacgcgaatttattgaacatgatcttggagcagaaggtttaaagcgttctgtacttgttgtatctacgtctgatcgttcttctatggagcgacttaaatcagcttatacagcaactgcaattgctgaatattttagagatcaaggaaagaaagttttattacttatggattctgtcacacgttttggtcgtgcattacgtgaaataggccttgcatctggagaacctccaacacgtcgtgggtttccaccttctgtcttttcttcattaccaaaacttatggagcgagcaggaaactcagataaaggttctattacagcattatatactgtccttgtcgaaggtgatgatatgacagagccaattgctgacgaaacacgttctattctagatggtcatattattttatcaaggaagttagctgcagcaaatcactatcctgctgttgatgtcttagctagtgtaagtcgtgttatgaatgctatagttacaaaggaacataaagaaaatgcagggaaattaaggaaatatcttgctaaatatgcagaagttgagcttttagtccagataggagaatataaagcaggtaatgatcctgctgcggatgatgctataaaacataataaagggattaatgcttttttacagcagggcctagatgaaaaaagtacttttgagcaaacacttcaggctttaaaaaaagcggtggcttaa

SEQ ID NO: 9441 - DNA, 615 bp, Lawsonia intracellularis
atgggcacctattttcgactaacatcatcattaccagagttgacagaaagaattcctttattaaaggcagactttttttcttctcttatctcctccagtgaactatcagaagctgttactaagcgtattaatgaactaaaacttcatgcagaagaagtatacaagcaaaaaggaaaagatggctatgaagatggcaaaaatgaaggacttcgtgagaacaaagagcatgtgttagaaacagtattattatctgttgaatttattgaaggtattgaagatgaccttgtacagattgtgatgaatacagttaaaaaagttcttaatgaaatggatcccgctgaacgtattatacgtattgcacaacgagcgctaaagaatgttaaatctcaaaaagagttagttatccgtgtatctacagctgacgaaaaagctattacaaaaaagttttctgatacattaaagtcaacaaaaggtggatttcttaatattgttgttgatgccaggttagaaccaggttcatgtcttgttgaaacagaatatggtgttgtagatgcaagtttagatgtacagcttaaagctttggaaagtgctttccattctaaaattaaatattaa

SEQ ID NO: 9442 - DNA, 705 bp, Lawsonia intracellularis
atggataaagtattttttcttgagataatcattaataaacctcaattatttgaggcaataatagaatttaattgtaatttattatataatgtaatgatccagacagctgaagaaatggcttcttttacagatgctactcctggatttgataattcttttatacaaaagcttgctttacgaggaattgctttaaagaaagagcgactaatggaaacagaatattgtttttgggattttatggaagaaacaagaaggattgcattacttgaaccagaaacagtaaggcgtcttcaactagtttttggtgcagccattaatgcagatgaaattgcaaaagttttaagaagggatgaagtcctccaattacagcagatccttgggcaagatctttatcaatatagcttattgcgtggtagataccaagtcggtgcagtacgcagattttttttagcacagagtcattccattccattaacaacccgtatccattgggatggtcgtatggctttagagatttgtgcatcttcatggcctagtgttcttcaatctatatttttttcacagcttaattttgttttttccacagaagacagtgctgtactgtctcaggattatccttcacctgttattaaaggggtttgggatgggctaaagaaaatacttcttcgagaggttgcaccacaatgggcacctattttcgactaa

SEQ ID NO: 9443 - DNA, 873 bp, Lawsonia intracellularis
atgcttttaacagacagatatatagttaaagcaacggatagcaatgtatatccattaaaaaagtgggacaatatcttactgttatttattattttttttagcattatttttatatcagggtgtaagttagaagtttataaggggcttacggaagatcaggtaaatgaaatggttgctacattaatctatagggggattgatgtagaaaaatctccaggtggtaaagaaggattttctttacttgtggcagaagaacagttgataagtgctttagagattttaaaaaagaatgcattacctagagaaaactatgttagccttggggaagtcttttcaggccaaggtatgataagttctcaatctgaagaacgtgcacggatggcctatgctatatctcaagagcttgcaaatactttttctcgtattgatggagtattaacaacaagagttcatgtggtcccaggctatacagatcaagctgttgattctaaaatccttccatctatgggtatttttataaggcatacgcctgattcgcctgtagtaaatatgcttcctagtattcgtgaagttgcggctaaaagtcttcctgatcttgaatatgatcgtacctctgtgatgttacttcctgtacaagaacctttgactattccctctatgggctcttcaacctttttaggtatatcacttttcccagaacgaggtagtccttattttcttattggaatgggaattatctttttagccattatatttgggatatttttttgtattggtttagtgttatttcaaaaagatatacccattgctaaaaaaattgataatgatggatctatatcaggagaacaaactattaagccagaagagcaataa

SEQ ID NO: 9444 - DNA, 378 bp, Lawsonia intracellularis
atgctttctgaatatcaagtaaaaaggctgcttgatacagctaatacagcttgccattatggattagttggtgtggcacgtaaaatttatgatggtgttttggcattaaaaccaggtttcccaccagctttaataggacaagcactgagccatattgttatcgatgagtttagtgaagcagaagaaatcctcacgaaatatttagaaaaagttccagatgatcctgatgcacaagtatttttaggaattacttatatgttcacagggcgtggggatcaatcatcgctgttatttgagaaagtagcagccactgatggtgcagccagtgtctttgccgtagatttacttgaggtaatgaaaatacagttacagtcataa

SEQ ID NO: 9445 - DNA, 297 bp, Lawsonia intracellularis
atggcattcaccaagaaagatcttgaagcacaagaacggcaatatttagaattaaagcaagagttagagaggcttaataaagaatatgatgaacgccttgaagctcttggtgttactgaagaaaaacttgaagagtttgttaaacaacttcctccagaagttattagaactttagaagaagaaaaacaaaaaattcaagaaaaattttcagatattcctgtaacaaagaaaaaagaagaagatatatctacaaaaaggaaaaggatagtttctagaagaggagttgtaaaactctaa

SEQ ID NO: 9446 - DNA, 363 bp, Lawsonia intracellularis
atgataacacatgaaattgaagagtttggtcgtcgtatgggaatgtcagacttagaactttctcaagatggtatcattgcatttgaagttgaagacctaggatctttacatatagagcaagatgaagaaaatgaagaactttttatatatttagcaacacctgtaccaccatataataatgatattcctaaaaaagttcttgaactatgtagttataagcatgcacatccatttatactacatggtggtatacataatgacaacgttatatttctttctagaattagctatcgtgatgtaaaagcatcaactattgaaaatacaacacaatttcttataagtattacacaaaaagtgttgtaa

SEQ ID NO: 9447 - DNA, 342 bp, Lawsonia intracellularis
atgctgctcacgtccgaacagcgacaaactttatatatcttaggatatctttacatacgcatgggtctaaatgactcagcagaaagactttttaaaacaatacttagtctctttcctgaagataaatggtctcatcgaagccttgcagtgatcgccatgaggaaaggtgatagtatttcttgcttagcacatatttataaagcagtagcaggggaacatagtatagtaaagcatgctccactacttcttttacaagcacaagcattatggaatcttggacgttattctgaatcaaggacatctatccaaaactatattaaaattagaggaagtcgaacatga

SEQ ID NO: 9448 - DNA, 2103 bp, Lawsonia intracellularis
atgagcttattcgctaaagctcaatcgactgtaggtgttattacacgaaataatgacatcactatggtccttttattagtgactgtcatagcattaatgattatcccattacctactcctttagtggatacactgattggtattaacatgggactttcatttcttattgtaatgatgtgtatgtatgttaagacagttttagatttttctgtttttcccactatgctcctttttacaaccctgttcagagttggtttaaatatcacaacgacaagacttattttactccaagcagatgctggagaaatcatttttatttttggtgaatttgccttaggtggaaactttgttgttggagcagttgtctttgtcattctaacaattgttcagttccttgttattgcaaaaggagctgaacgtgttgccgaagttggtgcacgctttacccttgatgctatgccaggaaaacagatgtctattgatgccgacatgcgcgcaggcgttattgacatggaagaagcccaaaaacgtcgtgcacgaataaatcaagaaagccaaatgtatggagctatggacggtgctatgaaatttgttaaaggtgatagcatcgcaggaatgataattgctgttgttaatattgttggaggtaccattattggggtcacacaacatggaatggctgcctctgatgccttacatgtttatggtattctgaccattggtgatggtttagtctcacaaattccatctctgttaatctccattgcagcagggattctgattactcgtactggtgactcagctgaaaatgttggttctcaaattggtgaacaaatatttaatcagcctaaagctcttttaatggcaggtggagttgtatttcttattgcactagttccaggttttccaaaaattcaactttttgccatttcagctactcttgcaggtattgggtatacactaaaacttattatgactaaccctgcacctaaaaatgcaaaacaaagtatagcaaaaacattagaacctacaacatcaccttcaaaaaaatcttctactgaacagaaggaatcaaaagaagagttttcaccaactgtacctattatattagatatatctcaacaaatgagtgaagagttagattatgattcactcaatgatgaacttataacattacgtcgtgttctatactttgatcttggtgtaccattccctggcattaatcttcgcatctcatcaaagctacatgaccttacttattccttaatgattaatgagattcctataaccaaaggaacacttgaaaaaggtatggtcttagcaagggatacaaaagaaaatttggcaatgcttggagtggaacctgaagaaaaagaaaaatttcttccagatgttgagtctctttgggttccagactctaaaaaagcattgcttgaacgggcaggaataacatgtatgacacatagtcgcattcttgcttaccacttatcccttgtcctttcacgccatgcttcaaactttctgggcatgcaagaaacaaaatatctcttggataaaatggaagaacgtgctcctgatttggttagagaaacaactcgattattacctgtacaaagaattgctgaaattttccaacgtcttgtacaagaacaaatttctatacgtgacttaagaagtatccttgaggctcttattgagtggagccctaaagaaaaagatactgttatgctcacagaatatgtccgaagtgcgttaaaacgtcaaataagttacatgtactctaaaggtcaaaacatgctacctgctgttcttcttgatccaaacgtagaagaaactattagaaaatctgtaagacaaacttctgctggggccttccttgcattagatccagaaacaacacaaatatttatggcatcccttaaagagtttgcatcagagaccaatctaacctatacccaaaaacctgttttaatcacttcaatggatattcgtcggtatgtacgtagactcatagagggagattattacaaccttcctgtagtgtcataccaagaacttacaccagaaatttctgtacaacctgttggaagaatacgtttctaa

SEQ ID NO: 9449 - DNA, 261 bp, Lawsonia intracellularis
atggaaacgacaactatgacatatacagcaaaagcactttatttagtgcttgtgctatctatgccacctattcttgttgcatcacttgttggactttttgttagtttaattcaagcaattacacaacttcaagaacaaacacttgcatttggtataaaacttcttgctgttgtacttactcttttttttatgggtggatggttaacaggagaactctatagatatgctgaagaaattttcaatcgttttcatatcatgtaa

SEQ ID NO: 9450 - DNA, 816 bp, Lawsonia intracellularis
atgaattatgatcaaacaataggtgcacttggtgtatatgatcactttatagcattcttaataggaacaccaaggctcttcatgattattcaagttgttcccttcatgggcaataatattgtaacaggtcaacttagagttgttgttgttttctcattttatctattattatcacctgcacttgttgcacaactaccacatatacctgaagtagatccctcactccttcctcgtattttagcaatagtaataaaagagggctttataggattttttttaggataccttggaagtatggttttctggatgattgaaagcgtaggactctttattgataaccaaagaggagctgccatggcagcacagacagatcctttgtcagggagccaaacttctcctcttggttcttttctatttcaatgtcttgtgtatatcttttttaccagtggggcttttattacctttttaacacttatatacaaaacatatgaattctggccaccacatgaatttatccctatgagttggaaaatgcgtcttcctgaattaataataaaacaagtagattggcttatggcttatacaatgctacttgcaggtcctattgctgtagcatgtttacttacagatgtttcattaggacttgttaatcgctttgcatcccaacttaacgtttatgtccttgctatgcctataaaaagtgctgttgcggcttttctccttattttctatttcaaattacttctagaaaaagctacatttttatttaaaccttttgaaactgttctatttcaaattaagagtctcatacaatga

SEQ ID NO: 9451 - DNA, 1083 bp, Lawsonia intracellularis
atgagtggagatagcggagataaaacagaaccaccaaccccgaaaaagttgcgtgaagcaagagagcaaggtgacgttgctaaaagtcaagatgtcgctgctgctatgacaatgtttggtgcttcattatattttattggaatgtggcaagatgtctttagcaatttgcttaatttaattgaattaccaacaaaatttatacacctaccatttgaagaagcactccctgctacaataagcggaattgcatcaatagcttttagtatacttatacctatcattgctactcttatgtttttagctgttgctgcagatttaatgcaaataggcgtattattctctgtcaaatctgctatccctaaacttgataatcttaatcctaagaagtggttttcaaaagttttttctataaaaaatcttggagaatttgtaaaaaatattcttaaagttagtgtattaactattactgtatggattattttatcaaattatatcaaagaattatttgcaatagcttcaggaaatatttggagtttatggtacatattaggatctgttttaagggatctaacccttagcgtttctatggttttttctgtcattgcatgtatcgatttcatgtttcaaaaatggcaatacaataaacgtcaaatgatgagtaaacaagagatcaagcaagaatataaagatatggaaggtgatcctcttataaaaggaaaaagaaaacaacttcatcaagaaatggctatgcaaaaccctgtaaacaaagtaagaaaagccaaagttgttgtagttaatcctatccactatgctattgccattgactatgaaaaaggaaggacactccttcctgtaattctagcaaaaggtgaaggattattagcacaacgtatggtagctgtagcacaagaagaaggtattcctgttatgcaaaacattccactagctcatagcctttttatggatggaattgaagattcctatatccctagaaatcttattgcaccagttgctgaggttttacgctgggtaaactctttaaataaaaatatgatacataaacctatatctaatgatacttaa

SEQ ID NO: 9452 - DNA, 4149 bp, Lawsonia intracellularis
atgcgttactttaattttcataatcttgctagacaacttattatatctcctaagttttttcttatcatttgctcatttatttatttaacctatattttgcttctacccttagttcatgctaataatgatacaaataataaccttaatacagatttaactttttctcctgaagaaacatcaactggtattataacagatagagtaaccccattattagattggattttagatcaatcaggtcaacttacaattaatcaagttctctctccagaagtacaacgaactttctcatcatttctatttactgaccttcctaagcaggaaggaactttttggtttcgttttgtaattgactcaacaaacaggctttcttcatctgactttatacttgatttaagtaaacgtactcctactcagttccctgaaccaacacaagtatgggttgtgtctatgggctctgggaaagcaacactaattaatccaattaaagataatagttatccaatcaaatactcaggagctgaagtccttgaagtatatataaagctacctggtgcaccaggagttggttttactcctgttctctggacaaaaaaaagcttttcgaccttttatgcttctatgcatgttgctatattatttttgcttgcaattactattgctatctgtcttattcgagcatttacagaaaaacaagaatggagaatttgggctgcactttattcaggatctattctaataagcacactatggggacttcctcctacccctaaggggatacttactatttgggatatacctggtttactagctccaggaatagcactatttattctaccacacataggtagacgcctgatgaacacaaggcaagtatcacctcatattgatatacaacttttacttcttactcttccaggattagttttatcaattcttcctcttattcctggatatctttggactttaccatatctttctgtttggccacttataactattctctttttacccacttgtttgtatgcaagattttgtgatctaaaacaatcaaaaacattttttactatatgtgcattcccatctattgggatattgcctcttgctatttctatcaactctatgcctcaatatattcctataggtctaattaacctctttcctataataacacttactctaagtgctatgcttgttgcacttgtacctaatccaaaaccttcttctggagctatacgacgggaacacccttcttctaacataaaaataccatctatacctaataaacaaaataagatacagatgaagaaagaagaagaacaaagaacaacaactacaaatttaaatatagaaagtcttgaacaacagctacgtgcacctttagagcgtatacgtaaagaattaagtatacttaatacatcgctacagtcgacacccttacaacagcacattgaatctattgaaaatacagccgaaggtctttctcatattattaatgatatacctgaactatttatctccaaaactcatactgacaaagaaatttttgacttaaaccaaatagttctgggtatccatgatgctgtcaataacgatgcagaaagtaaaaatcttgctttttcttggtttatagcaccgcatctttatcaaaaatatgaaggtaacccaacgcagctaacacaagtcctttatatgcttgttgaaagctccatacaagctacagaaaaaggacttgtacaactacgtattcaacgggtacctaatagtataaaccctggagaactacttattacagtttctgactctgggaaaggatcaccaccaattacacgtagcccgcttgctcttattcatgcttgggaattagcaactagcactggtggctctgtgacaatgaaaagtgagccaacaggaacaactatctcatttagtatctccctcactgctaaacaaacaactacgtctttatcccaccaacatgatgagtcaattactactactgaacagccaacaacacaattatcacaaattattattgttgatattgtccctagcaatagacaacttttaacttactacttagatgaacttccctataatatctttgaagcacaagatgttactactgtctataatctatataaacaatctccaggagcagttatcatttttggaccagaactgtctgaaactattgctattgaaacaataggagctattagagtatttgagggagaacacaacttccttcctgcaccaatattagctatttgcaaaacagaagctcaaaaagaaagactcctaagaataggctgtacccatgtaattatcgaaccattaactcgtaagacctttcgacaaactatattacagttatcgcctatttctagccatacccaagctatacctagtcctcttttggaatcaacatctaaaaaaatcaaacagacagcacctactagttctgttaactcaaaactaatagacacagtaaatgattcacaaataccatgcatggagacgcctatacaggatatacccatatctcctcatgcctctctctattctgaagataatacttcagagtatactcatgaaaaaaaggggatagcactcctaaaaaccccagatcaaattaaaacaaaaaaactttctataattaaaggagaacctacacctatttcttcttcgactcatcaacaaaggaatgatacatctctaaccaataatgttagctacaaagtagaacaatatcctcttatgagttcatcagagtgggttggtgaacctactcctattactaagcaaaaaacttctactaataaaacttcagctagattatcgcaacattcatcagaatgggttggtgagcctattcctattataaaacgaaaaaaaccaccaataaccccacctaaaaatgatcctttacataatactgtagagtgggttggtgaacctatgcctattactatagcacagcaaaaatcattaacaattgaacaacaacctatagttaatctaacaatagaagatgaacaactatcctcagaaaaaagaaaaattgttgaggaaaactatacgacaactatagaaaaaacactgtcagcagaacctaaaccacacgagcaacttgcaactattactaaagaaaagatagaacacattgaacctatagtaacaacaaatgatatacataaaaataacctattagagaatggtacatcttttaatgaaaaatcagttatactacaaaactctatagagatacctgaagatttatcaatttattccccaagtttacacattcaaaattcccctgaaaaatcttttttatcatcacaaagtgaacctgataacaactctcaatgcattaataactcatcaaaagaaatagatacaattcaagaagttcccataacatcatctgactcggctattatcaatcaaaaagataataaacatcatgataacctattaacagctactacaactagacaaaagaagcataataattctcgtcaaaaaaactctcgacatcaaaaatcatcactatcattattagatatgataacaataccaacagaagagaaccaagaaacaaaccatacacaaaaagctcttaatactgatagctacttatctatggttggacaccctgagataccagaagaacatatcataacattaacagaaacagtagatacatacaaaaaagacacattatcagtaaaaaaagacataccagacttatttagtgttcaccatccaacagaagtcatagaagattttacttatccaaaggagcagtctgaacaactaagtatgatgcaactttttagctcaacacttaacattgtcgaagaaaacgacttgggaactcattctaaggaacttttccaagaattagatattacattaggattattacaacaagctatccaaacaaaacaatctgaaaatcttgtatccttttcacaggtcattttatctctctctgaacaactaaagttaaaacatctaaaaacactttcttactctttactcgacgctatccaaacaagtaaagaagatataatagaacaacttattaaagatataaaagcagaagtacaacataaccaaggggatactacagacttattatag

SEQ ID NO: 9453 - DNA, 1266 bp, Lawsonia intracellularis
atgcaaaatatacgctctagttatactgactctattaatttctttggtaagacatcacctgaagaactaataaaaatttatggttcacctttatatgtatataatgaatccataatccgacaacgatgtaaagaaataaaaagtctatcttcctatccaaatttttttgtatcttattctgctaaagcaaatacaaatcctacattactctctattattaaagatgaaggatgtcttgtagatgctatgtctcctggagaagtatatctccataaaaaagtaggatttaagtctgatgaaatactttatgtatgtaacaacatttctgcagaagaaattcaatatgctattgataacaaaatccttcttagtatagactcactttctcaacttgaaacctatgggaaacttaatcctggggggaaaataatggtccgtattaaccctgggataggtacaggacatcataaaaaagttataactgctggaaaagaaacaaaatttggaattaatacagaacagtttagtgatgtaaaaaaaatagtagatacgtatcaattgatgctagttggaataaatcaacatataggttctcttttcttagatccccaaaattatcttgactctattgcttttcttcttcaatttatagacaataacccttggatttttgaacagctagaaattatagattttggtggtggttttggtattccttacaaaaaatatgaagaacaaccacgacttgatctcaaaaaaatgtcagaacagttcaatacaaaaattatggactgggtagcatcaactggttataaaggacgtttctatattgagcctggccgttatatcattgcagaaagtgggatattacttggttctgtacatgttgttaaatataatggtcctatacgctatataggaacagatgtaggattcaatgtccttatgagacctgtattatatgatgcttatcatgagattgaagtctatcgtaaaaatggtacaccagacttacagcttattccacagactgtagtaggaaacatttgtgaaagcggtgacattatagcaaataagcgtcctctacctctcattcaagaaggagatataattggtatcttagatgtaggcgcttatggatttgttatgtcatcaaactataatcaacgtccaagaccagctgaagttctcattcaacagaatggtgaaccaaagcttattcgtaagcgtgaaacaattgaagatatgaatattcaacttcattaa

SEQ ID NO: 9454 - DNA, 1179 bp, Lawsonia intracellularis
atgccttctttttcttttgtattaagatgttgcctgctctttttaatggtactaacctcacaaaccttgtctgtttcacagccactaagagaagaagctgaagggaatttaccacaacatattgaagctaccttaactaaccttattgaagcaacttcttcaacaaaacaatacccttctgtttcacagcttgatacaatccttcaatttgtaacatcgactaatgaacaggctcataaaatccttccagccacacgtgattatggtaaaggtattttttataaaactactataaatattccactgtctaccttaattaaatattttcttaacccagaaattccaggagaagcactttatcctacaagtatccgtcgtaatgtatggcaagaaggaagtgaaatcctccaaaatagtaatatattcttagcagcacctcttcctccccaaaaacctattttctctcgaggaacagaatatgaagaaataactcctgatatatctagcggatgttattataactatattttaaaaagactatttattttatataaatttaagagtgaaacagcgtttattactgtttcatttatgccaaaagaatcatctgttggattacgtggcggtgttattggtaaagatactgagtgggattatgtctatggtccagacataggcacaaacctgcctatgctaacatgggcaaaaacatatctttatggttcagcaactattaacattttcacccaaaaacctaatagtcctactacagatatttatatattcaaatggacaagtgctggctggtcagggatgaatgttgtaacacataaacacattagaaatggggttattcgctttatttcaggtttgaaacaaattatggaatccccttatctcccctcagaacaagaaattattaaaaaacatagcgagcttaacacaatgagtcttaatgaattacaatctgctctcaaaccatttgcatcaaaacttgcagcaaaaagtcttaaagattctactctatcaaaagataattttcaaaaaattctaaaaaatgacgtctaccctacaacactaacaaaagaaaatgctgttgctgaacttttaaaacgttatatgaagcaaaaaattaatcaaactatggaaggaaagacaactatcacatcaaaaaaataa

SEQ ID NO: 9455 - DNA, 756 bp, Lawsonia intracellularis
atggatcctcaacacagggtatggattaaaacaactttagctctaacaggagcattttataatatattccctggtagaacaatatctactcaagaaaatctgtctattggttttcaactaaaaaaaacttttaaaccttttcattggaccatcttactcttagatgaacattatatgtcttcgccaagaattgcagcagcaattatgcctgcacagcttgctggagttaaaaacattatagctgtttggaccagtaaaaataaccgactgaccgctgaaaaaatctcacctgctttactaacaacattagaactttcaggagttaacatagccctaacacttacccacactgaaactgaacttcttattcatcaattaatgaaaataggtattggaaacctgttatattttttaaaagaagaagacatactacatatatctactatacctgtactacctttctggaaagaatatacttctcatcgacttgttatagaaaaagatgctggcattaatacagaaatcctccaatgggcacatcctcattcaattatagaacaaatagcaacagaaccatactctgaagatatcccagatgcactttactgtgctagctcatccagtaaaaactatacatcatacagaatcccaagaatttttcataatggacttgaagcatattggattcatccaacactttctccagcctcctttctccatacaacatgggatttatctttgctagaacaagactaa

SEQ ID NO: 9456 - DNA, 1188 bp, Lawsonia intracellularis
atgaaaccactgcataatatcatccttattatgtctatagctttaatgggagttatgggcgtatccattattcttccagtccttcctctacttgcccatatatttgaacttactcctactgaagtaggacttattataacctgtttttcattgccaagtgctttatttactcctgttgccggaattattgctgatctttatggaagaaaaaaaattcttttattaggtctggccctttttgcacttggaggagttggatgtgcactctctacctcctttaaaggacttcttttttgtagagctatccaaggtcttggagcagcgcctctaggaatactctacagtactatcattggagacctttataatgaagaagagcgtcctaaaatgatgggcatagctggtgcgacaataagtattggaacagcaatatatccggcactaggtggatttgttggagaaattcactggactcttccattctggttttccttattatctctccctgtagcaatcatagcccttatttatccctatccttataaaggaacaaaaacatctatcaaagactacacaaaaatttctggaaaacttatttttcattcacattcagtaggccttttaagtattacttttctttgttttagcattctgtatggcccaatacttacctatttccctttaattgcaaatttactctatcaagcttcacctatccagataggtataacctttagtattgcctgcttaggtactgcaattatcgctattaatcttgcacaacttagtaggacatatagtcacaaaaaactgcttattatagctgctggttgttactttatttcccaaggacttgttattattctcccattacaaagccaaaatatttggctacttacattacctatttttgttttaggaatagcacaaggtatatcatttcctttagtaaacagccacattacatcacttgcaccaacatccaacagagctattgttatggctataaacagtacatttatgaggttaagtcagagtatttcgccaattgtttttggtattggatggtcattttttggttggcctggtccttttatatttggtctttttacttctattatattagccctcttaattatgaaagtattttcaagatgtaacccaatatcacctatttttgataactag

SEQ ID NO: 9457 - DNA, 801 bp, Lawsonia intracellularis
atgatgtcatggctcacaataggtgttatccttggattagtgcaagggatcacagaatttcttcctgtttcctcaacaggtcatttgattattgtagctaagtttcttcactttacaggctctaaagcaagtgtgttcgaagttgctgtacaacttggatccattatggctgtagttgtcatttactggaatagatttataggactaataaggccagaaaagaataaaaaatttacaggactatatggtatttggcttttatttttaacaacattaccgccaggaatcataggatttttatttcatagctatataaaaacacttttcaccataccaagtgttatagctgcattaacaactggctctatatttatgttgattagcgaacagttatgtagaaatatttctcaacgtatagttacacttgacgaattaacgcctaagactgctcttggaattggcttttttgaatgtttagctctttggccaggattttcccgttctgcagcaacaattatgggaggaatgcttcttggggcaaagcgtcatcttgctgctgaatattcttttattgctgctgtgcctgttatgtttgcagctacaggctatgatctccttaaaaattgggatctttttactgccaatgatcttcctctttttattacaggaatgatatgtgccttcttagcggcttggataacaattaaagtttttatcttacttataagtaaaatctcattgcggccatttgcttattatcgtcttctattagcatttattgtatatttatgtattaaataa

SEQ ID NO: 9458 - DNA, 1272 bp, Lawsonia intracellularis
atgtcttctattcgtaagagtctgttacaaattatgtttttaggtgcatctatgcgtcgatggaatgataagcttcgtcctatagaactttatgaagtagataagcaaggtcataaaatgattattgcttggatgcttactttattaaatagtcgtcatgcctctgaatcggaaaagatagcattacaacaaactgttattgagagaggattatttgattatttatttggtttaatagtaacagatattacaccacaaatttttcatagaatttgtgaacatcacattcataaaagacaacttactgattgggtattaaataaattaaaaccaattgtagaaccattgagtagggatttttgggatcgtatggtaaaatatcattaccaaacagatcgaacagaacttgcagacaaaattattaaggcagctaggttgtatgcatcaggatgggaatttgcacttattcaaccttttaatacctttgatgaggagacaaaaaatatttcccatttttttatctctgaactttttgccttaaaagaacttacaggggtacaagacttaatccaaggagaggctttttttatagagaatcctacagcacttggacattttgcaaggttaagcgggcaattacgttttcaaattcgttggtcggatactcctcgtgttcctgaaacatcagttttaggtcatatgtttttagtagctggatatgtatatttttgtagtcttgttataggttgttgtccagcaagatgtgtaaacaatttttttgctgggttatttcatgatttaccagagcttttgactcgtgatattataacacctgtaaagcgttctgtggatcaattttcaatattgttaaaagagtatgaattacaagaattagagagacgtatttttgtaccattgcggaagtcaggttatatagatcttgtacatagattgcaatactacttagggctacttggtgaagatgttacatccgaatttcaagaaacaatacaagatagctcaggggtaaaacgtattaagaactttgaagagcttcaattgtttaacaataaagatgaatttgatccaaaagacggtcaactattaaaagcatgtgatagtcttgctgctttcttagaggcacatacttcaatatataaaggtatttcatctcctgtattgcatgcagcagttgctcgcatccatgcagattttcataatttaacttttggtacactttcttttggtacgttattagcagactttgattaa

SEQ ID NO: 9459 - DNA, 435 bp, Lawsonia intracellularis
atgaagacgtttagcccaaagccagaacatattagccaccaatggtttctagttgatgcacataataaaattcttggtcgtcttgccgctcaaattgcccatagacttcgtggaaagcataaacctgaatttgctccacatatcgataacggagactatattgttgtagtcaattgtgaacagattaaagttactggtaacaagcaagaacaaaaaaaatactatcgtcattctggatatgtaggcggactaaaagaaacaacattaaaaacacttcttgaaaaaaaaccagcagaagtacttatacatgctgttcgtggtatgcttcctaaaaatcgtcttggtcgtgctatgttaaaaaaacttaaagtctatgctggaccggagcatcaacatatagctcaacagcctattcctttaagtcttccttattaa

SEQ ID NO: 9460 - DNA, 393 bp, Lawsonia intracellularis
atgtcaactgaatttaattatgctacaggtcgtcgtaaaacagctgtagcacgtacaagactctaccctggaaatggaactattaaaattaatggtcgtcctcttgaaaattattttcctagaaaatcattacagatgattatccgtcaaccactagtccatacaaaactattagataaatatgatataaaaattaatgtaagtggtgggggagtatctggtcaagctgaagctgtacgtcatggaatttctcgtgcacttcttgaagttaatccagaacttcgttcccttttaaaacctgtaggctttttaacacgtgatgcacgacaaaaagaaagaaaaaaatatgggttacgtgctgctcgagcaaaatatcaatattcaaagcgttaa

SEQ ID NO: 9461 - DNA, 1656 bp, Lawsonia intracellularis
atgaaagatgaatttttaactataacaccactaggaggattagaggaaattgggcttaactgccaactatgggaaacatccaaaggagttgttcttattgactgtggcatcatgtttccaaatgaacaacatcttgggattgatgttattattccacctattgatcctattttacatgtaaaaaatcgattactaggagttgttcttacccatggacatgaagatcatataggtgctatcccatggcttgtatgttttattcctggtctaaaaatctatggttctccctttactcttgcgctagttgagcacaaactcaaagaacgtaacctcctcagctcagcccaacttattgccgttactccaaaaactaaactcaatcttggtaacctttacttccaatttatttcagtaagtcattctattcctcaaagctatgcgcttgcagtgacaacacctgttggtaaaattattcattctggggattttaagatagatccaacaccatcagatggtattggcacagatttgcaatctattaaagaatttgctggtaatgatggtatacgacttttcctttcagactcaacaaacgcagatgagcaaggacataacctctctgaacaatatataaaaaaaaatttttatgaaatttttagtgaggcaaaaggaagaattattgttaccctttttgcaagtaatatagaacgaattcaaaccgtctgtgatttagtcaaagtttttaataaaaaattagtggtaacaggaagaagccttattaataatatagaaaaagctaaagagctaggttttctcaatatcccctataaattttttactgatcaaaatgtaccagacctgtctcctgaacagacagttattatcactactggttcacaaggagaacccctttcagccttagtgagaattatttcaggggaacatcgctatctctctatccatgaaggtgatactgttattatgtcttcaagagttctacctaatagtactttagcagtaaatcgccttataaatagaatataccgattaggagcaactgtttgtcttaatggacaaaaagcaattcatgtttcaggacatgcacgtcaggatgaattaaaaattttgctcacagtagttaatcctcaatattttgttcctatccacggagaatatagacaactatttcgacacaaagaacttgcaatgcaacatggaattccttctgaaaacatttttatccttgatgatggagagccccttacacttctcccaaccaaggtccgtaaagaaaaaaaaatacccttaaaatctattttgattgacggaaaaggtattggtgatgttgatagtagtgtacttagggaccgacaacttcttggaggtgatggtgtagttgttgtgtctcttactagagataagggaactggatctgttatgcaggggccttctattctttctcgaggccttatctttgaaaaaaaactaaattgtcttatagaagaagcaaaacaagttgttattgaaatattacaatcagatttaactctaacgactcaaaaactagaaaaaaaaatttgtacttcactacatagtttcttccgaaatgttattggaagagaacctattatcattcctatcattacagaaaactaa

SEQ ID NO: 9462 - DNA, 1029 bp, Lawsonia intracellularis
atgagtaaaaatgtacatattgaccttaaaatcggaataagttttgctatttctacaggaacgtttcttattttaggattatatattctactttcaatacaaccaattattgatcaatttaaaatcacaatcttagaaacatctgatgctataagcatcactacacggctattaattacaatgaaagaagcttctataaactttcgcagttatactgtaagagcagatcaatctttctatgataattttactaaaaatatacatctttttaatacagcactagagcatgcacaaaaccttaatgatgattctatctcattaaaaatattaaataaaaacttgccacaagttatagctttaaaaaaagaatataaagaagttggccaaaaagtatacgatcttactgaaatgtttaaacaaaatacacctaaattagcctttcttttaagtgcatttatcaatgacatagaagagtttttaaaaactcttgaagagttagttcgaaatactggtggcaaagatgctgaagctttcaaactaatagttgatcttaaccaactcattgaaacatccttacttgctagaggagatttttggagaggagttagtaatgcaaatagcaatgcttttgaaacatgcttaaaaatactcaaaggcagtattagccatatggaagctatcaaagaagcaaattctgttaaagaatttactgctccatttgaatcgttaattttttcaatgaaaaatcttgaaaatatctttgtaactataattaataactatgagttagctcaagaaaatatacagaatcaagatgcaatcgtacagagtatcttaacactccttaatgaaatcctagaagaaaatatggataagataggaatagaatcaaagtcagcagttgaaaacttaaaacttataagaaatattgtgcttatgcttgtagcaataggtgtaatttttacaaatacagtaggatttattgttgcaaaaaaaataggagaaaaaacatataccccatcaaaataa

SEQ ID NO: 9463 - DNA, 360 bp, Lawsonia intracellularis
atggcatatttgccttatgagtatttttgttattttgtttatgatatagaacttagttatgaagaaataatgagtaaagaagagaggcttaccttttttgttcaacagatacttaatagttttgatgcaatacatcttgattttacaccagtaggagatgggttacaggttcaatgttcgtttgaagacatgaatgatagaaaatataatgaattatgtgaagccttaagtaactacacttgtgatggtataaatggaaagtttttacttattagtagagacttgaatcagttacaaggagttgtagcttcagataagacgtttcaaaaatatacttttactattcctccttggaattag

SEQ ID NO: 9464 - DNA, 492 bp, Lawsonia intracellularis
atgggaataaatgaactcaaaaggctatgtataataagctatgcaagacttggaatagcaggattatctcctattatgccaggtagttgtggttcactcatagcagcaatattagccccctggctattcattccattctcaacattcacaagaatattaattcttatttttattttttggacaggtagccttgttggaacaataattgaacaattactacaaaaaaaagaccccaaagaagttgtgattgatgaattactgggtctttggatagtattacttccattcaaaaatcctggatggatttttattggattagcatttattctttttcgtatttttgatattattaaaatatggcctgttaatgcatcagagaattggttacctggtggatatggaattatgattgatgatgtatttgcaggactacaagcattactcattataagtatactatactggacaggttatctcaaccaatggctttaa

SEQ ID NO: 9465 - DNA, 477 bp, Lawsonia intracellularis
atggcattacttcgctactacctcactataggaattatatttataactttgttaagttcagctactgcaacacaacccaaaacagaatctcctgaatctattcttaataaacctgaaaaatctacaaaacgtaatacaactatttcaatcgaatttgaaggtactgatagtattggttctaaactttccacccgcatcaaagaattaatgaatgcaagtaatcttttcacacttacagaaaaagattcccctaaaattcgtattctgcttgctacaatgtcagagttttctcaacgtccaagtattggctcagtatattctgttgtgtggcttttttcacaatcagaaacaacactaaaacattttcttgcaaaaaaaataggtgtacttactgctgatgaagtagaccaagttgcagcaatgattgtagagcaaacagatacacttgctgtacgctatggttatctactcccataa

SEQ ID NO: 9466 - DNA, 2073 bp, Lawsonia intracellularis
atgagtcttacagcaggaatgtggacaggtgtttcaggacttttaagtcatggcgaaaagatgaatgttattggtaataacatagctaacgtaaatacagtaggctttaaaggccaacgtatggatttcgcagactttatttatcaagatggctttagtactgcagggattacacaaattggacgtggtgtaggcattggagctgtcatggggaactttggtcagggtagttttgaaaccacaactgaagcaacagaccttgctattggtggtcgtggatttttcaaagttaaaccacaaggatcagagacttcatattatacccgtgcaggtaattttcgttttaataatgatggatacttagttgatcctcatggatatgctcttcagggttggaaaattgataatactgaagggccacaacgtatctcaggtggtgttaatccaggtacaaatacttcgcagattatgggtacaggtgaaccaacagatatccgtcttgatacttggacagttgcacctttacagacaacaaatgtaagttttaacgtaaacctttcttctgataaatctggagataaatctcaaaacgttaatagtccatttacctcattatttaatatatggaatggtaaacaaccaagtgaacctaacaatccacctatgcctgaaagtgcatatagttatcagacatctattaaggtatatgatgaagctggtggaacacatacattaacagtctattttgaccaagtttctcctaaagactacaaaggtggtggaagtggagaaagtgtatgggaatacgttgttactatggatccttctgaagataatcgccaagtttctgttggtggtaacattgtggacatcaaagatactaaagctgcaggaatgttaatgtcaggaacattgagttttgatagctcaggaaaacttgcaaaccaaagtgcatattcgctgaatggttcacgtaagcctgcagttgatcctgcaaccggagctcttattaatggtaatggttttactattgatagagatggaaatgcaattcctattcttaatatagataatccagctgaaaacttctatccagcagaagtttctaataatggatttcctatgattgtagctaattttactggtgtcccaggtaaaaatacagctggatctgttggtgatgctaccaccttttttacagaaattgactttggtttaaaagctactgatcttgataatacatggaagaatgcaaatgaacctctttcttctttaagctataaaaaaacacataatcctatggatgtcgcaggtggttggacagttggtgggtataaaactccagctccatcagtaactgaacttggtatggctcagatattggaaaatcctgctggggtaatgccacaatattattttggtaaccctaactatgataacacagttccacagagtccaccatatgtatataaaaatgaagcttcttatcaggctgcatataagactgcattaactgccgcaggtggtaccgcagctgacattaaaaaggaacattggcctcataatgctgcatcaggtatattagaagctaatgatccaccaaatgttaaagacttagctaatatgaatggaacaccaaaccgcttatcaaatgcgtttactaactatgcaggtggtagctctacaaaatctgcaagtcaaaatggttatggttttggtgatttaatgaactatagtgtaaatgctgagggagtgttatttggagtatattcaaatggagtacaacttccattatatcaagtagctctttatgattttaactctaaacaggggttacgtcgtgaaggtggtaacttatttagtcaaacaagagaatcaggggacccatcttcaggtgctgcaaacacttctgggtttggttcaattaacgctaatactttagaaggatcaaacgtagatatatctacagagtttgtctcaatgattgcaacacaacgtggattccagtcaaatagtaaaattgtaactactattgaccaaatgttagagacagttgtaaatatgaagcgttag

SEQ ID NO: 9467 - DNA, 840 bp, Lawsonia intracellularis
atgccaactaatggtgcttcaggagttagctcagcaactgggattttttctcagcaggctggtaaaagtgaactgggtaaggaagattttcttaaattacttgtaacccagtttaaatatcaagaccccctgaaccctatggaagataaagaatttattgctcaattagcacagttctctgctcttgagcagcagatgagtacaaatgaaaagatggagtctttattaaatttacagacacaacaacaaatgattagtgctgcaagttttattggtaaagaagttgctgctcgtggttatggtgtatccgttaaaggtgatactatttctaatattcaatatgcaattaatgaagaaatggttaaaggttatgtaaatatttttgatgcttctaatcaactaattacaacagttcaattggactcaaaggcacctggtattcatgattttgattgggatgggctgcttcctaatggaagtaaagtttctgatggagtttatacagttaatatcgcaggtcaaaattcagcaggtgctccagttttagtagacacatctgtaagtggaaaagtagaagctgttacaatgtatcaaggggatcaattattacgtctttctgatggacgtctagtagctctttcaaatgttcgtgaagtggttcagccaaaaacagttgagcccggtgatgacacagacagtggtgattcagaagacggtgagtcaggtggtggggataattcagatcctggtgaaactaatggtacagagggatctgaaggttctgggatgcaggatttgtatcagctattacccactataaaagagaagttatctaggtaa

SEQ ID NO: 9468 - DNA, 1827 bp, Lawsonia intracellularis
atgcagatttttcctatttcttccgatatgctttataaagaagcttcatcattatctagaggtaatggtagagatagctttgcttttaatcagctctttactaagttttttaaaaatactccagctgaaattacgccaaatttattttatgattctgtagataaaaatacatcattttttagtacagaagctccttatgataatagtgcagagcttagagtagatgtaagtacattatatccatcctcttcttctattgatgatatacgttttacagatagcgagttgcaaaaggttattgattcattagcagcccaaggtgctgcaactgaaactgttcagaatcttcttggttcacctaatggaacagctattggtgatgtcatacaagcagtagcttatgaagctcctgtgcgtcttagtgaaagcgatatgataaatattagatcactagcaaataaactggatagttcaggtcagttaggagagagagttcttagtgatttcagacaaggacgttctgttcaagcatgggatcgtttaagtaaagcattatcaagttatgatccaaatgtaaaactttcaattagtcataaagaaattgtttctcttggaaaggcgttaggggcaaactctgcaacattggatgcattatcaaaaagttttaagggaagtaaagagttatcccttactcctgatcagttaagaaatttacttgtaccacttcaacaacaaatgacaaataaaattgatgcacagagtaagttggcaagccaacttgaaggtgcattaatgcctgtaattaaagaagctaaaaagcgtatggatgaggagatttcagctgggactattgagtcaagacgatcagagcagagtaaaattcttattcaggatacagttacaaagaatggaatagctaatatccaacaacaagacgtagctagtgaaactcttaataaaatacagggtgcagaacaaactcaggatacagttacaaaaaatggaatagctaatactcaacaacaagacgtagctagtgaaactcttaataaaatacagggtgcaagacaaaatacagattcggcaaaatttgccgggcaatttcaacctcaaactggtgataaagaaaatttatttcaaggtaagaatagtggtgatggattatttgaaaaaaataatggacaagatagtaagggtttattgtctgataataagggaaaaggtgttactacaactagttctaacccatgggaatctcttgcacaacgtttaggggtaaatcaatctgtggggacagttattcctcttcaacaacctatacaacaaaatgctcaactaactgcaatagatcgtttagcagctagaatgttttctcaaatagagcaaggggcattttctgcacttcgtaatggaaccagtaaattagagttgacacttaaccctcttgaacttggaacagtgaatgttttgcttacaacaaagaatggggaggtgagtgcactattgcgccctgaacgtgctgaaacaacagctgcattactgcaacagatggatagcttacgtgcggagctagaacaacaaggtcttaaggtagctaaagtagaagtacaaacacagttgaaagacgaacaaaatatgcattggcaaggtatggatcagcataatagctctcaagaacaatctgaaagagtaagggatcttgagagattacgcatgcttggaagagtaggacaagaagataatggggtagaaatttccttggcacataacatgcataataacagtatgacggcaggaaataccagccgagtagatatcattgcataa

SEQ ID NO: 9469 - DNA, 1410 bp, Lawsonia intracellularis
atgactcaaagtccaacattgattattcaattacaacgaatgggtgatttaatactatcatttcatttgtgtaaaagattattgatgttagagccaaatcatcctttatgggttcttgcagaacctcatttttttaaagaattaattacagttgctcctcaagtggttttttttgatcactctatgatacctaatcttaaattaaggaactataggcgggttattaatttaagccatagagacatagctgctcaacttactggtgtattaactactgaagagaaaataggtatttttaatcaagaagattttttatatatagcaggtgattggagattataccgtagttctatagttaataataataggcataatcttttccattggtcagatttggaagcattagggctgattccagagcagtcatttaaagaggttatatggccacctttacgtaatattggaagttcaggacatattggactttttgttggtgcaagcgaggctggaaagcgtcctaacgcacagttttggggtttactagcacgttatctaataaggcataacttatacccaatttttcttggaggtcctaatgataggagcttagctcaagagtgtatagacatagctcagttaaattcgtctaataattttgctgggaaatttaatctttctgagttagtacttttttcccaaaagctagacttatttgttactccagatacaggtccaatgcatttggctgcatggacaggaactcctgttttgaatttgtctatgggaaatgtaaatccatgggagacagctcctgcatctcctggacatattgtagttaggccagctatgagttgtgtaggttgttggaattgtgaggggagagattttagttgccggagtttatttaccccagggaaaataggtagacttattgttcatttaatagagaatagttctttagagaaatcaatattttctgggttacatatatataaaacaagtagagatgaacgaggattatttactttggttccattgcttcccaatattgagcatcagagacatttattaggtttattttggaaagagtggtttattgcaatgcttggtggaatgtcagacaaacttatacctgtttctaagttattttttgagaatgctcctcatatgtgtaaccctatgcaaaaaacattattaagtcttagtaagaatgttgcaaaagttcttaaaaaaggaagtgatattgttccaagtaaatattggttcagcgttatgcctgcattaaggccagctacaggttatattgatttgttattacaaaataataaatttagtaataaagcatggaaaaaaacaggtacattgctttcttcgttaatagaaacttttagttttgcttctcaatgttag

SEQ ID NO: 9470 - DNA, 885 bp, Lawsonia intracellularis
atgtctttggtcattaacaacaacatgatggctgcaaatgcagcccgtaacctcaatgaaagttattcacgacttagccaatcaacaagacgtctatcttctggacttcgtgttgggacagcagctgatgattcagcagggcttgctattagagaacttatgcgagccgatattaaaacatttcaacaaggtgcaagaaatgcaaatgatgctatttcattagtacaagttgcagatggggcactaggtgttatagatgaaaagcttatccgaatgaaagagcttgctgaacaagctgctacaggtacttataattcaacacaacgcttgattattgaatctgaatatcaagcaatggcttcagaaattacacgtatttctgttgcaacagaatttaatggtataaaattattagatggttctctatctggacctcataaaggaactaatctacaacaaacaggagctctaagagtacattttggtccagggaatagttcagcagaagactattatgaaattagcatacattccgctacagcttctgcactaggccttggaaatggaactactggtcctggtgctacaatctctactcaagctgcagcacaagcagcgttagacgccatcaatgatgctatcgtttctaaagataatattcgtgctagccttggtacgctacaaaataggttagaagcaacaattacaaacttaaatacccaagctgaaaacctccaggctgcagaatcacgaatttctgatatagacgtttcaacagaaatgactgaatttgtaagaaatcaaattttaacacaatctggagtagcaatgctttcacaggcaaactcactgccaaagatggcaagccaactcattagtggctaa

SEQ ID NO: 9471 - DNA, 702 bp, Lawsonia intracellularis
atggatttaaaagaattacaagaagatttaggatattattttaaagatgaacagttacttataacagcattgacacatagttcatgggtaaatgaaaatgatgtaacagcagaacataatgaaaggttagagtttttaggagatgctgtattagaaatttgtatctctgaggagttatttaaacgtcatcctgaggcaagagagggagaattaactcggatgagatctaatcttgttaatacaaaaatgttagtccttcttgctagagaacttaaacttaatcaatatcttttattagcacgaggagaagaaaatcagggaggcagacaaagaaatactttacttgctgatacaatggaggctgtctttggagcagtttttgttgatggagatttgttttatgcaagaaaagtaattagcaagagttatgataatttttggcctaaaaaaagtgccgcattagttaaagattttaaaacaagattacaggaagagacacaaagacatattaagggattaccaaaatatatccttgaaggaatgcatggacctgaacatgaaaaaatttttgaagtttgtgtcgaacttccagatggccaagtttttagagccagtggtacaggtttaaaaagggcagaacaagaagctgcacgtattgctttagagtctttgatgcattgtcaatcagttaatgataagtaa

SEQ ID NO: 9472 - DNA, 336 bp, Lawsonia intracellularis
atgtcttatactatccgtatggtaaaactttttacaggtgaacttgtactaggaaaatttgatcctgaaaaaaatatacttaaggatgttgctttactacaagttatccccacacaacaaggtgctcaaatgatgatgttaccttatggatacccatttgaacaagaattttcaggaacaatagaagctaaattctttatttatgaatataaaaaagttcctgaagatcttgaaacaaaataccttgaagcctgcacaaatcttacactttcaacagctggggtaactcttacaggagcaactcctagtggaaaccccacaggattaattaaataa

SEQ ID NO: 9473 - DNA, 522 bp, Lawsonia intracellularis
atgtcagagcagcttgtagctgtcggagtattatctcgtcctcatggtattaagggtgagatccgtttaatacgttatacggattctattgatgtttttttaggtgaagtctttcttcaaaaaagtaactcattacctaaaaaggcagaaattatatcctctcgtattcatcaaggagtagctctagtatgttttaaaggtttttctgatagaagtgctgtagaagtcttacgtggtcaaacattacttgtttcaagaagttttttacctgagatagaaagtaatgagtcttatctatgtgatctattagggttttctgtagtattagataatacagatgaagttataggtaagttggaatatgtatcgtttcctgggggacaggaattgtggtcgatcattactccagaagggaaagaagttcttttaccagctataccagaatttgtattagaggttgacactaatgctcaacttattaggataaatcctccgaaaggactgctagagctatataagtaa

SEQ ID NO: 9474 - DNA, 234 bp, Lawsonia intracellularis
atgttaaaaagttttgtagaatttgttgccaaatcccttgtagataatcctgaagaagtgcaggtgtgtgaagtggaaggtgaacaaacttcagttcttgaattacgtgttgcaaaagaagaccttggaaaggttattggtagacaaggtcgtacagcaagggctattcgtacccttctaggtgccgcatcatctaaagcacaaaaacgcacaatgcttgaaatcttggaataa

SEQ ID NO: 9475 - DNA, 1515 bp, Lawsonia intracellularis
atgtttgaaagtttatctgaaagattatccagtgtattgcatgcgattggtaaacgtggtcaacttacggaagataatattcgtgacggattacgtgaggtacgtttagcgttattagaagctgatgttaattttaacgttgttaaaaagtttattgagcatgtaaaagagaaagttgttggacaagctatagaaaaacatcttactcctgcacaacagtttataaaggtttttcatgaagaacttgttaacctattaggaggaaagtcgaccaaattagatgtaacgcattttcccctaagtgttattatgcttgttgggttacaaggttcaggaaaaacgacatctacaggaaagcttgcttctttactacagagtcaaggattacgtccatacttagttcctgttgatatatatcgacctgctgctattgaacaattacaaactttggcaacgcaactgaatatcccatgttttgcatctaatgcggcaatgaagccattagatattattaatgctgcgctgcatgaagcaaaagaaaaagagtatacagttgttttgttagatacagccgggagattacatatagatgaaccattaatgcaagaacttacagatataaaacttgttgcacatccacaagaaattctttttgttgcagatgctatgacaggtcaagatgttgtaactgttgcagaggagtttaataaaaagctttcattaacaggtgccattcttacaaagatggatggagatgcacgtggaggtgcagcactatctatttgttcatctactggtgtgccagttaagtatgtgggaaccggtgagaaactttctgactttgaagtctttcatccagatcgtatagcaggacgtattcttggcatgggagatatgcttacacttatagaaaaagcccagtcaacgtttgaagatgatgagcttaaagctattactgaaaaaattcagaaagcaacatttaattttgaagatttttttagtcaaatacgccgaatgaaacaattaggttcattaagttctttaatgaaacttatccctggatttggttctgctgttagtaaatttcgtgttgcaattccagaagatgaattttcttatacagaagctattatcaactctatgacaattaaagagcgtcgaaatccagatttgttaaatacaagtagacgacaaaggattgctagaggcgctggtgttactcttaataaagttaatcaaacaattcagaaatttgatcaaatgaagcaaatgatgcagagagttgtctcagataattctcttatgaagaatgcagaatcaggagaaggtggttttggattaggatcattttttggtgagggaggaataggttttagtgcattaccaggtatccctggactgtttggaagacctgtcctgcgttcaacttcaattggtggagtgaatggtagtggaaaatctgcaacaaaaaagaaaaaggaaaaaaagaaacataagaataaaaaaagaaaatag

SEQ ID NO: 9476 - DNA, 1413 bp, Lawsonia intracellularis
gtgaacaataataaaaaggatatgaattatcttcaacatcaacttgttttagatattacatctattgtttcagatggtcgagggcttggacgttttgaaaataaggttgtttttgttcctcatacagttcctggtcaaaaagttcttgttaatatcacatctgtacactcaaagtttttagaaggagaagttaaacagataataaaaccttcgaagtatgaaagagaacctatatgtatacatgcaatacaatgtggaggttgtacatggcagcatattcaatataaacatcaaattatttggaagaaacaaataatacaagatgctcttgaacgtataggtaaagtgaacaatccagtaatattagatgttataccttctccatgtgagtggagatatcgtaataagatggtctttgcgtttgctccatctccttgtctaagtacagtattattaggtttaaaaagagttgattctcatgaagtcattccagttacagattgtttgcttcagtccaaaaatactatgaaaatagtagagatagtaagacattgggttagacacgaacagacatcattagaaaaaaagatacttacattaaaatattttcgttttcttattattcgagagacaataactggtgatatccttgtcgagcttattgtaaataaaaaaaatacattgattgagaataaatttgatgaacaggcattaggtaaaaggttagctcagtgtctaaaaggagtagaagctataaaaggtattatattgtctcggaggactcaggtttcagatatagcctatagtgaatatataatctggcatgagggagaacgatttttagaggaacaagtaggggatattgtattatctagggggaatgataatttttttcaaataaatacaaaagcaactgaaattctttactcaaaaattctttccatggctcaacttacaggaaaagaacttgtttgggatttatacactggagtaggttctattgctctttttttagctcctttttctttaaaggtgataggagtagagtcaattgctgcatctattaatttagctaataaaaatcgtttatctttaggctatactaattgttcttttatacaagatgatgcatttagttttattcgttcacagatacaaaaaggtattactcctgatatagttattgtagatcctccacgtgctggtttagataaaaaagttatagaattgcttatccgccttgctcctcgacgctgtatttatgtgtcttgcaatcctgggacctttgcacgagacattgctatgctaagtcctcattttgtcatacagcagactcaacctgtagatttatttcctcatacaccacatgtagaaactgtttcatatttgttgtataataatgcattctcttaa

SEQ ID NO: 9477 - DNA, 879 bp, Lawsonia intracellularis
atgaagggaattatattagcaggtggctcaggaacacgtctttaccctattactaggggagtttgcaagcagttaatacctatttttgataaaccaatggtttattatcctttatctatccttatgcaagcaggaatacgtgaaatttgttttatcacaacgcctcatcatcaacaggactttataaatctttttggcgatggttcacagttagggcttcagttaacgtatataaagcaatcatttcctaatggtctggctgaggcatttatattagcaagaaattttattgctggagaaccttgttgccttgtccttggagataatttgtttcatggagacaagttatattgtatgcttgaagattgtacaggccttgagtatggagggaaagtttttgcttatagagtaaaagatcctgaacgatatggtattgtttcttttgatgaaaataataaagtattaactattgaagaaaagcctcaaaatccaaaatcacattatgcagtcacaggattatatttttatgatggtgacgtatcaaataaagcagcatcattgaaaccttctgcaagaggggaacttgaaattacggatttaaataatatatatcttcaagacagtggactttctgttgaaatttttgggcgtggagttgcttggttggatacaggaacatttgagtcaatgcatcaagcagcagcctttgttcaagccgttcaagagagacaaggtgcaaaagttggttgtattgaggaaattgcatggcgtaaagggtatattgatgatgttcaattaaaaaaacttgcagagcccatgcataagaatgaatatggtgaatatttatttagtttactagaacagaataatgaacgataa

SEQ ID NO: 9478 - DNA, 594 bp, Lawsonia intracellularis
atggatcttattttaattaaaagagcaatcttaagtgtcactcaaaaagatggccttatagaattagctacctttcttcataaacataatgtagagcttgtttctacaggaggaacattagctacattacattcagcagggttacctataactgctgttagttctgtaacaggattccctgaaattttaggaggacgtgtaaagactattcaccctaatattcatgcaggaattcttgcagataaaaacaattctgagcataccaacacattacaacagttaggtattcaaccatttgacttagtttgtgtaaacttatacgaatttgaaaaagctttaatgaaaaaatttaatccatatgaaatggtcgagaacattgatattggtggtccatgcatgttaagagcagcagcaaaaaattttcatagtgtactagtattacctagcccaaccttttactctgaagcaataaaagaattatctataaactctatgtatagctctctaaccttccgtaaaaaaatggcagctgaatcttttaaaataacttcacaatatgatactattattgcaacatatttagaaaataattag

SEQ ID NO: 9479 - DNA, 408 bp, Lawsonia intracellularis
atgctccaccataatgaatacacgaatcctctcaatgtagtatgtgggattttatggcgtaatgaacgatttttagctactcaacgaccagtaaatcaaagccatgcaggatattgggaattccctgggggaaaagtagaattaggagagacactacacatagctcttaaaagagaacttaaagaagaattaggaactactatcttttcacctactttctattgcaaaataaatcataattatggagtaacaccacttcttatccacttttttcaaattacagtatttgaaggtgaacctactccacttgaaggacaaacattaagctggattacaccaaaagaagccaacaaccttcaattcttagaagcagacaaatttttactccaacagttacaacaacggtag

SEQ ID NO: 9480 - DNA, 1011 bp, Lawsonia intracellularis
atgaatgtgcttgtcactggtgctgctggttttattggtttccatttatgtcgtcgattacttgatgaagggcattcagttgtaggtattgataatctcaatgactattattcagttactttgaaaaaagatagattggcacttttaatggatgagcctaattttacattttcctctatagacatagtaaatctacctaaccttcaagagctttttttacaataccgatttagtcatgttgtcaacttagctgcacaggcaggtgtacgatatagtattgaaaacccttcatcttatatccaatctaatcttgtaggatttgggaatattcttgaatgttgtcgtcatactgaagtggaacatttagtttttgcttcttcaagttctgtttatggactcaacacgttaatgccattttcagtacatcagggtactaatcatcctataagtttatacggagcctcaaaaaaagctaatgaacttatggctcatgcttatagtcatttatataatctaccatcaacaggattacgcttttttactgtatacggtccatggggaagaccagatatggctttgttcctttttacaaaggcaattctttctggtgaacctattagtgtatttaatgaaggaagaatgaggagagattttacatatattgatgacattattgagggagttattcgagtgatgaaaaaaactcctaagataaatgagaattggaatagtcattctccagatccttcttcaagtaaggctccttggaagatatacaatatcggtaataataatactgtccagttgagtgagtttatagaagtacttgaagtagagttaggtaagaaagctataaaggaatacttacctatgcaacctggtgatgttgaagcaacatgggcagatatagatgatcttaaacatgatgtagatttttctccgaatactcctatagaatatggaattaagaagtttgtagagtggtataagtcgtattacctcatagcatag

SEQ ID NO: 9481 - DNA, 732 bp, Lawsonia intracellularis
atggatcaagtctctttaggtgtaatagggatatttcgtccatggagacaggcgggtattacacatttattaatagaaaatgaagcattaatttctttattaaagagtgaccagaattataataataaatttcaatcaccttcttttgagaaagaaaaattaaaagataatagtaatactatcccatcatttcagcccaactcatctgatgcagtgaaagtaaggcatcatcaagttacacatacaaaaaatagtgtaccattactcccgttagataagtggccgtttgcttggaaagatattttgagtaggactccaaagaatccatttatactttggacatatgaagagttagggtatgacttggggggagaggcaaatccagatcgtcgaagattattacatcgactcattaaagatttgtctttagctaaaggaagccatgcattttggcctttatgtttattccctgatcatgcaacctcctttgaaaatatgcaaatgtttatgagtggtgtacagcatcttaagccaaattgggttatttttatgacaggtattactccaaatcaactaggattacctaacttttctctttttgttcctcaaatatgctggggtagatatatggtaactacacaacatatagatgagttaatagggaatgaaatgtattacagtcaacttctaagttttttaaaaaaacatattcaaagtttacatactctatag

SEQ ID NO: 9482 - DNA, 1209 bp, Lawsonia intracellularis
atgatagacaagtaccttttatttcattgtcaggaattattacagatacatttaggtgtttgtgggtcaattgctgcatatcgagcaatcgatttagtacgagcttggaaagatgtaggtctttctgttagtgtcacactaacacctgcagcctgtaactttttaaatccattagctttttcttctgttggagcagatcctgtttacacaacgatgtttgatgatattcgtcatccatactcacatcttgaacctgggaaaacagcacaagcttttattattgctcctgcttcagcttcaactatatcaaggttggcatatggacaggcagatgaattacttgcatgtcaagctttagcattttctggtcagcctattattgctcctgcaatgaatccaaatatgtggaaccatccttcaacacagcaaaatataaaaattcttcaagatcgagggtgtattgttattgaaccagagcaagggcgtgttgcatgtggagatgaaggtcaaggtcgcctggcagatcttagagatatttatcttataggccttaagtctataacaccacaagattttgcaggattacgtatacttattacactaggtcctacacgagaaccctgggatggattgagattttggagtaatcctgcaacaggtattatgggtgcatcaatagctgttgctgcctggatgagaggtgcagaagttcatgctgtttgtgggccaggctctccatggttacctttaggaattcaccgttattctgttactacagctttacaaatgtttgaagttgcagaaagtatttggccaacttctgatataggaatttttgttgctgcagtagcagacttttcgccagaaaaaggtcctgaaggtaaatttaaaaaagatgaagctggtgatggatttacactacgatttattagaaatacagatatattacaaaaactttctaataataaagctcgtaaccaaaaagttgttggttttgcacttgaatctgaagggttagaacaagctgtacagaataaattatatgttaaaaaggcagatatgattgttggaaattatattaaagatagtgttgcatctctatctggcagtgtctttatcttagataggaatgggcatgaagctcgttgggaagctatgactaaaacagatattgcatggagaattctttcatggatcaagtctctttag

SEQ ID NO: 9483 - DNA, 549 bp, Lawsonia intracellularis
atgttgagaatatatttttgtgtttgtttatgcataataacagttggttgttctaagtttgacttttctagttttagcaatcctttttctagttcaactgcacatgtagacgatgtgtattatggaagcttcccagatatttgtattccaaagagtatgagtatagatcataaccgaacacttgtttctgtagggccagatggagaaaaaataggactacttacgtttgaaggaagggttgataggtcttctctttgttctgctatgatacataatatgtctcgtcagggatggactcttagaggtgttatagacgggaaacgaacaattcagctctatgaaaagagtggtcgttatgctatattatatatttataatcagcagttgactactgctatagaggtttgggtattagctcgattagatgatggtgcatatcaattaaatctatcgagagaaacaataataagtcaagattcaccttattcttcacatggagttataggtgactttgagacagagttaggagagaaaggacttaacgaatga

SEQ ID NO: 9484 - DNA, 612 bp, Lawsonia intracellularis
atggatgttcaaaagataaaagaacaacttagtcgtatcaagctctactactcacgtaacgaaacaattagagctcttggtgtagctgtagcaggtctcaaaggtatcgtaaagtctagcacgccaccacctacagaattacgcagccttttaagggaaggttctcaactactattacatgatgcattaatacagaaatatttgccagcccctataacttaccaacctggccaggaaaaacaactctttactgttttatcagaaacatacaaaaaaattattgaagatcaagaaaaagaaacatacttaaaaactagagaaagaaagcaatctttagatcaagcttttaaccttgggataaaattactagaacaaaaaaaaatatctgaagctgataaagctttcacagaagcattaacatactataaggacgaagaaagactcttttatcttattgctaaagcgcttattaaatctcatgaacctacacgtgcatttgactatataaaaaaagggcttacttttcatccaactaataatgatcttagcaaactatatgatatcgcaacacgcctaaaagctggtgaaacatctgcactagatgaactataa

SEQ ID NO: 9485 - DNA, 1314 bp, Lawsonia intracellularis
atgcaaaattatccattatgttttatacatgcatctgatctccatctagatactgtattttcaggtctgtcaaaagatattccttcaaacttagctacaatacttcataactccacttttgtagcttttaaccgtcttatacaattatgtattacacaccgtcctgactttctattactttctggtgatatctataacgaagaagattatagtatccgtgctatccttacattaagagatggctgttacaccttagaaaaagaaggaatacaagtctttattgttcatgggaatcatgatccttactcctcaagaatgaagtctatcacttggcctaaaaatgtcactatttttgatacagaggtaacaaatgtaccctatacagccaaagatggtacactccttgctcgaatatatggtataagtcatgcttcaaataaagaaagtaagaatcttgctctacaattccatcgaacagaagatacatgtttacacatagctatgcttcattgcactgtaggaagtccacaacactatgatagatatgctccttgctcaacaaaaaatcttatagatgcaggcatggattactgggcacttggacatgttcatgaatatcaagaaatttcacaagatccccttatagtgtaccctggatgtacacaaggccttcatatccatgagcaaggagaaaaaggatgtgtccttgtcacaactaaacaacaaggctcaaaacttactctatacaaaaaattttatacacttgggccagtattatggcacacacttactattcaacttggagatactaaccaacctactcttcaagaagatatctctaacacactatcccttgattatatagaagatacttttcataatgctcttaatgagcttatagctacatttactcctggctggcagatgctcattcttcgcctttcttttacaggttgtacatcacttgatcctctgttaagatatgggaataatctgaatgaccttcttgaaaggctaagggatgtagctagtagctcccaaccagtttggattaaagacattcaactgttaaccacatctccaaagtattatcatgaacttttagaaagagaagacttactaggtgaagttgtacgactttcaaaatcaattaatgaattagaaaatatagaacaaatacatacaacagctcttgctccactgttttcacatcataaacttcggaaaattcttaactatcctaaccagctagaatttaaacaacttttaacagaagctgagcgtctttgtgtcgaacttttagagaataattaa

SEQ ID NO: 9486 - DNA, 3963 bp, Lawsonia intracellularis
atgcgtatccactccttccatatagattcgtttggattctttcataaccaaacaatttcaaatctttcaccgaaattttctatttttcttggaaacaatgaagcaggaaaatcaacgcttttggacttttttcgtcttacacttatgggctatccacaaagaaaaaacaatcgtatcaaaaactatctaaatggacatggacttcaaggaggaagtttagttcttgatactaactatggtaatatccatatcactcgacgtcctaataaaggaccagtaattatagatcaacatggaacccccatagatattacactatgggaacgcttattaagtggtattacccctgaagtttatacaaatatctatggatttagcctctcagaacttcaatcatttgaaacgcttagtactgataatatccggaatgcactctatggagcaagttttggtactggtttacagtccccaagtgaagttatcaagtcacttgataatactatgaatgaactcttcaaacctaaaggttcaacacaacctatagctgaacacttacatgactgggaagagattaacaaacaacttatagaagccgaaaaagaagctgcaaactacgataattatgcacttgaattaaaaaaaattacattaaaccttgaaagtctccattctaaatccaaagaattagaacaacaacaataccatttaaaaaaacgtcttgatatttggcatcaatgggaagaatggcgccttatacagacacgccttgaacaccttcctcccatatctgcatcatttccacaagatggtgcagctagaatggaacgtgcactggaaaaaaaagaacatgccgcacgtgaagttacccttgctagaacccgtcttaacaatacactgaataaaattcaacaatgtcatataaatcatgacatattgtgtattcataaagaacttcaaactattgctgaacataaatcaacctataaaacagcccttatagatattcctgccttagaagcaaaactacaacaaacaaaagaatctcttaaccaagaattattaatacttggtaaaaattggtctattgaaaaaataaacaaaattgatcgctctatatctgtacgtgaaaaacttgaacgcctttctgttgaaatagagctaactaaagaagcatatgatgctgcagccacagcatataataatatatgtgaagaattggaagttgcaaaacaagaagaaatagaaaaacaaaaaatctatgaatctcttccttcattacagactgtccttagtgatacaaacaaagacatccttagtcgtatgcttatacagatagaagaagctgaacgttatttaccagagaaaaaaagtcgctataattctctttatgaagatttcaaaaatcttttaacccaatttcatttacatcctaaatataataaaatagagacacttctaaagctgttaaatgaacaaaactctgctatagaaatggttaacaccatccaagaaaaagcattagaagaaatacaagctaataatttattaactcaaactaaacaaaaggtggaccaactaaaactccactcaaaacaaatagaagaacagatccaacagttaggggatgttgatacaaaagatattgtttcaatctattctcaaataaataccttacggacattactacacatcttttctacagaaaaaatacgtgctgaagaaatagaagattattatcaactacaagttgcaaataataacttcaataacaaaagctcacggtctattgtaataggaattctttctagtcttattggttgtggaatatttagtattcaacacttaatgaatagtaatatattgcctatttctcaaaacataataatcctgctacctctatggtctggctacttctttttaagttcaggaattgtcattatcttaaaaaaactattctataattaccttccactaactaaaaattctactattacaaaacaattacatacacgacatgaaaaggctctatccaaatgtactgaacttcaaaataaaatttatactatttgtaatgagctgcgtatagaaacaccctctttagaaaatattgagaagttaaattaccaaatagaacaaaaaaaagaattatatgataagaaagaacatttaaagcaagaacataataaatatcaaaaagagattgaatcactttatcaacaaatagatgtggctaaaaaagaacatgagcaaaaactagcagatgttattttagctaaaaatacttggtatgaatatgttttggagtttggaatacagtttgttcctaaaccagaacaagttactgcattctttgcacgtgtagaaacagcatgtaatttatggtctactatagaactattgaataatgatattgctgaacttgaatcttattacaaaaattttaaaaactttgtaaatcaaaccttaggggagtatctttcttctattgactgtgattctataccggctttgattaatgcagtaaaagatatcttaacttctcatcaagacgatgaattaaataatagctatacacaagctttagaagatttacagttagcacaagcacacactaaataccttatagattacttacaaaaactaaaaatacagtatgaacattccaagactaaatacgataagacttgttcagcctggagcaacaatctaagtaatcttatgttggatcctaacttggcgcctgatgcaataaaaaatatgttcaaacaaatggatcatattgcattgttaaaccaagagatgataaaaatccaaaataaacttgaacatcaacaaaacgaaaaaaatgcttttgttctcccactaaaacacctttgtcaacagttaggctatactccaaacagtgatgactggattacagttcttgatcaactccttaaagatgcaaccaatgccacattaatatctaatgaaaagaaaacacttgaagaacaaaaaagcgaatatgaaaatgaagtaaaatatactcaactcatcctcgatgacgcaaaccaatctgtctatagactactccaacttgccaatgtagatgatacagagactttctttcaacacgatatcattaaacaaaaacaagaagagctttataagcagcaagaagaaattgaagctattctaagattagctgctaaagatatttcttcctacaaatcctatcctgatttcaatatgtttttacaatcattttctgaaatagaaaaaaaagatttagaagtagaactgaatgaagtttcatcacgacttattgataataaaaaaagtatagataatttttctaatcaagcacgcacacttgaaatacgtttagaaaatcttatttcatctgatactctatatcaaatgaaagtaaaacaagcttctatagtacattctatgcaaaacattgcaaaaaaatggagttgttatgcgctagcaaaacagcttttaattgaagcaaagtctcactttgaacaggaacgtcagcctgaaattatacgtattgcatcccatatttttagtactattactggagggaaatggataggcatcaactcttcattagaagaaatgtcacttagtatattaccacctcatggagaacctataaagccagagcttcttagtaggggaacccaagaacaactttacttggcactacgtcttgcacatatccataatcatgccatccaagcaagtccattacctattattatggatgatattctagtcaactttgatcctgaaagagcaaaacatacaattagtacctttgtagaattaacaaactcttctcaagaacttcatatggggcatcagcttcttttttttacatgtcaccctcatattgcaaaacaacttcttgaaacaatccctgaaagtaacttatactatatagaaaacaaaaaaattactcttgcatcttga

SEQ ID NO: 9487 - DNA, 645 bp, Lawsonia intracellularis
atgaataaagtgatacagttaggatttatcctaatgataacaagtagtttacttggggcttgtgggcaacaacttgtagaaattcctgaagtattacctaaggtaacaattggtgttgtaggacctatacagcctatgggaacaacagatcttttagctggttatataccagaagatcgtggttttgctacagaggaaaaccttatagaacttcgctctttgattatagatacgctaagagcacaaactaaacgtgaatatgaatttattccagcagctgatggtgcagatcctacaattacacgtatggctggagttaatagtgcactagaatattgggttgctgtaggaaaacaactaggtgtagagtttttgattataccttatgttttaagttggcatcctagagagggaagtagtgcaggtgtgacatcttctgctgagttgactatagatttttttcttatagatacaaaaggagaaggagcattactaggaagatctcactatagcgagaagcaagtaggacttgcaagtaatcttttaacacttaataaatttatcaaacgtggtggtaagtgggttactacagaggagcttgcaaaagaagctattgaaaaaatgattaaagagtttaggctatag

SEQ ID NO: 9488 - DNA, 948 bp, Lawsonia intracellularis
atgagtgactctggagcaataaaagatactgatagcaatatgttattagatagctcacaagaaaaatttgtagaaagtatgcatggagaacaagagcaggcatatcttccaggtataacacctccagtaaataatacatcgctcataataactgcaagtggaaatggaggaaacaataatggtggagggatacctccaacaatgtctgatgatgatgagaaaccatatggaatgcctttgttagagcatttatcagaattaaggaaaaggcttactaagtgtattattgttattggagtagtatttatcacatgttatagtatatcagatatactatttcattatcttgctctcccattaataactgtaatgccagcagacacaaaattgatttttactagtgtccctgagggtttttttgtatatcttaagatagcttttgttgcagcactgtttattactagtccttatattttttaccaaatatggttatttatatccccagggctttatgatgaagagaaaaagtatattttgccactatctatatgttcagctgcattttttttaggaggtgcggcattttgttatttttttgtctttccttttgtttttgttttttttatgagctattctacagatactattgtagcaatgccatctcttagtaattatttgtctttttctctcaagatgttagttgcttttggtcttatttttgaaatgcctttatttgcattttttcttggtaaaatgaaccttattaatgctgaaaaaatgcgttctatacgtaagtatgctattcttgtagtatttattgtagcagctatacttacacctcctgacgttttttctcaaatacttatggctattcctatgttgatattatacgagttgagtatatgggttgttgcattgtcagcaggacacaaagaaaaaagaaaatag

SEQ ID NO: 9489 - DNA, 366 bp, Lawsonia intracellularis
atgtttggtattggtggtacagaacttcttttaattttacttgtagcattactagtccttggaccaaaaagtattccccaaattgcaaggacattaggaaaagctttaagagaatttaggcaagtttcttcagaatttcaacatactcttaatactgagataacatttgaagagcatgaaaagaaagttaaagcaggtaacaccgtaagtagtgtaaaaaataatgtagataataatgagacaacaatatctgaaagtcctttatctacaagcgacacactatctacttcatttgtgtcttctaatgataaggatgatggcaaacattctcttaataaagagcaggctgagaaggcatctatatga

SEQ ID NO: 9490 - DNA, 1542 bp, Lawsonia intracellularis
atgcagaataaagttattgtgatagattatggttcacaatttactcagcttatagcacgtcggatacgtgagttaggtgtatattctgaagtgtatccttgtactgttagtaaagaagttttagcttctttacaaccatcagcgattattttgtctgggggacccgcaagtgtaggagcatctgatgccccacagttagatgatattatctttgattttaatgtacctattcttggtatttgttatggaatgcaacttattgctcaatgctttggaggaattcttgcatattcacaaacacgtgaatatggtcctgctgagtttatactagaaggaaactctattctttgggatggtattagccataaacctttctctcgtgtctggatgtctcatggtgatactgtagagtttccacctccaaactttacagttattgggagaacaaacacacttaacgtgggtgcaatcgcaaatgaagagaaaaaggtatatgctgtacagtttcatccggaagtttctcattcagaagatggagaacaaattatccgtaactttctttttaagatagtaggtattgctcctgattggactatgtcttcatttatagaaaagattatcacacaagcacagaaaacgataggggatggaaacgttgtttgtgcattatctggtggtgtagactctacagttgtagctcttatattaaaccaagcaattggtaaaagacttcattgtatttttgttgataatggtttgttgcgtgaaggagaaaaggatgaagttatttcttacttacgtgaacactttgatttaaatcttatttttgtccaagcacaagaccgtttccttaaacaactagaaggtattcaagatcctgaagaaaaaagaaaaattattggtcatacttttattgatgtctttgatgaagaggcaagagcaattggaaaagtagactttttggcacaaggaacattatattcagatataatagaatctatccctcatagaggttcaagtgttgttataaagagtcatcataatgttggtggacttccagaaaaaatgtctttgaaacttatagaacctttaaaagaactatttaaagatgaagtccgtaaagttgctgtagagcttggattaccagattccattatttggagacatccctttcctggtccaggccttgccatccgtattataggtgaagttactcaagagcgtttaactatattgcgtaaagcagataaaattgttgaggaagaactcaaaagttttggttggtataaaagaatttggcaaggttttgcaattcttttacctctaaagactgttggtgttatgggggatggaagaacatacgaaaatgtcatagcattacgttgtgttgatagtagagatgctatgacagctgattgggttcgtttaccttcacaacttttggaaactatctctaaacggattataaatgaagtaaaaggtattaatagggttgtatacgatatttcgtctaaacctcctagtacaattgagtgggagtaa

SEQ ID NO: 9491 - DNA, 1476 bp, Lawsonia intracellularis
atgaatcaagatataacaaataaaattcgttataaagcgttaacgtttgatgatgttttattaattcctgcatactctgaggttactcctgataaagtaaatatttctgcttggttaacaccatcactattgctaagtatcccatttatttctgctgcaatggatactgttacagagtctgctatggcaatctctatggcaagagctggaggtataggtattattcataagaatatgagtatctctaggcaaaagatggaggtagaaaaagttaaaaagtctgaaaatggtatgattcttgacccagtgactgttcggccagaggatacagttgaacatgcacttgaacttatgcagctatatagagtttcaggcttacctgtagtacaagataaaacgcttataggtattgttacaaatagagacgttcgttttgttgaagatctctccaatacttttgttcacgaagtaatgacacgtgaaaatcttgttacagttcctgttggaactacattagatgaagcaaaacatcatttgcatatgcatcgcattgagaagttattggttgttaatgaagcagggcaactagcaggattacttacaatgaaggatattgataaaatacaaaaatatcctaatgcatgtaaagatgacaaaggtcgcctttgtgtgggagcagcaattggtgtgggttctgattgtgaggctcgagcagaagcattacttatggcaggagtggatgttcttgttttggattctgcacatggtcactcaaagaatattcttcatgctgtaaaagtaataaagcattctttccctaattgtcagctcattgcaggaaatgttgcaacatatgaggctgccaagtctttactattagctggtgccgatgcaattaaggttggtattggtccaggttctatttgtactacacgtgttgttgcaggtgttggtgttcctcaagtaacagcagtaatggagtgttctaaggctgcaagggagatggatcggtgttgtatcagtgatggtggaattaaattttctggagatgtagttaaagcacttgctgtaggtgccaatacagttatggttggtagtctttttgctggaactgaagaaagcccaggagaaacaattctctatcagggaagaacatataaaatttatagaggaatgggttctattgatgcaatgaaagatgggagttccgatcgatacttccaggacacaaataagaaacttgttcccgaaggaatagttgggcgtgttccttatcgtggtcctgtatccgacacaatttatcaacttgttggaggtttatcttctggtatgggatattgtggtgcatcagatttaaaaacactatttaatacttctcaacttgtgattatttcctcagcaggtttacgtgaaagtcatgtgcacgatgttattattacaaaagaagcccctaattatcgagtagatactccctag

SEQ ID NO: 9492 - DNA, 588 bp, Lawsonia intracellularis
atgacagaattacaaaaaatgctatctggctatgaatttgaatctgaagataacgaaatttatgaaaggtctttaaaagctcaacgatatataaaaactttaaacgctcttgagccagaaagacctgagcaacaactttcgattttaaaacaactttttaattatgttagtccaacagtacgtctccaaacaccatttttttgttcttttggttttaatattaacattggaaacaacacatttattgatatgaattgtgtttttcttgactataacaatatcactattggcgaaggagttcttattggcccttgtgtaaatatttatactataacccatccaatatctgtacaagagagaaaacgacttgctcctaataaaaatgatgcaccactctataatgctactgctaatcctgtaaagattggagataatgtatggataggaggtggctctattattttaccaggagttgttataggtaataatacaaccattggtgcaggttctattgttactaaaagtatcccatctgatgtacttgctgtaggaaatccatgtcgtgttcttcgtaatcttcatccataa

SEQ ID NO: 9493 - DNA, 1440 bp, Lawsonia intracellularis
atgaattttatctttttttcttctattattgttatttattgtttagctatttttactgccgcacaggcattactccataaaaaagactcaaaatctgcatttggatggattgctataatttttatgctcccaattccaggaataatcttttactggctatttggtattgctcgtgttgatagtcgagcaagtcttttgatgggaaaagcagcttataaggtcttaggtgggaaaaaagatctccatactggcttttttgttaaggatcctcaaggattcattgatagcaaaactcttcctgtaaatatagcaaagctatctatgccaggacaaaaaatttctgatcattatgttgtaggaggaaataatgtctatccactttataatggagaagaagtataccccaaaatgcttgaagctatttcaaaagctacccatcgagtatatctttctacatttatttttgggaacgactttgttggaacactctttataaaaactataaatgaagctgcgattaggggatgtgaggtaaaaatattacttgatggtattggctcgttcttccctataaaaagttggagggaaaaattacatccagcaattaagctagcctatttcctatcaccaagcttactacctcccaaattatctataaacttgcgtaatcacagaaaaattcttgtatgtgatagcaatattgcattcactgggggaatgaatatctcacaacatcacttagtaactcttaaaaagtctaaccgtgtccaagacatacatttttattgtgcaggcccaattgctaaacaactcgagattgcatttctattagactggagtttcactacaggtgaaactgctcgtatcccttttgatccaataaaaaaacaaggatcaacactatgtcgtttaattattgatggtccaggctctcctcatgaaacaatccatgatttattctgtgctatgagttcatctgcacaaaaaaatatccgtattatgagcccttattttttgccaacacctcaactaagcgaagctttagcaagtgcagtattacgaggagtaactgttgatattatcattccattaaaaaataatcattacttactacagtgggcaatggcccatcaggctcctcaacttgtagataaaaatatacatctctttttacaaccaccaccctttgcacacacaaaactcttacttattgataatgattatacattaatgggatccgccaaccttgatccacgaagtttaaatcttaactttgaacttgtagtagaaaattttagtacaacacttactaacaatttaattgaattctttgataaaaaaaaatctcaatcctaccaactgactgaacatacaaaactaccgtctctccccatacgattacgtaatgctgccagctggctcttttcaccctatctataa

SEQ ID NO: 9494 - DNA, 2442 bp, Lawsonia intracellularis
atgaaaagaagtcaacatcgctctcaaaaaacaaaagataatacattgggacaaaagacaagtaagatacaaaaacataaacctaaaagctatattactcgtcaaagtgttcagccaggtagtaaaataaatggattacacatactaagcttactatataattctgatcatcctttaagtagtaatgaaatcattacacgtttaaaaattactaagcaaaaaaaacaagctttagaattagtattaaacgtgttacagaaacaaggtcagatagtttgtacaaaaggtgagaagtgggcaatagcatcacctatgcaaaaagttatagggacgtttgtagtacagcgctctggagcagcgtttgttattgttgatcaacagaatacacaaaagccatattcagatatttttatccgtccagaacttcaaaatggtgcatgggatggagataaagttcaagttattgtctatcctactaagcatggtaaaaactttgaaggccaggttgtacagatccttgaaagacctcgtaaagaagttattgttcgtgttagccagaagcatgagaaaggaggggttgtttgctatcctgtagactctaagcttaatgtactattcattgtagacacatcaaagttacctgaaaaacccattgaaaatgagctattagttattataccaactccaaatacaaatggtgagttattgatgggtattgctcaatactcactgggggttgaagaggatgttcgagtacaagaaaaagttgtgaaacttaactataatattccatgtgaatttcctttacatgtattaaaagaggaaaatgttgcaaaagacctttttattaagagtaaagcagtattctataatgttccctatcagaaatatgatgatatttcacaatgttctacagctataaggcaagatttaagagtaatagactttgtaacaattgatggtgaagacgctaaagattttgatgatgctatttgtgtttatccaacagatattgggtgggatttatgggttgccattgctgatgtgagtcattttgtcagagcaggttcattattagatagtgaagcattagcacgagggaattcatattatttcccatgctctgtagaatccatgttgccagagtttttatctaatgatttttgtagtttaaagccaaaagaagaacgtttagtaatggctacaaaaatttcttttgataatgatgggaaaactaagaatgtaatattttttcctggagtgatatcttctcgggcacgtcttacatatgagcaagtacatttagctttggaagttaaagaaataagtcgactccctgggggaatagataccctgtcaatgcttaataatgcaagtgagttagctaaagtattacaagctaatcgtataaaaaggggaagtttagagtttgatcttccagagacacgttttttaattaataaagcaacccgtcgagtcataggagttatacgtcaagaacgttttttttctcatcaattaatagaagagcttatgttagctgtaaatgaagctgttgctacatttcttcatgataaacaaattccttttttataccgtatacacccagagccagatattgagcgtctagaaaaactttttcggatattagcgactacagacttagcttgccaattgtcaggtagtcctgatgcaaagaagttggggggtattttggaagaagcagaaaatactcctcagacatttttgattagtcgtatggtattacgttcaatgatgcaggcaaaatattctcctgaacctggagagcattttggcttagcatctcctttatattgtcattttacatctcctatccgtcgttatgcagatttacttgtgcatcgagctgttaagtttgctttaggagatactcagaaacatataccctttgggcaacagctttttagtattgcagaacagtgtaattcacatgaacgtgtagctcaagaggcagagagagaaattactaagcggttaagttgtcttgtcctacaaggagatgagggtaaaatttttgaagctattgtcacaggaataacagattttgctttttttgtggaattaatatctatgcctatagaaggtatggtaaggcttgcatcgctaaaggatgattggtttgagtataatcaggatagacaagaacttcttggtgtaaggacaggaaaacgtttttatttaggacaacgtctaactgttaaagtaagttctgtgaatatattaaggttagaaatagagtttgagttacatatgatgcaacctactagtggagaaaatattaaaaaaggtaggactaaggcaaggaactattataggcaaaaagaaaaggtaagaagtagcaatagttcttttagaaagagaaagaaaaaaagttcttctttacatcagaaaggacaatag

SEQ ID NO: 9495 - DNA, 1455 bp, Lawsonia intracellularis
atggatttcattgaattacaaaaaaatttaggatttattctattaccattgtcgtatctttatactctagttatgagaatacgtagagctattggaaagataggtttattgggtcgactagatccatattgtccatgtatttctgtaggtaatatttcttggggaggtacaggaaaaactccagtgatcgactggttactcgattgggcagaacaaaaacagttatcagtatctgttttaacaagaggatataagtcggataatagttctactatattacctttatatgtaaagcctcaccataagcccaaagaagttggtgatgaacctcttatgttagctttagagcatccaaatgcatctattttagtagatccaaatagaattcgttcaggaagatatgctgtacaagtattaaagccagatttattacttttagatgatggatttcagcaggttggtgtaaaaaaaactctagactttgtattattaagtgaggaagatttaacaaaacaatggaatagagttattccagcaggctcatggagagaaggtagccaagcacttgaggatgcaagtgcttttcttatcaaggcagataaggaaaaaatgcaatcacttttgcctattattcaaaatagattatttcattttggtaaaccagtctttagtttttatttaaaaccagttttattaaaaggagcaggtttgtcagaggcagtaacagctaaagagtttgctggccgctcatatattttagttacaggtgtggggaatccaaatcaggtattacatacagttgagtcatatttaggttattctccagaaactcatatcattttttctgatcatcatagatatacttttcaagatattaatcgacttctttcttttaatcttcctattatttgtacaatgaaagactttgtaaaactgcagtggttacctgttagtgaactttggggattacaagtaaaaacagtatttgaaggatatttgtggtcaaagtatagtttcccacaatggttagctgcattgtgggatgaaaagcatcataatattgtagattcgttaggggaagatatagaggattacaaaggatttaatagttcggtaacactattttttgaagagcagggagaggaaagtatccctccagagtatgagcaatctattcaagataaggctgtctctaatgatttaattatttttgatgatgaacgtagtgacgttgatgaagttagtgttatacagaacaataacaatgtagaagtacaacatactgatgatcatgaagagatagataacatgaggactactgttatacttccagaatctccccaaaacctttatcatggtagtcatgttatggatgaagctactttttctaataaaagagaaagagatatactacgtaatgatagtaatgataataacagtgaaagagccacctga

SEQ ID NO: 9496 - DNA, 519 bp, Lawsonia intracellularis
atggttaaggaacgtaaggatataataacttttctagggaatccattaactcttatgggtaatcctgtttctataggggaaaaggcaccagactttacagttcttgcaaatgatctctctcctcggactttaagtgactatgctaataatatattaatattaagtgctgtcccctcattagatacaggagtatgtgatatagaaacacaacgttttaatagtgaggcagcaaaacttggtgaaaaagttcgtatcttaactattagttgtgatttaccttttgcacaagcacgttggtgtggagctactggtgtgagtgcagtagaaacactttctgaccatagagaactttcctttggttatgcatatggtatagctattaaagagttgcgcttgttagcacgggctgtctttgttgttgatacaaacgggatgattacctatcaagaaattgttcctgagatgacacacgagcctaactatactgctatctttgaagcagttaatactgcgagttaa

SEQ ID NO: 9497 - DNA, 2412 bp, Lawsonia intracellularis
atgagcaaaaataataagatatctattcctctcaataatacttattctttagtacgttgggacttactaaagtttgaacaacaactatgtaatagtattaaattaatccttccttttaaaaattatgctatttactttccacagcatcatctccccaaaaatcctgaatggcttcccgaagaacaaaaactatttcttccattctggtacaaagacgaattattaggcgttgtcatgattcgtaatcctgatcctaccttaacagagatgttactccctgttctgccagggttaactactttatttttagcacaacttgaacttcataaaaaagcacaacttgattttcttactggcctaatgacacgccaaaattttatccaattgcttacagaagaaatagagcttatccagtcctcactcaataataacagatatggtggagtagaagaaacaactcattataaaagcagtatagctgttataatcattcgttttaatggactatctaaattaacccacgaaataagctataactttgtagaaaatattattgctgatcttgctgatatttttatacaatccatacctaaccatacaattcctgcaagaactggtgagtatgaatttgcattactaataccagaaacaaatagatctcaatgtgatactatcgcaagcaaaatccttttttgtttaaatcaatataaaaaaccttctcccctaactgaccgttatatcagtattagccctcatgcaggctatgctatttatccacaagacatggatagaacaaaaaaagttactatggatacccatgttaacctcatcctacataaagcaggacttgctgctgaaacagcttactccagactttttcatggtgggaaaaatattatgggatatggaagccttctttatgaaggaggagaaatttgtcaaattctaccattagcacaagtcgctataaatttaggaagagaaattggagcctatgaaggacaacatttttctgtttggacaacacattatcataatcctaaaaagctaaaagaaaatcatattcccatctataaaggagaaattgtactgcttgaagtaaaagaaaccagtagtatagcagaaatagtttaccttggagatcctacacaacctttcgaaattggagatatgctcctactccttgatgaagaacatagtttattacaagaaaaatcttatgaaaggcaacaaaaaataaaaacacataaactagatcccacaacaggtctccttcaacattttgactttgtaacaaaattttcagaatcttatagaaaatatactcaattttctttagccattattcatacagctaataaaactttaaatagtacatctcaagaacaaataaaccactatatcaaagagatagcagtaaaatgtcatttattaaataataacctcaatgatagcgaattatttggtggacgatttgcacttaatagtcttatcttcttccatactaatactcaacctgaatcactttatgcacattacacagcattatctacaaaaatttctcaagaattaaatataactttaagcgtaggtattgcctattggccttttctaacattacaaccactagacattttagaatgttgtcgcaaagcattggaatatgctcttcttctaccaccccctcatgtagggatatttaactcactagctataaatatcagtgctgacaaaaaacactgtaggggagatttattcagtgctattgaagaatataaacttgctctacttgcagataaaaataatgctttagcacggaattcactaggtgtttgtattgcaagccttggacactacaatgaagcccaaaaacattttaaggaagcactccaactcttaccaacagaaccaatgatctcctataatcttggtatgacataccagaacttaggagatattacatctgcgactcaatacttccataactgtcttacactatgtccaacacatctatatgcagctattagacttggggctcttgcagagtctacaaataatactcaagaagcaataaaatattataaccaggcattatctataaataaaaaacatgcattaccatataggcatcttgcaatgcttgcttttaaagaggggaaaaaagaaaaagcaagagaatatcttcatcaggcactattatataatccacatgatacaactacacttatgcttatggcaaaaatgtatttagatagtggtgaagatcccgaaattgctgaaactctttctcgtcaatgtgttgctcaacggccagatattaaatcaaactggattgaatttgctagagctcttgaggcacaagggaaaaaaaaagaagcaaacaaagcttggctaaaagcaaatgaattataa

SEQ ID NO: 9498 - DNA, 2067 bp, Lawsonia intracellularis
atgacatatactatccataatttgcactgtagaggttgcgctattcgcatagaagagcaaatacagtctttaccaggaatatcatttgcttctattgatgaattaacacatcatcttgttatagaaggtagtgccccagacttaatagaacttaataagatagcaggtgagattttacctggagtttattttgaaccttattctactaatgcaatagatgaagaggtttcgtggcctccttcactatggatagctagccttttctttattattggtattctttttcaagaaaaattatataaattttccctttcagttgtcacagatgcaattttttttggtataccatatgttttatgtggatggagtgttttactacaaggtttgaagtgtgtattacgcaaagatttttttaatgaatttaccttaatgggtggagctacgcttatagctattgctcttggagatttctcggaagctgtgggagtgatgtttttttatcgtattggtgaatacattcaagaaagaacattaataaaatctaaaaagtccattagggctttactggcaacaaaaccttctattgcacatttagtgcaaaaaaatcatatacaagatgtttctcctgaatctctgcagcctggagctaatttgcttgtaagaccaggagaaaagatacctttggatggcattgtagaatcaggtacttcacaagttgatacttctcctctcactggagagtcagtaccgactgttgtacatgttgggagccaagtctttggtggaactattaatatcatgggttcattaattataaaagctacagcaacttataaggattcttctatatccagaatgttagagttggttgaaaatgcagtagcacggaaagcacctacagagaggtttataacacgctttgcaaggtattatactccattagttgttttatctgctattttagtagcaatattacctccattgtttggactaggaactttacaggagtggatatatagaggattaattttaattgtcatttcttgtccttgtgcactccttatttctattccactggggtatttaggtggaataggtgctgcttcacgtcaaggtattcttgttaaaggtggaagtgtatttgatgctcttcaaaaaattaaaattgtagcttttgataaaacaggaacattaactaaggcaagatttgaagttacagggatacttcttaataaaggagtctctcgtgaatatttactacagtcggcagcaatggctgtaacatactcttctcaccctattgttcgtcctattttagatattgttaatcaaaaacctcaggtaagtggtatagcattaaaagaaatcccggggaaaggtattgttgcaacatataaagagacatctcttgttgttggcaatgaaaccttgttaagggaacatggttttgagcctattatcgtagataggcctggcagtatcatacatgttgctagggatgctaactaccttggtgttattgttgttactgatacattaaagtcggatgcggtagaagctataagatgtttaaaaaaatatgttaataaagtggttatgttaacaggagatcgccctgactctgctgaaggtatagcaaaaattatacaggtagatgagtatagggcagggttattacctgaagataaggttgctgtgatagagtcatttgggcctattgagcaaacattatttgtaggagatggtattaacgatgctccagttttagcttattcaggtgttggtgtagctatgggtaaattaggagcagaatcagctattgaagtagctgatgcagtaattttagatgattcaccagtacgtgtagtagatcttatacgtattgcacgaaaaacatacattattgttttacaaaatattatactagcgttagggataaaaactgttattatggggtttggtatagcaggcctttctacattatgggaagctgtatttgctgatgtaggtgtagcattattagctgtttttaattcaactcgagctggtaaattaaaaaacttttaa

SEQ ID NO: 9499 - DNA, 1482 bp, Lawsonia intracellularis
atgcagcagtatattatttttattcccattatcatatatttgggacttactttttttattgcactactgacaaataaacatcttactataacaaattcagatacatttattaaagagtactttattggaagccgctctatgggtggttttattttagcaatgtctattatagcaagttatacaagtgcaagtagttttattggtggtcctggagctgcttatgagtatggattaagttgggttttacttgcaatgattcaagctcctgttgcttttttaactcttggaatccttgggaagcggtttgctattatggcacgaaaggtaaatgcagtaacattagtagattttcttcgtgttcgctatcaaagtgatattcttgttgtattttgttgtatagggctacttacattttttatggcagcaatgcttgcacagtttattggtggagctaggctttttcaaaccataactggtttctcttatgagtatggtcttgtcatttttgttcttacagtgacattttatactgttgttggtgggttcagggcggtagtaacgacagacgcgttacaaggtatagttatggctatttcttctatacttattttatgtgttgttatttataatggtggtgggatagaaaactgtattcttaccctaaagaatatagatcctggacttattactccaacagggccagatggacttctatctcctactcttatgttttctttttggatacttattggttttggtgttcttggtctcccacaaactgctcaaaaatgtatgggttataagaattcatattcaatgcataaagctatgatcataggtacagttgttattggatttatgctattaaatatacacttagcaggagtattcgggcgtgttattatacctgatttatctataggagattttgttatgccatctcttatagtaaaattacttccagaattttgggcaggattattcatagcaggtccattagcagctattatgtcaactgtagatacaatgcttttgttagcatcagcagttatcgttaaagacgtctacattcactataaatggaaaggtgatatttcgtctgtttctcaaaaacatattaagcaaataagtactggatgtacattgttattaggtttacttgtttttgttctagcgttagatcctccaatgctattggtatggattaatctttttgcttttggcggccttgaagttgtatttctttggccaattctttttggaatatattggaaaaaagcaaatgctacaggagcaatttgtgctattattacaggaatgattactttttggagtataagtatttttaatttttcttttggaaatgtttattctattgttccttctttactgttatctggtatagctttcattattggtagctatcagggacagcctacatcaaaagaaatcctttggttattttggggtgaaaaggagtaa

SEQ ID NO: 9500 - DNA, 366 bp, Lawsonia intracellularis
atgcagcatagattaagtaaagaaattttttcaagaaatgataagaatcatacatataaacaatataaacaatcaaattatgaggcatggttaacatcatgtatatatattttttatagtatatggtggtggctttttgcctatgttatttgtaatgggaatgtcctaacgtatagttatatattaggattcccttgttggttttttttcagttgtcttatagggtttcccctactttgttgtatattatggtttattattcattacttttttaaagaagttccattagatacaccaattcaaaattatgacccaaatgatataaactcccaaatacagagtgaacatcatccagaattattataa

SEQ ID NO: 9501 - DNA, 1320 bp, Lawsonia intracellularis
atgttacaacgccatattcttgtttcaccactctataaaaatactaaattatcttttattacatctgtaactcatggattaattattggagtctgtgttggaagtatcatttctttatataggttaacacacacagtatgtctcaattttatactacagatattacaccaatggttgaactatgtatgggtaatcccattatggttttgtatactttttatcatttcctggatcattggtaaacttgtagcttacgcaccacatattgccggtagtggtgtcccagaagtagagcttacacttacaggagatctccaattaccatggggaaaaattcttatttctaaatttataggaggctggctagctattttaggaggtctttctcttggacaagtaggtcctagtatccaaatgggaggactaataggagatggatttagtcgctattggctaaaacaacaatctaacttccatattattggagggattgctgcaggagtctgtgctgcatgcgatgccccaattgcaggcttattactagtttttgaacaaataaaatatcctataactatacgctctttaatcattactattttttctgtgattggtgcacaacttgtattaacctatggatttggtattaaaagaatgtttaactttgagtcatttcttagtcctatattaaatgaaacgccactacttatagctactggcattataatagggataggaggagcattatataacactatacttttatggttcagagagagggaaagtaaacaaaaagttgttcctaatcttttcagagcagctccccctctcttttgtgctggtgtattaattttttttctacctgaaattacagagggcggggaaaacctcatacgtcaacttcctagcttttcatactcattatattttttagcgattcttcttctatttaaagttattttctctgcatacagcactacaggaaacatccctggaggtatccttatgcctattctttcaataggtgctacctctggcctcatacttggtaacatgtttgctcaacaagaagttattggatatatgcaagcaaaaagttatcttatttatggtatggccgggttttttgcagcaactgttagagcacctctaacaagtataatattagtaacagagataacaggagcattacagtgtattccaggaacatttcttgtaggctttctaagtcattttacagctaacttagtacaatctacacctatctatacatctttaaaaaaacttgcttatctcagactttataataaccgtaatttatag

SEQ ID NO: 9502 - DNA, 747 bp, Lawsonia intracellularis
atgaaagaaacattacataattatacatttacgacaggagaaaaaattacagtcatagttaaaaaaggttcacctagacgtaaacatattgctatttgtataacaagtagaggacaagttgttattacaataccatatggagtaatgcaaaaagatgcattacaaataataaacaaaaaagaaaattggattaaacatcacctcattaaaactcttaacaaacctcaaccctctccattaacttatactacaggagaatcacatttatacttaggaaaaagatattctcttattgttcttaaagaaaaaaaatctcgactatccctgcaacaacgtatcatacttaacaaaaatgaaatccaggtaactccattttccaacaactcattaacagtcaaaaggcttctttttaaatggtactatgctgaagctcaacaatatattgcaaagcaattatatctacttttacaacaaatcccttggttacagacagttcctacatggaaaattaaagcaatgcggtgttgttggggaagttgttccccacatggcgtaattacaattaatacacacctcattaaagctccaacaatatgcattaattatgtgttacttcatgaaatagctcaccttaaggagcacaaccatagccataactattataaattattaacaaaactgatgccaaactggataaacataaaaactcaactagaaaatatagcaccatttgttttaatgagttag

SEQ ID NO: 9503 - DNA, 1575 bp, Lawsonia intracellularis
atggtaaaagaacagtccccttctacagttaggacaagatgtattaagcgtatagtagaccaatgttccctatggcatcactgcattcctatagcatttgcttttagtcttagtagtataggaaaaagttttctctttaccttaccattttggtctaaccactggaaacctaattcagaatcattttttattaataaaccttatgggctttggattacctcgataactattcttctacttggaatacttcttcactatactaataaattaaacaacgaaaattcgttaattcacaattttataaagtcattctcccatatcataaaacaagtagtacctataaaatctcataggattatattatggaaaaagagtcccttacaacctctctttgttacttatcttattgtaatactcttaaatatattatttgaacagtttcaaccctacttctcagacttattcaaagaaactatgtactctattgaactaggagtcatagtttttacaggattactatgtatttctattttcccacctgtttatgcatgtattacttatgccttagcgatagtatgtaatattgctttttatgaatgcacgctgtatattgatcccagctatatacatatgtttcaagtaatagcaccatttttagcacttccactttttattattggtattccccatttagaaccacactataacataacaaatcctaagaaagtatctagacctactgtcaacatttcaaatcacagtttacagtatgtagccctctcccttataggtttattatctacattccaattctttcttaatgctgcaacaatagatacatttatttttattaatgcttatctttcagaaaaatactctgcaacaatttttatgctcagcagtcagttaattgcagcaatttttgccatatggataattaaatctaaagataatgcacatcttatgttactgctttttatcctgggtctcttaggaatcagtactattctttatagtattcttatccaaaaaactgttccaatagctattctccaactagcttcaggcttaataacaatgttttgtataataacattttctatattagtgcatagtcaaaaatgtatgtataaaatacttgcactatcaatttttgttatgaatatagttggatatttttctggatatgcattatggaatatagcaatattcttaaaaaattcctctagctctattatacatatacacattcctatattaggaattgtttcagttttatcaattctattaattcaatctttatattaccatattatggatatatcctatctatgttatatattaagttctcatgataacagtatggatgtgtatgtttaccaagacaaactaaatacccttacacctagagaaaaagaaatattgagtcttgtacaacaagggttgaagaatattgagataagtaataggttaagcattacagaggggacgttacgtgttcatctacgtaatacttatcgtaagttaaatattcaaggacgacaaagcttaaaaagccttcctcataatttataa

SEQ ID NO: 9504 - DNA, 1083 bp, Lawsonia intracellularis
atgttacataattctaaaataatctttcctaccttatctattcggatatattactttatcttctgtatattatctatagtggtgggctgtactgtttttctactagtaaagcaaaatgcttcagacttattcttatataatttgttaactatcaatacgactatacttaaaaataaaacttatcctcaacatatctttcaattaaataaaaatagtaaccaactattttctgaaaaaaatctttttaggaataatcaaaacgtacctaacctactatatagtaatactattcacaagtttactgaaaaaaatgatactaaagatacatttaatttattgctattatgttctatctttttttttgctataccatacatcattttttatttatttgtaatatatccatttatcaacttatgtcatacaatagaatatttatatagcaaaaatagtaataaaaaaatatttaaaactactatattcgaattcaaaaaaattatttctatagtccaaaaaaatattattaaacaacaagaattatatcataaactacaaattactaaaacagaaaaaaagtatattcaacgtattaatagtatagattacacaacagggctattagataaaaagtgtattaatacgtatttatcaaaatatcttggttatagtgtattaactatcttaatgatagatattgatcattttaaagcttataatgatacttttgggcatgttgctggagataaatgtcttgctgctgtagcaagatgtataaaaaatgcacttaaaagaaaagaagatattgtatttagatatggtggagaagaatttattgccttactcccaaacacggcaatatcaggtgcacatattgttgctcaacgtatccataactctcttacgcaaatgaaaattccaaacactacttcaacagtatacccgtttcttacagtaagtataggtattaatgaagtcttaccatacaaacatactacaccaatagacgctgtccatcatgcagatatagcactttatacagctaaacataatggtcgaagtcaaacagctgtccattctaattaa

SEQ ID NO: 9505 - DNA, 867 bp, Lawsonia intracellularis
atgcgtccagaaacacaagctatgctttgtcgtatgcgtgataatgaagccacggatagtcaaatatatagattgttatctaagcaaacaaattcacttcataataaaaaaattttagagcaaatggcccaagatgaggataaccatagtaaaatttggaataagtatatagggggtagcccatcaataagttcaataagagtatggattttcacactattaggaaaaatttttggattagtctttgttatcaatttattagaatctagagagattgctgcaattgaggcatatcaaagtattagtgacgaaattcctgaggctaaagatataatggcagatgaagagaagcatgaatcacaatttgctgttcttattgagtctgaaggtttaacctatataagttcaatggttcttggacttaatgatgctttagttgagcttacaggagctttagctggatttacatttgcactccacgataataaagtaatcagtatggctgggtttattacaggggtttcagcaacactttcaatggctgcatcagaatatcttgctcgaagatctgagaaaacaaataaacatccactaaaagcagctatatatactggtgtaacatacctcataacagtaactctacttttagttccatttataatatgttcttcacctattatagcacttatcttttgccttattactgctggtcttattattttatgttttacatatgtagtctcagttattcatagaaaaccatttttaccttcattccaagagatgattataataagttttggggttgcaggagtatcatttgtgataggttggttagcaagggtatggtttgatgtcgctctttag

SEQ ID NO: 9506 - DNA, 702 bp, Lawsonia intracellularis
atgacggtgttagcagaaagaaatgataatattgaggctagtgcttttataaaaagtcaacaaaaagatcccttacgtgaacgtgtttatcaatatttaacacgggttatgtcaacgggaggtgtccagcatggacaagctattaatcaagatcttatttgtaaagagttgcaagtaagccgtgcaccactacgtgatgctttaattcgtcttgaatctgaaggtgtggtaacgattgttgctcggaaaggtgtatatttaacacctgtaaatgaagcttttttgcgtaatgcctatcaagttatcaatactcttgaaattgaatgccttaatgaagtctttgattttttaactatggaccatgttaaggaacttgaagaatctaattcaaagcaaaaactttttttacagcaaaatcaagcaacagcttatcatgaagaaaatatgagatttcatgatatttttttagatttaactgaaaatgcattattacgtaggttacatacttctgtggcaaatcggctacatttattttgtcaatctgcttgttttgacgattgggaaaatcaacgtttaagtgagcatgaaagatttattgctgcaataaaaaataaaaatagagatgatgctattaatattttaaaaaatgagcattggtcttttgcccaacataaagattttcttgaacgttattatgtataa

SEQ ID NO: 9507 - DNA, 1497 bp, Lawsonia intracellularis
atgaaatgccacattttgatagattggttaaggactgttcttactttattacataatattttttataaaaaactactacctttttcttatattaaagttgttattttttcttgttgtactatagtacttttttctacttctctcatattaactcctatttatgcatctggtttatttagtagtatggggcttaaggaagagcttgagctagggaaaaaatttaatcttcttgttcgttctcagatggctgttgtagaggatcctgaaattgttggttatatccagtcaattgtagatcaattagcagcatctatgcctccacaaccttttcaatttaaagcaagtgtcgttttaaataactcagtaaatgcgtttgcgattcctggtggctatgtatttgttaatacaggccttatcatgaatatggagaatgagtctgaattggttggtgctcttgctcatgaacttgctcatgtgacacaacgacacatagctcgtcgtatggagcgtgctcaaattgtaaatgttgcaagtatattaggtgctcttgcaagtgttttcttagggggaggaaataccactggcgctgtttttgctggaagtttagctgcaggtcaaacagcaatgttgaactatagtcgttctgatgaaacagaagctgatcaaataggattacagtatttagttaaagcaggttttaaaccacaaggtatggaagaagcttttgaaaaaattcgtcgtaaacagtgggcatcaggtgctagtactccagaatatttatcaacacacccggatattggggaacgtattaatgaaattcattctcgtgttgcttctttgccacaaagcatacaggctagagtagaaaataataaacgatttaaaagagttaggactcttatatgggctcgttatggtgagccagaaacagcatattggctttttacaaagtctggagaaaaagactgtcttgctttaatgggtttaggaattcttgcagaaagaaaaaataaaataaaggttgcagaagatgcttttcataaggcagttgtatgtgctcctaatgatgcccttatactaagggaaacaggaatgttttattataataggggtgatggtacacagtctatccagtttttgaagaaagctttatctttagattctaaggatgtgcttgcacagtttttttatgccagagctctagatgatgctggtaatagtacagaagcacagacatattataagcagttgttgaaaatattacccgaagacgcagaagttcattatatttatggtcgttcacttggtcagtctggaaatgtatttgaagcatatattcatcttgcttatagtgcattatatcaaaatgatataaaaaaatttacattatggtcagagaaagctcgtagtcttgcaaaaacatcagaacaagaaaatcaacttaaaagtctcatgaaaattcatgaagaacgtgtagaaataacaacacaggaataa

SEQ ID NO: 9508 - DNA, 1458 bp, Lawsonia intracellularis
atgcatctatataatactatggaaaagaaaaaagagccacttatacctataatttcaggaaagttaggtatatatgtttgtggaattacagcgtatgatttttctcatattggacatgcacgatctgccatagtttttgatatcttggtgagattattacgatatcaaggatatgatgtaacatttatacgtaattttacagatattgatgataaaattattaatcgtgctaataaagagggccgtagtagtaaagaggttgcagaagaatttataaatgcttttcatgaagatatggatcgccttggtgtgctaaatgcagatattgagcctaaggctacagattatatccctgaaatgatagagtgttgtcaaaaattactagaggctgataaagcatatattacagcttcaggtgacgtttattttagagttcgttctttccctgattatggaaaactttctggtagaactcctgatgagttacgtataggagtacgtattgtacctagtgaggagaaagaagatcctttagattttgttctttggaaagcagctaagcctggagagccttcttgggaaagtccttggggaagagggcgtcctgggtggcatattgaatgttcagcaatgagtgaaaagtgttggccacttcctcttgatatacatgggggaggaattgatcttatttttccacaccatgaaaatgagattgctcagactgaatcaattgtaaataagccgttggctaaaatttggatgcataatgggcttgttcaagtaaattcagaaaaaatgtcaaaatctcttggaaattttaagattgttagagatatattagaagcatatctcccagaaacattacgttttttccttttaaaaaagcattatagaagccctatagatttttcttttgaaggaatgaatgagacagaacgaagtcaaaaaagagtgtatgaatgtattgctgaggtagataaagcacttgaaagaaaatcttgggactcaggtggttcatctagctctattttagctgagttagatgaacaattttcactatttatgtctgcgctagaagatgattgcaatacagctgctggattaggtcatttatttaatattatccatatagttagacgtgctcttgatgataaagctctttactccacaactgatgggaaggtggtttttgaacaatttcgtgagattatacgaaaagtagatattttattaggtgtatttggtcaaaaacctaatagttttttacaagatctcaaaacaattcgcattattagaaataaaattgatgttaatcaagtagaagagttacttagtaagagaaggcaagcaagagaggaaaaaaattttgttcaggcagatgaagttcgtaataccttagcttcattaggtatagaaatacgtgacacttcagaaggtcaggtgtgggatattttataa

SEQ ID NO: 9509 - DNA, 429 bp, Lawsonia intracellularis
gtgctaaaagtttacattgcttctgatcatgcaggattttctttaaaaaatactcttatagagcaattgcaagataacgattatatagtaagagatttaggtccaatgacatctgaaccttgtgattaccctttatatgctcaatatgtttgtgaacaagtattagatgaaataggcagttttggtattttaatttgtggaacaggtataggtatgagtatggctgctaaccgtataaaaggtattagagcagcactatgtacttctgagttccaagcaagagcaacacgtctacataataatgctaatatattatgtttaggtgaacgtgtaataggtaaaagcattgcaatagagattgttaatatttttttgacaacaccatttgagggtggacgacatcttcagcgtattgcttcatttgattaa

SEQ ID NO: 9510 - DNA, 345 bp, Lawsonia intracellularis
atggaatttcagatagaatggggtaaagtccaagatttattttgtgttatgtatactggtttatgggtgttagtaatatatgtccgttggtttgttgggttagatattttcttttcattatgtattgctagattaaaaaaacataaaaataaacttgaaatacaattgagttattttgtaaatacattaactccagttgaacaggaaaaattaaaagctgagcttgatcttgtgagtaaagatatcattcagttagaaagtaagaaaaaaagtgcttttagtaaaaattgtacagatgtgttgcaaagacgattgctaaaagcttattgccttgtaagtagttga

SEQ ID NO: 9511 - DNA, 786 bp, Lawsonia intracellularis
atgatcatcttattacggtatgttatcttattggaattagggctattaataataagttgtagttcagtacaaacaaaatttcctattgcctctaaggacgtgcatgagatatggtacacatatgaaaggtatgcagaacagcaggggaaaaaaagtactccatatagaataaaaggaacattattatatcatgctgataaagcaataaaaaggctttctgttattatatggagtaatggaaattttcctatttgtttagatgggatggctgggatgaatactcctgttgttaggctacacgcaacacaggataaatttattatatattctattatagataaagaagctaaagttttttctaatacagataaggtatttttagagttagaaaaacctttaccatttggattttatgactttgtatcacttatacgtggtcagttttataatgtatttggaaaacaggttcagggagtatctcctttatctatgtctaatgggaacattatatatactttgctaggaggaaagttatctggaactttagaattatctcaaagtggtttgccagtgaaatgggaaaattctactgttggatggtcattaactattacttatgatgatcaaacaaaactaccaagtaaggtaattttgtttgataacaaaaacaataaaattgtttttattgttaaaggtagagaaacgtttcttcaaaattttactaactctcagttacaacttattcttcctgaaggagttgatgtacagtatatatcttatgaatga

SEQ ID NO: 9512 - DNA, 1722 bp, Lawsonia intracellularis
atgaacgtgatacaatttgttcataatgtattaaggcaatggccactggtacaattgctcttgagtataggtttaatcctattcccactacaagcttgtgttgctaaaaattcacaacataacactattcattggaatcttactccagaagcccaagtaacatatggcattctattgcttgaacaatcgattaggattggagataagagcggtgttcttgaggcaatgagtattttggtgaaacatagcccagcgccacaattctttacagatagtgccgcatggtttcttttagagaaagatcctattacagcaagaaatattttagaacaggggatacagttatttcctgatgagtttggattttatctactacttgctgattgctggcttgaagaaggttatccagtaaaagctttggagtctcttcaagcatatcaattacgtcatccaaagtcagatttagtgagacaggaactagcaatactttatcttaagacagaaaattataaagaggcagtagatattttttcttctttgccaaagaattattacaatgcgtttattcgatattgctatgctcagtccttagcagcattaggtcgttcatctgaagctatgagtcagctgaagttagctgtgcaagaaaaccctgaatttcttgaagcatggtttgaaacaggtaagctattagaaaaaacaggcaattattctgaagcaattaaagtatatcttgacttgctagataaagactctggtaaccagagtgtacggctacatcttattagtacaatgttatcactaaagaagcctgatcaggctttaaaatatataacagaaagttcagagaattacagcttttgtttgactgctgttacattatttcttgaaaataaattttatactcaagcagagctattacttaaacaaataaaagagcgcccagaagcagcaggtgacataaatgttatactttatatccttggagctattgagtatgaatgttataaaaattatgacaaagcattaacattgcttgaagaggctagtagtaaggataagtattatattaatacattattattgcgtgtacaaattttttacagtttgaataaaataaatcaagcaatgcagttactacatcaagggcaagaagcagctccattagaacaagagctatggacaacagaagttcagttgttgcttaataaaaaagagtataataaagcccttattgttattagtaaaggattagaattgtttcctgaggagaaaacacttctttttttgaaaggtgtagctataaatggattaggaaaaaagtctgaatcattagagcttatggaacaacttatttctcgttatcctgattatcctgaagttttaaactttgtaggatattgtttaattgaagataaacgtgatatagatcgtgcactttcattgattaaaagagctgatagtcttataccaaaccgtgcttatattgtagattctcttgcttgggcattttttgcaaaaggagagataaaaaaagcttgggtagaaattaatagagctgtgagtcttgaagatagtaatgatcccactatttgggaacattatggagacattgctcaagctataggaaaaaagaaggatgctaaaataggttgggaaaaagctataaaacttcagccacaagatgtagaagcaatacaaaagaagttgcaaggactgtaa

SEQ ID NO: 9513 - DNA, 1158 bp, Lawsonia intracellularis
atgaattacgatatacaatctccttttttacttgacaaaagtatttcagagcaatctttttgcagtaaaaaaaggaaaaatgatgacacatataaagctagctcaagcaaagttgaatatgaaaagataaaaagaaatagtaaagaagaaagtgaaattgaagacccagatactgaaatggatgatactttattaagtagtagtgaagatcttctttgtgatcttatagaagatagtgagcttgatgaaatgggttttgaaactgtagtgtcttctcaagtgacactgtctacaacaacggctacaagagattctttacagctttacttaagagaggtcagtcgctttcctatgttaaaacctgaagaagaacttaggttagcgcaggatgtacagaaaaaaggttgtagtaaggctgcattccgtttgatttcttcacatttacgtcttgtggttaagatagcaatggactttcaacgtcgttggatgcaaaatgtattggatcttattcaagaaggtaatgttggccttatgcgagctgtgaataagtttgatcctgataagggtattaagttttcttattatgcagcattttggattcgtgcatatattcttaagtttattatggataattggagaatggtaaagattggaacaacacaggcacaacgaaaattgttttataatcttaatcgtgagagacaaaaactccttgctgaaggttttgatccagatacatcctcacttgcattacgcttaggtgttggtgaagaacaaattattgagatgcaacaacgactagatgcatcagatatgtcattggatgtaactgttggtgaagagacaggaaatgcatcacgtatagattttttaccagcaattaaccctgggatcgaagagagtcttgctggtcaagaaatagctatacttcttcaagataggataaaagatatattacccttactttcagaaaaagaagtgtatattcttcataatagattacttacagatgatcctgtaacacttcgagaaattggtgaaaaatacagtgtaacccgtgaaagagtgagacaactagaagcacgtttattacaaaagctacgtacacatttatctcgtcaaataggtgatttttcagaagagtggataggccattaa

SEQ ID NO: 9514 - DNA, 468 bp, Lawsonia intracellularis
atgtatactattcgtactatttttctatatacattatttattgctttaacccatatttcgttagcacatgctgaagaaataaagactatccaagggaaagaactagcttatttcatttcacaaaataaaggaaaacctattttcataacagtttttgcaacatggtgtcctgcctgtagacaagaaatgcctgggattattgctacacaacaaaaatattctaaagaacaagtaacatttattggtatttcacttgatgataatgtagaaaacttacaaaattatataaaacaatcaaaaattacctttcctgtatatattgctggctcaacaattccttcaatgttctccatcacagcaataccacacaatattatttatgataagaaagggactcttgtaatgaataaggctggggctctttcagcgaatgaattaaatactatgctaaataagtatatcaaataa

SEQ ID NO: 9515 - DNA, 747 bp, Lawsonia intracellularis
atggttatgtggattggagtctttttcatgattgttacctgtccaaactgcctaacaaaattcaattttcctgatagtcaaggacgccctaacacaaaattgcgctgttctgtttgtaaacatatttttcctcttatacaagaagagcaaaaacttagcttcaatactgttaactcttccaaatcttcaagtggaggggaaaagaaaaaaaaatggagctccacaaaaaaattacttctgcttttcatactcctaactctaactgcaggtatttatgcctggtacacatacccccaactaaaagatgttgttcaacattttctcttttcagaaaaaaaagaagaacctactgacttaataagccttattgctcttcgtgatgttgtccaatacaatattaataatgaaaaattaggaaatatttctgttatagaaggaaaagttgttaatggattttctgatcctagagaattaattagactagaagcttctctttatgacaaaaatggaaaactccttgtatcaaaagaacaacttgcagggactagtgtatcactttttcaattacaagtccttggcgaacaagaacttgaacgtgcccttacaaataaaattgatatccttgctaacaatacgaatatccctccaaaaggtgaagttccttttatgatagttttttataatcccccagacaatgctgctgaatttggtgttaaagttattgacgcacgcttacctcctaaataa

SEQ ID NO: 9516 - DNA, 1332 bp, Lawsonia intracellularis
atggctaaacctcgagaagtctatatctgcattgaatgtggagcacaattcccccaatggcatgggcaatgtcttacttgtaaaacttggaatacactaaaaatacacaatgcaccttctacaaccgctcaaaaaatatataaaaaactaaaacctataccaattggtcgtgttgaaacctctacctatcaaccattcagtactgggattaaagtattagatcatattcttgggaaaggacttgtgcctagtagcgctctacttattggtggagaacctgggataggcaaatctacactattacttcaacttgctggagctacagcaacattagggaaaatcgttctttatgttagtggtgaagaatcactaccacaaataaaagctcgtgctgaaagattaactgtccttcatgataatcttttatctatggcaacatctcaagttgaagatatccttcctctacttaatacatctgaagctccagacttacttcttatagattccgtacaaacacttacttcaagtaatgcagaaggattacctggcaatgttagccaagtaagagcagtagcaactgaacttgttgaagcatgtaaacaaggaaaaacaacagttatctttataggtcatgtaactaaagacggtaccctagcaggtccacgtctactagaacaccttgttgatacagttatctctcttgaaggagatcgaagacatatatttcgactattacgagttataaaaaatcgatttggacctaaccaagaacttttaatttttcaaatggctcaacatggtcttgaacctgttgctgacccttccacttattttttaggtgcaagagatcctagtttaagtggaacagctgttgttatgactattgatagccaaagaccattagccgtagaggtacaagcacttgttacaaaaagctatcttgctatcccacgccgaacaggcttaggctttgatgttaatcgactacatttaattcttgctgttttagaaaaacgtcttcgattaaattttagtaatgttgatatttatgtaaaaataggaggtggaataaaactccaagaaccaggaatagacttagcccttgttgctgctattctctcttccttctatgatgttcctttacctgaacgttctgtattctggggagaagtagatctaaatggtcaaatacgacctgttggctctcattctatccggctttcacaagcttctaaactaggatataatcctattttttaccctaagcatgaacaaagtggattagcaactgtcatggaacttcaacaatcattattaaaaaaaaaaaattaa

SEQ ID NO: 9517 - DNA, 330 bp, Lawsonia intracellularis
atgactcaatcatcttataatccgatagaacaagaaggtagccctgaattactacttcaggaaaagataaggcgtcctaagatgtaccaagttttgctacataacgataattataccacaatggaatttgttgtttctattctaatgaaaatatttcgcaaaacaatggaacaagctacttctattatgctctcagttcataggaaaggtattggtgttgctggtgtttatacacgtgaactagctgaaactaaagttaatacaacacatatgttagcaagagaggcaggatttcccctccgttgcacgcttcaggaggtagacgaatga

SEQ ID NO: 9518 - DNA, 2247 bp, Lawsonia intracellularis
atgattgggaaagaaatgcaagatgttatcaatattgctattactgaggttaataaacgccatcatgaatatctaaccctagaacatcttttatatggcattgtatccgaaacaacaggccaaaaaattattgaaagttgcggtggcaatactgaatctattcgtgcacaacttgaacaatttttttctacttacttagatacacttgatgaagcaataccagaaagcgaaattccacaaacattagccatacaacgtgttcttgaaaataccatagctcatatccactcttcaggacgtacacaaatagaagttggagatgtacttgctgccttattagaggaagaagaatcatgggctgcttactgtctaaaaaaacaaggagtcacccgtattgctgtgttagaatttatttcttatggacttccacacagtgaacttggcaatgatgactttgtcaaaaaagcagaagaaagctctgaagaaaaaaatccattaacaaaatatacaattgaactcacacaaaaagctcgaaatggtgaaattgatcctcttgtaggtcgagatatggaaatctctcgtacaattgaagtccttgcccgtcggaaaaaaaataatcctctatatgtgggagatcctggcacaggaaaaacagctattgcagaaggacttgcgttacgcattatctctggaaatgttcctgaagaatttacatcgtcacttatcttttctttagatatgggagcactgcttgctggagctcgttaccgtggagactttgaaggacgtattaaatctgttctttctgagctatcaaaacaaccaaaagctatattatttatagatgagatacataccattataggtgcaggctcgacaaatggaagtgctgtggatgctgctaacttactaaaaccaatattaacaagtggtaagttacgctgtattggctcaactacacatgaagagtttcgtaaccactttgtcaaagatcgagctcttgctcgaaggtttcaacgaattgatattcatgaaccatctcaagatgactgtattgctatacttaaaggattacaatcacgttatgaaaagcatcataaagtgaaatatacaccagcagcgttacatacagctgtaaaactatccgccagacatattacagatcggatgctaccagacaaagctattgatgtccttgatgaagcaggtgcagccgtacacttacgagcaggcaataaatcaaaagtattagttactagacaagatatagagaaagttatttctcgtatgacgggtattcctataaaaacagtctctggaaaagaaaaagatagattaaaaaatcttaaaaaagatttatcttcacatatttatggtcaaaatgaagctatcgataaagtaactaaagctatattccgctcaagagcaggactcaatagaggaaaccgtccttcaggatcctttttattttatggacctacaggtgtaggaaaaacagaattagctaaacaaattgcagaaaaacttaatattgcttttcttagatttgatatgagtgagtacatggaaaaacattctgttgctcgactcattggttctcctccaggttatgtaggttttgaacaagggggacttttaacagaggctgtgaaaaaaacaccttattgtgtagttttacttgatgaaatagaaaaggcacatccagatatttataatattttattacaagttatggattatggaacactaacagataatactggtcgtaaaacagacttccataatgttatattaatcatgacttcaaatgctggcgcaagggaaatgggaataacaaatatgggatttgtatcagatgatacaaatacaatatctcataaaggacgcaaagcagtagaaagtgtttttagtcctgaatttcgtaacagattagatgcaatagtaccctttaataacctttctcctgaattaatgaaccatattgttgaaaaaaatataaaagaacttacaaaaggtcttgcagaaaaacgtgtttctgtcatgttatcttctgaagcaaaaaaatggcttgcccaaaaaggttatgacaaaaaattgggagcaaggccattacaacggctattaagggaatctcttgaagatcaacttgcagaagaaattctttttggaaaattagtcaaaggtggacgtgttactgtaaaaccaccacttgaagaagacagtaagcttgttgttatgcttgaataa

SEQ ID NO: 9519 - DNA, 687 bp, Lawsonia intracellularis
atgctctctgctctttccaatgatcctatgtattttcctcctcttgaaacagcctttgacaatggactactggcttatggaggtgatctttcccctcaacggttattatctgcatatacaaaaggaattttcccctggtatgacaataactcacctattctctggtggtctcctgatcctcgatgtattttactacctgaaaactttcgaattcctaagactatacagcgtgaacttaaaaaatgtactttttctgttacaataaataacgccttcacagaagtcattacagcttgtgcaactctacctagaacaaaacaaaaaggcacatggattacacaagatatgaagatggcatatatccaactacataaactaggattttctcattctatagaagtttgggataattctactcttgtaggaggattatatggtgtagcattagggaaagcattttttggtgaatcaatgtttcacattgctccacatgcctcaaaacttgcgttagtatggcttgcacaatacctgtggtcatataattttgattttatcgactgtcaaatgcctactacacatataatgagatatggcgcaacactcatttctcgtaatgaatttcttactcgactgacaattgctgttactactggaacaagtcaggcttccacaaaagaagccctataa

SEQ ID NO: 9520 - DNA, 1299 bp, Lawsonia intracellularis
atgtttccaaatgttcaacataaacttggcgttgtttttttccctgcttttgattgggctattagtccaactcatcctgagcgtgaagagcgattgttgtatacacaagatcaactctatgaagagggaatatttgatattcctggtatacaagaatatcaacctagtctctcaacatattgtgatatagaaagtgttcatttttgtttgccaaatgtaggagcagtttgttcaaattctcacttagcttcagctggaggagctattcatgctagtaaattggtactgacaggagaggttgaacgagcttttgctattatacgtcctccaggtcatcatgctatgagggtaacatatggtaatagaggtttctgtaatattaatattgaagcagtaatggttgaacatatacggcagacatataagaaacaaaaaattgctattgtagacactgattgccaccatggagatgggacacaagatatttattggaatgatcctaatgtcctttttatttcattacatcaagatggtcgtacaacttatccagggacagggtttttagaagaggtaggaggacctgcagcactgggaaaaaccgtgaacatccctcttcctccaggaacagggaatgaggggtatttatatgctatggagcatgttgtgttacctattttagatgaatttcagcctgatattattattaactcagctggtcaggataaccactatacagatcctttgacaaatatgtatcttacagctgaagggtatgcatgtatgacccaaatgttgaaaccagatattgctgtattagaaggtggttattccatacagggtgctttgccttatgtgaatttaggtatttgtcttgcattggcagggttacctttttcttatttacaagaacctgatcttgataaagtagatatttgtcaacctaaaagagttacagaaacaataaaaaaggtgtgtgaacaagctctgagtcagtatttttatccaccagtaaaaccttatgatggccaacaagatggttgttggtgggttcgaaataggactatatattatgacacagatatgatacatgatactcaatatgaacgtatacgtttatgtaaaacttgtaatggtttgacagcaatagaaacaaaatctacctgtctagatgaagctctttgtcttttgtttcctagaggagcatgctcaagttgttgtagtgaggctgagtctttgaagaggcagtgggttcaaacaagaaactctaacatactagagattaatccaaataaaagctaa

SEQ ID NO: 9521 - DNA, 972 bp, Lawsonia intracellularis
atgtatatagttacaggtggttctggttttataggtagtgctatgatttggcttcttaatgaagttggtatagatgatattcttgttgttgataatctagcaataagtgataagtggcataatcttgttaaccgtcgatttaaagactacatacatagagatgagttccgtcatttgattcagaaaggtaaagctccagaagatattagagcaatatttcatatgggtgcctgctcttcaacaacagaacgaaatgctgattttttgatggaaaataattttcattatactcaaatggtttgtcgttatgcactggagaatggagcaaggtttattaatgctagtagtgctgctacatatggggatggttctaaaggtttttctgataatttgcttactactttggcgcttaaaccacttaacatgtatggctattcaaaacagctatttgatctttgggcatatcgtgagggcttacttaatcagattgtaaaccttaaattttttaacgtttatggtccaaatgaatatcataagggtgatatgagaagtgttgtttgtaagtcttatgagcaaataacaacctcttcttttttcagcctgtttaagtcagatcatccagattatgccgatggtggacaaatgagagattttgtttatgttaaagattgcgtaaaggtaatgtattggttgtttgaacatcatgaagtaaatggtatttttaatgttggttctgggactgcacgaacatggaatgatcttctcaatgctgtatttatcgctatgaataaaaagcctgatattcgttatgtcgatatgcctgatcaactgaaagggaaataccaatattttactcaggcagatatgaattggctccagaaagttgggtgtgatgtgtccttccatagtcttgaagaagggattatggattatgtccaacattatttaatggctgaagatcgttatttataa

SEQ ID NO: 9522 - DNA, 1095 bp, Lawsonia intracellularis
atgcgttttgttgatgaagtaactattagcgtgagcgcaggaaaaggtggaaatggatgtgtttcatttagacgcgaaaagtttatacctaaaggtggacctaatggaggggatggaggagatggaggtaatataatttttaaagctgattcacgtttgttaaccctttatgattttcgtgtgcaacgtcactatagagctcaaaatggagaaggtggtaaagggagccagcgtcatggtaaaaaaggggaagatttgattcttcatttacctgtaggtacaattatttttgagcaactattagataaagaatattttttagttgatcttgatagaccaggagttgaattcttaattgcaagaggtggtcgaggaggaaaaggaaatgagcattttaaatcatcaacaatgcgaacacctcgatttgcacaaaagggcgaaatgggggaggagaagtatctcaggttagagttgaaaattttagctgatgcaggaattatagggctacctaatgcaggtaaatctacattaatatcaaaactttctgctgcacaacctaaaatagctgcttatccttttacaacacttaaccctaatcttggagtaatgatcgataatcttgatccagataaaaggcttgtccttgctgatatcccaggattaattgagggtgcatgtaagggacaaggccttggtcatcaatttcttaaacatattgagagaacacgttttttaattcatgttttaagtagtgaagatattgatgaggataacccatggttaggattcgacatcgtaaatgaagagttaaaagaatttgatcatactttaatgcaacgtacccaattattggttgttaataaaattgatgtattacaacctgaaaaattatcacacataaaacaagttgcagaatctagtggaaagataatatattttatttcagcagaaacaggtgaaggtatagagctccttgtggatgcaatatggaagttacaatcttatagattaaacgcaccttttattcacttaaagccaattgaacataaaagtgatgaagaatttgctattgaggtagcttatactaaagagtaa

SEQ ID NO: 9523 - DNA, 309 bp, Lawsonia intracellularis
atgtacgcaattattgaagctggtggaaaacaattctgtgttgaagagggttctaaaatttttgtttctaaaatagacgctgaagttggaacagaaattttttttgataaaatttttatgattggtggttcatctcctcaaattggaacaccatatattaataatgctaaagttatagctaaagttcttgagcatggtcgtgataaaaaaattcttgtttttaaaaagtggagaagaaatgactcacgtaaactccaaggtcatcgtcaagactatacagctctaaaagtaacaggtattcagctttaa

SEQ ID NO: 9524 - DNA, 306 bp, Lawsonia intracellularis
atgaacctgaaacctttgaatgaccgtgttttagtaaaacgtcttgaatctgaagaaaaaacagctggtggactctatatccctgatactgctaaagaaaaaccatctcgtggtgaagttgttgctgttggacctggtaaacatacagatgatggtaaattaatacctatggctgtaaaagcaggagatacagttctttttaataagtatgcaggaacagaagtaaagcttgatggtgtagagcatctagttatgcgtgaagatgacatcctagctgttattactggagaaactggccgcaagtga

SEQ ID NO: 9525 - DNA, 1647 bp, Lawsonia intracellularis
atggcttctaaagaaatcctttttgatgctaaagcccgtgaaaaactttcacgaggtgtagataaacttgcaaatgctgttaaagtaacacttggacctaaaggccgtaatgtcgttattgaaaagtcttttggttccccagttattacaaaagatggtgtatctgttgcaaaagaaattgaacttgaagataagtttgaaaatatgggcgctcaaatggttaaagaagtagcttccaaaactagcgatattgctggtgatggaactacaacagcaacagtccttgcacaagctatttatcgtgaaggtgtaaaacttgtagcagctggtcgtaatcctatggccattaaacgtggcatagataaagctgttgttgctgttactaaagaactaagcgacattacaaagcctactcgtgaccaaaaagaaatagctcaagttggaaccatttctgcaaactctgatacaacaataggtaatatcatagctgaagctatggctaaagttggaaaagaaggtgttatcacagttgaggaagctaaaggtcttgaaactacattagatgtggttgaaggaatgaagtttgaccgtggctacctctctccatactttgtaactaatcctgagaaaatggtttgtgaacttgataacccttatatcctttgtaatgagaaaaagattactagcatgaaagacatgctaccaatcttagaacaagttgctaaagtaaaccgtccactccttattattgctgaagacgtagaaggtgaagcacttgcaacacttgtagtcaataagctccgtggagcactccaagttgtagccgtaaaagctcctggttttggtgaacgccgtaaagctatgcttgaagatattgctatccttactggaggagaagcaatatttgaagatcgtggtataaagcttgaaaatgtaagcttgtcttctttaggaacagctaaacgtgtagttattgacaaagaaaatactactatcgttgatggtgctggaaaatcagaagatattaaagctcgagttaaacaaattcgtgcacaaattgaagaaacaagctcagattatgatcgtgaaaaacttcaagaacgtcttgcaaaacttgttggtggagtagctgttatccatgttggagctgctactgaaactgaaatgaaagagaagaaggatcgtgtagaagatgctctaaatgcaacaagagctgcggttgaagaaggtattgtccctggtggtggtactgcttttgtccgctccattaaagtccttgatgatattaaacctgctgatgatgatgaacttgctggacttaatatcatccgtcgttctcttgaagagcctttacgtcaaattgctgcaaatgctggctatgaaggttctattgttgtagaaaaagttcgtgaagcaaaagatggttttggatttaatgctgcatcaggagaatatgaagaccttattaaagctggtgtcattgatcctaaaaaagttacacgtattgcattacaaaatgcagcatcagtagcctccttacttctaactacagaatgcgctattgctgaaaaaccagaacctaaaaaagatatgcctatgcctggcggtggtatgggtggtatgggtggtatggacggtatgtactag

SEQ ID NO: 9526 - DNA, 882 bp, Lawsonia intracellularis
atgatcaaatatatagactggatacaaaaaacaacaatgatgtttaaaaaggcagggatagattcaccaaaactctctgcagaacttatattaagtcatgttttaaatattacacgattacaaataataatgactccttttgaacctattccaactaatagctactcaacgcttaatgatatcatgttaagaagactccatggagaaccaattgcatatctcacagggaaaaaagaatttttttcacgagaatttaaagtcactcaagccacacttatccctcgcccagagacagagttacttatagaatttgtattaaaccatattaacccaacacaacaaatatactttgcagacttaggtacaggtagtgggtgtattgcaattacactagctgctgaaagaaaaaattggttaggtattgctactgatatctctagtgaagcattaaaaatagctaaacttaatagtttaaaaaataacactcatagtcaactacagtttcttcaatcagattttacacaaccactctgtctaccctcttcattagacttatatatcagtaatcctccatatataagtgaaaatgaactgacctctcttccgcatgaagtaatatcttttgaacctaaaatagctcttacaccacataaatgtattcatcttgatgaaataaataccgttttacactgctataaaaaaattattacccaagcagagatatcccttaagcctggaggaataataattttagaacatggagcaacacaagcagaagctatcttattgttgttaaaaaacaacatatggacaaatgtaataagtcatactgatcttacaaataaaaatcgttttattacagcatataagtataaaatataa

SEQ ID NO: 9527 - DNA, 915 bp, Lawsonia intracellularis
atgcaacaaacaaccattcaacgttcaattacattttcaggtataggtgtacatagtggccaatgtcttaatgtcacgttacaccctgcatctgaaaatactggtattgtttttgaagtgataactggagatactcgccatactcttatcccctctccttctgctgtgatagctactaaattagcaaccactattggtaataaaaatataacaatatcaacagttgaacatcttcttgcttccattagaggccttgaaattgataacatccgcatttgtgttgaaggtgcagaaatacctattatggatggttctgctaagatattcactaatgaattactccaagcagggattaaatatcttccagcaacaaaaaaaattttacaagtgattaaacccgtcgaattcattaagggagagaaacgtattcgtgcattaccgtataatggattcaaactagattatactattaattacatacatccaattattggccaccaacgacttgtattagatgttacaccaacgacctttctttcaatagctaatgccagaacttatggctttcttaaagatgttgaacaaatgctaaaaaatggcttagctcaaggtggctctcttgagaatgctattgtacttgattctacaaaagttattaatcctgaaggattacgttatcctgatgaatttgttcgccataaagcccttgatttcattggtgatatggctatgatgcatctacctcttcaaggatattttgaaatatattgctcaggtcatcaacataacaaccaattccttcataaactacaggatgaaaatgcattagcccttgtaacacttgaaggagaaaaaacacaaaatctctaccaaaatattacaccactatataatgatgtattagctctactttaa

SEQ ID NO: 9528 - DNA, 1947 bp, Lawsonia intracellularis
atgaatgcatcacgctctcctattatacttcttccagaggcactacaaaaccaaattgctgcaggtgaagttgtagaacgtcctgctagtattattaaagaattagtagaaaacagccttgatgcaaaagcaacagatattgaagtaataatggaaaatggtggacatacatttatccaagtccgtgacaatggttttggtattcccccagcagaattaagattagcccttactcgccatgctactaacaaaataaaagatttaggagacatatggaaaatccattcgtttggatttcgtggtgaagcccttcctagtattgcatctgtatcttcttttaaaatagaatctgcctatacaaaagaatctaacaatactgaagctgcatttctgcaaatcaagcatgggaaaatagaaaaagagggtcctagctctctttacaaagggacgattattactgttcaagatctatttgctactgtccctgctcgccttaaatttcttaaaagtcctgtcacagagcaaaaacgtgctcaagaaattttttcccgtttagcattaactactaatacaactatgacccttttttcaggagcaagagagcttttaaaatttcctgcagcacattctttacatcaacgccttaaaatcatttggccagaagaattgacatctaaccttatacctgttgataaaacaacacatgacattagaatacatgggctaacttcaccaccaactcaaacacaactccgttcagacagggttcttctctatgtaaatggtcggacactcaacgataaacttatattgcgtgctatttttgaagcttataaaggtcggcttatctctaaagaatatcctcaagcagtacttttcattgaaatttctcctgaattaatagatgtaaacgttcatcctgcaaaaactgaagttcgatttagagatgaaaaaagtatattctctgctattagcactgcactaaaagaagctattaacaaaactataccaagcttttctttacagcaaactgatacagacatacatccaaaaggattttggggtgaagcagatcaagaatatatctttcctataaagaaaaattctaacatccaccctacacaaactgaagtttgtactacacaatcaacaacaactgactctcatggtttctcattacaacatatgttacaaaatacgtttgtccttgagccagattgtcaacaatctttatctgctaaagaatctacttataccttagcatcatcttattcatctcatccttcagataactcttctttactacctaaccttacatcaaacagtacagattccaacaaagaaaatgagatctcaattaaatatatagataaaaaaatgtgtattgggccctatcactacttaggacaaataggggatacctatcttattcttgaagatataaggaaaaaaaatgaacaagctgagcttattatccttgatcagcatgctgtccatgaacgtattttagcagaaaaatttcgtaatggaagtttaattaaccagtctcaacagcttgttttacctattcaattaaaactgcactactcagaacaagaagagctccaagaaatcgctaactccctaacttcccttggatttatattctctcttaaaggagatattcttcatgttgagtctatccctccactacttgatcgtagtcaagcaacaataattcttcgaaaagccctctcaaggcaacaagaaaatatagaaaagctttggatctcaatggcatgtaaagctgctattaaagctggcttacctctacctccagatgaagctgcattacttattactcaatggatttctatagaaaaacgtgaaaactgccctcatggacgaccctgtgtacttgtttggacaatccaagatttagataaactatttaagcgtagaagctaa

SEQ ID NO: 9529 - DNA, 1545 bp, Lawsonia intracellularis
atgcaatctagtttgaagatacaattttttctttttttaatagggataaatgtacttagtagaactattattgctatggctgctccaactaaccctgtggctatcactttatatcctactggtgggtggatccaggttgttgaagagttacctgttcaagatgataaagtgtattttgaacttcctgcaggagcacaacttggctctttacttttaagtattgagggacaatttataggaagtattgaaacaacccccattgctagtattgatagtcctgtagttgctaaaattcgagaacgttatacaaaggcagtacaagaagttgctttgattcgtgggaaacttgcagcagtaaaagcaaaaattgctctttggagtaatcctgaatgtcctagtcgttctattgaagaaattaaaaaatttgattcaatgatgggatcaaaaattgaggaactttatgttgcagagtcaactatagagccagctttaaagaaagctttgtatgaattagagttattagaaaaagccattgtggatgctggtgggaaaaatacatatgctacagctattacagcagttattagaccagataaaacaaacaaaaaacctaataagcaagtgatagttcaatatggatatatgctttctgattgtgggtggaatcctatttatcgttttgatgcattaccagagaaaggtattgtccaagttgttcaagaagcagaaattcgccaggcttctgggcaagactggagaaatgcagatataactttggcgtcagtaaatattgggagtgcgttagtgcctcctaatttacctgactggaagatactacctgcccctatacaaacatatcgtcaaggacaagaagtgtctcctatagcagataatgcaatgtatttggcaaaatcatctgtgcctatagttcacgcccaagaagagcctacatttacaacttggtctcttggtaaagttacagttcctgcaggaatggtgatgcgttttatgttatataaaaatgattgggatgcaaaattttttagattgttaagaccatcagtacaacctcattcatatcttgtcgcaaatattgatattcctagctctgtagatttaattcctggctctgctcaatttatggttgatggaaaagtggtggggaatggttactttactttacgtagtgaagaaaatcatatttattttggtgtcgatcctagagtcacagcccaaatgatcttggataaaagtcagagtggacgtgatggatttttagataaaaagcaaagtcatagttggagctggaatattaaagtttgtaatgatcatacagtacctgttaaagtggttgttgaagaaccagaacctcagtcaggagatattggtattattatcactacacagtctaatcctaagccaataatagaagatcatatgtatttatggaaaatgactcttcctgcagaaggggaaatagatattcagcattcagtattgatgacagcaccaggagatatgagaattattgaaggacgtcgataa

SEQ ID NO: 9530 - DNA, 2496 bp, Lawsonia intracellularis
atgttcagtttttttattcgtaagatttttggctctaaaaatgatcgttatttaaaaagtctttcacctatattagatcagattaatgcacttgaatccacaatgaaagctttatctgataaagagatcccagtacaactagctacatttaagcaacaattacaagaaggtaagcgtactattgatgagttattaccagaagtttttgctcttgtaagagaaacaagctttagggtgttaggaatgagacattttgatgtacaactcattggtggtatttcattacatagaggtaagatagcagaaatgaaaacaggggaagggaaaactttaatggcaacacttcctgttgttttaaatgctcttgaaggtaaaggggtacatgttgtcacagtaaatgactatcttgcacagagagatgctgaatggatgggtgcattatatagtgctctaggtttaacaacaggtgtgttgacatcagggctttctgatgatgctcgtaaggaagcatatgctgctgatattacttatggtactaataatgaatttggatttgattttttacgtgataatatgaagttttatcctaatcagcttgtacaacgtggacacttttttgctattatagatgaagtagattctatccttatagatgaagctcgtacaccgcttataatctctggtgggtcagaacaatctacaactatgtatactcagatagataaaattatacgtaatcttaagccacaacaggatttttctattgatgaaaaaggaaaagtagtcattcttagcgatgaaggtgctgtgcaagtagaaaaagcccttggtatagataatatgtatgatcctagtaacatagctatacagcatcatgtgctacaggctttgaaagcacattatatttttcgtcgtgacgttgactatattgttaaagacgatcaagttgtcattgttgatgagtttacaggacggcttatgccaggtcgacgttttagtgatgggcttcaccaagcacttgaagcaaaagagatggttactgttgctgctgaaaaccagactttggctagtatcactttccaaaactactttcgtatgtacaataagcttgcagggatgactggtacagcagatacagaggctgtagagtttgcacaaatttatggattagaagtagttgttattccttctaataaacctatgattcgcaaagatcattctgatgtaatttatcgtacacgtaaggaaaaatttgatgctattgtaaaagctatcattgagcttcataaaaaagggcaacctgtattagtagggactatatctatagaaacctctgagcttatttcttctatgctccgtaaaaaaaatatatctcataatgtccttaatgcaaagcatcatgcgcaagaggctgaaattattgctcaagctggacaagtaggtaaagtaactattgctacaaacatggctggccgtggaacagatatcgttcttggagatagtgttgttgagcttgggggattacatattttaggaacagaacgtcatgaaagtagaaggattgataatcagttacgtggtcgagcagggcgtcaaggtgatcctggatcatcacgtttttatctttctcttgaagatgatttaatgagactttttggttctgataagctttcagggctaatgcaaagattaggtatggaagaaggtgaacctattgaaaatattatggtatctcgggcgattgaaagtgcacaaaaacgtgttgaaggacatcactttgaaattcgtaaaagtctattagattatgataatgttatgaatcagcagcggacagtaatttatacattacgtcacaatatcatgaatgatccagagccaatggatattattttagagtatttagatgaattattaagtgatatttatatagagttagaagataatgataataatgaattaaataaaagcattcatacccagttatatgatattatgaatctttcacaggtaatgtctatagataacacccttccaacaaaggaacaagcaaagacattaattctttctatgtttgaaaagttgaagtctaaggctggagaggcatataatgatttgctacgttatgtgcttcttgaagaacttgatcgttgttggaaagatcatttaaggaatatggattttcttcgagaaggtataggactgcgtggttatggtcagagagatccaaaattagagtataaaaaagaaggctttgtacttttccaggaattgcttgctaatattagagaaggagtctttcgtacttttacaaggttacatttagaaaaaaaagaagataatttttttcaacatgagccaattaatgacttatggtatccagctagtcatgagaaagaaacaaagtttcaagtgaaaaaaactgatcgtgttggacggaatgatttatgtccttgtggaagtggtaaaaagtataaaaaatgttgtggagtacattag

SEQ ID NO: 9531 - DNA, 1017 bp, Lawsonia intracellularis
atgacaaatagtttacttttagattgtggtagtggtggtcgagcttcacagcgattaattacaggtctattccttaaatattttgataatgatatactaaggacccttaatgatgctgccatagtctctctttcgtcacctgtagctataagtacagatagttatactattacaccattatttttccctggaggcaatattggttctcttgctattcatgggacaattaacgatgtatctatgttgggtgctaaaccattatatataacatgtgcatttattttggaagaagggttggagcttgatattcttgagcgcatagtagcatctatggcagaagctgctcatacagcgtcaattaaagttattacaggtgatacaaaagttgttcctagaggatgttgtgataaaatttttatcaatacaactggtattggagaagttttggttgatcctgctccatcaggcagtcgagcagagccaggagatgtaattattgtaagtggttctattggtgatcatggactaactgtatttggccaacgagaagggatagactttttaagtcaagttgaaagtgatagtgcaccattaaatgtgatggttgagcaacttattcaagaagttagagacattcacgtattacgagatccaacacgtggaggtcttgctactacacttaatgaaattgcttcacagtctagcgttgtttgttatattgaagagtcactgatgcctattcatgacgttgtaagatctggatgtgatattttagggcttgaccctttatatcttgcaaatgaagggaagttactttgtattttaccatcagaaaaggaggagttagcactagatgttatgagatcattcccacagggtagtgaagcaagaaagataggttttgtctcagatgctgggaaaacaacaaggcctggtcaagtaattttgcacactgtgattggtggatatcgattgttaaatatgttggaaggagatcagcttccacgtatttgttaa

SEQ ID NO: 9532 - DNA, 1398 bp, Lawsonia intracellularis
atgataaatcctagaaaaacatactcattgaagtcagttattatagcagtagcaacagctcagtttataatgccttatatgttagctggtgttggaccacttttacctgttattggtatgcattttaatgcaactgctgtagagttaagtcttatcaatgctgtttatgctttatctttaactatctttcacttaattgctggccgtattagtgatattttaggactccgtcgggtttttcttataggccttggactttttacttgtacttcagggattcttccattttcccctaacattacatttttttttatattaaggtttattcaagctattggtgctgcgcttatgaacactagtggactatctatattaactaattgttctccaaaagatcgactaggacaaacactaggtattgcttctataggaatttacctaggactatcccttagtccttgtcttgcaggcattatggctaaattctttggttggtcatatttattttacttaatgattcctattggtcttattgcttggttgcttatgaaatacacagtaaaggaagaatggtatattgatgcagagtacccttttgattggactggttctatcttatacgcaattagtattagtacattatctataggaatgatatggatattaaatggaatatggccaatagtttttttgagtataggaattatcttttttggtagttttttaaaggttgagctaactgaagatcatcctatccttgacatcaaatttcttattcataatcatgcttttttatatagtatttttgcattactaataaactatagttctatatttggtttagctttttactttagtttatatttacagttaggctatggccttagtgtattaacgacaggtttaatcctttcgttgcaaccatttgtacaagttattatttctccgattgcaggtcgtcttgcagatgcttttggagctattaagattgctattgttggtatgattatgtgtggggttggactatttttagctataattcttgaaattcactctaatatatttgaaattgcatatatacaaatgatcttggggttaggtgctggtctttttgcctctcccaatatgacagctattatgagtgcagtagatagtaaacatatgagtcaagctgctggtcttattggaacaatgagaacgtttggattactgcttagtatgcttattatttctataacaatgaatatttactttggaggagaaatacttacggcaaaaagtatggataaatttacagcagcaatggatatgaatttttggattttcagtctattaaatattgtggctattattttctctattatgactttaaaagtaaaaagaaaaatcagtatctaa

SEQ ID NO: 9533 - DNA, 318 bp, Lawsonia intracellularis
atggatatcaaagatgtaaataataatccatatggaatggttacgagtcagggtgacttgataactaaatcaaataaagtagctagagggaaaacagatgctacgtcaggggaaccttatcctcaagaagataaagtaattctttcccctaaaggcaaactatatgtagaagtgtatagagaagctatgcactctatagatataagagaagaaaaggtagcttcaattagggctgctatagagtcaggtaattataagataaacagtaaggatattgcccaaaacatgttaggtttagagtcagaaatttttggttaa

SEQ ID NO: 9534 - DNA, 411 bp, Lawsonia intracellularis
atgaaaataatttcttttcagacacgtaatatgttaaaaaagtatgaacaacaactagtaacagcacgaaggttagaacgttatcgtcaagcaattagcttaatagaagagccgcttagtttatctaagataataaaaaggaaaatattagttagactagtagctaaagagttttttaaaaattttcttatcactggttataattcatctgtggtacaagatgtgcaaaaagaattaatagagaagtttaataataaaatttgttttcaatatcccccagagagtcctgaagttgttatattggtgaaagttaataatgaatgggaaaaagtaggctcaaaattacaaactgagatattatgtcttgcttggacaatgatcttggataaagtaaatactactatgttgtag

SEQ ID NO: 9535 - DNA, 1266 bp, Lawsonia intracellularis
atgactcgtaaggatagaacagaaggtatatatagtcgacgagaggtacttgatgaaagtgaacgtcgtcaatattatcttattcaactaaaagaattactttcatacgcctatcgctattctgaagacgtcaaaaaacgctttgatcgagcccaatttaatgttgaaaaatttaaaacactttctgatttaaaacatatccctatccttaaaaaaaaggaacttatttttcttcaatccattggccctaggttaggaggattacttacaaaagatattggtgatttaaaacgtatttttctttctccaggtccaatttttgatccagaagatcgtactgaagactactgggggtatacagaagctttctactctgttggatttcgacctggagatgtagtacaagtaacttttaattatcacttatccccagctggacttatgtttgaagaacctctccgtatattagggtgtgcttctatacctgcaggaccctcagacgcaggaacacaactggatatcatgcaaaaattacgagtatctggatatgttggtactgcaagttaccttatgcatttaacccaaaaagcagaagaaaaaggtattaacctccgtaaagatctttttcaagaagtagcctttgttactggagaacgtctgtcagaaaaaatgcgttcacaacttgagaaaaaatttgatattatactacgtcaaggatatggcactgctgatgtaggatgtattggatatgaatgcttccataaaactggattacatatttctaatcgttgttatatagaaatttgccatcctgacacaggaattacccttaaagatggtgaggttggtgaaattgtagttacagcttttaataaaacatacccacttattcgacttgcaactggtgatctttcctatattgatcgctctccctgtatttgtggacgaagtagtccacggcttggtagtattgttggacgggtagatacaacagctcgaattaaaggaatgtttgtatatcctcatcaagtagagcaagtcatggctcgatttgaagatattaaacgttggcagattgaagttattaatcctgatggaatcgatgaaatgattctttatattgaagcaaataattttcatcaggaagaagaacttcttcatctctttagagaacgcatcaaattacgcccagaactaagaatactagttcctgggacattacctccacatattaaaccaattgaagataaacgagagtgggattaa

SEQ ID NO: 9536 - DNA, 807 bp, Lawsonia intracellularis
atgataatagaacaattttttaatactcctataggaatggctctccttgcagggatagtgatttggggatttactacagttggtgctgcagttgtctttatatctaaagagttttctagacgtactcttgacttaatgcttggctttgctggaggcattatgattgctgcctcttattggtcacttttagaacctgcactagaaatgtctgagtatcttgggaaatggtcattagtgcctgttggttcaggagtaattttaggtgctgctttccttcgattacttgattatattctcccacacattcatattgtagaaggtgttctagatggcagaaaaagtaagttaccacgtagtacattgcttgttcttgctattacattacataatattcctgaagggttagctgtaggtgttgtttttggtgctgcagggttaggaacaccagaagctacgttatctagtgcgatttctttaatgttaggtattggattacaaaatattcctgaaggtcttgcagtctctggaccattattaagagaaggctattcacgtaaaaaagcttttctttttggtttattttccggtattgttgaacctattgctgttattattggtgcgcttgctgtcactactgtaacaactttgctaccatttgcattggcttttgcagcaggcgctatgatttttgttgtagtagaagaagttgttccagagtcttatgcttctggtaatggagattcttccagtatggcaattatcttaggatttgtggtaatgatgtgttttgatgttttattagggtag

SEQ ID NO: 9537 - DNA, 840 bp, Lawsonia intracellularis
atgccagaacttccagaagttgaaactattgttcgaacattggaaccaataattaatggcagaatgtgtctgaactatactgtatataaccaagattctgtacaaggagatatatctctggatgtacttattggggctatatttggaaaaccttttaggagaggaaagctccttcttattcctttagttattaaagatagtcatgtttatacgttatgtattcatttaaagatgacaggacgtattcttgtgtatcctcaagatagatgtccaaccacacatacacgagttagtttttcccttgatgatggtaatactattttttttgaagatataagaaaatttggatatgtccgtatcttatcgacaactgaagaaccagtatggccattttggaatacgttaggtccagaaccgttagagatagatgtttcaacgtttatagaacgttttcggggtaggagaggtaatattaaatcattattactgaatcaaagagtaattgctggatgtggaaatatttatgcagatgaaagtctttttcgtgcacaaatttcacctatggctactgtttcacagttatctatggagtcaatagctacactttatcatgcattgcaagaagttttattagaagctattgcaagttgtggtagttctattaaagattacagggcagctgatggcaatgttggtgcttttcaaaattcacttaatgtatatggacgttttgggaagccttgtgtagtttgtaaaaaagatttggaaggaacacgtatagggggaaggatgacagtctggtgctcttcttgtcagcctattaatggatcacatgaatga

SEQ ID NO: 9538 - DNA, 312 bp, Lawsonia intracellularis
atgcgcacattaaatattattgaaaatgctgaatttaatgatatcagcatgaaaaaacaaatggttaataaaggttcaagcttttatattttaaattttaatttgaaaaaagggcaagaattacctcttcatcatcgtgatatagatggtgaacttgctatatatattattgagggagaaggtgtttttcttaaagaagatggaacattccctgctaaaaaaggtgaaattttgattggtaatattagggaaccacatgggttaagagcacatacagatatgattgctattgcagctgttacccctcattag

SEQ ID NO: 9539 - DNA, 789 bp, Lawsonia intracellularis
atgattctgaaagttcctgaaaaatattccatttgtataatatgtgttattatctttctttctgttaacttgttttttccattaagtatacaagctgcagaagacatagctatacctaatttacaacttacactgtctggtggacagacagaacctgagaaagtttctttattattagaaatcttgtttatgttaacggtgctttcattagcaccagccattatgcttactgttacaagttttacaagaattattatagtatttcattttcttagacaagctatgggtattcagcagattccgcctacccaaattcttgcaagtttagctatttttatgactgttatcataatgtttcctgttgggaaacaaattaatgatacagcactacagccgtatttggatgaacgtttaggtttttcagaagcattaacacgtgcacaagctccattacggacgtttttatttaaacatacacgtgagaaagatctatctattttttactctattgctaggatggaacaacccaaaaataaagatgatgtcccaacaattttactttctgctgcttatgttattagtgaattaaaaacagggtttatcattgggtttcttatttatataccatttcttatagtagatatggttgtctcaagtgtattacttgctatgggtatgatgatgttacctcctatgatggtttctatgccttttaagctactgctttttgtaatgattgatggttggaacttacttattggctcattagtaaatagctttttattataa

SEQ ID NO: 9540 - DNA, 495 bp, Lawsonia intracellularis
atggcatggttatatcttatttcttcccttttttctactatagctgttgtccaagaaaataaaggaagtaatgtagacaagttttctaaggttgatacagtcgtagatcaggcgatccatacagcaaatgaagtagcaacacatgcagatgccactttttcatggggaaattattttcaagcaataggctttatgtgtttattacttgctggtctatggggagcagtttggctggttcgccgttatggaaaatttaattttattccttctcctacagctcttcctcgagatgcactaaggatggaagctcagttaccacttggagcaaaaaagggtcttgctgttataaaatttttagatagacgccttttgattggtattacagagaaaaatattattttattaaaagatactatactatataatgaacgtgatgctcagggttttgaacacttgttgaatggggccgagcaacatgattctgaaagttcctga

SEQ ID NO: 9541 - DNA, 495 bp, Lawsonia intracellularis
atggctacagaagaagagcttgcagcagaatgggctgcctctcttgaaaaaacagaggaagaatctgcaaaagttgaggaagaagagcttgctgatgcatgggcttctgctttggcagaaacagaacaacaagctgttcaggaagaaaaggaaaaaggttttggttcacatgcaatagaagcaacgtttaaagatatgacagacattgcaagaactcctagacctgagggaagtcgtcgagagttagattttattttagatatacccttagatgtttctgcagagcttgggcgtactcgtcttcttattaatgagcttcttcagcttggacaaggttctgttgttgagttaaataagctagcaggagagcctctagaagtttttgttaatgggaaacttgtagcacgaggtgaagctgttgttataaatgaaaagtttggcgtaaggcttacagatattattagtcctattgaacgtgtaaaacagttagcatag

SEQ ID NO: 9542 - DNA, 570 bp, Lawsonia intracellularis
atgccagtagatgaattacctgaaaataatgacacaggaggaaaaccaaaaaagcgctctggattaaaaatttttattattttacttgtgttattattactactaggtgtgattacaggtgcttcttggtggctatttttacgatctgatgcaacatttaagcatttattagagggagggggtaaccctggaacatcgcaggagcaatctgataatgctaataaaaaagaaggaggaaaaggatcatcacctacagatccaaaaccactcttaaaacctgtctctcttccttctgttacagtaaatcttgctgatccttcagggagtaaatatttgagaatagggatggatgttgaattaagttctgaagaagctataacaaatcttttaacacagagtgcacgagtaagagatgctattattttactattatcaagtaaaacttcagatgagcttgtttctgcagaaggaaaagttttattaaaaaatgaagttgcatctaggcttaatcaaatattaggagaaccaagagttgtacggatatactttacagactttgttattcagtaa

SEQ ID NO: 9543 - DNA, 702 bp, Lawsonia intracellularis
atgatatctgaagaatttttaaaagagcgattagaatttttacatgatcaaattcagcaagccgttgtaagctctggacgtgataaaaaatcagtaaaacttattgctatttcaaaattccatcctgtaaaaacaatagtgaatgtatttaattatggacaaaaagcttttggagaaaactatgttcaggaagctatatataaacaatcagaactttctggactgcctatagagtggcatttcacaggaagacttcaaacaaataaaataaagaatgttgttggtcaatttgagtatattcatactattgattctataaagttagcaaaactattatcttcccgtcttccagaggatggaccaagtcaaaaaattttacttcaagtaaatataggagatgaaccacagaaagcaggtataacagtagctgagttaccttttcttgcagaaactattttatcattacctaaacttaagttgtgtggtcttatgtgtcttcctcctattactcataaaggaaaagttgtttcttgttattttactaagctccgtgagctgcgtgatagattagaagtgttattagatattactttaccagaattatctatgggaatgtcaaatgattatatccaagctataaaagagggagcaacacttattcgaataggtacaagtatttttgggcatcgattaaacaattag

SEQ ID NO: 9544 - DNA, 975 bp, Lawsonia intracellularis
atgaatacacagtcatccagtaatattggagataaattaaaaacatatcgttgtggttgggtagcacttataggtccaccaaatgcagggaagtccaccttaacaaatacctttgtaggtcaaaaggttgctattgtaacctcaaagcctcaaacaactagaaataagataggtggaattcttacacaagatgatatgcaagttatttttttagatacacctggaatttgttccgaaaagaatcatgtacagggtcagcttggaaagcttatgttgcaatctgcatggcaaggtcttgctattgctgatagtatagtttgtgttttagatggtggattatatctaaaaaaacctgaccttatggatagggatattgagccttttgttgaagttttgagacaagaagtacgtcctatagttattgtagtaaataaaattgatgtatttcatgataagtctcgtatgttaccaatgttagctaaacttggagagtatttcccaacggcagaaatctttcctatttcagcacgttataaaaatggtacagataaattattagatacaatttgtttgaagttgcctgaaggtgaggcaatattccctgaggatcaactttctacagttccagtgcgtttcatggtagcagaaataatacgggaaaagttatttgagcagttatatcaagaagttccctatgctgtagctgttgaagtagaaaaatgggatgaagaatctagaaagaaccaagtggtgatatatgctgtcatttatgtagctagagcctcacataaagctatggtcattggccaagcaggcgaaaggattaaatctataggaacaatggcacgtaaagaaattaaggctttgttagggaagaaagtacatttagagttatgggtaaaggtccgtgaaagttggattaatgataatcagtttttgtatgaacttggttttggtacagaggaaataggatga

SEQ ID NO: 9545 - DNA, 861 bp, Lawsonia intracellularis
gtgacaagtcaaataaaaacttttattctacttgcagtcctttctggcttacttattgttattggtggggtgttaggtgggaggacaggccttattattgcctttggtttagctttacttatgaatatttggagttattggtattctgatagctttgttatacgtatgtataatgcagaacctttatcatttgatgaagcacctatgattcatactatgatagaagagcttgcacaaagtgcaggtatacctaagccacggattgtggttattcctgaagatgcaccaaatgcttttgctacaggtagagatccagaacatagtgttgtagctgttacggaagggattatacgtattttatctccagaagaattgaaaggcgttttagcacacgaagttgcacatattgcaaaccgagatatccttattcaaacagtagcaagtgttataggttcggcgatagtttctattgccaatttattacagtttacagctatttttggttttggacaacacaatgaagatggtgaaaactcaaatcctcttgtagtattagctatggcattacttgcaccaattgctgcaacaatcattcaatttgctatttctcgttcacgagagtacttagcagatgcaacaggtgcaaagcttacaggtaaacctcttgttcttgcaggggctttggaaaaactttttaattggaaccaacagattccaatgcaacaaggtaatccatcaacttcagaattatttattgttgcaccattgtttagtgggaatatggctactttatttagtacccaccccgatattcatgatagagtcatacgattacgagctatggtccaaaatcataattaa

SEQ ID NO: 9546 - DNA, 1695 bp, Lawsonia intracellularis
atgtatattggacttgatatgggtggaactcatactgatgcagttatcattaataataaaaccgttgttgctgaagcaaaagtacctacaaatcataaaaatttttcatcctcaatagaacaagctctaacacaacttttttttacatcaaaaatttcttcctcactagttacacgtataacctttggaagtactcttgctatcaatgctattgttcagaacaaacaatcaccagtaggacttctcttaggttctggcccagggattaatcctaattggtttactattggcgagcatagctttcttacatctgctaagcttgatcatagaggtatagagattaatcctttacaaagaggtccactacaaacatgtatcaatgaatggaaaaaaaatggtattaatacatttgcgtgtgtatctaaattttctattcgtaaccctaaacatgaaaatgacatggaattagttatacaaaaaatatttgaacactatacaacaccagttatctcaaaaggccatatgctatcaggcagtttaaatttcccacgtcgtattacaacagcatactggaatgctgctgtatggaatatccataataaatttataacttcgattgaacttgtacttaaaaaattttctattaatgctccaacttttttactgaaagcagatggtggatccattcctttagcactatcacgttctatccctatagaggctattcactctggcccttctgcaagcatcatgggactcatcgcattatatcctacttctgaaacatgtctccttttagatataggtggaacaacaacagatatttctatcatagtaaaaggtaaaccaatattatcaacatcagggctaattatccaaaaaaaacctacattgataagagcattagcatcttactctatacctcttggaggagattctttagtaaatattcaactaatggatggaatcccccatataaaagtaggaccactacgtgaaggacctgcaatggcttttgatggggaacaccccacatttcttgattgtcttaatatcttaggctatgcacaagtagggaatattactaaatcttatgatggtatttccttactttctaaaaaatataatataattccacaagatattgcacaatctgttgtatactcagcacaacaacaactacaagaaggaattagccatcttctcaatgaaataaacagtaagcctatacatacaattgaagcacttcttgaaaaccataatgtacaaccaacactatgcatagttacaggaggacctgctagtagtattaaaccattattaaatactatactaaatctacctataataacaccaactaagtatactttagtcacaaatgctattggagcagcactgacaaaaccaacagctgtattagaactttatgcaaatacagaaagacaagtttgtttagtaccatccctcaacacccaatatcctattcctaattcttactcactcaaagaagcttgtcatgacgcatctaacattctgaaaaaataccttcaagatattacaaatacaacaacttccccaataatagatattattgaagcacaagaattttcaacactagatatggttggtaaaaaaggaaaagatatcagagtagtctgccaagtaagacctgaacttgaattctctttgaattaa

SEQ ID NO: 9547 - DNA, 1230 bp, Lawsonia intracellularis
atgactaagttgtcaccgttaatgaaatatcaaacacttacttatggtttaagtatacagcagggattagttgttgatcctaagattgtattttttagtggtgggacagctcttagagaagtagcatcgtgtcttacacagtacacaaagaatgctacatatcttattacaccatttgattctggtgggagttctgcagtattacgtcaagctttttctatgcctgctgtgggggatttacgttcaagattgatatctctagcagatagaacttctccagaatataaagaaaagatttttttatttgaatacaggttaccaaaacaagcatcatcaaaggcattattagatgaaatgtgtcaactgagggatggtaaccatccaatgatgtatcatttttcaaatgtcactttacaatttgtaaaggaagaaattcgtttttttcttacacaattaccagaaggttttgatttatctggagcaagtataggtaacattcttttgacatcaaggtatttacaagaaaacagagatctttttgcagcagtgacatttttttctcactggttagggagtaaaggtgttgttagacctcttatagatgctaatatacatttatgtgtacagttagaaaacggtgaaatttatataggtcaacatcgttttacaggaaagaaagatagccaagtttcttcaccaatacgtaaaatatggttttcaaaatcactggacaaagtagaattagctgttcttaaggcagatacgtttatttgtgaatatattcattctgctgacttgatttgttttcctatgggaagttttttttcttctgtggttgcaaacttactgcctgtggggattgctgaagcaatatgtaatacctgttgtccaaaagtttttattcctaatcttaataatgatccagagttatttggtctttctttaaaagaacaaatacaatatctaggatatatcttaagaagcggtgaagcaaaacagaatatttatccagatataatacttgtagatagaaatacaaataactatccaggaggtattccttataaatggcttataagaaatggtatagaattgatttctacagagttgataactaaaacttatgctccttattttgacccacaaaaaatttgccaaactttaatacagattctgaatagaaacgtttataacataactcaatctactatgaataacagttattgttaa

SEQ ID NO: 9548 - DNA, 2649 bp, Lawsonia intracellularis
atgactgatgtaacactccctaaagcgtatgagcctaaagacatagaaacatattggcgtgaccattgggaacgtaacaatacctttactcctaacctgaatgaaaaaggggagccattttgtatagtcattcctcccccaaatgtgactggaattttacatataggtcatgcattaaacattacgcttcaagatattctttgtcgtcatgctcgacaacaaggtaaaaaagttctctggataccaggaactgatcatgcaggcatagcaacacaacatgttgtagaacgtatgcttgctaaagaaaatgtatctcgtgaacaacttggtagggaagcgtttatccaaaaagtttggcagtggcgtgaaaagtatggtacacatatccttgaacaacttcgtagaattggggcatctgttgattggacacgtgaaagatttaccatggatgacggcctctctcaagctgttcgaaaagtatttgttgagctttataaacaagggtatatctataaaggaaaatatattgttaactggtgtacgtattgtcatacagccctctctgatgatgaggtcgaacatcgtacagagaaagggaatctttactatgtccgttataaacttgaagatggttctgacgatctaataatagcaacaacacgtccagaaaccattgtagccgacacagggatctgtataaaccctaaagacaaacgatatactaatttcatcgggaaaaaagctgttgttcctattataaatagaattgttccaatcattaccgatagctatgtagatcaaaattttggaactggagttttaaaagttacaccttgccatgatgttaatgattggatgcttggtcatcgacataaccttgcttttatccaagccattaatgataaaggtatcatgactgatgaggcaggaccttatactggactctctaaagaagcatgtcgtaagcaaattgtagaagaccttcaaaaacacaatcaccttatcaagattgaagatattgagcatacagtaggatactgttatcgatctcatacagtaatagaaccgtatgtttctgaacagtggtttgttgctgcaaccaaaatggctcctcaggcacgtgctgctgttccagaacaaacaaaactttttcctaaaagctggttaaaaacttattacaactggctagataacatccgagattggtgtataagcagacaaatatggtgggggcaccgtatccctgcatggacttgtacttcttgtaataaactttttgtagaagaaactgaaccatcatcatgtccatgtggctctcataatcttatccaagaaacagatgtacttgatacatggttttcctctgcaatctggccatttagtactcttggttggccaaataaaactccagaactggctatgttttacccaacctcaatccttgtaactggctttgacatattatttttctgggttgccagaatgatgatgtttggccttcattttatgaaagatgtaccattccgtcatgtatatattcatgctcttatccgtgattcagaaggacgtaagatgtctaaatcattaggtaatagcatagatccaatccaaatgatagaaaaatatggaacagatgctttacgatttacccttactgcatttgcagctatgggaagggatattcgcctttcagaagaacgaattgaaggctatagacatttcatgaataagctctggaatgcttctcgctttgcattgatgaatcttcccacagattctgttcaattagtatcaatagaagagattacagctctccatcataaatggtttttacaccgccttgaagaagtaaaaatagatgtaaacgactctataaaaaattatcgctttaatgatatggcccaaacactttacaaattcttttggaatgaattctgtgattggtatctagaaatcataaaaatagatttcaaagaagaaggattacacaaaactcaagcacaatatgttctttggcttggattaaaagaactacttattctcctacatcctattattccctttatcacaagtgaaatttggaaggcgcttcctggtcatacacaagaacttgcttgtgaaccctttccttcaactcgttctcactgtctttctcctaacgaagctaaccagatgatctttttacaagaggtaataagtgctattcggactatcagagctgaactaaatatttcaccatcttataaactctctgtactattacgtcctatcgactctatccaattatctcttctacaaaaaaattctaaccttattataacacttgctaaattagaaactcttactattgattctaaccaaaaagctcctggtccttcagcaaaccatatcatccaacattgtgaaatcatagtttttctatctggtgctattgactttaatgcagaatacaaacgactaactaaagaattaaataaaattgatactgagcttcaaaaaataacagaaaggttaaaaaataaaaattttatacaaaatgctcctaaagaaattgttcaaaaagaacaggctagaaaagatgaacttttatcttctcatcaaaaaatatatgtattaatgaaccaatatcttaataatattgataaataa

SEQ ID NO: 9549 - DNA, 2556 bp, Lawsonia intracellularis
atggcatacctatctatttcaaaaaatcaatgtaagtcttttttaataactctagtaactatatttataatgacatcaataccacaactagctgaggctgttgaacactttgctaatggtgtccccacagtagtacaagatgttaatgtcccagctgactcatactttggtggtgctgactcagctgtaggtccaaacccaatagcttctactcaccttacaatttctacaactcaagggtttggacaaaatgcactagaatttgttgtgggtggtagccttgcaaatggtaatggaaatccagccaacataaatggagatatagtccttattgttgaaaatacaaatactcagaatagtattattggtggtagtatggcaaatgctgcccctgtaactattggtggctctatttttatgactcttagaaatgttactgcagtagatccaatttttggtggctctgtagatgtacgctttttcgcccaacagcaacctaatgaggatcaacttgtaggtggagatattaatataaatctagagaatgtaacaactccagagttttatggtctaggctacgcaaatggtgtaatacctgttaacgtcctcaatagaaattttttggtagctgttcagggaaatataactacaaatatttctaattctaacattgcaaccgttatgttaggttcacactatgatacaactatggctgtaggaggtaatggaacaataaatgttgataattcaacaattggttatctttcagctagcaatagtagcgactttgttaaccctgacttaacaaacactgttacttttaatattggtcccaacaacagaatagcaaatatttttgcaagcaataatggtgttatcccacattttattgtaaatatggatggatctggaacagaaatacaagagttaacacttggtaatgtaattcgaggtggccttgtacttacttcagagctaaatctatctcaaggaacaataaataatttaatcactggtaatgaatattacgatagatcaggattaagaactactgtaaatgttagaggaggtacaattggcgtattgacttcaggaggttctgactattcagaattaaacttcattcctggagaaatatccactatattagcaacaaattcaataggtaaccaagattttgcatctctttctcaagttacaatacaccaaggtgctgaaactctttggggaatgagagatgaagtatttgaacttcaaactaacaatctacagttaggtggtgaactatttattcctgctgatggaactggaggagtagccctaatcacaaatcatattattgcaaattcaggtgtgataactccggtaaatatgtctccagaaaggatgacccctatcattggatttttagaacctactggtgaggtagcacagttaacaatatatggaccacttacagttaaccttagccattctccagaaattcttgggaaaattattacacaacctatccctattgcagttactaatagtgatgtttttggtacttctaaactatttgtggaacataacacaaaaggactaatttggagtgatatcatttttaatcctcaagataaaacatggtatctaactaactttagaggttctgaagacttctacggactttcagcagcacgggaagcatctaattggttaagacaacaacatatctggagcctacaacgtcgctctaataaattattagatcatggtgtagatgggttatggatgaatgttcaaggtggttatgaaaagcttgatgcagcaattggtgatgctaagatgccttggattatggcaagcttaggatatgattttatgcataagttaagtgatttttataacttaaaagcactttatggattcggatttggatttgctacaggtaaaaataaatggaataccataaactcaactactaatgatatctacatggggctggttggtgcctatgttggccttatgcatgaagccacaggcctttatggtacagtatccggacagtttgcaactaaccgtacaaaaacaaaatgtacaggctttgatgaaacctataactggaaagaaaatgtaccaacagaagctattgaaattggttggaaatggagcattgatgagtttaaaataaacccacgtggacaagttatttttgaacaattatctaaacatcactttagtctctcacaagaaggtgatactgctatcttagataaagaattcttaactacaaccgttataggtatctctggagaatatgatttagatttaagaagtaaaataataaagcttcaagctagtgttgactggattaaaggcatctctggtgactttgcagctaaatccgaagttcttaatatgaagtttaaagataaaaatgatactagtacatttagaggaacactgggtgctagtgcacaacttctagaaaactttgaagttcaccttgatatttttggtgatcttggcaatgataaaggtattggtggacaggtaggagctacttatagattctaa

SEQ ID NO: 9550 - DNA, 2892 bp, Lawsonia intracellularis
gtgaatacacattatactcttattcgtgaagttaaaattcctgaagtttcaggtattgctaaatattggcgacataatggtaccaatgctgaaatcctttctatctctaacaatgatgagaataaatgttttggtgttacatttagaacacctcctcatgattcaacaggagtagctcatattcttgaacattctgtattatgtggttcaaaaaaatatcctataaaagaaccatttgtagaactacttaaaggttcattacaaacttttcttaacgcattcacattccctgataaaacttgttatcctattgcaagtgcaaatttgcaagacttttataacctcatagatgtatatttagatgctgtttttttccccctgattactaaatcaatttttcaacaagaaggatggcatatagagatagaagatacaaaaaaacctcttacatacaaaggtgttgtatttaacgagatgaaaggtgtatattcttcacctgatgctatacttatggaaaaatcacaacaatctcttttccccaatatgctctatagccttgactcagggggagatcccaaaattatacctcaacttacatatgaaaaatttatagagtttcatagctctcactatcatccatcaaatgcacggttctttttctggggagacgaccctgaagaagagcggcttatgcgattactacctattctgtcacaattcacagaaaaaaaaatagacagcactatccctctacaatcctacttacaaaaagaaaacgtattaaaagtcccttatgctactggcgaacaatctgagaaaggacatattacttttaattggcttttatgtcctacaacagaagctgatgaaattttactacttgagatacttgaacatatcctcctaggattaccaggttctccattacgtaaagtgcttattgaatctggtcttggagaagatgttacaggtgttggatttgaaaaagatcttcaacaaacctatttttctgttggattacgctccattaacccagaatcatctcataaaatagaaaaattgattctccaaacactagaagatctctctaacaatattcctacgcctattattgatgctgctattaatagcatagaatttagcttaagagaaaataattctgggaaattcccacgtggtttaactgctatgttgcgaagtcttaggacatggctctatgacgctgatcccttaattccattacggtgggaaaaaccattatcagatattaaacaacgtcatgcaaatggagaaaaaatttttgagaaagctatccgaaaatggtttatagaaaataaacataaatcaatagttactctaatcccagattcaaaacttgcagagcaacgtgaaaatgatgaacaaaaacagttaaaacaaattaaggatagtctatctgaacttgaagtaaaccaactcataaaagatactattactctccaagaaaaccaacaatgtccggatacacctgaagcacttgcaactatcccatcccttacattaaaagatttaccacctaaaaatgctgtcattccctgcatagttgagaatgacaaacaaattactattttaaaacatccaattgatacctcagggattgtttatgttgaatgtctcttctctttagatgctgttcctgatgacttactctatcttgttcctctttttggtcgctgtttaacggagttaggtacacacaaacattcttttgtagaacttggagtactattagcctcaaaaacaggtggaattgatatctctccacttattactacaactaggggaactcaactacctgtagctaaactatgtataagtggaaaagctacagaagatcatattacagatcttttttctatacttgaagaaatacttttagaaacacaatttgatctcaaagatcgctttctacaaatggcattagaagaacgcgcaagaatcgaacaggccctcatccctgctggacataatgttgttataacaagactacgctcaccctatagtattgctggacaaataagtgaaaacattggtggtgtctcgtatttagaagcattacgtaatcttacagaacgcattcattctgattggcattcaatacatacagatctcaccaagttacaacaaattattattaataagcagcataccatctttaacattactgctagtgaaactcttttattaaaaacattaccacttattaatcaaattgaatataagcttccatatgtagaaaacaatcctatactacgcactaccaagaaacctcttataggagaaattcttcaagtaccatcacaagtcaattatgttggaaaaggttgtaatatctatgagttagggtataaatggaatggttctgcacatgttattacacgccatttacgaatggcttggctttgggatcaagtccgtgtccaaggcggagcctatggtgtcttctgtacattggatcgaatgaatggttctctcacacaagtatcatatagagatcctaatgtagaaagaacaattaaagcatttgatcagtccgccaattatcttaaaaatcttcagttaacagatagagaattaacacgagctattgttggtgcaattggagacttagatagttatatgcttcctgatgctaagggtatggcttcacttacaaggtatcttactgatgatcaagatgagatacgtcaacatatgcgtgaagaaattctaagtacaacaaaaaaacaatttacagagtttgctgaagtaatggcagaagtagcaaaaactggctctgtatgtatccttggtggctctgcagccactgatattgcacaacaaaataattgggttattcatcaattattataa

SEQ ID NO: 9551 - DNA, 1719 bp, Lawsonia intracellularis
atgtctaagcgtgtgattatcattggtgctattgctgctgggcccaaagctgctagtcgcttgagacgtcttgaacctacaacagaaatacttatggtagataaaaatgaatatatttcatttggtgcttgtggaattccatactatatctctggagaaataaattctatagattcactacgttctactgcctatggtgtattaagaacacctgaatacttccaacaaaaagggattacgacatacaataggacacaagcaatatccattgatcgaaaacaacaaattgtacttttaaagcatcttcttacaaataaagaatacacagtttcgtatgataagttagttcttacaacaggaagcaaacctaagcttccaaccattaaaggacaacatctaaaacatattgtaactattagtaatactagccttgactctgctcaacatatccaaacattatgtgcatcaaaaaaaattaaacatgctgttatcattggtggtggttttattggattagaaatggcagtttcccttgcaggaaaatggaaaataaagacctctattattgaggttaagccacaagttatgccaggctatgtctcacctgactttgctgatatgctttgtcatgatcttacaaaaaataatgtagaaatttttacctctgagcaagtattacaattcaaaggtaaaaatgattccgttaattatcttattacagataaaagaaaaattgaaactgatcttgttatctttgcaacaggttttttacctgaaacaacactagcccaagaagcaggacttgcccttgatcctaagacaggagctatacttgttaacccatacatgcaaacctcagatccaaatatttatgcaggaggcgactgtgtagctgtacctaatcctattactggagaacatagttggttcactcttggctctttagctaatcgacaaggccgtattattggaactaaccttgctggaggtagtgatacatttccaggtgcagtagggaactggtgtatcaaactttttactttatctgcttgtggtgctggactcacacttgaaaaagcaaaatccctaggatttgatgccatctcagctagtattgagcaagcagatagatcacaatcataccctgaacatagtataatctctttagagcttatcgtagattgttcaaaccgtagagttcttggcattcaaggtatatgtagtgcttcagatgttgttaaagcacgcattgatgctataactatgctattacaatatggtcatcctacaatagatgatatttctaatgctgaaatgtcctatgctccaccattttcttcagctatggatcctattaatgttgttgcaaatgtagcagataatatactttctggtcagctagaatctgttacctcaaaaacattcacaaccatgtggaatgatagaaaaaataatactatcttctttgtagacacaagacctacaactgcctcaaaagaacttaaagaaaaatatcctaatgaatggcatactattccttttgaagaaatttcatcatatctttcagaacttcctaaaactcagccaattgcattaatttgtaatactggcctaagagcatatgaaacaatgtcatacttgcgagggaaaggcataacaaacacaatagatgttcttggtgggatgtatgcaattaaaaagcgaggagaagaattatag

SEQ ID NO: 9552 - DNA, 816 bp, Lawsonia intracellularis
atgcagttagtgaagccttttctcaaatggccaggagggaaatttagattacttgatcgtatattatatcatcttcctcaaggagagcgtcttatagaaccttttgttggttcaggtgctgtatttttaaatgcttcatttaaagaattttgtatatatgatagcagtcctgacttaatagggctatttcaagtattacaacaagaaggcgaattttttataaaaatatgtcaaactttttttactactcggtataataatgctaacacttattatacattaagaactatttttaatcattctatacatccatttgaaagagcagttttatttttataccttaatagacattctttcaatgggttagttcgttataactccatgggattatttaatgtaccatttgggagatataataacccttattttcctaaaaaagaaatggaagcttttttaaagaagatgaaagaaacatctattacttttgctgtatgtgattttagggatgcttttaaaaatctttatcctggagatgttgtttattgcgatcctccatatttaccactttcaaatacatcaaattttactacatactctggaacagttttcagttatgatgatcaaaaagatttggctaatcttgcttataaagcttcggagcaaggcatccctgttgtattaagtaatcatgatacaccagtgacaagagaactgtattctatggcaaagatagattgttttagcgtacagcgttttataagttgtaatgggaaagatagaagagcagctccagaattaatggccatatttacataa

SEQ ID NO: 9553 - DNA, 813 bp, Lawsonia intracellularis
atgattcattctataatactacaaggtcttttttttataacagctattttaataacaggatgtgcaataactccatatacagaaagaagccagcttctccttatacccacttgtgtcgaagagattttaggttcagaattaacatcttctcttttagagaaagaaaaaatagaaaaagattcaaaattttcaaagaaagttaatgaaataggtaagcggattgctgcagttttgcctaaatcagagtatgaatggcgtttttatactattgatgatgatactgttaatgcttttgctgtgcctggtggttcagtttttgtttatagagggattttacaagttgccaaaacagaagaacaactagctgctatcatgggacatgaaattactcatgttattttgaggcatggttcagaacgtatgagtcaggctctccttttgcaaattggtggagaggttggtgcagcaactattgataaatatggaaaatcatcttatgcagagatatttagacaagtgtatggtacagcatcaactgttggaattttattaccatatagtcgtgagcatgaatatgaagcagatcatgtaggaattcttttaatggcagatgctggctatgacccacaagagtctattcagttatggaaaaatttttctttattagataaaaagtctatacccgaatttttaagtacgcatccagtgaatgagaatcgaattttggcattagaaaaaattatgccagaagctataatacgttttgaaaaatccggaggaaaacctggtccaactcctctggggaaactataa

SEQ ID NO: 9554 - DNA, 2265 bp, Lawsonia intracellularis
atgggcaaaaatctcattattgttgagtctcctgctaaagtcaaaactatcaaaaaatttcttggttctggctatgtagttcaatcaagcgttggacatatccgtgacctacctaaaaaaaatattggtgtcgatgaaagtaaaaacttttctcctcactatgaaataatccctggaaaagaaaaaattgtccaaggacttcgtgaaacagcagcaaaagtagatactgtttatcttgcaccagatccagatcgtgaaggtgaagccattgcttggcatgttgcagaacttataaaagataaaaatagtaatatacaacgaattcaatttaatgaaattacatctaaagctgttcaagaagcattaagtcatccacaaaaacttaataaaaatctttttgacgctcaacaagcaagacgtattcttgatcgcctagtaggatataagatatctccattattgtggaaaaaagtaaaacaaggcatatctgctgggagagtacagtcagtagcactaaggcttattgtagaacgggatgaagaacgttatacttttattcctgaagagtactggttattcaaagcaaatcttgaaggttctaaccctcccccttttaaagtagaactttggaaagttaataacaaaaaacctattattcctgatgcagtaactgctgctgcacttgaacaacaaataaaggataaaccatttattgttgactcaatagaagaaaaagaacgtcaacgttcaccaaaacctccttttataacttctacacttcagcaagcagctaatcaacgtttaggttatacagcaaaaagaactatgaatattgctcaacgtctctacgaaggattagagttaggggataaaggaacaaccgctcttattacttatatgcgtacggactctgttcgaattgctaatgaagctaaacttgctgcagcaacactcatagaacaaaaatttgggaaggaatatttagctaaaggtggtaatggtagaaacttcaaaggaaaagctggaattcaagatgcccatgaagctattagaccaattgatgttacaatccttcctgaagatgtgaaaccttatcttgcaccagatcaatatcaaatttatcgtcttatctggtcacgatttattgcatcacaaatgtctgtagctcaattccatgatacaataattactataaattgtgaaaactctcagtggagaacaaaaggagaacgtcttctatttcctggatttttagctgcgtttcccaacacaaaagaggaagaagatactaacttacccgtgctacataaaggagaaatactaaagctacattcccttataaaggaacaaaaattcacccaaccaccaccacagtttaccgaagcatccttagtccgagagttagaagaacttggcataggtcgcccatcaacatatgcatctattatttccaccttgcaagatcgagattatgtacgtcttgaagataaacactttatagctacagatttaggccgtgttgtttgtatgttattacaggactatttcaaaaatcttatggatgtaacatttactgcccatatggaagaactccttgataaagtagctgaggggaaacaagattgggtggaactactccaaaatttcagtgaaacttttaatcccacattagaagaagccacaaaagctatgagtcaggtcaaaactggtttagaaactgatattaattgtcctgattgcaaaaaacctcttgtcataaaatttggtaagtctggacagttcttagcatgttctgggtatccacaatgtaaatttacctctaactatctacgagatgataaaggacaaattcatcttcaagaaaaggtccaacctgaactgcaaaaaataggtatttgcccaaaatgtaataaagatcttgtactaaaaaaagcacgtacaggaagtcgttttattgcctgttcaggatatcctgaatgtaattatactgaagctttttctactaatgtgccttgtccttgtgaaggctgtaaaggaatgttagtagaaaaaagttctaaaaaaggtaaagtattctatgcctgtaatacatatccaacatgtgattatgctatatggaattggcctatacaaaaatcatgtccaacttgcagttttcctattttagtcgaaaaaattacaaaagctaaaggaaaacatcttgcttgcccagaaaaaaactgtcgctatacttgtgaactagaagaaagcgatatagaaacctaa

SEQ ID NO: 9555 - DNA, 627 bp, Lawsonia intracellularis
atgtctatttttactattccattagggatgttagaaacaaattgttatattatacaaaaaggtaaaaatgcacttgttattgatccaggtggaacttctcctgaggatctctctataataactacatttattacacaaaataagttatctatccaggctatattgtgtacacaccttcactatgaccatatttttagtacagcaatgcttcataaacaaacaaatgtaccagtatttgcatccacaaaagatgatttcttattaaaaactcaggcaaaaggaggaataggaaaactagcttgtccaaaaatagaaatttttcaacatgaagatttgacagaaggtctacacacatttaatacattttcatgtgaggttattaatacaccaggtcacaccccaggaggagtatgtctctattttaaagaaatgaatactctttttactggtgatacattgttctaccacactgttggaaggactgatctccctggtagcaatacaaatgatttatttacatctttacataaaaaaatctttgtacttcctaaatatacaattgtataccctggacatggtcctaaaacttcaatagaagaagaattaacaaataatccctacatctaa

SEQ ID NO: 9556 - DNA, 1194 bp, Lawsonia intracellularis
gtgtctaatagaataaaaaaagttgttttagcctactctggaggactagatacatctgttatattaaaatggcttattgctacttataactgtgaggtcattgctgtaactgccgatcttggtcaaaatgaaaattttcatgacattgaagaaaaagcaatagtaacaggtgctagcaaagcatatgttgtagatcttcggaatgaatttgctaaaaattttattttccccatgctaagagcaagtgctatctatgaaggacgatatctccttgggactgctattgctagacccttaattacaaaacttcttattgatattgctagagcagaagaagctgatgcaattgcccatggagctacaggaaaaggaaacgatcaagttcgatttgaacttgcagccgcagcacttgcaccagatattcacgttattgctccgtggcgtgaatgggatttaatatctcgaactgcattaactacttttgcagaaaagcataatatccctatatctacttctcataaacgttacagtaaagatcaaaatatgcttcactgtagcattgaaggaagtgaattagaaaacccttgggaagaacctcacattgaatcatatacaatgacagtccctattgaacatacgcctgattctccagaatatattacaattgattttgaaaaaggagaccctattgctattaatggtcaacaaatgatccctgctgatattatgtttacattaaatgacattgcgggaagacatggtattggacgaattgacatggtagaaagtcgctttttagggataaaatcacgtggtgtatatgagactcctggagggacaattatccatatagcacaccaagatcttgaaggtattacccttgatcacatgactcttcttactcgtaatcaacttattccttcatatgcagatgctatatataatggattttggttctccccagagcgtgaagccatacaagcattcatggataaagcacaagaacgtgtgactggcacagttaaactaaaactttataagggtatggcttatcctataggcagaaaatcttctaatagtctttatagctcccaacttgcaacctttgaagaagacacttcatataatcacaatgatgcaacaggttttattaaacttaaaagcttacgtatccgtggttatcaaaaaagttaa

SEQ ID NO: 9557 - DNA, 1383 bp, Lawsonia intracellularis
atgcctaaaaaaaaactttggggaggcagattccatgaaaagacagctagtcctgtggaacaatatacccagtctatttcttatgataaaaagatgtatgctcaagatattgctggttcaaaagcgcatgcttccatgctaggccgtcaaggtattctcacctctgaagaagtactactattactcaatggcttagactctattcaaaaagaaattgaaacagatacctttccctggaagattgaactagaagatgtccatatgaacatcgaaagcagacttacagatcttattgggactgtgggagaaaaattacacacaggtagaagccgaaatgatcaagttgctcttgacttcagactctttgtttctgataatattagtctctggaaaagacaactccttgaactcataggaatttttgttgcaaaagcagaagaatacaaagatactatccttcctggttttactcatcttcaacctgctcaacctgtgagcctagcacaacacttacttgcttatgcatggatgtttaaacgtgatgttcaacgtgtatatgaatgtaatcaacgtgtaagagtttcgccactaggtgcagcagcgctttcaggtactacctacaacattgaccccttctttatagcaaacgaactccatatgtatggtgtatttgataatagcatggatgctgtctctgatcgtgattttgttattgaagctctcttttgtgcaagtgttattatgatgcacctttctagattctgtgaagaacttattatttggtcaaatccagcatttggttttgtccaacttcctgatgcatatgcaacaggttcatccattatgcctcagaaaaaaaatcctgatgtagcagaaattatgagaggaaaagttggaagagtctatggtgcattatacaatatgcttactatccttaaggcattgcctctaacatataaccgtgatcttcaagaagataaagagcctttctttgatacaaatacaacaatacagtcatcactttccattatggcagatatgcttgcagcaattacatttaataaaaacaaaatggctagtgccctttcggatggataccttaatgcaacagaattagcagattacttagtaactaaaggactctcatttagagaagctcatcatacaactggatcaattgttgcattagctgaacaacaaaaaattccattagaagaattatctcttcaggattttcaatcaatatgtgataaaatcgaatcagatgtttttcatgttcttgactaccatgtttctatagaacgaagaaaaagtactggaggtactggttatcattctatagaaaaacaaatagaaaaactcaaatcttggttgacacaatag

SEQ ID NO: 9558 - DNA, 993 bp, Lawsonia intracellularis
atggaacaagggttaaacgtacgttgtctccatatgatttcccctttctttggcaaaccaaacaaagtgcaacactgggaatcattatataatcttacaattgaaactatagatatcagtgaaaagtatatagagatgttacagcaacgaccaaggtatggttttgggaaagtacttaatccctgtatagactgtaaaatgcttatgatgaatatagcatataatcgtatgctagaattaggtgcttcgtttattatttcaggagaagtcattggccagaggcctatgtcccaacgaaaagaagcactaaaccttatatcaaaccgtgtaaatatacaaaatatacttttacgcccactttgtgctcaacacttatcaccaacagatccagagcactctggacttgtagatcgcacaaaattacttgctttttttggtagaggtagaaaagaacaactacagttagctaattctatgggtatacaagaaatacctacacctgctggtggctgtaaacttgctgagaaagaaaatgccagacgctattggttagtacttactaagttaaagaacccaacagttcaagacttcaaccttgccaatgttggaaggcagtattggtataataattattggcttattattggtagaaacaaagaagataatcaaaaacttgaagttttagcttcccaaaatgatactcttataactcttaaagacattcctggaccaactggactagcaagaaatacaaccttatgggattcaaaaatcctttatgaagctgcaagtcttgttgcatcctactcccaagtagctataaaaaaagaaatgcctatagaactacaactaacatctcaaactgaaagtatatgtctaaccgtaatcccatcacgaacaggactattcacaaaagaatgttttcaatttgaagatgttaaacaagctataaaaaatgaatttcatccatcaatagcaactgcagtatcttaa

SEQ ID NO: 9559 - DNA, 540 bp, Lawsonia intracellularis
atgaagtatagtatcacgccaacatgtataagttttattgggatatcagactttaaaaaagattttattgggaaattatttgctcaatatattaattgggcctacttaaatacaaatcacattatagaagcatattatgggatggcaattaaagacattatttataataataaaaatgaatcatttcttactatagaaagtaacattatctcttccctcaatataaaacgaaccattatttttacaggaaatacttgtagttataaaatggaaactatgcagtatctacaacacattggccctgttgtatatatctatactccatttttaaaaattcttccatatcttaaccaacttaaaagaaaagatatgttaataagtccatctatcactactaataactttgaagcatttttttatgaaagggacacactatatagttactggtcaacacacataataaatgacaatcagcctattcaaaaaattataaacatccttcttaacttattctataattcacaagtaaaaactaactaa

SEQ ID NO: 9560 - DNA, 543 bp, Lawsonia intracellularis
atggcaaagaaaacaattaaagaacaacgtatttcaaaggtaattgatgcattaaattatgcaagaagtatggagttacatgctattagtcaatatatgaatcagcattataatcttgataattctgattatggccagtttgcctcaaatgttaaattaattgcaattgacgaaatgaggcatgcagaaatgtttgcagagcgtataaaagaacttgatggtgaaccaacatctgatcttgctgagaaggtaactaaggggcaaaaagttagaatagttttttcttatgatacagatcttgagacaaaaacaattgatgagtacaataggcttcttaatatctgtagagaaaatggtgattctattagtgcaaagctttttgaaaatattcttgaagaagaacagtcacatttaaattacttttcaaatacagatggtcatattaaaactcttggagatacatatctttcaaaaattgctggaacaaaattaatagaaataccttctaaaggttttgtaagtgaagagtctaaagcaagttag

SEQ ID NO: 9561 - DNA, 1830 bp, Lawsonia intracellularis
atgtgtggaattattgcctatgctggccatagacctgctatccctgttattattgaaggacttcgccatctagagtatcgtgggtatgactctgctgggataggctttatccaaggggaaacgctctatcatgttaaagcaaaaggtaagcttaatgctttagaaaaaaaactctctacctattcaccaatgctttctacagttggtattggccatacacgatgggctacacatggatctccctctgagtgtaatgcacaccctcatgtaaatgaagaatgtggtattgccattgttcataatggaattatagaaaactttcatgagttaaaacataccctttctgaaaaacagtaccagtttaaatcagaaacagatacagaagttcttactcatcttatcgcagaaggatgtaaacaatattcttctttaatcgaaagttttgcatgggcattacgccaagcaaaagggacatatgctgttgcccttattagtgagaataatccttctatggtacttgctgcacgtatgtctgctcctcttattctcggcgtcggtactggagaatattttattgcttcagatattccttcattcctaaattatacacgtgaagttgtattcttagaagataatgaaattatatctattacagataactcatggcaagttaatgatttatttacattaaatcctgtaaaaaaatctattcagactatctcttgggataaacattcagcacaaaagaatggttataagcatttcatgcttaaagaaatttttgagcaaccacaagttattgaagaatgtctttctgaaagaattaatcaagaaacggatcatatctacttcccagaattagataatttacctatcccaacacgtataattgttgtagcatgtggatcttcctatcatgctggaatatggggaagaaatatattggaacgttgggcaaaaatcccaacgctacctgaaattgcttctgaattccgatatcaagagcttattactagccctggagaactaataatagttattagtcaatctggagaaacagcagatacattagctgcacttaaacttgctaaagaaaaaggatgtaaagttattgcattatgcaatgttataggttcaacaattgctcgtgaagcagatgctactatttatacccaagcaggaccagagttaagtgtagcatctacaaaagctgtctgtagtcaaatgattcttttagctcttcttgcattgtattatagtcaacgaaaaaaaaccttagatattcagttacaacaaaatattttatctgacttaaaacaactaccacaaattttacaacaatcacttcctactatacaggataaagctaacgaacttgcaaaatgctactcaacgtcttcaagcttctttttccttggtcgaggagaagcataccctttagctctagaaggagcattaaaactaaaggaactctcatatattcatgctgaaggttatgcctctggagaaatgaaacatggcccaattgctcttattgataaaaatttcccaacagttgtaattgcactatacaataatctattttctaaatctcaatcgaatattgcagaaatacaagctcgaaatggaccagttattatactcacgaatgcacctcttcattctaacacatataatgaaaatcacttatggactataccaaacgcaggtttttttacaaactttgtaaccctttcagcattacaactttttagttatgaaatggctggataccttgggaaagatgtagaccaacctagaaatctagctaaaagtgttactgtagaataa

SEQ ID NO: 9562 - DNA, 3003 bp, Lawsonia intracellularis
atgtcttattgtactaatttttatatcatattttccttattaaagttaaaaaggatatcaataacacatattatctactttttttatacaatagtacatctatttctttttatacatccttcctatgcaataattgatctaggtacacttggaggaacaaactcacaagcgtgtgctatttctcctgatgggcttactgttgttggattctcaaatacctacctaggcactaagcatgcatttaaatacaaactaggcagaatgtttgatcttggtacacttggaggaaaaaattcaactgccattgcaagttgtgagtttggtagcattataattggtaattcagatataccagggaataatcataaccatgcatttgtatatacagatcatcatggattatatgatcttggtacacttggaggaaaagactcaaccgcaaaagctatctcacatgatgggaaagttattataggttcttcaatgacagaaaatggtgacgttcaagctttcatccaaaaaatgacaacattctttgtaaatgatcaaatatttttcactcctcaaggcaatctaattaacttaggaactctaggtggaccattctcatatgcaaccgatctttcttatgatggaagagttattgttggcagttcaagtactccacttggtgaagttcatgcatttaagcatacgcctctattgggaatgttcgatctaggaactctaggcggaacattctcaatagcagagtctgtatctcttgatggagatactattgttggttcttcaactacaaatcaaggaacaacccatgcatttaagtatacacctctattaggaatgtatgacctaggaacattaggtggtacttactcaaaagctataaaagtatctggattaggaaacgtagtaataggagaatcatcaatttgtaatgggaatatacatgcgtttaagtatagtgactcaacaggaatggttaatttagggaccttaggaggaaatcagtctcaagccataggactttcatattatgggactatagtagttggaaatgcacatacttttcaaaataaaatgcatggatttatacatacagatcaaacaggaatacttgatattggaacattaggtggagaggagtcttttattacagggatatcattagatggacaaataatttgtgggtatagtaatacttctaatggagctattcatgcttttatccatcgtactaatatagctgatattcccccaagaccacaatctgtaataagattacaacaacctctttcatctcctgattatactccacctgactctttcagcatcattactagtaatccttccactcctacctcagaaacaagctctcttagtaaccatacttctcctccttcctctccctcaacttcaacccctcttacttcttattgtcaccacttcccttcatctttttataaacttacaaatatcacccctctatctagtaatgatacctctatggtcatggcttctcctcctgcctctccttcaacttcaacccctcttacttcttattgtcgccacttcccttcatctttttataaacttacaaatatcacccctctatctagtaatgatacctctactgttataacctctcctcctgttcattcttccaataaatcttatctatcaacgcctaatagtgataacagcttaaaaaataatgattgtctttctccacaatctagcgctaatagctcaccaatttgtggacctgattcaatattacaaaggttacaagcagtagcaacaaagctggaaatatttcaacaacagcaacaaacctcttctagcagtaatcctgaccaaatagatgggaccttacaacatagctcttacgtttcctcccctcaacaaccttcaagaaattctgctacctatcattcttctaacactgaatctcctgatacttctgggaactttacacctccagaagaagaagaagaagagcaacaacaaattattcagagattaggagcaacaaatcctcaattaaaccaagctaactctcaagtaagtacacaaacaacatcttcatcacaacaagtaactcctgaaactgaagtttatattcaccacctatttaacccaagaaaacttgttgatgtacataatacatcactagcgttagaacttgatgcagcacagttatcaaatattcttgcaaacaattatgaagaaattaaccaagcactcaactctgattgtaatacatttggtccatatggattttgtttaaatgttgggaaccgttatttatcgactaaagactcaaaagtatctcaatctataggtatggttaatgttgctttcaaatttactccttatttaagaattggacttgctttggacaaagctctaacaaaatacaataatcaatataaaattaaatgttcagaaccgcttacaacattatattgtgtctatgagcaatcaacacagtctacaggaattaagtttaaaataactggaacccaaagaatatctgatgtaaagattgctcgaatactactaccatatacagaagaaggtaaaggacatacaaaaatgaaaagttttggatttgaggcacaagctggttatgggtttatgttatcttctaattggtctctccagccaattgttggtgtacagcatataaatattactcgaaaaaagtatcaagagtttcctcaagttcaattcccaattacctataaccaagcaggaattcaaataacaaatgtagaaacggctgctcttctagaaggaaaagtaactaactggttcaccatagattttacaggaagtataaaacacattatacatcaaaataataaaagttatactgggactataccatatctaggagagttcaagttacctttcaacacaaaaaaaaaaaatactatgctgttagagttggtacaacatttttacttgattctaaacaaactttacgtttacaaatag

SEQ ID NO: 9563 - DNA, 408 bp, Lawsonia intracellularis
atgagttctcagtacttccaacaaattatggaagatttttttaaagaacttgggattgaatcttataaacaacctgaattaacttatgtcttaacagcccaagactttggggaaattattattgctgaacaacctacacaatgggttacactactagctcaaataggagaaaaaccttttgattctagtatattatggtatcaagatatacttattgaaaattcccttttagataaagctactcctaagcccagtcttggacttatagggaaaacacttatacaaaatgcacaactccccttagaatacctcacattacaactactaaaacaatggattgaattctttcttaaaattgctgttgaaaatcaaaaaagatttatcgtaaattggaaagaaaatgtataa

SEQ ID NO: 9564 - DNA, 1158 bp, Lawsonia intracellularis
atgtatcctataactagtccacataatacttctcaagtcacatacaatattcctaactggacaataaataatgaagaaacaaaattagctaggcttcaaaatgcattggaacaaaaatatcatataggattatctttaatgaaaacctgtttctccagaacgcctagtttaattgttggtagtattgttggggcaggggtaggttctttatctttaccactttccttaccttcagctactattgcaggtggtattacaacagttggtatacatgcatataatactttaaaagaaaataataatagtagtaaacaaataataaatcttattactagttcaatagtatatgacatagttcataataacaataaacttcaaaaagtatgcttagaacctttttctcaaataaaaggtgatttttacagaacattatgccgtttctccattgatgaaacagaacaagcaagcaatggtatttgtcatggccttagttttctttggattcgagaaatgatcattaatgcaaatgatccaagttctatgaaagaaagcctccagcaattgaaaacaataaatagttttcctcctaatgaacctaacagcattactatacatagagaactatatactaatgatgggtttggttactttaaattactacctgaatgtgaagcttgtacaccaaaatttcacttttgtagagaaaaagaaacctatggcacaatagctagtgaagatagacctgagaaaaatcctattacttttgggaagacattaatcaagtccctattagaaagtgagcttagtttcaaccaaaaatatgcaaccattacactaagtttatcttgctcaaattggctagaaaaacatagttgtgctgtctctattgaaacaccacctttaaaaaatgaagagagagaagatattgataacagtagccaaccagttataattaattattttgatcctaattatggtcagtttcaacttaaaacatcaatttcagaagctcctcaaactttttctgaattctttcaatatttcaatagtattgcctatccttttgtaaataaaaattactcttgtgaaataatattcaaaccacataaaaatgctaaaaatagaatacctcaaaatgcattaagattaacattgtga

SEQ ID NO: 9565 - DNA, 600 bp, Lawsonia intracellularis
atgaaactttttaataatggcccacgagtgacattcgatgaaaatagcaattccggttattcctatcctcatgaagatgacgtaacacacgaagaggaaagaattaacactaagtatgatccaaatgccattcctggtaagtctatattaaaacagactactggagatagaggcgttaggtttgatcagagtagtaatagcacgtatgtatattctccaggaagtgatgtcagaactacatatgatccagatgctgttcctggtaagtctatactaaagaaaacaaagtcttcctttttgtcaaggatggttacatcgattcaaagtagtctaggtagggtaggagcagctattattcatggagtgcaatatgttgttaatggagttaaaggattatgttcctataggactagacaagttcagtcagaaggttctagtttaaatccaggagagggacaacatcatcagccagagctaaagcaagagccaatttatgtaaattatctggatgtatcaggcactcaacaacagagcaataagacttctgtacaagataacagtaaagcacatcatccattaccatctattccacaagagtaa

SEQ ID NO: 9566 - DNA, 615 bp, Lawsonia intracellularis
atgaaaattcaatttaaacatagcagtagtcataatagtggagtagaagaaaatggtaatgccactggtactagtagttctgtaaaaaacaaatctttagagcctactaaaaaagagagctcaattttaagcaaattgcgtgcgtcatggagtaatactcttcagagggtaaagcattctactatgaaaatgattggtgctcgtacacatcaagctttaaaagattatgatgcaaaaaaagatacaacaggtacttcagaaggaaagaaagtaagtagtacaccaaggatagttcctcgtcacgagaatacatctggaccatttacatcaaatcctgttgattctccagatacaatttatgctacagttgttcatcctagtacccctcttgcacagcgtccgttacctcctattccagaaaacaacccttcatcagagcctatttatgcagaacttgattttacccttgggcctaattctcctggtaaaatgaagcctgttatatacgaaaatttaaagagtgtatcaccaggtccacatgtaacagaacccatttatgctgaaattaaaacaacttctatctctacaagtggtaataaagggaagaataactaa

SEQ ID NO: 9567 - DNA, 1116 bp, Lawsonia intracellularis
atggctccagctccagggtttggtgctaataatattcaaggacaaggagatagtagacaattattagagaaagtgaaggattttttaaacttattagtatatcaagataaagataaaaaaccaacacaacctcaatcaggctataatgtaatagcaaatcaagggtctgtaaaaggactgagttatgttatacatggagctatacaagaagtacaaaattctatgagagtgttagcattaaatatgaatacagcacgattaacatctgagaaaccattccgtatatttggttcactcagtggacaagcaagtagtcaaagaaatagcggggcttcaacacaagctggtgtaatgtatgctatacctatgtttccaaaattatgggttggtacagctatatctcaaggtagggagagaaaaaaagagtatcaaggagtagatatagcaaaagcatatggtggagctaaagctaaaacagaaacaaatcaagcttcagttattgctgcatggaatgtagctgaaccagggcttatgggatatgttgaaggcacatttggatggggtgaaacaaaaaatacacgtgtatttactcatgctggtgaacgtatcacaactaaaggtgcagcacatacttcaacaaatggtggcatagcacgtgtagggtataatatagaaattactccaatgatgatgcttacaccttatgctgaagtatctattgcaacagctcgttgggattcatataaagaatctggtcggatattacccgcaaaaataagtgcaactagagaacatgttattgaacatagagctggattgaaagtcgattggcatatttcagatgtttgtaaaatccaagcatggggggctgctattttaggagagagaaataatacaggtgtaaccgcaaaaccaatatcattgtattcagtaagtatctcaagcggtaaagataaatcaagatataaacagcttgaagttggaagtaacattgattttaaaattactcataattgtggagttggtgttaatgttggaatccgtacaaaagatggtgaaaaagataaaagtataaaacctcaatgtatgggaattcatttctggtacgacttttaa

SEQ ID NO: 9568 - DNA, 1173 bp, Lawsonia intracellularis
gtgagagcaccttttgcttcagccagtccttcttctctagttagctcttctgttatttcaacggcaacattatcaagtgtagtttcaagctcttctgtggtaaaagtaactcaagaggtggataaaccattaactaaaagttcaagtagtaagatgtctgtgaaaatagactcaacaagtaatatttcaacaacaacaacaacaacaactactactactactacacaagactcctctataaaacaggcaccactagtacctcaaaagcctcaaagattaagtattcccttaactacctctgtaaaactaactacatcaaataactctgataatgatgaagactggggtgatgatggttgggatgctcctcatcctgaaagtagtgctgtagagcatggaatgaaacaagattttttagagcaaggacagtcattgttttcttctgttttaaatgggacatattctaggaatactataagcgaaaggggagaaagagatcagtcatctgcttctccctcagcaagctcttatcaaaatggacgtttggtggattcatctagttcttgtccattaagtcttcatcaggagggagagcctggtgattcatttgatactgctaaagccaaactggaagtctttatgcaaaaacggcatgagccaccacagcagccaacaaagaagcctataggtccaagagatgagccaaacaatgcatttaaagaggcacaaagtaaacttggtgcttttttttttaaagaagaagggtggaatgcacaaagcttaaaagagcctttaaagccgacaggaagacaaagtgaagactataaaaagaatagagctgctatggagcttttatttgctggagtgattgctcaacatcaagatatacaagattatcagagagataggttatcatcgccatcatcattatcttcttcttgtttggttgaaaattatgaacaaggaagacaaaaatggcttaagcttaaggaagacctagaaaaaggagaaagagtgtatgaaggtatgtatggttttttccagatttccaatcaaaatgaagagttacgtgcaaaactttttgctatacataaaaaaaatgaaagtttgaaatcagaattagagtctcttggacaagagttagaagatatgtggcatagggggttagtgtag

SEQ ID NO: 9569 - DNA, 426 bp, Lawsonia intracellularis
ttgacaacattttatttactttgtttgttatgtggaaagagtaaagtatttgcttcagatagagaaagtagtgatagacagcatgttaaacaagtgaaacaacctcttcatcattctaaacataaatcacatcagccttcaggaaaagaaatacaaaaaaaagtagagaaaattgaagaagcaaaaaaattattagaagatcttagatcacagcaggttagtactcatgaaacaaaagaggggttaaatgcctcctttcaaacagttaaacaagctcaaacagtacttgggattttagaatcagagcttaaagaaatgttaggaaaatatttttctagtgttagttcaagtgaaagggatgaggatttaagtagtcatactataagtaaacaaaaaggtaagaccgatccacataaaataaaaaaa

SEQ ID NO: 9570 - DNA, 1434 bp, Lawsonia intracellularis
atgattcagacttcccctattccagttaatctttctttaccctataaaattgctgatatctctctagcagatttcgggaaaaaagaaatgcaactttcagaaagggaaatgcctggtcttatgacattgatccaacgctataaggagaaaaaacctttaaaaggcctaaaaattacaggttctttacacatgactatccaaactgctttacttataaaaacactttattacttaggtgcaaatattcgttgggcctcatgtaatattttctcaacacaagatcatgctgctgctgctatcgcagacctaaattatgccagtgtttttgcatggaaaggagaaacattagaagaatactggtggtgtatagagatggcacttacatggcctgatggttctggccctgaccttattattgatgatggtggagatgctacacttataatccataaaggggtagaaatcgaaaaaaatcctgagttattaaaacaaagccatagtgataaagaaataaaaattattatggatcgacttaaagtaatgtataatacttctcctactcactggacgaaaatagctaaaaatattcgtggagtctctgaagaaacaacaacaggggtacatcgtctttaccagcttgctgaagaaaataaacttcttttccctgcaattaatgttaacgattcagtaacaaagtctaagtttgataacctttatggatgtagggaatctttagcagatggaattaaaagagctacagatattatgatcgcagggaaagtagttgtcattgctggatatggtgatgtagggaaagggtgtgcacagtctatgcgcggctttggagctcgtgtaattattacagaaattgatcctatttgtgcattacaagctgctatggaaggctttgaagttatgacaatggaacaagctgcagctgaaggcgatatctttgtaacagctacaggcaaccttcatgttattacacataaccatatgaataaaatgaaagatgaagctattatttgcaatattgggcactttgataatgaaattgaaatgagctggctagaaaataattcagaatgtaaaaaagtaaacattaaaccacaagtagataaatgggtcctccccaatggacgatcaatgattgttcttgctgaaggaagacttgttaatcttggatgtgccacaggtcactcaagttttgttatgtctacaagctttacaaatcaagtccttgctcaacttgaattagcccataataaattagaaaataaagtctatattcttcctaaaaagcttgatgaagaagtcgcacgcctacaccttgaacgtcttggagtaactctaacaacattaacacaagaacaagctgactatattgatgtccctattgaaggaccatataaatcagaacattacagatattaa

SEQ ID NO: 9571 - DNA, 909 bp, Lawsonia intracellularis
atgagagtagcaattatatcatcttcttttgctcgatatgataaaaaaccacttgaactacttagccaagctggaattgaatatatccttaatgaacaggggtatcatctcactgatgaagaactaatacaaataatagatggttgtgctggtatcattgttggttcagaaccattacccaaaaaagttttagagactaacccaagactcaaaactattgcttgctgtgggaaacatcttgataatattgacgttgaatatgctcaagaaaaaaatattattatttataatcctcctaaaggttatgcaattgctgttgcagaatttacagtgggccttatcctatctcttatacgtcaaataccataccaagataaagaagttcgttcaggagtatggcataaacgtataggaaatcttttacatgggaaacgtgttggtatcataggtcttggacaagtaggaaaagcagtagctgaacgactattaccatttggtgtagacattgcttataatgatccaaatgtatatagtactacattccaaaaatttgatcttgataaacttatagattggtcaaatattattactattcactgtagtaaacctataaaagccggccctattcttgacttgggaagactttcactaatgcaaccaggaagttatattattaatgtagcacatggaggattaattgatgaaaaagcattatgtggacttttaactgcaggtcatttagctggagctgctctggatgtctttgggaaagaaccatatgatggtcttctaaaaaatattaataatacaattcttacaccacacataggagcttatgcaaaagaatcaaaaataattatggaaacagatgctgtaacaaacatcattgatacattaaaaaactcctaa

SEQ ID NO: 9572 - DNA, 2136 bp, Lawsonia intracellularis
atgtttgatacctctactcttaatagtgctcaacttgaagctgtcactgcaccagatggtcctgtccttgttattgcaggagcaggtagtggtaaaactcgaactattatctatagacttgcctggttagctgaacaaggtattcccccatcttctatgttacttcttacctttactcgtaaagctagccaagaaatgcttcatcgtgctacaatgcttcttaattatagtcttggtgacgttaatggtggaacattccatagcatagctttttctactctacgtcaatataaaccctcctgggcaacagggaaagtcactataatagatgcacaagacaccctaacttctctccaacactgtaaagaagaactcaaaattgctaaaggtgatcgttcgtttcccaaactacaaacagttgcagctttattaagtagagcaagaaataaagaaataacatttaaggaacttatacaaaaagactctcctcatcttatctcccatattgattcattaacaactcttgttgaacgttatactacatataaaaaacaacaaaatttacttgattatgacgatcttctttttgagtttgaattacttcttaaaggtgatgaatcaaaaaacattcctccattagctccattatttcaagaacgttatcaatatattatggtagatgaatatcaagacacaaatcgtgtccaagcacgtcttgttcggcttctttctggaaacacaaataatacaatggctgtcggggatgatgcacaatctatttatgcttttagaggagcgacagtaaacaatatcctagaatttcctaatctattcccagggaccaaaattatacgtctagaagaaaattatcgttctacccaacctatattagatacagcaaatgctatacttaaagagtcacaagaaggttttcataaacatttatttactaatcgtataggaggagaaaaagttcgccttatacgatcattaagcgatcttactcaggcaaatcttattgctaatcgaataaaagaattactatctatatatcctcccaaagaaattgcaatcctatttagagcaggatatcaatcttaccatttagaaattgctcttgccaagcatactattcgattcagaaaatatggcggcctcaaatatactgaagctgcccatattaaagatatgatggcatttataaggcttattgttaatccactagatatgccatcatttttacgtattgctgccttttcaaaaggagttggccccaaaacagctcaaaaaatttaccaaatagcagcacaaggaaattttttagagcttcaaaaagtttgtaataaataccctgatcttcttagtgatatgactctacttgatgagatacgacaacagcctttagaacctacagaaatattaaccaaagtctttgaacattatcaaccaaaacttatagtccatttccctgaagattggccacgccgtcaacaagggcttgaagaacttatacatattgcttctgcctatacagatcttgaacaatttattgccgatctttctttagagactccagaagaagagctgaatgaagaagaaagcattgtgctttctactattcattctgcaaaaggtcttgaatgggatgctgttattatccttgacttagtagaagatagatttccttctagacattcgcttatacgctctgaagattttgaagaagaaagacgccttatgtatgtagcatgtactagagccaaaaaacagcttgaactttctgttcctactacactctataataaacaatatggatgcaatgaacctgcaatcccaagcccttttgtacaacaacttccaagtatagtaatagaggagtggcaagaaggttattcaggcaacatatataaaaaaattacaatacctactaatcaaccagatagcaaaacatgttcccaaatacctgcttctaacaatacatataataaagaagagttatcttatagtttttgtcgacacaaaatttttggtagaggtaaaattatagaatatttattacctgataaatgtagagtaaacttccctggatttggccttaaagttatcttaaaagactacctaactattgaagattaa

SEQ ID NO: 9573 - DNA, 1023 bp, Lawsonia intracellularis
atgaaccagtattcttcattggtttcagaagaacatatcctctcgtgtattaataaatattttcctgatcaatctcattttatcacagctggtagaggtgatgactgtgccatactttctgtaacatcacctctatgtattagcactgatatgtttattgagaatattcactttcgccatagctactttagtccagaagatattggttggaaagcattagctgtaaacctaagtgatatagctgcatgtggggcacaaccaataggctttactgtaggacttgctttacccttaaatacatctatagatattctagaaggaatatattctggaatgtcccgtcttgctaagcaatttaacttaccgttattaggaggagatctctcccaagcatcagaactctctatttgtattacaatattaggggaaactcatgctcctttattaagagcccaagcacagccaggggacattatttttataataggacaagttggacttgctcatactggacttcaacttttagaacaacaggggacaaaagctattgaactatatccaaaatcatgtatggctcatttaagaccttttcctcttattcatgaaggtcttgctctttcaaaaatggcaaaaagttggtctcagcaaaccaacactcctcacagactagcattaatagataactctgatggtcttgcacaagatattcctagattactagggaaaggaaaaggagcagatatcaccatacctgcccttgatcatgaaatcattcaattcattgagtcacattatacagaaaatgaatactctcctgacttacatgcagttataggaggtgaagactatagtcttattggtacatgctctcctaactttggagcaaaattaaacatggttatatctaatcttactattattggttctgttacagactcagaacctatcttatttaatggacaacaaatgcaaggatttgatcactttagggggaattatattaacccctcgaacaaattatag

SEQ ID NO: 9574 - DNA, 1365 bp, Lawsonia intracellularis
atgggaacaagtaatgtttttcgtgcatatgatatccgaggtattgtagatgtagattttgatttggattgggtagaaaagttaggtaaggtcattggaacatattttgtaagtcagggtatttcatcggctgttgtgggttatgactgtcgaaaatcatcggtggactataataatgcattagtgaaaggattgttatcaactggagttgatgtaattagtattgggatgattccaacgccagttttatattttgcagttaagtatttgaatcgtcatggtggtgttatgattactgcaagtcataatccatcgcaatataatggctttaagatttgggcaggtgaatctacaatttatggtgatgagattcaaagtatacataaattatttgaagtaggttcgtttgcttcagggcaaggtgttttatctttccatgatattataccatcatatatggctgctgttgaagcatggtgtaaactgttacgtccagttaaagtagttgttgatgggggcaatggtgttggtggtactatttgtgcagatattttaaagaggataggtgcagaggtaacctgtctttattgtgagccagatggaaattttcctcatcatcatcctgatcctgtggtagaagaaaatatgaaagatttggctaataaagtgaaagctgaacatgcagatttaggtatagggttagatggtgatgctgatagattgggtatcattgattcaaatggtcgtttattatttggggatgaattactgtctatctatgcacgagaactccttgtacataagccaggttcaattgttattggagatgtgaagtgttcaaatagactttttgatgatatccagaagcatggtggaaatcctgtgatgtcagcaacaggtcactctattataaaagctagaatgagagagcttaatgctccattagcaggagaaatgtcaggacatatgtttttttcagatggatggtatggttttgatgatgctatttatggcgcagctcgtttagtaagtttattttctgctcaagaaaaaccaatgtcagaacttcctggttggcctccttcttttgctactagagaaattaatattccttgtaaagatacaattaagtttgctgtagttgaaaaagtaaaaaattattttaaatctcaatatgaaacaattgaaattgatggtgctagaattaatttcccttatggttggggtttagtaagagcatcaaatacacaacctgtattagtaacacgatttgaagcagacacagaagagcatttaatgtctatccgtaaagaagtggagacaccacttatgcaatggattaatgaagctaaggagaatgtataa

SEQ ID NO: 9575 - DNA, 1152 bp, Lawsonia intracellularis
ttgttatccattatgaattgggactgggaaaagctacaagaaaaacgacagaggcaaaactggggacaaggtcgtacgccaaaagactcaggtaataacacaccaccaccaaatggctcagatcctaaccctgaacaactttttggaaattttttcaaacagttcagacttaaacctaacagtgggaaagtaaaatggattatacttatccttatttctttgtggttattatcagggatttatattgtaaatcctgatgaacaaggtgtagtcctccaatttggaaaatataaccgtacagttgatgcaggcccacactatgctctaccttaccctatagaaacagtatataagccaaaagttacccaagtaagacgggtggaagttggctttcgttcaacctctcttggtggtacatttcaacaaggtgctacacgaactctacctgaagaagcatctatgttaactggtgacgaaaatattgttaatgttcaatttagtgtacaataccaaattaacaatcctgtagaatacctttttaatgttactaatcctacagcagttattaaaagtgcagctgaagctgctatgcgagaagttattggtaatagtatgattgactctgctctgactgatggaaaacttcaaattcaaaatgaggctacagaattattacaagaaattcttgatcgttacaaagttggtatacatgttttagcagttcaactacaagacgtacatcctcctaaagaagtaagtgactctttcaaagatgttgctagtgctcgtgaagataaaagtcgtattattaatgaagctgaagcatatcgaaatgagcttatacctaaagctaggggactagcaacagaaattgaaaataaagctcaagcatacaaagaaacacgtattcgtaatgcaaaaggtgaaacagcaaaatttcaagctttgcttttagaatataatcaagcaaaagaaattactaaaaaacgtatgtaccttgaagcaatggaagggatattaagtcaacctggtatagaaaaaattattcttgataacaaagttgctggaaaagccttaccacttctacccctttcccaaaaaggactctcagaatattctgtaccaaaagataaaataaaggaaaataagtaa

SEQ ID NO: 9576 - DNA, 852 bp, Lawsonia intracellularis
atgcaacacaaaatttctattcttgtgagtgtactagttattatccttattattagttcacaatccattttcattgtaaatgaaacagaaaaagctcttgttttacaacttggagatcctgttgatcgtatttttgggccaggattacattttaaaatcccatttattcaaaaggtaattttttttgatgccaggatattagattatgatgcacgtgcagctgaggctcttacaagcgataaaaaaacaatagtccttgataattatgctagatggcgtattgttaatccattagaattttaccgcaccgtcagaactattcctggagctcaagcacgtcttgatgatgtagtatactcacagttaagagctcaagtcggtagccatactctcactgaagttgtatctcaaaatcgtagtaacataatgtcagatgttacacgccgcacttctgatattatgaaagaatatgggattgaagttattgatgttcgtatcaaaaggacagatctcccttcagaaaatcaacgtgctatttttggccgtatgcgtgcagaacgtgaacgacaagcaaaacaataccgctcagaaggtgttgaagaatctactaaacttcgctctcaagcagacaaagaacaagcaattatcttagcagaagctaatcgtaaggcatctattatacaaggtgaaggtgatgctattgctacaaaaatatatgcagatacattccaaaaatcaccagaattttatgaatttcaacgaggtcttgaagcacttaggaacggactaaaagaaaatactcatatggtcatcacaaatgatgatctattctttcgccccattcaaaaataa

SEQ ID NO: 9577 - DNA, 762 bp, Lawsonia intracellularis
atgatgatctattctttcgccccattcaaaaataatatgaggcaaactctccgggagaacgctatgactttctttcaagaagtttatgaccgagttcgatttgccacaaatacaaagactcaagctgaattggcaaatatacttgaaattagacagtctagtatatccgatgcaaagcgaagagattctgtcccccctgaatggtatataaaactctttgaaaagtttggattaaatccggattggattaagcaaggagtggggcctatgtatctccgaacagaacaaggatatattcctagagagcttccattaacaggtgtacaagaaacacctatgcattatggtgatcctatctcaaaaagtgtattacatactgtcttttctatgaggtgcaattacatagaaaatagtaattcactacctatcttacagcccactgggaaaattgcattacctcaaccatatacaggagcaaatatccttgtatttcaaaccgagtcagatgcgtttcttcctctagttcgtcggtatacctatctaggtattaatacagactttacacatcctcaatctggagaaatttacgctgtttttatgccatatgaaggaatagctcttaaacgtctttttttaagtacacaaaaaaatggtttttgtttatgtacagatcaaaatgatagtcacgaaagcttcttacctgctcaagaatgtcctatacgtatactaggccggcttgcttgggttttccaaaccttttaa

SEQ ID NO: 9578 - DNA, 1323 bp, Lawsonia intracellularis
atgaatagtcactctccatcattacgttgtcatgctataagccttggttgtccaaaaaatagggtagataccgaaagattattgggttcattaggtattcctttaacttttatagattatcctaataatgccgattttgtttttatcaatacatgtagttttatacacacagctgttcaagagtctgtaaatactattttacaacttgttgctgatgttgaagagttatctgaaaaaccttttattatagttgctggatgttttgttggacgttatggtgaaaaaattttgaagaaagatattcctgaagtagatttatggcttgataataaagagatagaaagttggaacgaacaaattttgttagcattaaatataaagtctacatttttagtcactgatcgtataataactacaggcaaatcttatgcatggcttaaaataagtgatggctgtcaacactcatgttctttttgtacaattccttctatacgtggttcgttacactcatattcaatagatgaacttgttaaagaaagtcgtcatattcttgatcaaggagtaaaagagctagtacttgttgctcaggatgtaacagcatgggggagagatcttcctaataactatggtttaaaaactctattggatcacttattagttttagatggattaaagcgattacgacttatgtatctatatcctacaggattaacaaaggattttttactttatttgaaatcggtaggtgaaccttttgttccatattttgatgttccaatacaacacgcacatccagatattctttcctgtatgggaagaccatttgcaaaaaatccaagaaaagttatagataatattcgatctgtgtttcctgaagctgtccttcgaacatcagttattacaggtttccctggagagacagagggacatcatgtatatttaagcaaatttatagaggaaattaaatttcagcatttaggtattttttcatatgtagctgaagcaggaactccggcagctgtcatgccaaatcaagttggtgaaaaagtaaaagaacaacgaaaagcagaattaatggaaattcaattaaaaattagtgaaaaatggcttaaaaattttgttggtaagcggttatcccttattgtagacaatgttcatccagagtggccagagttgtatacaggaagagcatggtttcaagctccagaagttgatggtatggtatatataagtggaccaaatataaagcctggggaactcatagaggccgatattatggaatctcattcatatgatttagttgccctagcagatagttattag

SEQ ID NO: 9579 - DNA, 750 bp, Lawsonia intracellularis
atgttaaggtcactgtatggcgataaaaattacctaatataccttgctaacgacataaaaggaatttcaatggattcatccttcaaccttcaagcacctgatataaaaactacagaaaaaaacaatgctatccctacagtaatacttgccacacgaaatacagggaaaattcaagaattaaaagatatgttatgtaattttaagttacatatactttgtcttgaagattttcctgaaattccagaaatagaagaaacaggcaaaacttttgaagaaaatgcattaattaaagctaaggtagtatcacaatatacaggactcatagctattgctgatgactctggacttgaagttgatatattaaacggtgccccaggtatatattcctcaagatacgcagaagatataccaaatatacataatttaacaatagatcaacataacatatcaaaacttctttccatacttacaaacgttcccttaacacaacgaacagcaaaactatgcacaacaatagttgcctataatacaaatggaaagtatatcactgcaaaaggaataacaaaaggtttaatctcattaacatcaaaaggaaataacggctttggttatgatcctattttttttgatactaacttaggaaaaacatttggagaactccctcttaaagaaaaaaaacaatatagccatagaacaaaagcattaaagaaacttttagaattatggccaacattatataatgagatataa

SEQ ID NO: 9580 - DNA, 1077 bp, Lawsonia intracellularis
atgattaatttactaaatattacttatcctgaatttgaatcacttattgtaactacgcttcaagaaaaaacatatagagctatgcaaatatggcagtgggtttggcaaaaacaaataacagatattgagtcaatgaccaatttaccccaaaaaattcgagcttctcttactgccttaataaaaattaatttgcctgaaatagttacaatacaacagtcatctgatggtactaaaaaatttctacttcgtctttctgatggagctttaatagaaactgtcctaatacctagcatagataaagcaggaaatataagaataacacaatgcttatcatctcaggttggatgttctatggggtgtactttttgcagtacagctacaatgggatttattcgaaacctgacagcaggagaaattgtaagccaagtacttttagcaaaactacacttaaacgataataagccagataaacctattatccgtaacattgtttttatgggcatgggagaaccactactcaacctaactgaacttacacgtgctttacatatcttacattcagaaaaaggactaaacttctctgctagacgaattactgtttctacctgtggcataaaaaaaggaatccaagccttaagtgaaaatggcttagccttcttagcactatctctccatgcctctaatcaagagctacggagtacaataatgcctaaggctgcaaaatgggatcttaaagaacttatagacacactaaaaaattattccctaaaaaaaagagaaaaaattacatttgaatatttactattaggaggaattaatgactctcctgaacatgcaaaagaacttgctaaacttattactgatataaaaggaaaactcaaccttattccttataatcctgcgcaaggacagccttacttaaagccaacagaagaaaacattctcaaatttcaaaaagtattatggtctaagggaattgttacgatcctccgtaaaagtaaaggacaagacattaatgcagcttgcggtcaactaaaaacaacttatctctctcagtcttctagcactatttattaa

SEQ ID NO: 9581 - DNA, 1320 bp, Lawsonia intracellularis
gtgaatagttttgatgtgttttcaaaagggtatacctttttgtggcgtcttgctagaccatttttgcaacaacataaacggttacatgaaaatttttctcaacgtctagttcctactaattgggcagagcctgcaactatttggattcaatcttcctcaggaggagaagcctacttagtacgttcattacttgaacatttaccaatacaggattccactctacatattcttcttacaacttggactccccaaggccgtattattttagaagaaacaaaaagtattttagaatcttctcgatcagatctttctattcaagttcaatatgttccattagatgaacctgcacttatggaaaaagcgttaatacaagtctctccacagttagtagtattaatagaagcagaaatatggcctgggctactttttgcctgtaataaaagaaatattccagtcttagttcttaatggacgtgtaagagaaaaaagtttgagaggttatgactggtttagttggtttttcccagaattttggagagctatagcacctaagtatgtagcggctatttcttctgcagatgcagcacggtttactgctctttttggtgaatattgtgtaggagtggtaccaaatattaagtttgatagagcaatttgtacattatctcaaagcgattcctcaaaaaatgtattgactgaaattttacctgataaacctattatattgttagcttcagttagggaagaagaagaggcattgttagttcctgttattaaaaaactatattctcgtcatggaaaagatacttgtattatagttgcaccacggcatgaatctagagtaaaagagtggataaaaaaattaaattttgttggaataaccactcagctaaggtctgttttaacaccatataaagaagaactatatcaaactagtataccagttataatttgggatacatttggagagttagataagctatataatttagctcaagcagtatttgttggtggaagcttagtaccccttggaggacaaaattttcttgaaccattaagtgttggaaaaattccatgtgttggtaagtacttagataatttttcatgggtttttgagccattaaatgtagaacatgaagatttttctttttttattagaatttgtcatactccgtttgaattaatagaacagttagaacgtcagttacaacatcctgaaccaaaagaggagattatatcacgttttaatacttggcttgagagcagaaagggaggggcagataaatgtgcatctcttataatatctatgttagagcaataa

SEQ ID NO: 9582 - DNA, 909 bp, Lawsonia intracellularis
atgaatatactcttattggcaggaggttggtcttccgagcgtgaagtatcccttcagagtgcagaattgataacttctgctatgatagaatatggacatacagttacttgtcttgatccactatatgattttgataaaattgtagaagtggctgaaaagcaagatgttgcatttattttactacatggttcaccaggagaagatggaatattacaagctttattagaaagagtgggctgtccctaccaaggggcaagtccagcaggttcactgcttgcactacataaagctgcagctaaagctcttttccgtagagaagggcttcttacacccaaaagtgtctttctgcctttaaagccagaagtaacttgggaacctgggttaaattatccaatttttgttaaatctaatattggtggctcaagtgtaaatgtacatctggtaactaattatgaagagctatttattgctatggaagcattgtttaatgcaggtgaggaagtcttattagaagaagctattataggacaagaggtaacttgtggtgttattgatgatcaagcattacctcctattttaatacgtagtcagggtaaattttttgattattataataagtatgctaagaatggtgcagaggaaatttgtcctgcgcctcttgagcctcatgtattaaaacatatccaagagtatgcccttagagctcataatacattaaatttacagggatgtagtcgggcagactttattcttagagacgatgagttgttatttcttttggaagttaatacaatcccaggaatgtctgctacaagtcttgtcccaagagaggcagcagctatggggctcactttcccagagttagttgaaaagttgattcagcttgcaatcagagatcataggaaataa

SEQ ID NO: 9583 - DNA, 642 bp, Lawsonia intracellularis
ttgtgtcaaactgttgaaaatctaaaatatatgataaactctaatgtcatacctacgctttactatgatatagactcaaattttgttccaagtgataaagactgtataacattatgggataaatatggtgtatttgataatatcagacaacatagtgtagtagttgcaaattttgcagaagcattagccaagcaagctgtaaaggttggctatacaaactatataaaaagttgtagagctggagggcttcttcatgatattgcaaaaagttatacagtgcactatggaggtagtcatgctcagctaggagcttcatgggtaatatcttctacaggaaactataggcttggccaagttgttttaaatcatgtagagtggaaatggagcttaccaaaatgtttaatacatccattatttattgttatgtattcagataagagagtgcaacataatattcctgtatctcttgaaaatcgttacacagacttaatacttcgttatggtaaaacagaagattcccgtaaagctatttatagaagttgggaacatcttaaaaatatagaacgcgttctttcaacgcagttggagttacctctatatgaatatactcttattggcaggaggttggtcttccgagcgtga

SEQ ID NO: 9584 - DNA, 453 bp, Lawsonia intracellularis
atgaaaatcagacaatataaatctattgatttagaacaaataacacgattgttttatgaaacagtccatgctgtgaatataaaagattatactgagcaacaattaaatgtatgggcaacagggaatattaattttaagaaatgggatacttcatttctgaaacatcttacttatgctgcaattgaaaaagatttgattataggttttggagacattgatgaaacaggatatttagacagattatttgttcataaagattttcaaggtagaggtgtagcaacagcactatgcaatcggctggaaaacgaagttggaacaaaatgtatcattgtttatgcttcaattacggctaagtccttctttgaaaattggggatataagataattagacttcaagaagttgaaaagcaaggggtttttttcaaaaattacataatgagaaaagaattataa

SEQ ID NO: 9585 - DNA, 1125 bp, Lawsonia intracellularis
atggttcatcgtgattattatgaagtactaggtgtctctcgtaatgcttctcaagaagagattaaaaaagcctatagaaaattagccctacaaaatcatccagatcataatccaaacaatccagaagcagagcaacgctttaaggaggctgcagaagtttatgaagtgctgcgtgatcctgaacagcgtgcaagatatgatcagtttggagctgcaggcttaggtggaagctttagtggcttttcttctgcagaggatattttttctcattttggtgatatatttggtgatttttttggtttttcgatgggtggaagccgtagaaaaaatacacctagagcaacagcaggttctgatttattgtataaacttacagtgtcttttgagcaagctgtaaaaggttctgacatttctataactatcccaaaagatgtttcttgtgaggattgtggaggttcaggtgctgcaccaggaactttaccagaaacttgtaaggaatgtaatggttctgggcaggtccgtaattctcaaggattttttcagtttattattccttgtccagtttgtcatggtgaaggatctaccatcccccatttgtgtcctcgatgtaaagggaaaggggttacacaacagtctaaagaactaactgtacatatccctgcagggatagctagtggaacacgtttgaggttacgtggagagggagagcctggtacacatggtggaccatctggagatttacatattgcagttactgtcgaagatagcaaaatttatcaacggcaaggacaagatcttttttactattgtgatatttcttttccacaggcctcactaggttgtacattaagtattcctggtctagatgatgaaacattagaattaaaagtgcctaaaggaactcagagtggttctgtgttacgcattccaaataagggactcccttatgtggggcagaaacgtcatggtgatttacttgtaaagatatctgttgttactccaacaaagttaacagagagacaacaagaacttttaatggaatttcaggcaattacagaaggtcgtccaatagaaaaagtgaaaaaagttgcaaggaaacttggtcaagccataggtatgaaatag

SEQ ID NO: 9586 - DNA, 1536 bp, Lawsonia intracellularis
ttgtataaggagacctttatggaagtacgttttcagattggagtatctagctggtcaacagatgctattattatacctttttttgaagatgaaatttttaaagaggcttatgctgaattacttaatgtacttccatggttagaagttgctccagcattagaagatgtaaaagggaaaaaaggagaggtggtagtggtatatggtccactttcaacaactatcccaagagttgttatcgtaggacttggaaagcgtaaaaaaattaccccaattaaacttcttgagaacttaaggaatactattggtaaagcaagtagttattgtagggagttaggattaaagaatttttctattcttgtaagatcatttgaacgctttgattataatcttgaaagaataattgaagaagtcatttgtgctattggactagcactatatagatttgttgactgtaaatctcaagaggatcttaaagagcttccagaggacccacaatggattggggtactttttcgtgatactgttgctgatgaaactatttgtaatgctgccagaagaggtgaagttcatgcaactgccgttaatttagcacgtactcttgataatactcctgctaatataatgacacctatccagatgtctaaaaagtctattgagattgctaaaaaatataatatgaagtgtgaagtaatggatcgagcaagtattatttctgcgggtatgggtgcttttgcatctgtggctgaaggctcttcccaggaacctcagtttattattttggagtatgcaccattagggcatgaaaatgatgatcctcttgtttttgtgggtaaaggtataacttttgacacaggtggtatttctattaagccttcagctaaaatggaagaaatgaagtgtgatatgtctggtgctggtgctatacttggattatttgaggcattgggtcaacttaaaccacaagttaaagttatagggctacttgcatgcgcagaaaacatgcctgatggaaaagctactcgtcctggcgatgtagttgtcacattaagccataagactgttgagattgttaatacagatgctgaaggaagattagtattatgtgatgctatgacatatgcacaaaaacattggactccagctgttcttattgatattgcaacactaacaggtgcatgtgttgtggctcttggagacgatatcgcaggggttttttgtgatgagatagagcttgtaaataaaattcgtaatattggtgagttagttggagaatcgtattggtctttacctcttgatgatagattttttgaaagtcttaagagtgactttgccgattttaaaaatgttggaggtagagaaggaggagcttcaactgctgcagtatttttaaagcaatttgtaaaagaagatacaaagtgggcacatttagatattgctggccctagctttacttctaaaaaaaaggatctatgtcctactggtggaacaggtttttctgttagaacacttattgaatttgttatggactatagctaa

SEQ ID NO: 9587 - DNA, 1398 bp, Lawsonia intracellularis
atgtcagcacgtatacttattatagatgatgaagactctattagattttcattgaaaggaatttttgaagatgagggccatgaagttttagaaagagcttcagcagaagaaggacttaagtgtgttgatgtagagtctccagatcttgtttttcttgatatttggcttcctgggatggatggtcttatggctttagaccatattcaggctcttcatcaggaattacctgttattatgatttcaggtcatgccacaattgaaactgctgtaacagctatccgtcaaggtgcttatgattttattgaaaagcctctttctttggaaaaagtccttattacagctaatagagctatagaaacagtaagattaagaagggaaaacaaattactacgtactgtattacctgaggagagtgagtttataggacagtctcctgttatcttaaaatttaaaagtttattatcacaggtcgctccaacagatgcttgggtactacttacaggagagaatggtacaggtaaagagttagctgcacaagcattgcacaaaggaagctcacgatatcaaaaaccatttatagctgttaattgtgctgctatccctgaagaattgattgaaagcgaactatttggtcatgaaaaaggggcctttactggtgccgatgcttctcgtgcaggtcgttttgagttggcacataaaggaacattatttcttgatgaaataggagatatgagtttaaaaacacaagcaaaaattttgcgtattttgcaagaacaatgttttgaaaaaattggtagtgttagaactattaaagttgatgtaagagttattgcagcaacaaataagaatcttgaagacgctattagcgatggaacatttcgtcaagatttgtattatcgcttacgagttgttccattgcatcttccccctcttcgtgaacgtgattctgatattgagctattattaaataggtttgtgattcagttgagtaaacgttatagacgtgagccgcctatttttttagatgaggtcttccctgtattgaaacaatattgttggccagggaatgtaagagaattacttaattttgtagaacgaatggttattctttattcagggaagaaagtatgtttgacagatctacctcaggaaatgcatactaaaagaagtattgatcctagtaaaaagcaatttaatatttctcaagaaatttcttccattataacttcttcagatatagattttaaacaggctaaaatagcttttgaaacaaaatttttaactgaaaaattacatgcttatcaaggaaatattacccgattagcagaagctattggacttgaaagaagttatttatatagaaagctaaaaagctatggtatttatctgtctgagtga

SEQ ID NO: 9588 - DNA, 1806 bp, Lawsonia intracellularis
atgcaaaaagtatgttatttttttcttataacctttttctactttttcataacagaaaattatctctttgctacatcaattaccacttccacaattaaccaacaacatatagcatatacagttacttttacctctccagaaaatcctaatcttgcaacagagatggaaacacatagtgaattagtaaagcttgcaaatcaatctttagatagtaaaataggtttaaatttacgtgttaaagaagatataagtacagcacaaaaaattcttgactcgaatggttattatagtggaagtgtcgagggaaagattgactggcagacgaaccctattagtatccaaatccaatttaaaccaaatgtacaatataaaataaatacaatacatatccaataccttgatagtgaacttgcatatctccctctttccttagaagaattcaatctctctaaaggtaatcctgctcttgctgttaatatcctatcctctgtaagtagcctcatgcaatatatacataataatggatatccattagccaaaataaaaaaaactcaatacataattaatcggatggattatacatttgatattgatttagtaataagacaaggaccgttactccatatgggtaaagtacaacctcaacataatctcaatatttcaacaatattcctaaataaaattgctacatggaaggaaggaagggtatggaacaatgcactccttgattcttatcgaacacggcttcaacaaacaggccttttcagttctataactctcaatccaaggaatcaaaaagaacaaaatggtaacacctctatagaacttgttgcaacagaagcccctccaaggactattagtggtggcttacaatactcttctgatcaaggtattggtgcacgtgggacttgggaacatcgaaatgtttttggtaatggagaactttttcgtataacagcaccaataagtcgagatgatcaaaaaattatggcaaacttccaaaaaccagcctttggccgtccaaatcaatcattaattagtgaagcacaacttaaaaaagaaaatacaaaaagttacaaacaacaacttgcatctattgctttaggaattgaacgacaatttaatagacgttggtttggtagtagcagtctttcagttgatacaggatttatggatgatcgagattctataaaaaaaatatttactctttttggcatccccttatcaataacaagggatagttctaaagatcctcttaatcctatccaaggaacaaaagctaccttaaatgttactccttatattggtaaatataaaaaaaagattttgactttacgtagtcggtttgattttagcttttacatagacgttcttaaaacagggaaacttatcttggctaacaaaatagcaataggttccctcctagggaaagatatagaaaactatcctgcaatactaaggttttatgctgggggtggtggtagtgtaagagggtatgactatcaatcattgggaccaaaaaataaatatggggatgctattggaggactttctttttcaactattagttttgagttacgattaaaaataacagaatccattggcattgtgccatttattgatggaggaaatatttacgaaaaaaaatttcctgactttaaaaaatcaatatattggggggtaggccttgggctacgatattatacaagttttgcccccatacgtttagatatagcaactccacttcaagatagaagccataataaacactttcaactttatattagtattgggcaagcattctaa

SEQ ID NO: 9589 - DNA, 4149 bp, Lawsonia intracellularis
atgaataacacaaaaatactttctaagttactctataccctcttaggagcatttacgttatttttaggacttattattacaggcattctttttatacggacctctacaggcattgcttggattaaaaatacagtttcttctttacttcaacaacaaggaattatactacaagtatcttcaattattggaccattcccagaacaaattactattaatgaacttagccttagtgatgtgaatggaacttaccttacaatatctaacttagaaatccaatcaaacttatgggctttattcaaaggtcaacttgaaattctgtcttttgaacttaatgatcttgtattatatcgcttaccctcaaataataatctaaaaaaatcatctacaagttttgtgttacctcacatatcatttgatttaactccatggtggactgaacatattcgtattcaaaacatccatattaacaatacacaactttcctctgatattataggtattccattggtattatcccttgagggtgatggtacattaacaaattggaatggaacatttcaactatcctcttctaacaaaacaaaaattataggaacgcttcgttaccaagggaataagacacaattttttgaatatgttcatcctacacggatagtaacactagagatagacagcgtagctgataaaaagtcatataataatagtatccttgaacaacctctacatttacacctttctatttatcctgaacataatagaattatcttacactcattactagctgaatatggtagctggttacttacatcagaaagtattgaagtatctaatgagcaattaaaaggaaatattttattaaaatataatggagaagctactcatcaacttcctataaaaaaacttaactcatcaattaccctcagtggctcactaaataaacctaattttagtatacaaatgacattacctgaaattaacattacaaaaaacataatagatcttcaaacagaacttgttattaatctaggacttttctctactcactctgatattcttacatctgggacaattacagtacagggagaaactatacccaatagtattctttccagtgcagttgatataatagcctctacaacaacacatacaattaccttagagcatgcaaccttaacatctccagaaatgcatttttccctatctggagaatttaatagtcttctaggaaatatcgatgcaaacctaaaaggtaatactccaactcttagtatattttcttctcttcttggactacctgatcttactgggcaaagtaacattactataggattacaccgtcaagggtcttcctcttcaatagaaggaacagcaactgtctcacttaataatatgaactggggagtacaagcattacaggggacattaggtgataatgcaactctaagtggaatatataatttaactcccatagactggtctatttctttaaacaaattgaaattaacagcaaagaatgtttatgctgaaggccttattaattttcaaaaaaaatacatagatagctctataaatcttataattcctaaccttcagctaatagctcctcctatatctggagagttacaatccttaattacagtgtctggaaaacttgacgcaccttctatagaaagcaaaattttttcatcacaactcacctggaatgcgctccaacttaataatcctcaactcataataactactactcaatcttcttcctctgcgattaaaggtaatataacactctcggctgagccagcttcatctgaggcattaaccttttcaagtaattggggaatcctacctacggaaatactagtagaaaaaattataggaaatatattaggagtaaatcttgatggtaatattaaaataacaaaaaaagattaccttataaatggtgatattattgcagaagttcagtcttggaaagatattgcaaacatattgcaaatacctattagaggttcagcatcaataaaaatacagtttgatccaaagaatcaacaatgtatttctactcaatggcaattaaaaaatttcatattaggtaataattttaatgtaactactataaaaggaagagcagatacaatacaacttcataagaatcctacaattgctctctcttcaaaaattggtgctggtacatatgaagactttcaatggacacaagggacgttagacataaaaggcacattaaaaaattttaatagtaaaataaatatagcaggacaaacaactgtaaacgcaaactttcaaacaaatctttttgaaaaaaatattaatataactactcttaatttaaaaaatattcaaaaaaatataggaattaagctccttcagccaataaaaattatagtctcacctcaacaatttgttcttaataactgttcactagcaattcttccatctggaacaattacaactgatatatatgttactcctcaacgacttaatgctaatgcaatcattaaagaagtttcacttctctctttccaaccatttagtatacttcttcctcaaggaaatataaatggacacataacacttacaggaatacctagtaaacctaaaggaacactctcatttgatattctaaacatacattatccaaggccaaatccatcaatagcaaacttacatgtagaaggggaaattatatcttctcctaacaatatatgtaaacttaatgcaaccctaacagaaaaaaaagagcctatacctatatcaatacaagcaacactcccttttgagttcacagaaaacaatatccctatgctatctaaaatgaggcctttttctgcccatatcaagtggactggaatattagatacactttggaaactcattccacttactgattacattatggctgggaatggatctttagatgcttctctttctgggactttagatagtccaacatatgcaattataacaacactttctaatgctaactttcaagatctctcccttggtctttacttagaaaatatcaatgctaaattacaggtcttttctaatagaatctcccatattcaagctacagcatctgatggtaaacaaggtagtatacaacttattggtaatattggctcatctaaagaacactttcctttgtctattaatggctcctttacaaaccttgctccattacaacgtaaagacctaagtcttacactttcaggagcagctactcttgaaggaacattaaaacagtctgaagttaaaggcgatattgttattaaccaaggcgaatttcaacttactgaagggttaaccagtaatattccaactcttaatgtagttgatagcactcaacaacaaaatacaaagaccaaaaaagctacctatcaacaacctaccttatctattgcgttaagtatcccgaatcgtttttttgtccgtagtagtatgtttgaaagtgagtggggagggaacctaactattaacaaagtcataacaagtcctgttattacaggagcactaacttctataagaggaaattttaatttactaggaaaacaattttctcttgctaaaagtacaatatcattttcaggatcagttccaccaaacccactactcaatatttctttaacatattcatcaccttctattacagctataggcattattaaaggtacaactagtaatcctaatattactttttcaagtacaccacctttacctcaagatgaaatagtttcccaagttctttttggtaaaagctcacaaagtcttagcaggatacaagccatacaacttgctcaagaattagcaaacttaacaggatttaatactggaagtatgaatttcctaacaaatattcgacagacattagggttagatatacttagcttagggacaacttctaatagaaaagccaatacatccaactcaaacgatcaaatagaagatatccctgttatagaactaggtaaatatattacagacactgtttatgttggtgttgaacaaagttatttagatagtaatgatactggggcaagaatatcagttgaacttgcacctaattttaatcttgaaggtagaacagggactcaatatagtgagataggtattaattggaaaaaagattattaa

SEQ ID NO: 9590 - DNA, 519 bp, Lawsonia intracellularis
atgaatggcattttaaaaaaatattttattatgtttgttatggtaggattaatatgtattaatactacattagttgacgcaaaaaggctttctccttgtccagggggggataataatggaaaaagtggtagtggtgtttatcaatatttaacacctgagatgcaaactaaatgtgataccattgttaaagagtttgctaaaaagacccaggaattaagagaaaagattttagcaaaacgtctagagttgcaagctatggcacaaagtagcaaacctgatcgttcagtgattcaagagctctctcgtgaaattgctaaaatgcatacagaattatcatctgaatatgaaaaaatgtatgagaagttatctagtgaagtaggcattcgtggccactatatttatggtagcgggttgatgcatcgtcatggtatgggatactatggtatgggtggatataataatatggaacctgattctggagctccaatgactccattgaaaagtggaagagggaaataa

SEQ ID NO: 9591 - DNA, 489 bp, Lawsonia intracellularis
atggaagtatttagacgttatggcatagttctggttctgttagtagtattaagtgcaggttttggttgttgtaaaaagagtgttgatgtagaacaatctttagcaacggagtgtattgctccagcaccagcaattaatgcagctgcagaaactataactgatgggattatttattttgattttgataaatatgatattaaacctgaatatcgtgatatgttgcagaagaaagctgaacttttaaaagaatatccttgtattcgtgtccgtatagaaggtaattgtgacgctcgtggtactcaagagtataatttagcacttggagagcgtcgtgcacgtgcagcatatgaatatttagtcatgcttggagtaaatccatctcagcttgagataataagttttgggaaagagcgtccagctgttgaaggaacagggccagctgtatgggcaaaaaatcgtcgtgatgattttcgtattattgccaagtaa

SEQ ID NO: 9592 - DNA, 1359 bp, Lawsonia intracellularis
ttggtgtttattattatgagtagaggtaacacttacagatcattaggaatattgataattttattattagtatgcttatgtcatccagccttatcagctatgcagatagatatttatggtcctggtcaaaatattgtacatgtagctatggctagaccaattatctccccaggagtccttgcaacagatcttggcattgatcttgatagagctattcgtaataatctaagttatcttccatttatgaggcttactgatgaaaaggcaattttaaatggaagttcgctagagggttatcagccgccaaatatagattttaaacgttttcaattggcaggttccgatttacttataactgttggttggccaaagggagatcattctgactctagtgttgaattaagattatatgaaacatattctggcaagtttgtttttggtacagcatatagtggtgttgttaaaagtgaaatttctaatatagcagataagttttgcgcagatcttatgaagactttaaccggtagtggggatttttttctttctacattagcctttgtgaaacaaggtaatgggaagaatgtaagagatgtgtggctagttaaaccaacagggaaagaattacgtcagataacagatatttcaggaacggcaatgtcaccttcatggtctatagatggaaggtttattgtctttacacatttagacgatcgatcacatgctctaggtgtttgggataggttaacaaataaaatccagagaattcgtttccctgggaatacggttataggacctgtgtttatgccagacaataaagtagcagttagcctttctactggtaagtatccagatatttttttattggatcatacttttcaaaaagagaaagtgctagaggaaagccctgctataaatgtttctccatcatttgatgctaaaggaacaaaaatggcattttgttctaataggctaagtaatccacaaatttttatgaaagatttttcttcaggacaagttagtcgtgttagccgtcaaggttgttataatacagagcctactatgagtcctgatgggacactcatcgcattttctcgattgacagatgatggtaatcgtatttttgtacaagatttgctgacaggaattgagagacaagttacttttggccctggtaatgatgagcaaccatcttttgctcctgatagctattttattgcttttacatcaacacgtagtggtaaaaagcagatttatttgataacacgtcatggtggagatgcaaagcaaatccctacaggacatggcgatgcatcgttcccacgttgggggaaaataacagttgcaaataaagctagatag

SEQ ID NO: 9593 - DNA, 954 bp, Lawsonia intracellularis
atgcgatttattagttatatcgcatcactcattctacatattgggttgatcttaattatagttttttggcctactaagactattgtaagacctgagcgtccaattcagattagcttaactatggagtctataggaggtggtagactaccctctcctgtattaggacagcagatccctgttcctactaaaacttcaacagttacaccttctatcccaatagaaaatattccagttctaaagaatccttctgttcagactagttctgattttgtacctcttagacaagaaacaataggtggtcatgagtctcaaaaccaacttcaaccaattgcagttcctgtaagggaagagatagcagttaatgaaaggatagagcaaaaaattcctacagaaaaaattttagatactccaaaggcaaaacaagaattagctaaaaaagttgaaaaaatgcaaccaaaaggagaaccagctaaaaaaatagtaaagaagacagaaccaataggagggagtgcttctttaaaagatgcattattagatgcaaagaaaaagacaaatattcaaaaatcacaaaaagtttctcctaatacttctgtaactaatgcgttagctgggtttaaaaaacaaacttctacagtcggtggtggaggtggagtaagtgatggtaatggtggaggtggtggattacatgatatttatgctggattagtaatgatgtctgttcgaccaaactggagtatcccaacgtattctcgtgataatttagttgcactagtccatgtacgtattgatgcagatggtaatgttctttcctgtgtaattgagcgtagttctggtagatcagattttgatgcttctgctgtaaatgcggtaattaggacaaaaatattaccaccaccaccaacacctgcacagcaagatatgattattgtttttaactcgctagaagttcagtaa

SEQ ID NO: 9594 - DNA, 435 bp, Lawsonia intracellularis
atgggggcatctttaggggggaaaagtagttttgtttctgagattaatgtgacgccatttgtagacgttatgttagttttacttatcatttttatggtgacagcacctatgatgactgaaggattagaagtagatcttcctcaaactagagctgtagaaacactaccactagagtcagaaaatcttattttaaccatccgtagagatggtaacatgtaccttgatacctatcctgtttctatggatgaactccaagaaaaattagatcttttagtgaggtctcaaaataaagagcttttgttacaggcggataaagaaataccttatggcgttgttgtagaggtaatggggagagttcgtgaggcaggtattgataaacttggtatgattgcgactagggaagagattggctctggggtaacctctaaaaagtaa

SEQ ID NO: 9595 - DNA, 678 bp, Lawsonia intracellularis
gtgaatagaatggatttgagtataatttctttaattgctcaagcaacagttgttggtcaggttgtgctactaattcttttgctcatgagtgtactaagttgggcaatgatgttccagaagtggatagctattaggttagccatgaaaaaaacagtgttaggtagtgagcgttttcatgatgctagagaattacgaaatgctgtgcactcaattggaagagacatggtttcaccgttgtatgtcgttgcacatgaaggagtgacagaatttaatcgttcaaaagaggctgggaactctgaggaggttattgtagaaaatgtccgtcgagcactacgtcagggagtaagtacagaaatgacacgattatctagctctctttctttccttgcaacaacagcaaatacagctccttttataggactttttggaacaatttggggtataatgcatactttccattctataggtgctatgaagtcagcttctcttgctactgttgcacctggtatttctgaagcactaatagctactgcctttgggcttgctgtagctattcctgcaactgttggttacaatatttttgttgggaaattaggggatcttgaatctaaattagttaattttgcaggaatgtttcttaatcgtgtccatcgtgagcttaatgcaaataagacataa

SEQ ID NO: 9596 - DNA, 576 bp, Lawsonia intracellularis
atgaaatctttaaagggcactagaacagaaaaaaatatccttactgcttttgctggtgaatcccaagcaagaaatcgatatgactacttttgtgtaactgcacgagaagaaggtttaatgcaaatatctgaaatatttgctgagactgcacttcaagagaaagctcatgctaaacgcctttttaaatttcttgaaggtggtgaagtagaaattcaagctgcatatcctgctggagttatttctactacagaaaataatctcctggctgcagcacatggggaacattatgaatcaacagaaatgtatcctcaatttgctcaaattgctgatcaagaaggtttttgtgaaattgcatgtgttatgcgtaacatagcagaagctgaagcataccatgaaaaacgttatcttgcctttgcaaaaaacctaaaagaaggtaaagtgtttgaacgtgaagttgctatttcctggcgttgtttaaaatgcggctatattcatcatgggaaaaatgcgccagaagtttgcccagcttgtggacatccaaaagcatactttgaagtcttacataacccatggtaa

SEQ ID NO: 9597 - DNA, 204 bp, Lawsonia intracellularis
atgtcagaaagtccaatcatgacagagccaaaagaaatgtggcattgtcaaataacaaactgtggatatatctataatcctgaaagaggagataaaagagctaaaattccaccaggaacggaatttgaatcgctacctgataattggcattgtcctgtttgtggtgcttctaaaaaaagttttaagccactaacagatagttaa

SEQ ID NO: 9598 - DNA, 1029 bp, Lawsonia intracellularis
atgaaaaatattgctgtatggaatactgcttttcttggagacacagtacttactcttcctcttatccaaactcttgcaaaaacttacccagaagcctctattgatttctatgttcgtaaaggtaatggctctcttttctcttcacatccaaatattaaaaatattattgaatataataaaaaacaacaattcataaaaagtacaataaaacttatccaacatataaaaaaacaaaactatgatctttggattaatgcacatacaagtattcgctcttctattattacactatgttcaaatgctaaactacgtataggttattctgaaaatatcatccaaccattatgttgtacacagctcattaaacgtaaacttggttctcttgatgagatagagcgtcttttagatcttctctcaaatttgcctataaaaaaatcaaatatccaatactggcctaatattgtcttaacccaagacgcacagcaacaagcaaataccttctggaggaaatatattttaggtcctgttttaggaattaatcctggttcagtatggcctacaaaacgttggttaccagaacgatttgcagctattttacatagagctataaaaaaaaatattcatgtactgctctttggaggaccaggagaggaacagcttgcaagtgaaattatttcattatctggtatgactggacaccccttactccataatctttgtggaacactcacgttacaagaattagctgcatttataaaaaaattgaattgctaccttactaatgattctggccccatgcatattgcatggagccaacatacgcctgttactgctatttttggccctaccgtaaaatgcctaggattttctcccagaggtgagcattcaactgtaatagaaatatctctttattgtcgaccctgtagtctacatggaggaaaaacttgtcctgaaaaacactttaggtgtatgaaagatattactattgatgtcgtatgggaaaacatagaaaaaaaactcttcctataa

SEQ ID NO: 9599 - DNA, 1011 bp, Lawsonia intracellularis
atggcaacctttttcttctttcctcctcttccttctattacagggggtatgtatgttatacttactattgcaaaacatttacatacaattggccataaaagtacattagtctttcgtgagtactcaccttatattgatagcattacacctcaaatccctactacacactgggacaaacttacacttagcaaagatgatgtttgggttgttcctgaaggttggccaatggctcttatcccaggactacgttctcaaagtcgttgtgttgtctatgtacaaaactgggcatatttacatgggaaacttccagacaatgcttcatgggaacaacttcctgtgacaatgatcgctgtttcaaatcctgtagctttctttataaaagaaacaacaggaataaatgctcatatattacgccctgggattaaccttaatatatttcatgtaccaacttgtaagtcttttaaatctcaaaacagacctatacgaattgcttggatgcctagaaaaaataaagcacttgcacatcaaatacaacaaagtattaaagcaaaactttctagttgtaactcatcaacttctttagagtggatagaaattcataaaaaaacaccagaagaagtttctgcctgccttaaaacttctgatatctttcttgctacaggatttcctgaaggatgcccattgcctccattagaagcactagcatgtggatgtcttgtagtaggatttggaggatttggaggatgggattatatgcgtcaagcactacctaatggttatacaccttggtggcccttagaaaatcttccatggggaggaaatggactatatgtagctgatgctgatatattaggaactatttttgccttagaatacgctatagatttactacactctcataatgaagaacttaactctatatatttgcaagctgaaaaaacagttaaagaatattcccttaataatcactataatgctgtctcaaatctttgggaacagcattttatataa

SEQ ID NO: 9600 - DNA, 588 bp, Lawsonia intracellularis
atggaggagattatgagtagccaaaatcagcttgattatgaaattaacaaagagttaggtgaatgctatttgtttatgggtgattttgataaggctgaagattattataaaaaagctaatacttctatggaaacacagcctgaaccttatatgggtcttgctactatagctatacaacgtggagactttgatacagcaatggacttttataataaggcttttgattttggtcttcaagataaagcattagctggtatgggtcttattaagatggaattaggcgaagatgaagaagccttttcttattttgaaaaagcagcacatgctaatcctgcaaatgcagtagcacttaattgccttgtccgtgaaggctataaattaaatcgccttgagtcagttgtttcagttcttgaagagtgtgtaaatattttcccagatagagaggagcttcgtatttctcttgctggatgtttaatttctttaggtcgtaataaagaagctataaaacaaattgaaacagtccttgaatataacccatctagtattgttgctagagaatttttcaatcatattatgttggcagcatag

SEQ ID NO: 9601 - DNA, 1866 bp, Lawsonia intracellularis
atggagagacctcatccatcatctattccaacaactcctggtgtttatttatacaaagattcacaaggtcggattatttatgtaggtaaagccagaaacttaagaaagagagtattatcttattttcgtgatgggttagtgataacgcctaaaacaaaggcaatgatgaatcatgctaatttattggaaacaatatctactaatacagagaaagaagcattattacttgaagctagcctgataaaaaaacatcgtccacgctataatattgtattacgtgatgataagcagtatttactatttcgaattcaaaaaggaattcctttccctagacttgaaattgtaaggcaatcttataaagataatgctgtttactttggtccatttacatctggtacatctgtccgtgatacatggaaatttatccataaaatttttcctcttcgtcgatgttcagataaagtttttaataatcgtatacgtccatgtctttatttttatttacaacaatgtcttgctccatgcacagaagaagtagaccctaaagactatgctgtattgatacaaaaagtagagttatttttatctgggaaatccaaagaacttgtagagttattacagaaagatatgttgtatgcttctgaagcattagagtttgaaaaggcagcaaccttaagagatcaaatccaagctattaagcatactatagagagacaaagtgttgttctccctgagggaggtgatatggatgttattggaattgcggtagttaataatgggttagctcttggttttttgtttgttcgagaaggaaaactgttagatggaaggacatttttttggccaggtcttgaacttgatgatggtcctgagcttttaggaagttttttaagtcaattttatagtcctatatcttcaatccctccaagaattattgtcccatggcttcctgaatcaacaaataataaagacgaaataagtgaagatacctttgaaacattaaaatatgtattagaagatatacgtaatagtacagttcgtattgaggttcctaaaaatataattgaaagtaatttggtagatattgcagtaactaatgctcgtgaagctgtacagacaaaattaggggagcctatgtcagctaaattagcaaaagtttttcatactgataaacccatttttcgaatagaatgtgttgatgtatcacatataagtgggacaaatactcgtgtaggaatggttgtttttgaagattctcaacctcttaaaaatgattatagaatatatagtacaacagaagataatagtccttttattaaaggagatgattatgctgctcttgcatcatgggcaaaacgaagaatacagtcaggccctccttgggcagatttagttcttattgatggaggaaagggtcaaataaatgccgtacaacgtgtttttaatgagcatcatcttaaagacgtatttatattagcaggaatagctaaagcaaggaatgaagaaggtagagtagatcgtcgtgcagggaatattggagataaaatttttgtcgtaggaagaatgaatcctctgaccttaaaagaaggatctccagagttattatttttgcaatatgtgagagatacagcacataattttgtacttggcaaacatagaaaagctagaaaaaatacagctctgttaggtgagttattacgtatccctggtataggacaagccacagcaaaacttttgtggagtcattttaagactgttgaagcaatgacatgtgctaccataaaggatttagaagctattcctgggattggtgaagcaaaagctcgtatgttggcagagagattgcagtcattacgtaaccagtga

SEQ ID NO: 9602 - DNA, 696 bp, Lawsonia intracellularis
atgactcaacaaagagtatcaagtgtttttatagaaaccgtaccaatagtattagcatcagcctctccaagacgtagaagtttgcttgagcaattaggtcttttatttaaaattgttagtgtagacagtgagcctttaccactttcttctgaacatcctttagagtatgttataagggctgcaaaagtaaaagcttttgctgctgctgcattagaaccacgttcagttatcattgctgcagacacagtagttatatatactaaagatgatgtttttgaaataataggcaaacctcaatcaggcaatgattctttttctatgctttctcgttttcagggaggaaaacatcaagttataacaggttgctgtattgtgtggccattagaagaaaatatcacttctgtgcaatatgaaatattttatgatacagcaagtatccaatttggccaatgggataaagatattttatcttcttatgtaagtacaggtgagtcaaatgataaagcaggagctttttcaatacaaggtataggagcttttttaatagatattattgaaggtaactatactacgatattaggtttacctcttccccagttagtaaaacgtttattaaagaggaaagcaataaaagttgtattgaataaaaatagtgaagagactatatcctctgattttttaacgtattcaagatag

SEQ ID NO: 9603 - DNA, 1080 bp, Lawsonia intracellularis
atgcccatttaccgtaaagttggtgctcgtcttacccaaatgcaggaattattctcccgaaatgataactggctgatcataattaatgctgatcctgatgctattgcatcagctatggctctaaaacgtattatgtcccgtcgaactgggaaagtatttattgcacgtattaatgaaattacccggccagataacctaactatgttgagacagttatatattcctcttgtcccatggagtgaaacactcctcccctttttccaaaaatttgctttagtagactctcaaccacatcatagtcctatattccaagacataccattctctattgttatagatcatcatcctattctacctgaatttccttcaaaagctacatattctgatattcgacctgaatatggtgcgactagtactatctttactgaatacttgcgtagtcttcatattagacctggaagacgtcttgcaacagcgctacaatatggtattcgaacagatactggaacattcactcgtaaatttacagatgctgatatcagagcctatcaatggctagctaaacatgcaagtaatacactgctaatacgtattacccgtagtgaatacttacaagactggttaaagtattttactcgagcctttacttctcttcatgactgtgggaaagggaaatttgccttcttaggaaatattgaaaatcctgatattttagttgttgtaggtgatttttttactaaagtttatgggttaaaatggactgctatttgtggagtctataaagaacaagttgttattgtttttagaggagatgaaagtatagatcttggaaaatttgctagtgaacgtttttcatcattaggctctgcaggtggtcatagggctatggcaagagctgaattcccactgaaacttgttgaaggaaaaaatttagaagtttttatatttcgaaaactttcagaacgtctacattcaaaaaagaaaaactctaagaaagaatcagagaataatgaagaactatcaacaaaagaagaacataaacatccatcagaaccattaaatacaaatcaaactagttaa

SEQ ID NO: 9604 - DNA, 1368 bp, Lawsonia intracellularis
atgctacctagtactattgtagaaattctttgttcgaaaacagcacaagcagatgttcatgttggtggatggatacggacaaggcgtaatgctaaggggtttgtgtttcttgaacttaatgatggttcatgtctaaagaatatacaatgtattataaatgaaggtagtgctgcttgggatatgcttgacggtgttaatacaggagcttgtgtatctgtttatggtaagcttgtaccttctcctggcagaggtcaagactgggaaattcaagtagaaaaaatggttgtacatggtcttgctgctcctgaggtatttcctttacaaaagaaacgtcattctgatgaattcttaagaactattgcacatctacgagttcgtacaaataagtatggcgctatttttagaatccgtgctgaggctgcacaggctatccataattatttttataagaaagggttttattacatccatactccaattcttacaggctctgattgtgaaggagctggtgaaatgtttagagttactacagcacactcaagcaatgattctcaatctagtgataatttttttggtaaggaatgtagtcttacagtctcaggacaacttgaggctgaatgtttagctatgggacttggaaaagtatatacatttggtcctacttttcgtgcagaaaattctaatacacctcgacatgcagcagagttttggatggttgagcctgaaatggcatttgctgatttacaagataatatgaatctagcagaagagttaacctgtgaagttattaggaaagttcttcagtgtcatatagatgacataatgttacttgataaatatgttcaaccaggacttattaaggcgttagagaatattattgccaagccatttatacgttgttcatatcatgatgctattacaatattattatctagccataaagattttgaatttccagttacttttgggttagatcttcaatctgagcatgaaaaatatcttactgaagaatattttaaacatcctgtcattatttttgactatccaaaagaaataaaagcattttacatgcgccaaaatgatgacgaagaaactgttgcagcaatggatttacttgttcctcgtataggcgaactgattggagggagtcaacgtgaggaaagacttgataatcttttgtctcgaattagagaactaggtcaatctatagaagagtattggtggtacctggatttacgacgatttggtactgtcccacatgctggttttggtctagggtttgaaaggttagtgatgcttttaacaggtgtttctaatattcgtgatgtattaccatttcccagaacaccaggttatttagaattttaa

SEQ ID NO: 9605 - DNA, 690 bp, Lawsonia intracellularis
atgttagtagaaagcgaccttgttattcaaaggagagttatggattcatcattgctgggacagtttttttcatttatattacatattgatacacacctttttcccttagtggctgagtatggaatttttttatatgtgattctttttattattgttttttgtgaaacaggactagttattactccctttttgcctggagactctttactgtttgctgcagggacagttgtaggtgcaggttatttatattatccaatacttgttattgtccttttaactgcagcaattatgggtgatgctgtaaattatatgataggtaactatattggtccaaatgtttttagtcgtaacatatggctcttgaataaagatcaacttattaaagcgcataatttttatgaaaagcatggtgggaaagcagttatttttgcacgttttatacctattatccgtaccgttgttccatttgttgctggagttacctatatgaatcctagcaggtttttattttataatattgttggtgcagctatttgggtgataggcttagtctctgcaggataccttttgggtaatatgccattaataaagaaaaattttagtttagttatttatggaataattattgtttctttattacctattattattgagtgggttcggttaggagtgagacggaagagaatataa

SEQ ID NO: 9606 - DNA, 3309 bp, Lawsonia intracellularis
atgagtatattttgtgctgacttacatatacattctcgtttttctagagctaccagtaaaaagcttacagcaccacatttagctgcttggagccgcatcaaaggtatttctgttattgctacaggagatattacacatcctgtgtggagagaagagttacaacaacaacttatattagatgaagcctcagggctttataagcttcctgtttctaaagaagtccttcagagtgaagtcccaggaatagagattccttctgattcaccagatcctttatttttacttcagggtgaaattagctctatttacaaaaaagatggattagtacgtaaggttcataatatgattttcatgcctgactttgatagcatagagaaactatgtcgaaaattagagtcaattgggaatttacgttcagatggtcgtcctattcttggtcttgattgtcgtaatttacttgagattgttttagaagttgacgaaagaggaactgtcgttcctgcccatatttggacaccatggttctctctttttggttcaaagtcaggatttaatagtttggatgagtgttttggtgatcttgcaccacatatttttgctttagaaacaggtctttcttctgatcctgaaatgaatcgtctttggagtcatttagatggttgtgctttaatttctaattctgatgcacattctggggataaaattggtcgagaagccaatttatttgagggactaccatcttatgatggaatttttaatgcactacgtttttctactggaagattcccttctatacctaataatgttcaatataaaggtacagttgaatttttcccagatgaggggaaatattatttagatggccatcgtgcttgtggtgttgttgttgagccaaaagaagccatgcgtatgggaaatatgtgtcctgtttgtgggaatgagcttacaattggagtgttgcatcgaattcttgaattagctgataggacagaagcctatatgccagctactcctccttattatccctttatccctcttgtggagttactaggagagatattgggagttggctcaatgagtaagagagtgcttgataaatatggacaacttattcatcgatttggaacggaatttaatatacttcatgtggtttctgaacgtgatcttcgccaatactggaatgaattaggtgaagctattgtgcgtatgcgtcgtgggcaagttatacgtcaaggtggttatgatggagagtatggcattatccgagtctttagtgatgcagaaagagcttcatttctacctggaaaaatgttttctagaagctcaaagcctcgagtaacaacacaagaaaaatcaaaaacaataaagaatttatcacccaaatatatgactatgcctttgttagcagctacaggcgttcttttggagggagagaaagaaacgtcttccccaaaatcttctagtgtaacggcggctagctatggtgatatttttttaactaaaaaagatcatgataaaaagataataactactactagttcttcttctaacttttcttattcaacttctcaaaatgaagctataaaggctgatatccaacctatattagttcttgctggaccaggtgcaggtaaaacaaggacattaataggaaggatagaacatttgctattcagtgggataaaacccagtgaaattttggctgttacatttagccgtagagctgcagaggagctacaagaacgtatacgaaattctatagggaagggaacaattagagtcgatacacttcatgctttagctcttggatactggcccaaaaaagaagatggcagtcagccacatgtcctttctgaggaggcttcacaggctgtatttattaaagctaacgaagagaatgaaccaaagttaatcaaaaaagcttgggagattttaaatctagtacgtgaaaagcaagttgatacgtcagtattgcctgaacaggcatatcttcctatgcttgaaaaatatagacagtataaaaaaatacgcaatatggttgattatagcgacttattagaacaatggatttctactttgcagaaaagcagaggaacattttggaaggcagtccttgttgatgaaattcaagatctttcttcacttcaacttgcattagtaaaattacttgttccatcatcaggtaaggggttttttggtataggtgatcctgaccagtcaatttatggttttagaggtgctcatcctaatgttcaattagctcttagtaaaatgtggcctggtataaaagttattactcttgcagagaactatcgttctgtaaaagaagttgtttactcagcttcagctcttcttgcttctggtaagcaaagtaaaaaccttacttctactagaaaggataaagggttattacacctttttacagcacctgattattgccgtgaagcttcatgggttgcaagtaaggtatctcaattaattggaggaagttctcatacattggtagatgcacgggctggtaatgaacctcatccattagcaggactatgtagtcctggtgatattgctattcttgtcagaatgaaggcactcatgaagccattccaagagtctttggtaagattaggtgtaccttgttctgttccagaaactgaattattttgggaagatcagcgtgtagctttgttattaggtcttgcaggaagaaaatttggaagaccttttggaatacaaacagttcctgatccttcttctattgcaacacatatttggaatggaggaccttcagcacttctttcatggttagaatctgtcccaccatttgatcctttatttcgtgaatccagtagttttaagaagttgttaaaagcctataaagtacatggttcttgggagagtttattgaattggctttgtttgcgacaagaaattgatttagtaaaaagtcattcagaacaggttcaaattatgacactacatgcgtctaagggacttgaatttaaagttatttttttaccagcattagaggaaggacttttaccatatttaggtacacaacgacttttacaaaaggcagagaaagagtatgaaaatagtgagactattgctgaagaaaaacggttattatatgttgggatgacacgtgccaaagatgcattatttttaagctattcagagcaaagaactatatttggtaatgtgttaaggcttgctccttctagatttttagttaatcttccagatatgtttcagcgtagtcagctgatgaaacatatacaaaaaaaacctagtcaactttctttattttaa

SEQ ID NO: 9607 - DNA, 2391 bp, Lawsonia intracellularis
atgggcgtgttaaataggttatataatatgcagttaaagagacaaggttatacaataaaaggtcgagtacaaggtgtaggttttcgtccttttgtatactgtactgctacaaaattaggccttacaggtaaagtaaaaaatactatatatggagtatggattgaagttcaaggggatgatagtaaattaaatatatttaaagaaatgatcactaatgaaaaaccttctattgctcaatttacgtcaattactatgcaatctcttggttttcaggataaagaaacagagtttcttattgaagaaagctctgatgggatacagtatacttcattaataagtccagatattgctacatgtgagtattgtgttaaggaattgaatacaactactgatcatcgttatcaatatccttttataagttgtacactatgtggtcctcgatatactattatacataaagctccttatgatcgacatcatacttctatgtcctcttttcctttttgttttacctgtgaaaaagaatataataattctttagatagacgattccatgcacaatctaatgcatgtccaacatgtggcccacagttatggttaacagatcatgataatagatatattacttataatagtgaagcaatattgttagctatagagtatatttataaaggtaagattattgctatgaaagggattggtggttttcatcttatttgtgatgctactaatgctgacgtagttaatacattacgctatcggaaaaatcgcccagataaaccattagctgttatggttccaaatataaatattgctcgacaaattgcttatattagtgaagtagaaatccaaaaaatgcaatcaccagagtgtcctatagttattttgaaagcaattcctcatagtttaccaaaaaatattgctccagatgtttctactataggtcttatgcttccttatactccactgcatcacattttatgtaatacattaacaaaagttgctgagctagaaagaataattcctgctcttgttatgacctccgctaatgtaagtggtggtactataatatataataatgacgatgcactgatacgacttaatactattacagatttttttttatttcataatagaaatattattgtgccagttgatgactctgttgtttgtttaagagaggacaacataggacaatcacctaattggcattttatcagacgtgcaagaggatatgcaccactacctataacagttaaaactttaaaggataatactccttgcattatagcattaggtgcagaacataaaagtacattttgttttacaaggggacaggatatatttttaagtcaacatataggagatctttctgaaccagaaacagaatggtcattttgtcaaacagtaaaacatatttcccaattatttggattttctcctgaagttgttgtctgtgatttacatccagactattttactacacggtatgccgcagagtttggtttaccaatcttacagttacagcatcatattgcacacggttatagtgtgttagctgaacatggacataaagagccggcactcgtattgactcttgacggtacaggatatggtatggatggaactatatggggaggagaattattttatttatatccagaagctgtaaaagggaagtcatatgagcaaggggaacgactagctagactatcactccttcctcttcctggaggagaaaaagctattcatgaaccatggcgtttgttaagcggttttttagcattattaaaaatacatgaactagaaggagtagatagccttgtaagacagctatggaaaaattctcctgagagatggacgattcatagtgcaatcagagaaatggtatccaaagataaagtgaagttgacttcaagttgtgggaggttatttgatacagtttctactttatttggattatgtgattacattacatatgaagggcaagcagctattcgtcttgaacatcaacaggatatgtcatgtaatgagagtcttactatttctatagttgaaaaagatagtatttatgaattagatacaacagtttttttaaaagaattaatagagttattacaacaaaaaatatctgtttctatattagcacgcaggtttcatatagggctagttgaaggattagcagatttagccttgattggctcagagaatacaggagttaaaactgttgggttatctggtggagtattaaataatcaaactatatcttctttattacccaaagcattaaggtatcgagggcttacaccacttatgcataaaaatgtaccatcaggagatggaggaattagttttggacaagcttattgggctagcatggttttagcttga

SEQ ID NO: 9608 - DNA, 828 bp, Lawsonia intracellularis
atgctcttttcttttcgttttattacctatcccctcataacaatttttatattatatacttgtcataatgcgcttgctagtaataatgattcaatgattacctctgaaaattttgaaagccaattacgacttcttcttcataaccatcctgagcttgtccttgatgtactaagagagcatagcgaacttgtccttgaaattgcccaacaaggttctaaacagcgtcaacataaatcccttatagcacagtggaaaaaagacataactactccaaaaaatatgcatctggaaaatagaccaatccgagggaatccaaaagcacccgtaactattgtagcattttcagactttacatgtttgtactgttcacaagcttctaaaactgtacaacaaatgcttattgattataaagataatgtaaaatatatttttaaacacttcccgcttaaaggacatactatttcacaacaagcggcaatatatttcattgctgcatctttccaaagtaatgaaaaagcatgggcactttatgatcttctttttcaaaaaagagatgagctattacaaaacggtgaacagactcttaaacaagcagtaaaagaagtgggactagatataaaaaagttaatgagtgacctcaacaaagcagaagtaaacaatattcttggacaagacataaaagatgctgcacaacttgatattagtggtactccatactttattgttaataaccttatccttcgtggtgcattacctcctgaattattcacagaagcaattaatatggccttaaaaaatacaaaagaagtgtcaacatctccaaaataa

SEQ ID NO: 9609 - DNA, 1044 bp, Lawsonia intracellularis
atgattatcaaatgtgatattgatacaattgccctccctaaaaactttcttaaagaaaaaaagacaaccattactttaggaaattttgacggtgtccatcttggacaccaagctttgttaaaaactatttatttaacagctaaaaaacagcaatctatctcaacggttattacctttgaaccacatccacaggccgtccttataggagaatccccatctctcctgactacaaaaaaagaaaaattaaagctaattaaatcaatggggatagatcttatcttccagctcaactttacatctacattagcaaatatgacaacggaacaatttgtgcaatcgattttattggaaagacttcatatggaaggtatagttttaggacacgacttttctatggggaaagaaagattaggaacacaacatgttttatcaaccctaggaaaaacaatgggatttacagtaacacatcaacctgttttcacatttaaagaacagcctgttagctcaagtcttatcagagaagctatccaagaaggagctatagaaaaagctaacttactcttaggtcgttgttactcaatagatggtactattatacatgggaaaaaacgtggtagaatgcttgggtttcctacagctaatcttgcattatcatctaatttaattccatctactggagtttatgcaacattagtcaccctagaatcaaatcaagataataccttttatatacctgtacaacatcaaaaaaatacatttttagctgtgactaatataggaataaatccaacttttggagattcaattcctaaaattgaaactcatttattaaattttcataatgatctctatgagcaacatatgacaatcaattttctaaaaaaattaagagaagaagccatattctctaatatctcttctctaataacacaaattaaagatgacatatcccaaaccaaaacaatttttaagaacatgttgtggcctcaatcactcagtttagaagatccagttgatcgcatggatgcgaccctaaaaacctaa

SEQ ID NO: 9610 - DNA, 882 bp, Lawsonia intracellularis
atgtctcttgtcattaataacaacctgatggccgtcaatgctcaacgtaacttaagcaagtcttatggagaactgagttcttctgttcgaaaactttcttcaggtcttcgtgtaggaactgctgctgatgactcagcagggttagccattcgagaactcatgagatctgacattgcaacaacacaacaaggaatacgaaatgcgaatgatgctatttctatgattcaaactgcggatggtgcacttggagtcatcgatgaaaagctcattcgaatgaaagaacttgctgaacaagctgctacaggtacatataactccactcagcgtatgattattgactctgaatatcaagctatggcctcagaaattactcgtattgctaatgcgacagaatttaatggtataaaacttcttgatggttcattatcaggtaatcatgatgggaaaaaaataaattcaactggtgcagtacgtatccactttgggacatctaacagctctgctgaagattactatgatattaaaattggtggctctacagcttctgcattaggacttggtaatacagtaaaaggtgcgggtgctacagtctctactcaagctgcagcacaaaatgccttaaaagctatagataatgccattgtttcaaaagataaaattcgagcacaccttggtggattacaaaatagacttgaagctacagttgataatttaagtatacaaaatgaaaacttacaagctgctgaatctcgtatatctgatatagatgtaagccaagaaatgacacaatttgtacgtaaccaaatacttacacaaacaggtgttgctatgctttcacaagctaattctctaccacgtatggctcagcaacttattggctaa

SEQ ID NO: 9611 - DNA, 504 bp, Lawsonia intracellularis
atgaacttattatatcaactaaatatattagatcttgtattagttatcttatgtattttctttattttaaaaggtcttaatagggggttattacaagaattagcaggtataataatttttattataagcttatggactgcttatatgttatatataaaattcggtaatatgttattaagttatataggttctcaaaaatggtcttactttttagcatatatagcaatcttttttagtgtaatgattatttcctctattatgagtgggttattgcagaagcatttaggatggaagtctggaggttggataaattggctgggaggaggagtaattggtgcattaaaagcttttgttttttgtatgattattatagctgtttttgaatatacagcagattcaaaaccttttgtgttggagtcaaaaatagttacttttgtcaaaaagcatgatacgttttttagagaatttattaagcattctataggtaatgaacgtagtatttaa

SEQ ID NO: 9612 - DNA, 945 bp, Lawsonia intracellularis
gtgaggatcaccatggataactataccgtatctcttactacgacttcaagcattcctttagttttgaaaaatcctgttttaacagcatctggaacatttggttatggagcagagtttatagggtatggtgatttgtctcaacttggagggattattgttaaaggcttatcgttaaagccacgaaaaggaaacccattacctagaattgctgaaacaccatgtgggatgttgaatactataggcttacaaaatgatggtgttgaattatttatacaaaaaaagcttccacgcttaccttggaaagaaactccagttatagctaatctatatgcgacatcagttgaagaatttagtgaacttacagctattttggcagcagaagagggagttgctgctttagaggttaatgtttcttgccctaatgtaaaaagtggtggaacattttttggccaggatcctagtttagcagctaaggttactgaagctgtgtgtaagaatgcaggaagtaaacctgtgatggttaaactttctcctaatgtaacagatattactattattgccaaagctgttgagagtgctggagctgatgctatttcttgtattaatacactaactggaatggctgtagatattagaaaacgtaagtcattgttatctacagttataggtggcctatctggtccaggaattaaacctattgcactacgatgtgtttgggaagtgtgtaaggctgtaaacattcctgtaataggtattggtgggattacctcagcaagagatgttttagaatttattcttgtaggagctcatgcagtacagattggaacaatgaattttattcaaccagatattgcatttcgtattgctgaggcattacctattatttgtaatgaacttggtatcaaaaactttgattcattcagaggttcattgcaagtagagtaa

SEQ ID NO: 9613 - DNA, 807 bp, Lawsonia intracellularis
atggcaagtgccaatttttataaccttgcagttattgataatatcccttttggtcttgcaggtatgcaaggacatttttttgcactacgtttggaacttccagattggaaaggttgggctccaggacagtttgttatgatacgtcctcaaagttggaatttagaaattccttgggcacgtcctttttctatctgtagggtaactaaagaagaattagttattttttttcaagtttctggtaaaggtacagagcggatggcttacttacggagtggtaatatggtccatttatggggaccattaggcaaccgttttagtacagaagaaaagcctacactgattttggccggagggattggtattgctccttttattggatatattgattctcatcccaaccctaaaaatctttatatgatgtttagtcataaatatcctaatgattgctatcctattgaaaatttatcagaaaaagtaaattttttttctttccaagaaaatactcttcaagatagagaagtatttcttgaacaagttagtacacaagttaaaaactatgctgcttgtaatggtttgatccttgtttgtggacctaccccatttttaaagtttgtgcagtctattgctcttgaaaataatgttcgaacacaactttctcttgagtcacaaatggcttgtggggttggtgcttgtcttggttgtgttgtgcaaactacagataaatggccagtaaaaaatatggctggtatgcctgttcctacatgtacaaatggacctgttttttgggctgatcaaattacattgtga

SEQ ID NO: 9614 - DNA, 1185 bp, Lawsonia intracellularis
atgtataatatgcccaaaggatttcgttttgctacagctagagctgggttccgtagagcatactgtaatgacacagctcttgttgttagtgaaacacctgctgttgctgcaggcacgtttactttgcacaaattcccagcagctcctgtccaaataggaaaggaaagactatctaataatctaacaatgcgagctattcttatcaattcaggacaagccaatgcttgtactggctatgaaggattaaaaaactgtcgccacactcttgaactcctttctaatgctattggttttaattcacaaaatattttacctgcctctactggagttattggtgttcaattcaacatggctctctgggaaaaagttattcctgtccttatagaacgactaggtaaagatggtccagaagactttgctaaagctattatgactacagatgctttccctaaatttactcataaaaaagttcaattatctcaaggtacaattaatattgtagcaatggccaaaggtgcaggaatgatctgcccacagatggcaacaatgctagctgttatactttgtgatgctgacattcaagtagagtgttggagagaacttatctcccatacagtaaacataacattcaaccgaataactgttgatggtgacacatctactaatgatactgtttatgctctttctaatggctgttctggtatttctattacaaataatgaatcattgaatcttcttcaagaggggcttacgtctatattaagcgaacttgcttatatgttggtacaagatggtgagggagccacaaaggttggacatatttatgtcacaggtgctttatctgacaccgacgcagagactgttgcacgtaccgttggcaactctcaacttgtaaaaacagctctttttggccaagatgctaattggggcagaattatagcagctattgggcgtagtcatgcaacatttgacccactagcggtttgtgttaaactttgtggtgtaactgtttttttaaatggtcaacccaccaaagataactttgatgacatacttaaagaaccattacaacaaaaagatatcctaatagaaattcaactaggacatggacctggtatgtataaacttctaacctctgacttaacacacgattatataacatgtaattcagcatatagaagctaa

SEQ ID NO: 9615 - DNA, 966 bp, Lawsonia intracellularis
ttgtatatcgagcttattatgcaacctattatagttagttcaaatgaggcaggacaaaaactttttcaatttttaactcgccgtttaactgtacccaaaagcatattacaccgctggatccgtacaggacaaacccgtattaatgggaaacgtgtgaccccctttactatagtaaactttaaagacaaaatacgtattccaccttttgcatacgaatataaaaaaaaagatttaacaacctctcttatacataatcaatatgatataagccctataagctctcatactacttctccacttcccccagttatagctcactccccagagtttattatattttataagccagctggcctagctgttcatggtgggacaggacaaacagatagtttagctcaccgattatcacaacattatgcacatagtacttttatgccaacacctgtacatagattagataaagatacatctgggcttcttcttgttgctaaaacatataatagtctaagatatttttctgaactttttgcttcacatagtacacaactaacaaaagaatatcttgcatgggtagttgggatatgtccatggactcaacccatctgccttgaagatatccttactaaaaaacaaaaacaggataactattcaagacttaatagttaccaaaataaactacaacaaacttcagctcaaaaggcttcattaacagtacgttgtataaaacagtataaagataaaagcctattacttatcaagcttcatactggccgtacacaccaaattagaattcaactttctattcatggttttccaattattggagataaaaaatatgggaatacaatacgttctcacaatcttaaacttcatgctttcagattgagttttccaggatatacgtttactattcttccctcatgggatgataagtggcaagttactcaagaagatatacctaactaa

SEQ ID NO: 9616 - DNA, 783 bp, Lawsonia intracellularis
ctgggactattcatgaagtacatgctttctctatggattaatatcttattttgctttttttttattgtaaatccaatatatgctgaaaaaaaagaacattatattaatggaattgacgctcattatccaccttttagttttatagatgaacatggggatcctacaggatttgatgtcgaagcacttaattggattgcaaacaaactaggctttacagttgaacatcgtcctataagttgggatggaattattcctgcacttcttgcaaaaaaaattgatatgatctgctcaggaatgagtatttctccagaacgtgaaaaaaatattctttttacaagaccatattggataacacaaaaaatacttattgttcataaagatagtaaattaactcctgaagaaattttttatggagaaaatatcatagtaggagtacaatgtggtacaaatgaagcaacgtttcttgaaaaagagctaaaaaacaaaggttataaatataaattacgctattatgactcttcacctcttgtaattaaagacttgcttaatggaagaattaatgccgcagtcatggattgccttcctgttgataatgctattaaacataataaagctataaaaaagctttatatcatagattatagcgatgcctttggtgttgctgttagaaaagaaaacactcaactagcaaaacgtattgaagatgggtttctacttttacaggctgatccattttgggaaacactaaagcaaaagtatctacctttaagagaaaacccttag

SEQ ID NO: 9617 - DNA, 699 bp, Lawsonia intracellularis
atgttgaatatttcctctgaactactacattctattaatattattatagaagctcttcctaatattttccaaggaagtttagttactataataactgtacttctagccctttttattggacttattcttggtataccaatggcaattttacaagtatatggaccaccatatattaggtatagtattcaaatttactgttggttttttagaggagtccctattctactcctcttatttcttttttactttggtctctttgaacttcttcaacttaacttctctgcagtcactacctcatgtattgtccttgggattgcaagttcaagttatcaaacacaaataatcagaagtgctatccaaatgataccttctggtcaactaaaagcagcaaaagctcttggaatgaccagtactcaagctatccttgtaattattctaccacaagcattaaggttatcaatccctggttggtcaaacgaatactctatccttcttaaagattctgccatatgttttgttcttgggacaccagagattatggcacagacacaatttgtagcttcaagaacatatgaacacttactactatatattgttgcaggaatcctttatttccttattacacttataggtgtttccttactccgtcgacttgaacaatatctttatcttcctggatatactgcctctctccattaa

SEQ ID NO: 9618 - DNA, 876 bp, Lawsonia intracellularis
atgatagattctacatatcctattctctatgttaaaaatattacaaaatcatttaataataaactgattcttaataatatatcggttaacattaataagggcgacattaaagtgttgattggcccttcaggtgctgggaaaagtacttttctccaatgtcttaactgcctcattttacctgatagcggaggtatttacctatatggagataaaatcgatttatcaaatcactatagcttatctgaattacgtaaaaaagttggaatgatttttcaagactttaatctatttgatcacctaaccacagaagaaaatatttcgattgctttacgtaaagtagctaattattcttataaagctgcaagagaaagagcattagaagaacttgcacaagtaggattaatagacaaagcaaatctataccctgcacaactttctggaggacaaaaacaacgtttagcaattgcacgtgctttggcaatggaacctaatgttatgctacttgatgaaccaacttcagctcttgatcctaaattaacatgtgaagtcctaactgttatccaaaaattagctaataatggtatgacaatggtgattacaacacatcagatggactttgcctgtgctattgctacagatattctatttatggaacatggtgaaattgttgagcaaggttcaccatgtcaacttctctctccagaggctcaaacaagaacaaatggcttcttcaaatcttttatttctcctcttcaaagtaattcattatctatagagaaaccatctatcagcatgttactttcaggagatctttctcatgatctaactaatagtggtacagaatccatttctttccctgaaaaaaacgaaaattaa

SEQ ID NO: 9619 - DNA, 687 bp, Lawsonia intracellularis
atgctgttagatattacatttattacccagactgttgtacctactcttaataaaggtctactggtatctattgctttaattattccatcagctattattggttttctacttggtgtttgtataggtataattcgtgtattcggaaaacgttggttacaacgtttaggaaatatattcactctcattttccgaggagttccccttaccgtccaacttatgattttatattttggccttcctaatataaatatttattttgaaccatatattgcagcagttattggatttaccctatgtactggtgcataccaatcagaatatatccgtggagcattgctctcaataaaaaaaggacaactccaagcagcttatgctcttggcttcactcgactaaaagctatactttttattattattcctcaagctacacgatatgctttaccaggatgtggaaatgagcttgtttatcttataaaatattcttctcttgcataccttatcacatgtatagagctcacaggtgaggcaaaaattcttgtctctcaaacagttaagcccatggaaatatattttatagcagctatatactatttaagctttgtttctattgctacctggatactaaaaaaattagaaacactgtatgctatcccagggtttggcaaaaaacatatcgactacttataa

SEQ ID NO: 9620 - DNA, 1821 bp, Lawsonia intracellularis
atgaaggatctcctcatgcctatccaagaaaatattagaaactttagtattattgcccacattgatcacgggaaatctactcttgcagatcggatccttgaatatactaaccttgtttcggatagagaaaaacgtgaccaatatctagataaaatggagttagaaagggaaagaggtattacaattaaagcacaaacagtgcgaattccatatataactgctgatggaaaaacttacatattaaaccttattgatacacctggtcatgtagattttaattacgaagtctctcgttctttatcagcctgtgaaggatcactacttgttatagatactactcaaggagtagaagcccaaactcttgccaatgtatacttagctctagaacataaccatgaggttattcctatccttaataaaattgatcttcctagtgctgatatagaaaaagttaaagctgaaattgaagaaactattggacttgattgctcgaccgctatctctataagcgcaaaaacagggttaggagtagatagtgttcttgaggctattgttcaacaactaccagcaccaaaaggagatccaaacaacccactaaaagctctgatatttgactcatggtatgatgcatatcaaggtgttgttgtactttttcgtataatggatggaacaataaaaaaaaatgatataataaaacttttttcaacagaaaaaagttacgaaattactcgactaggagttttttctccagaagcaatagatatcccacaactttctgctggagaagtaggatttttatgtggtaatatcaaaacactaggtgacgctaaagttggcgatacgattacacttcttcataatccctgtaccaaagcaatcccaggatttaaagaaattcaacctgtggtattctgtgggctttatccatctgaatcaagtgattatgatatacttaaagcagcattagaaaaacttcaacttaatgacgcagcattttcatgggagccagaaacatcacaagctttaggatttggttttcgttgtggatttcttggtttattacacatggaaattattcaagaacgtcttgagagagaatttcaagtagaacttattgctactgctccctcagttatttataaagttgaaacaactgacgggaaaatacaagaaattgataatccatcaaaactccctgaactagggaaaattgttcacttatatgaaccatatgttcatattgatattcatgtcccaagtgaatttgttggaaatgttcttaaattatgtgaagaaaaaagaggtatacaaaaaaatattgcttatcctgctcaacaacgtgtaattattacatatgaactcccgttctctgaaattgtttttgatttttttgaccgtcttaagtcagcaacaaaaggatatgcctctatggactatgaagtcatagactaccgcatatctaatcttgtacgtcttgatattttactaaatggtgaacctgttgatgcgcttgctgttattgttcatcgcgataaagcatatcactatggccgctcattggctatcaaactcaaaaaaactattcctagacaaatgtttgaagtagcaatccaagcagctattggccaaaaagttattgctcgagaatcaatctctgctctacgtaaaaatgtaactgctaaatgctacggaggagatataacacgcaaacgtaaattattagaaaagcaaaaagaaggtaaaaaacgaatgaaacggatggggaatgtagaactaccccaagaagcgtttcttgcagcactacaaatgggagacgattag

SEQ ID NO: 9621 - DNA, 369 bp, Lawsonia intracellularis
atgagaaatccagtatttttagattccattcttgttggattatggaatattactagtttttttataccaactccgctattaactatggctactatacttggtggaacggcagcactctgtgcattgttttgtataggtatgattttgacagcacaattgtcttcttcagagggttttgtagcaggctggtttatacaacatttaccagtacatattcttaaattagctattcaaccattgataacttactgttgttttacattactaggtttgaatagtaagttggtaggtgttatagtattaattgtagctatgccaaaaggtattatagcttatattattgctgaaaaatattatgtatatacatga

SEQ ID NO: 9622 - DNA, 1197 bp, Lawsonia intracellularis
atggcaaaagatgcaactcttgagtcactagatgatatcattgacttagtagatattgttcaatcttctgacaaaagtgaaagtcaggattctgaaaaagttgactttgattcacagctttcagatatacttagtaatgatgatcccatttcattagaggatattccggacttagatgaactttttgcagaagagtctgaagaggtaaaagaagaaaataactctcaacaagttgatattgatagtgaagatcttcttgataatcttggagaagaaaaggttgaaacaaatgttttaagtaaaatagactctgacccagaagatttagatgcgctgcttgataatttattcagtgaagaagaaaaagagccaattaaaaatcaaaaagaatcatccaatgcaagtttgaatttaggtcaattagaattttcgactaatgaagataaaacaaactttttagaaaaggcacttgatggccttgatgacctagatgatttacttatggaagaagacttagactctactgttgatatttcacctaaaaaaattgtggatgtagttgaacaagaggagagtcctaatcagttagaagatattgataagacgttacctgatgttgtggttgaagatgtaacaaatgtagaacatatactatcagataaagataaaggagaagttgaggctattcttgatgcagtaaaagatccagcatttttagcaaatgaaaagaatctactagataataatagtaatgtgccacaatcactatcagcagtatcttctgaagagattcaaattagtagtaatgattctagagtaatggagacagctgcaaaaaaggtgcaatcttctgatacaactttagaagttagtagtgtacttccttctgttactaatacagttatagatgagttgaatgttagaatccaacagttagaaaatgagtctcaggctcttaagcaaagagtaagtgcattagagttaattattatggctcatgagtcagaagtagaggagttacaagattcaaatgtgatgcgttttaattctatagatgaaaagatagataattctttgcagatggatatacttgtaaaagaagtggttgatagattgcagccagagattgataaatttgctgctgaagcagctgtacgagttattcgtgaagaaattgaactattattaaagaaatag

SEQ ID NO: 9623 - DNA, 1212 bp, Lawsonia intracellularis
atgggaaggtatttagttagatggagatatctatctattataatatgtttcttaggcatagttggttgtagcaatagtttgatggaatctatgtcatctaatggcttatcatatacaaatttaagacctttttataatataaaagaacaacagagtgcaacagctattgcaaagacattttctccaagaaaacaaaatcttcgctcatggaaagaacttaggccagctttggaggcaactcatcaatatttaagtaagaaagacttagagcaagtggcaatagcacatggtgatattgcaattacatggggtcaactttttaatacagttaatcgacttgaaacattacttgatcaattagatgaacatccagaagttctttcaaaggattttcagtggataggtttaacagaagatataaattttttaggttattatgagcctatgtttaaggcaagctataaaccaagtaaggagtatagatatcctttatataaaacaccaccagacttgcatcagctcaacctagggttatttaaaaaagagttggtaggatctcatattatatatcgacaaacagaaaaagggcctattccttactatagtcggtatgaaattgatgataagggagtattgaagggtaagggattagaggtcgcatggttgaaagatccattagattcttactttttacatatccaaggctcaggtttattagtttttgaagatggttcttctatacatattgggtttgctggcagtaatggacaagagtatcatagtttagctagttatcttgaaacacaaggtattatcccgcaagggaataaaaatattgagttaataagaaattggattcaagaaaatccattacgcatgtcagaattattatacaaaaataataggtatgtattttttaaactgtataaagatggaccaattggtagtagtggatatattctttctccctggataagtatgtctgttgatcgttctgtatttcctttgggggcaattatagcttttgacttatctaataatgcttctactaatgagtttacaaaagaaacctgtggtattggtattgctcaagatagtggtggtgttaaggggaaaaagatagatatattttgtggtagtggtcaacaagcttatcaagaaagcatttctttgtctggaatgggtaatgcatggatattacttgcaaagtag

SEQ ID NO: 9624 - DNA, 450 bp, Lawsonia intracellularis
atgcaacatacaccttctcatacaatatgttattctcaccgtgtttcttatggtgagacagatgctatgggttacttatatcatgcagaatatttacatatttttgaaataggacgtactgaatttctccgtagccttggtataagttatgcagagattgaaagtagaggcatcagattacctgtatgtcatgcaacatgtcactatcgccatccagcccactatgatgaagtcctaaacgttcatatcaaaattaatgaaataaaaaaagcttctttgacttttagctattctgttataaacaaacattctaataagttacttactaatgggactacaagacttgcctgtaccaacataaatggacaacttataaaaattcctgaatggcttatcaatattttctatggttctttactaatgattcccaacagtcataactgtagttaa

SEQ ID NO: 9625 - DNA, 822 bp, Lawsonia intracellularis
ttgctagctgatatacatatgcatacaagtgcttcgcatggcaaaaatacagttgaagaaatgtattatgcagcaaaagataaaggcatagacattcaaggtttttctgagcatgcaccaagaccacataaatattcatatcctattgaatataataaacatttgagttataatttccctcagtatattgaaaatgtgtctcatattaaaaagtgtggttttgagcatcataaagtattattgggtgtagaaattgactggttacctagtgaaagtctttttatggactcagtgatttctatgtataattttgactatattattggtggagtacattttttagggagttggggtttcgattttactatagaagactggcgtaacttgtcattatctcagtgttatatgcattataaaaactatttttcttctttaaaagaaatggtgtgcagtaaacttatgcatgttgttgctcactttgatcttattaaaatttttactccatctatatttagaacttggattaatagtgcagaaggacaaaaaatagttttagagttattgatagctattcgtgatagtggtatgagccttgaagtttcgtctgcagggctacgtaaattttgtaaggaaatatatccttgtttagaaataataaaaatggctaaagcacaaggtgtatcaatttgttttagttctgacgctcactgtaaaaatacaattggttttgcatttaaccaacttttttattacactaagagtgttggatattgtgcttataggatttttgaaaaagggaaggctaaagtaataactttttga

SEQ ID NO: 9626 - DNA, 1215 bp, Lawsonia intracellularis
ttgatacagttttttgcttgtatttttaggggagaagatatgaccattgaaaaggggagatacttttttacctctgaatcagtaacagaaggtcatccagataaagttgctgatcaaatttctgatgctgttttagatacgttgttagagcaagatccacattctagagtagcttgtgaggctttagtttctactgggatggctattatcgctggggaaattacaacaaatggttatgcagatttgctaagtgtagttcgaaggaccatacagtccattggttataatagttctgagatgggttttgactggcagacatgtgcagttctttccacaattgataagcaatcattagatattgctcagggaattgatcgtgcaaaacctgaagagcaaggtgcaggagatcagggaatgatgtttggttttgcttgtagagaaactccaacgttaatgccagcacctatttattgggcacatcagctttctcaaaaattaacaaaagtacgaaaagatggagaagtgtccttttttcggccagatgggaaaacacaaatatcttttgagtattataatggggttcctgtaagaattaacaacgttgttgtttctacacaacatgccccttctgtatcacaaagtgaccttattgaagctgttaagagtaaagtgattcgtcctgtacttgaacctacaggaatgttcgatgagaaagaatgcgaaatatatattaatacaacaggacgttttgttgttggtggccctatgggtgattgtggtttgacaggaagaaaaattattcaagatacgtatggggggtcaggccatcatggcggtggagctttctcagggaaagatgcctcaaaagttgatcgttcaggagcatatatggctcgttatattgcaaaaaatgtagttggtactggattagcacaacgctgtgaagtacaaattgcttattgtattggtgtagcaaagcctgtttctgttttagtatcttctttaggtacaagcgatattcctgatgaagtcttaacaaaagctgtacttgaggtttttgatctaagaccttattttattacaaagcgtttagatttactaagaccaatttatagtaagacttcttgttatgggcattttggaagagaattacctgaatttacttgggaacaattagatgctgttaaagatttacaaacagctttaaaaatataa

SEQ ID NO: 9627 - DNA, 591 bp, Lawsonia intracellularis
atgataaaaaaacctgtttaccaaggacaaattgacgttttttgtgctgcatatgcagctattaatagtattcgaattgcccaaggaataaatttaattaatgcacgcaaactattacatgaagctttacttaatgttgctaaggatcttgaactattccaaaaagttcttgatcaaaaaacagattatgtattttgggttgataacatattagaacaagagtcaaaacgtggttctattacagtaaaaaaagcattccctcatgcgactgaaaaactggataaccatatcactagcgatgatgtttggtgttctattataaattggctttctaatggagaaaaacgttcatgtctctttcagtttattcgctatttacctacaaaagggttatttctccaacactggacatgtggctataacttactatacaataatacattacttctctttgctgattcctcattagagccagactctctccaatatatatacaaaaaggaacttggcactacttttaaaaatcttcatgatgaagtaataattaaaccatatacgttacgtttagtagaaccaattctaatctcttaa

SEQ ID NO: 9628 - DNA, 885 bp, Lawsonia intracellularis
ttgataataaaggtagaaaaatatatgcaagtaatacgagcaaaaacagcagggacatgttggggtgttgatcttgctttacgtaaactttctcagtctattgaaaataaagaaaaagctaatacacgttttgtcatgtatggacttattatccataatcctcaagttatagtagaatataaggctcaaggagttatatgtgttgactctattgaagaagtccgtgctggagatactgttattataagagcacatggaattcctatctatgaagaacaacaactaactgacattgggattaacctcatagatgccacttgtccaaaagtaaaaaaaactcaacttgcaattgcgaatgcaactaacagtgaaacaatattacttctctttggtgaagcaaaccaccctgaagtaaaaggacttatttcctattctcaaggcccattccatgtttttgacacaaaacaatttgttgaagactttgataattctcaaaacaaaacaatagttctcgcctctcaaacaacacaagatgaaataactttcaaagaaatacaagaaatactccatcaaaaaggaatacaacctgtaattcttaataccatatgtgatgccacatataaaagacagagagaacttctttctattacagaacaagtgaatactatggttgtagttggtggatttactagtggtaacactcgtagacttgttgagctatcaaaagcaaaaggaatcaaaacatttcatattgaaacagtagatgccctttatggaaataatgaattagatcaaaatgatattattggactcaccggaggagcatctaccccaaaacagcttattgataaagtggaagatttccttagtaataatctaagttaa

SEQ ID NO: 9629 - DNA, 951 bp, Lawsonia intracellularis
atgtcacaaacaggtattcttcttgaatctggaacaaatgaactagaaatagtagaattttttcttgatgaggatgatgacaatggagaagtgtatcgaggatattatggtgtgaatgttgctaaggtacttgaaattattagaatgcctaaagtgacagaactacctgatactcaagatgagtcgatacttggagcgtttaatttacgctcacatgttattccccttgttgatctaggtcactggcttgggaaaaaacttgcaaaaacagatgagcccaaaaaagttattgttacagaatttaatgacgtaacaacatcttttatggtctctggagtgaatagaatccatcgtattagttgggatgaagttgagcccccaaatgactatgtctctcaagtttctaaaacaaccattactgggattataactattgaagatcgtattgtttttattcttgatctagaaaaaatagtagctgaacttaaccctgcattaagtctccgacttgatgaggctgtaacatggggaagcgaaattcgttaccgtgctctaattgcagacgattcaaaccttatccgtgaaatgctcaaggatttgatgcaaaaagcaaattttgaagtcgaagctgttaataatggccgtgaagcatgggaacgtttaactgaacttaaaaatagagctactgaggaaaataaaaatattactgactacgtacaagcagttataacagatattgaaatgccaagtatggatggacttaatctttgtaaaagaataaaagaagatcctcaactacgaaaacttcctgttgtacttttttcttcaattattacagataaacttcgtcataaaggaattgatgttggtgcagacgatcaaatttcaaaacctgaggtcactcatcttgctaaacgtgtatatgcccttattgctgaacgacagagctaa

SEQ ID NO: 9630 - DNA, 1332 bp, Lawsonia intracellularis
atgcatatttgtgtaataggaacaggatatgttggactggtaagtgctgcttgttttgctgaaatgggtaatcatgtttattgcgtagatattaacccagcagtaattgaagggctttgtcatggcaagatacatatttttgaacctgggctatctgatttagttaaacggaatacttctgaagggcgattatattttactacagatttgagtacagggattaaagatgcagaagttgcttttattgctgtagggacaccttctacagaagaaggtacatgtgatacatcttatgtagaacatgttgcatcatcattaggtcaatgtatgagttctcctcttattattgtaaataaatcaactgttcctgttggtacagcagataaaattcgaatattagttaaagaagctcttaagactcgaggaatagaactgtcttttgatgttgtttctaatccagaatttcttaaagaaggtgatgccattgctgactttatgaagccggatagaattattgttgggacagactctgaatcatcagcacatttactacataagctttatgcaccgtttgcacggaatagagagaagcttattgtaatgagtgtacggagtgcagaactaacaaaatatgcagctaactgtatgctagctacaaagatttcatttattaatgaaatggctttattgtgtgaaaaattaggtgctgatattcgtgaagtgcgtaaaggtattggtgcagatcatcgtattgggtaccattttatttatcctggtgttggctatggtggttcatgtttcccaaaagatattaaggcacttattcatacagcaaaccaaattggtatagattcaaagttgttagaggcagtagaagttgtgaatgatcgtcagaaacattcaatggctgtaaagattcaggaatatttttctggccagagtggtattaagggtaagacacttgcattatgggggcttgcatttaaagctaatacagatgatgttcgtgagtcaccagcaatagcaattattaataatttgacagcaggaggtatgtatatccgtgcatttgatcctgttgcctatgacacagcaaaagctgttcttcatgataatatgcttgtgagtattgaagcagatccttatactatatgtaataattcagatgcactacttattgtaacagagtggaatcagtttcgtaatcctgactttgaaaaaattaaaacattgctcaacatgcctgtaatatttgatggacgtaatctttactctccttcctttatgaggcaatgtggttttacctattattgtattggatatgggaaatga

SEQ ID NO: 9631 - DNA, 378 bp, Lawsonia intracellularis
atggctatcattggcttaggaatggatttggtagaaattttacgtataaaaaaaaccttttctacatttggtgatgtatttctctataaaatttttactagtattgaatacaataactttttactaaaaccttctatagcatctctagctgcaagatttgctgctaaagaagctgcctcaaaagcgttaggaactggttttagtgacgggatcacattcaaaaatatagaaatttcttctttacccaatggtaagccacagctacattttcaaggcaatgcaaaaaaaaaagctatctcccttggtgttaacaatataatgattacattaacacatagtcataatacagctggtgcggtggttatattagaaacataa

SEQ ID NO: 9632 - DNA, 534 bp, Lawsonia intracellularis
atggaaattcgtggaacaactattcttgctgtaagacataaaggtcatgttgcattagctggagatggacaagtcacattaggtcaatcagttgttatgaaacatacagcaaaaaaagttcgtagaatgtataaaaatcaagtaatagctggatttgcaggtacaacagctgatgctttcactttatttgaacgttttgataactatttggaagaaacaaatggtaatcttgttagagcggctgtagagcttgctaaagaatggcgtaaagataaatacttacgtcgccttgaggcaatgttacttgttgtagataaagatcatacatttgtactaagtggaactggggatgttattgagccagacgatgggattgcagctattggaagtggcggattgtatgctgtggctgcagcaagggctttagtcgctcatagtgagttaagtgctgcagaaattgctcgtgaaagcatgcgtattactgcagaaatatgtgtttttaccaacttaaatcttaccctagaaactttatag

SEQ ID NO: 9633 - DNA, 798 bp, Lawsonia intracellularis
atgaaaaaacttcttatagtattattagctattatagtatgttcttatagctatactcatgcaaagatggaacctcttatagaaggtgtcatcaaacgtggtgtgcttcgtgtaggatttgctccttttttaccatggattatacaaaataaagatggtgaatacgtaggatttgatattgatatcgctaaaagacttgctcaagatttaggtgtaaccttacaactagttccaacaagatggacagaaattatcccatctctacttgcaaacaaatttgatataatcattagtggggctacgataactcttgaacgtaatcttcaagtcaatttttctaacccataccatcaaacagatattgaagtcctggctaatgcaaaaaaagttaaagggatgaagtttccacaagactttaataaacctgaagttatagttgctatacgtaatggtagtacagttattactcctgcaaagcaacttcttcctaaagcatcttttagactctttgatgatgaagttgcatctataaaagatgtagaatctggacaatcacatatattattagcttcagcaccattaccagcgattcaagctataaactcaaatggcaaccttattcgtttagatacactccccattactcatcaatctgtaggatttgcaataaagaagggagatccagatagccttaacatattaaataattggattaaattcatagaaaatgaaggttggcttagcgaaagaaaaaactattggtttaattctctaaagtggaaaaatgaagttatatga

SEQ ID NO: 9634 - DNA, 483 bp, Lawsonia intracellularis
atgaaatggtttacacataaagctattgctattgcaggggctttagctcttgaagcttcgcctcctggactttttgctacacttgtaggaagtatcttacctgatcttgcagataggacctttgctatggggaacaaacagcaatggagacgtatacacagacagacctcacattggatgggatggtatctactcttaatgattttaggactaatgaattttccattaaaacattttgcattatcaccaatagcaaatcaacttttttcagaaataatgttatgggttgggtttggaggtattacgcatgttcttctagatagcctcacccctatgggtatccccatgtggccatttggtagtaaaaagcgtattgggcttagccttatatcaactggcagtgttggtgagcttgtatttcttattatttcaattagttgtattatatcacagtataattggtcaaaaatgttatccaaataa

SEQ ID NO: 9635 - DNA, 918 bp, Lawsonia intracellularis
atgatttattctcacctttctagtaccagttgtacgattactactggatgtaaagtaaatcttaatctatatattacaggaattcttcctaatggttggcataaaatagactctatttttctaccactatctgaacctcatgatgaacttcatattgaaataactaatcataaccaagggcttcatctttcctgcaatattcttgatattgagttagagaataatattctgacaaaaacttataccctttttactaaggctacacattttaccccttctatttctatatatttaaaaaaagggatcccttatggagctggtcttggtggtggtagctcagatgctgctgcattactaacttggttacaaaaaaatagtccacttcccttatctccatcaaaactactaaaacttgctgctgagattggtgcagatgtcccattttttcttaaaaataaaccttgtcgagctactggcattggagagaagttagaagaaatctctctttctaaccttaatatttcaggcaatacgctttttattatttgtccaaacctaaaaatttcaaccccatatgcatataaaatgtgggatgattataataaaaaacagatagctacctcctcacgttataacaataacttgacaaaaaaatactcttgggatagaagctcaccatccacccatctgtcagactacttgtggatgaaaaatgattttgagccagttatcttttctgaatacacagaattaagtgtattcaaagaacaactccttcagtttggagcgcgagctgctgtactaagtggtagtggatcatcaatatatggcttatttaaagaatataaccagacgtcaattatgactgagttttataagaaaaaaaatattttaacattcagtcagttattgcagtag

SEQ ID NO: 9636 - DNA, 966 bp, Lawsonia intracellularis
atggctataaagccaaaggccttcagttttatgtatggtgagttaaaaattctttcaggaacagcaaaccttcctcttgcacatgctatttgtaacaacttaggatgtcccctcacaccatcgctctgtgaaacatttagtgatggagaaactcgaattgaaattaatagtagtgtccgtggtggtgatgtatttgtcattcaacctacatgtgatccagtcaactataatttaatgcaattatgtcttatgcttgatgcgcttaaaagagcaagcgcaacccgtatcacagcagtaataccctattatgggtatgccagacaagatagaaaagttaatccacgtgcaccaataagtgcaaagttagtagctgacttcctttctactgcaggtgcaaatcgtattgtgacagtagatcttcatgcaggtcaaattcaaggtttttttaactgccctgtagataacctctttgcatcaaaagcattattagagcctttctttagtatgaaagatgaaattgttgttgtatccccagatgctggaggtgtcgaaagagcacgtgcttttgctaaaaaaatcgaagctccccttgctatcattgataaacgacgagataatccaaatcaagctattgccaccagtgtaattggagatgtaaaaaatcgtattgcaatacttgtagatgatattattgatactgcaggaactataactgctgcggctgaactccttcttcgtgctggagcacgtgaggtaaacgcaacagccacacatggcgttctttcaggacctgcaattgaaaatctaaatcgctctgtatttaccaaagtactagttacagatactatcccaatacaagataaaaacaaagaatgctcaaaaatacatgtaatttcagtagcaggtttattagcaacagctatttataacattcataatagctcttctgttagcgttcttttctaa

SEQ ID NO: 9637 - DNA, 594 bp, Lawsonia intracellularis
atggataacttaaaaacacttgtagttcaaaaacgtttagatcttgggaagggtccaaatcgccgtctacataaaaaaaacttaatcccagggatattctacacatctagtggtaaaaatattcctatacaactccccgagcttccctttaccaaaatttttagtgaagtaggacgtactacagtttttaatctaaaaattgaaagtgataaagaaaacatcacgcatcctgttattatctgggaactacagtattatccagtaaaaaatcgttttatgcatgtagacctttatggtgtagagcttaataaacctataaaaattgtagttcctcttgaattcactggtactgctaaaggaacaaaagttggaggaaaacttgaaacatatagagaacagcttacccttattgcaaacccacttgatataccctcaaaaattacattagatatttctgatttagatataggtaaaagtatatatgtagcagatttaaaactcccagaaggtgtcaaaacttcttatgacactaactatgctatagtatctgtaataatgccaggtgggaatactgcaacagaacaagaaggatag

SEQ ID NO: 9638 - DNA, 606 bp, Lawsonia intracellularis
atgagcattaaagggattattgcaggtcttggtaaccctggaggacaatatgaaaagacccgacataatattgggtttatggttattaataaacttattactataacatcagcaagtaaactttctggcaaaaaattttattgtgaattatggaaaacaacaactataatagataattatctattagctaaaccacaaacatatatgaatctatcaggagaagctatccatcccctagtagaatggtataatataaccaaagataaccttttagttatccatgacgaactagacttacctattgggaaaatgaaacttcaacaaggtggaggaactgcaggtcataatggactaaaatctattattcataacttaggaaccaaagatttttatcgcctccgaataggcattggtcgttctcctcttccctctgaaaatacagtaaactgggtccttggccacctttctatgaaagagcttactactcttaacaatctcttccctacaatttttgatgcactctccttctttatcaaagatgagaaagagacagctataagaatgattaacagttttactcttagtgaaacagttaacttaagctaa

SEQ ID NO: 9639 - DNA, 693 bp, Lawsonia intracellularis
atgaagaattcttggccgcttataatatccattagctttattattcttataactggttgtgcaacaaaaaccatatgtatcatagatcaacaagaattttctgtaatgtatcgtcaccttgctccattattatggaataaaaatgttgttgataacaatggctattatcaggaacaaataaataaaaaactatcccctaagataggagaatatttatttcaacatcttccagtaaaccttacctcacctacaactaaaactaatgtattaacatttgcacaatcccaaaatccatatacaaaaattactataactcattatggattttcatttcaagacaacaaacggaaaatacaaattaaacttattgctcaaactgactggttcaacaaaggaaataatgattggataatattataccatgttcactcttctaatatttctacaaattattatcttattctacctcatcctaaggaaagtttacctattgagccacaattaattgctatatgcgatgagctaaataatacttgtacaataataaatgataattcaactaacattcaaaactttggcacctcctattttgaggtagaaccagagatttactctatcatttcaagtccaaaaaaacaaaatatacaagaaaataaagaaacaacggttactataaaccaattacaaaaataa

SEQ ID NO: 9640 - DNA, 795 bp, Lawsonia intracellularis
atgcaacaagctaaatttagtggcttatttgctgcattaagtgcagaacacaggatgaacttcattgccaataacttggctaatgtaaatactgcaggctataaacaagataaacttgcatttaaagatacaatgatccaatttgctcacgatcaaattagagaaccaatagccactgttcgctcaaaaccactattccctgagccaaataatgctgcaagagttcgtattgctgtttctaatacagactttgcccaaggaagcatgcagtttacaggcaatccattagactttgctattacaggagagaatggatttttccggattcaatcacctcaaggaaactatctcacccgtaatggttcatttgtccttgatgcaacaggacaactagttactaaacaaggatggcctgtattgggagatggtggaccaataactataccagaaggaacaaaaaaaatctctattactcctgacggtagaatttttgctgatgatgcagaagttggaacaattcaatttgtttctttagatgatgtaaaaaaacttgaaaaagttggcgcaaacttatatcgcccaaaagaagggttagaaattattgaaggaaatgctaatgaaacaggtgccattatcaatcaaggatttttagagagctcaaatgttaatgttgttgaagaaatggtcaaaatgattgaagttaatagacaatttgatgcctatcaaaaagttatgcaaacttctgactccctcgatcgtgaagcttattcaaaagtaggtcgtactagccgataa

SEQ ID NO: 9641 - DNA, 786 bp, Lawsonia intracellularis
atgatgcgctctctttggacagctgctacaggcatggtagcacaacaacttaatattgatgttatatcaaataaccttgccaatacaaatacttctggttttaaaaaaagtcgtgctgaatttgaagatcttatgtatcaaactatgaagattgcaggttcagctacagatggagataataggattcctgtaggaattcaggttggtatgggagttcgccctacagctgtccataaattttttacacagggggacttccaaaacacaggtaatcctctagatatggctattgaaggcgaagggtttttccaagtattggttggtgatcaattaatgtatacaagagcaggtgcttttaaacttaatcaggatgggactcttgtaacagccaatggataccccctacaaccagaatttacagttcctcctgatgctaaatctgttgctatttctgaaagaggtcgtattactgctttagacgcaaatggacaagaaatcgctgctggagaaatacctttatatagctttgttaatccagcgggactggatgcaaaaggacgtaatctctatattcccacagaagcatccggtgaagcggtagaaggtgtccctggtgaagaaaacttagggactatagctcaaggattccttgaaatgtctaatgtagaggttgttgatgaaatggtacaaatgattgtaggacaaagagcatatgaaatgaattcaaaagcaatccaaacttcagacaacatgcttcaaactgcagtccaacttaaacgtagttaa

SEQ ID NO: 9642 - DNA, 984 bp, Lawsonia intracellularis
atgaaatacattcgtcttctattattcacacactgtattgcttttatttttcatataactatagcacataattgtgctgctaactctcttggatcagattggcgtattcatattaaagaagcttctgttgtccatggggatatggtcacccttgctgatatagctaaagtatatgggacccctcctccaggagtttgggaaaaaatttcttccatacccttatgggaatctccagaaaaacctggtgtaccaatgaaaattaacagggttaggctagaaaaagcattaaaagagacccttggagaagcctcttttttttctgttataccttctaatgtagctatacaaaaaggtggagagattctttatgagaaccaacttcaagaccttacccaaaaagctattaaaaacgtatacccaatgttagcttctcatggagaactctcagattaccgtatcccagcatatatttttattcctcaaaaaggtcaatatgtagaagtagtactacctactatttctcctaagagattgtctctacagtttgttttaaaagatattgatggaactgtattacgtcaatatactggcactgtgcttttaagcgtttggcagcctgtcccttcagttgggaaacctctaaatagaggtgattatgtaaatcctgaagatgttacatggattaataaaaacattgcctttttaagagatgatatatgggatggcaaaggaggtccttggcaaattaaaagatctattggtattggacagcccatctatcaatctgaccttgaacctttagctgttgtacgtaaaggagatattataaaacttaattacaataaaggatcaatacgtcttagcgttaatgttgaagcccttgaaaatggaacacatggctcttttatccaagtacgaaacttgcaaagtaaaaaaatagttcatgctactgttgtagattctaatacagtagaaatacgctaa

SEQ ID NO: 9643 - DNA, 693 bp, Lawsonia intracellularis
atgaaaaaattactctttacttcaggctgtattcttattttaacaggttgttctgctccaaacaaaactcctgttgttgctcctcctataacacctcctccagcatatgtagaacctgaagactcctatagtaatcctggctctctttactcatctgctgaatctgatggtctttttgctgatactcgtgctcgacgtgtaggtgatattgttatggtaaaaattgtagaaaataatactgctaaaaataaagcagatacaacagctgataaaaaaactgcaaatacatacggaattgatgcgttttttggtagacaatatattggtggaggatcaacaaaaattcctgtaggtagtgttgcttttgatacaacctctgaaagtggaaccactagtacaggagaaacaaaacgtgaaggagctataaatggaacaattgctgctcgtgtattacgagttatgccaggtggattattagaaatagaaggcgtccgtgaaacacgtgtaaataatgaaacacagtatattgttatcacaggacttatacgaccaatggatatagagccagacaactccattatgtcaaatagaatctctgatgcaaaaattgcttattatggtcaaggtgttctttccgagaaacaaaaacctggttggtttacacgctttatggataccctctggcctttctag

SEQ ID NO: 9644 - DNA, 1140 bp, Lawsonia intracellularis
atgttatcttctattatcagacctactaaaaattgcctactacactttattatacgttcttcctatcttacattattatttattgctgtatttcataatccagcacaatctgttcggattaaagatattgcaacattctctggtgtccgtaacaaccaacttattggatatggtcttgttattggactcgctgggactggagataaaagagactcaccttttacagcaagctcaatgacaaatatgcttgaacgtatgggagttgctgtcgatgctaacaaaattaagcctaaaaatgtagcagctgttatggttactgcaaatatgcctgtatccgcaagacctgggacagagcttgatgttacagtttccagtgtgggtgatgcaaaaagccttcaaggaggtgtattattacaaactccactaaaaggtgttgatggaaaagtctatgctcttgcacaaggttcacttatcattggaggatactctgctgaaggaactgcagctagcgttcaaaaaaactcaacaactgtaggctctatccctggaggaggtattgttgaaaaaggtattccttttgactttaatactcaacaaaatctaacacttaatatgaatagcaacgacttttctactacaatgcaagtagtaaaccgtttaaatgctactatgggagggaattttgcctcagcaatagatgcaggaactgttcgtattgatattccgccagcttataaaggaaatcttgttccattaattgcttctatagaaaatttagaaattaatcctgaatctgtggcaaaagttgtagttgatgaaaaaacagggactattgttcttggacgtgaagtgcgattatcacgtgtagctgtagcacatggtaatctccaagttgttatccaagaaagcgcccaagtttctcaacctggacccttcagccaaggacaaacagttataacacctgaaactaatcttaccttacaagaagaaactaaaaggctcaatttgttagaaggagcctctctacaagaacttgttgatggacttaatgctattggtgctacaccacgtgatatgatttctatcttacgtgcattgaaagccgcaggttctctccatgcacaactggaggttctataa

SEQ ID NO: 9645 - DNA, 684 bp, Lawsonia intracellularis
atgattaatcctattgatccttctttagctcaaaattcagctgaagaacaaaacttaaaagaaataaaacgtaaagcagataaagaaatacaaaatcttgatccaaatgctgctgcagctaaagaaaaaaaacttcgtgaagctgcagaaggatttgaagctatctttattcaacaaatgtggcaaagtatgcgtgcaagccttcctaaagaaggtataatgcatagtcgtgaagaacaattttggcaagggatgtacgatcaagagttaggcaaaagtatggcttcagctggagggattggacttgctgatatgatgatggctcaactatctaaaaaattagaaaatgctagtgaagttacagcagaaagtatgcatcgaacaccactagatataaaaccagttccacttattgaagaaaaagcacctcaagaactaaaacctactaataaaaaactagaacatatctataatggcgaattaagccaacataactcttctataaaaaataatacaaaaccttctacaactactaacacacttacacctgttgaagaagctctaaatgaattttctaagcaaataaaaacaccttcttcaacacctacagaaaatataacatcttcagactcaaatacaaaacctcctattatatctaatacagttactatcccaaaaaattaa

SEQ ID NO: 9646 - DNA, 531 bp, Lawsonia intracellularis
atgccttgtattacattgttgaacaaaaacagctttctaatttataggagattacttatgtatatgatcatacatggcagtcttgatcgacaaaaaaaaggacttgctctattacaagagttattaaatgaagaattttctttattaatggatagaaagacagaagaaattatggcattagaattttctatccactctttattacgtcagcttgctggagaaaagatttttatacagaaacggcttaatggaggcaaacttcttgactatgcagaactattatcagaccctgaacaaactaaagccattaagcagttatggcaaaatattgacacacttgaacaagattgttcccgtcaggcctcactaaatgcagaactttcacttgcattgcttgatcaaagtaaaaatttactttctttcttgcataaaaatgttcaacctcaagaaactctatctacatatggacgatcaggaacctataatcaccattcacgtcctgagggcacccttctttctgggagattgtaa

SEQ ID NO: 9647 - DNA, 2118 bp, Lawsonia intracellularis
atgtcgatcaatacacttttcggtattgggaaaagtgcaatagctggaaaccagacagctctaaacgttactggtaataatatagcaaatgttaatacacaaggatattcccgccaaagtgtacgcttcgaagataggtatggacttaatcaaactccaggaatgcttgggcagggtgtccatacagctgaaatataccgcaattttaatagatttgtagaagatgcttaccttaatcgtttttcccaaaatactcgatgggacgaacaaagtgctattatgaactctatagaaagcatttttaacgaatcaaaccgtacaggaattagttcactactaggagaattttttaaaggatggcaaaatctttccttacgtccagaagatgcagctactcgtgaagcagtgctctctacagctaaaaatctcacacaacttattaacgatgcaaaatcaagtctacaaaaaacccaacaagaaatggatctctacatccaacaaagtgttaataaagttaatgagttagtagatgctattaaaaacattaataaacaaatctcagcaacttatattcctggtcaacaaaaccctaatcaattacttgatcaacgagatcaacttgttcgagaattagcaaacctggtagatatagaagtaaaggataaaggtggaggaaattttgatatacaattaaaatctggacaacctctcctggaaggacaaataggttatacacttagcgttgggggacaacgagttgaaaactatttaaaacaagattcaaaatatacaggcactataacctctagtggttcagactcccatgaatattcatttgaaattattaatcctccttctggtggagcacctgggagtatgcgtgtatcacttgatggaggaaaaacttggcttcgtaacgaagatggatctgaacttaacgtacctattcctactacgcctggtgaaactatcaaagtaaaaaatcttgaaatatcttttgatcaagatccttcgcaattagtttcaggagacaggtttgatgttattccaaaaacaggtttatactggaattcacccacaagacctccgatcaatattactccccaaacactaaatgatggtacagaaaatacagggcgtctcactggaggaaaacttactgcatattttagtactcgtgattataatgcaggaagatatattgataaacttgatgcattagcaaactctattgtatgggaagtaaaccgaatccacagtcaaggtgctggagaacaaaaaatgacttactctttagggagtagtcaagtaaatcgtacagatgtaccactgggaacatctcaatctggtcttgcctatggaaaccgtcttacaactgggaacttatcattccaaatctatgatgaaaatggaaaacctttacctgtaggcacacctccaaatggaatcccagaatctttagatcttgatccaggtacgcctggagttcaaaactttgatccttcaattcatagtcttgaagatctagttaatgccattaaccaccctaataactatggtgaatttatgaaagcttctattgttaatggaagtctccaacttaccagtcgtcctggaacatcatttgcagcaaaaacagatacaacaggtttacttgcagcccttggaatcaatacttttttccaaggttcagatgctacagatatggctataaaacctgatgttattcaaaatacaaattttattaatgctggaaaggttaatgctaatggtgaagtttctacaggtgataatagtatagctaaagaacttgctgaccttgctacaaaagaagtaacaatttctactggatgggaaactacacaccaaacattaggtgcttattatggtgcactagttggtcttgtaggatctgatactcgtacagcaaaatttaatgctgattataataaaacactttcaaacgaactagaacaacaagctttatctattacaggcgttaacctagatgaagaaatgactcagcttattaaatttcaacattcatatactgcagcagcaaaactcattacaacagcagatcaaatgctgcaaactttactttctttaaaacagtag

SEQ ID NO: 9648 - DNA, 1578 bp, Lawsonia intracellularis
atgagggttacccaccaatcaatgtattctggcatgatcagtcagatgaacaaaagtttatctgactatatggagactaatatacaaggcggtacaatgaaaagaataaaccgtccttctgatgatcctgcaggtacagctagaatcctctcttatcgtggaagtattggtggaatagaacaatttaaaacaaatactgatacagctatgggatggttatctcttgcagatgaaacacttaatcaagtttcaacagttgttactaaaattaaagaacttgccgaacaagctgctacagatacatatacccctgaccaacgtgaagctattggtttccaactccgccaacttatgggaactcttataaacctttcaaataatcaatttgaaggcaaacatattttttctgggcaagattataataaatcatcctttctagaaggactcacagtcacaagcggagatcccaatgttaaccctaatccaccaatgcaggttactggaacacttgaaaaaactggacttattcgctttgaaaaagatgaaacaatccctccagcagcagatctaaattatcagtggtcaactgatggtggtaaaacttggcaaactgcaaccatccctgctgggggacgagaaataactataggtggtgcagtcgtaactgttcctgctccagctacaacaaatgtaacagcatttgacccagataaacctcttggagatactaatggttccttactatatgtacgtcctacagctatataccaagggagtgataataactcaaaacctattgtagacagatatggcactgtaccaatgcctccacttaataccaatacagtagggactttttctgataatgtcgttgtaaaattccctaatggtgttgatttatcaactcctggatcatttgatttctcttatagtacagatggaggcaaaacatggacagcaggaaactctgaagtcattgtttctcctggaccaccatcaactagtactgcaagactcattctgcctggtggctatatggatataggttctgctgatactacaagtccaaataatactattcctcctgatggacaacttatccttcgcccccaacgaacagatcttagttttgaaatcatggaaggacaaaatattactgtcacaaatgtaggaaaagatatttttggtggaatatattctacaaatggctcatctaatttggaacctatgtttggacaaaatgatggacgtaatttatttgaaacagttggaaatcttattgcgtacactgaaacaaataatcaagaaggcattgcaaacgcccttaaagatcttgaattagcacaaaaaaatatcctaactcaagctgcacgtattggaggtaaagaaaaccgtcttgaaatcacaaaagaagctcttgatacaaataaatatgatcaaacacaacgcttaagtggtgttgaagatgcagaccttacagaactagtaagccgcttagcacaacaacaaatggcttattctactatattaaaatcttcttctatgattatgcagttaaatttaacaaaatacatttaa

SEQ ID NO: 9649 - DNA, 690 bp, Lawsonia intracellularis
atggagttgtccatgctcattttaacacggcgtgcaggggaaagcctatacttagatgataacatacgtataactattcttggagtacaaggtaaacaggtaaaaattggtcttgatgtccctcctgaaatgaatatttatagggaagaagtttatcaacgtgtcaaagaagaaaatacattagcaactacaatcaataataatgatttaattgcagctgctcaattaacaaacaaagaagaaataataatagacactagattaggacaacaaactattgaacctgaaaaaattattaatttccctcaaggattaataggttttgaaaataaacaaaaatttatactattacaaattcaaccagcatcaccatttattatcttacaaagtattgataaccctaagcttggtttacttgtagcagatccatatagttttataaaacactacactgttcaacttaatgatacagaaaaaactattctacaatcagaagtacacaacttagctatattagttacaatgactattcctaaagggaaaccagatcttgcaagactcaatcttacagggccaatcctcataaactatgataccaaaataggccttcaagtcccacaaactaatttagaaacaacaagtcatgtttatctatatcaccctggggaagaaccaatcctcaacaaatag

SEQ ID NO: 9650 - DNA, 1581 bp, Lawsonia intracellularis
atgtttctaccattaccaactccacatgaaatgtctttatgggataaagaatcaatcaatataggtgttccagaaactgttttaatggaaaattcaagtagagaagcattacatgttctaaaaaaaacctttggtagtatagaaaataagtatattcttatactaatgggatctggaaagaatggtggtgatgcagtatgtcttgcacgccatttacatgatgcaaaagcaaatgtacttgtactacatactcgctcattcattcactacaaaggaactacaagacaataccttaaactagcaaaacactgtggaatactgttttctttagcagaaagctggattacaaaatataataaaaccccttggggggaacctgatattatcatagacggactaataggaacaggactctcaagcaacttacaacaattagaactagaattagttaatacagttaataaactttcaaaaaaaagctttatattagcactagatatcccttctgggctatcaggacttacaggtaagccacaacctactgctatcacagcagatataactgttacctttgaagctgcaaaaccaggtcttatcttaccagaagcgtcaaactatgtaggcgtgttacatatttgttctattggaatcccattatgtgtacgtaaaaaaaatccaccttcttatcaaatgattaatcaaaaatctaagcttcccctacctaaacctcaacctatgtggtataaaggaaatgctggtcacttacttattattggtggatcttctaactcagaggggatactcactggtgcaccatgtcttacagcattagctgcactaagaacaggtgctggccttgttacaatagctgctccttacaagctatgcaatgaaattaaagcaaattatccagatataatgatgcttccacttgggacaccagaaacctatgagtgggggcctgatcttatagaacaaatactatctaagctacataaatataattgtattgttattggaccaggaataggaagaactataggtacaacccaattcatagcaaaattgcttagtactcctagtcgtatacctaaagtgatagatgcagatgccattattgcattagctgatgagactactatattaaaaaatcttaaccatacagatattcttactccacaccctggagaagctgctactttattaaaaacaaatacaacattaatccaaaaaaataggtttgatgctatccaccaacttacttccctttcttcatctacatggatacttaaaggtgcaggaactatgatagcctctcctcaaagtcctacaactattttccctcaggctattccaaatcttgctattggaggctctggggatgttctttcaggctgtatagggactctccttattcattatcatgaacaacctcatattgctgcttgtttagccacacaacttcatcttgaagcaggagcaattctttcaaaacagtttctttatagagggaatactgcattagatattgctaatgctatacctaatgcatatataaaccttatgaaaacatattcataa

SEQ ID NO: 9651 - DNA, 1530 bp, Lawsonia intracellularis
atgacagtaaggcttgcttgtggagctttagaaggtgttgatgcttttcgtgtggatcttgaagtagattttttacgtcaaggattaccgtcatttgtaatggttggccttgctgagggtgctgtccgtgaagctaaagagcgtgtttttgctgcattgcgttcttgtggctttacactacctcctgccaggataacagttaatttggctccagcaaaccgtcgtaaaggtggcagtgggtatgatttacctttagccataggtttacttgtggcttctaataacttgcctgttgaagttataagtggatggttcatgggtggagagctttcacttacagggacgttaaagccaattccaggaattcttcctttagcacttttagctaggaaagaaaaagcaaaaggtattattgtagcatcagaaaacgcagctgaagctagtgttgttgctgagttatctacatttggtgcaagaacgttgagtgaagtaatagattttttgttagggaaaatatcattacctatagtgaagccagttgaaccagatttacctgaagttgagtcaatcttagactttgctgatgttaaaggacaagagcatgctaaaagggctatagaaattgctgctgcaggcgcacataaccttctatttgtaggacctcctggaagtggtaagactatgcttgctaaacgtattcctactatattacctaagttagattttgaagaatctttggaggttacgaagatatatagtgtagcaggattgcttaatcagcaagggctgatacaaaaaaggccatttagagcaccacatcatacaatttcagaaattgcacttattggtggaggtgtatctcctcgtccaggagaagtttctttagctcatagaggcgtattatttttagatgagttccctgaatatgctaaaagtacgcttgaagtattacgacaaccacttgaagaaggtaaagttactatttctcgctctatgttttctgttgttttccctgctgattgtatgcttgttgctgctatgaacccttgcccttgtggttactctacagatccaaatcatagttgtatatgtacagcttcacagattcaacgttatcgtgcaaggctatcaggtcctttgcttgatagaattgatttacatatcactgttcctacagtttcttatgaagaattaagaagtttaacatctcatagatgttcttctcagttgttagagaatattttacgtgctcgagagatacagtcagttaggtataaaagtttttctaattgtcgaaccaatgctgatttatctggacgtcttcttgaagaattttgtcaaattggaccggatggacaaaattttttgaaagaggctatgcaaaaattagctctatctgcacgagcttatacacgaattttgcgtattagtagaactattgcagaccttgcaggtgtaaaacaagttttagtaaagcatttagctgaagcaattaactgtagagttcttgatagagaatttttaaattag

SEQ ID NO: 9652 - DNA, 1695 bp, Lawsonia intracellularis
atggatatctataaacaaaaagcattagataagattccatttgtccctagtctatttaaaaccctagctcagggttatagctataaaatgctttttaaagatttttctgcaggatgtaatattgctgttatcgcacttcctcttagtttagctttttcaatagcgtctgggttaacaccagaaaaaggtctttattcaagtatagttgcaagtttaatcatggcctttttaagtgggagtaattttcaaatttgtggtccaacaggggctttagttattattatctttactattatttcacgatatggatatgatgggttaattattacaacaattatttcaggtacaatccttattttttgtggcattactcggcttggatttcttataaaatatattccatatcctgtaacaataggttttaccttagggattgctttattaattttttcttcacaagtaaaagacttttttggcctacctatggctgaaactccaccagaattttttgataagtggcatttatacttacgtaatgcactttcatttagtccttcaacactctttacttctttttttacattattagttattattagcgttcgtttttatattcctcgttttccagcaccagtgatgggtgttatttttacaacggttattgtttggctatttgatttacctgtagaaacaataggtagtcgttttggaacactcccatctgatatcccatcttttttagtaccattagattttagtattgagaggttacgtatcttattaccagatgctttcactatggcattattaattgcaatagagtcccttctttcatgtgtagttgctgatagtatgacagggaaacgtcataattctaatatggaattaatagctcaaggggtaggtaatattggttctgttttatttaatgggatgcctgcgacaggttctatcggtagaactatgactaatatacgttcaggagcatattcacctatttcttctatttttcatgctatatttttatttggttttattctttatttgatgcctgcaatagagttgatcccattatctgcatttgctggtgtccttgttgtcgttgcttatgatatgagtgacttaatgacagtcagacgtatgttctatggaccaacagcagattgggcgcttatgttgcttacatttattttgactgtagttttagatcttacgactgctgtctatgtaggtgttattttggcatcattattttttatggggaggatgggtgaaattacacagttacaaacagttacaaaagaatatcaatctcatgagatagtccaagatataccggttgaaaaggataagttgccaaaaggagtgcatattttttcaataaatggtcctctcttttttggtgttgcagatcgtttacaaaaacttttagaagcaatggaaactactcctaaggtatttattttatatttgcataatatgcctacaatagatatgacagctatccatacattagagtcctttattgaaaaaagaaggtctggttgtaaaatatttcttgcagatattcatcctgcaacaagatctactcttgaccgtgctggtattatccatgcagtaggtaaagaaaacattttccctacactccaaagtgcagttgaagaatctactaagtttgttgaggatactgcatga

SEQ ID NO: 9653 - DNA, 693 bp, Lawsonia intracellularis
atgagttttgattttcaaccacaagttatgttagagacagcaccactattactagaaggtgttgaattaacacttataattacaattggtggtctttttttaggtttggccttagggatacttgtaggacttataaataccccacgttttccttttttacgtactttggcagtaatatacgtagaaattattagaggaactcctttaatagtacttgtaatgtttttatattttgcccttcctttggctcttgatatacatattcctcctaattgggcaggagtaatagcaattggagtaaactctggcgcatatatcgctgaaattgttagaggttcgattatttctatatctcatgggcaaatggaagctgcacgttctactggattgacccatgcccaagcaatgttgtatattatttggccacaagcctttagacgcatgatccctccattgacaaatcagtgtattatttctttgaaggatacctcattattggtagttataggtgttggagaattaacaaggcagggacaagaaattatttctgtaaatttccgtgcttttgaagtatggctcactgtcgcaatattctatttaataatgacattaagtatttcagcgctattaaagtatcttgagcgtcgacttgttttacctggaagacttcaatatgctggtaaacaatattaa

SEQ ID NO: 9654 - DNA, 750 bp, Lawsonia intracellularis
atgaaatataaaatatttgtttttattttaggactattttttactaatacttttggtttttttgctaatgcaaaagggttagtcgttgcccatgatacaaatttaatgccttttgagtttaaagataaagagggtaattttgtaggattcgatattgaactatgggagcatatcgcagagattgctaatataccctatacttttcaacctatggattttaatggcattattcctggattacaaactggtagtattgacattgcaatctcaggaatgacaattactcctgaacgagctaaagttatattattttctcagccttactatgaatcaggattaatgattcttgttcgtgcaggagaagagtcaatttcaaagttggaagatcttgttgggaaaactgttggtgtaaaaacaggaacttcttctgtagattttatgaagagctttggtaagcaaaggtcattaaagcttttccctactaatgatggaatgttttttgatcttatgactggtggcgttgatgctgttgtttttgatgctccagtattacagtattttgcctcttcagcaggaaaaggaaaagttaaactagttggtcctaaatataaaggacaaccatatggaattgcttttcgaaaaaattcagaggagttagttcaaaaagtaaatactgcgcttaatgaacttaagagaaatgggatctatacagaactttataaaaaatggtttggacttccccctgaataa

SEQ ID NO: 9655 - DNA, 1725 bp, Lawsonia intracellularis
atggaaactgaggaaactatggaaaataacggtacagacctagactttaattttgaaagcgcacttgaagactatctcagtacagattttggtgatcttgaggaaggaaccattgtcaaaggtgagatcgttcgtatagatgatgataatgtacttgttgatgtaaactttaagtctgaaggacaaattcctactattgaatttcaaaatactgatgggaatattacagctaaagttggagataaaatagatgtttttgttgttcgaaagaatgagcaagaaggaactattattttgtcttttgaaaaagctaaaagaatgcagctttttgatcaacttgaagatctacaagagaaaaatggtattattaaaggacgtattgtacgtcgtataaagggtggttatacaattgaccttaggggagtggaagcattcttacctggttctcatgttgatcttcgtcctgtaccagatatggatatgttagtaaatcaagagtatgaatttcgtgtactaaaaattaatcgtagacggagtaatgtaattgtttctcgtcgagttcttttagaggaagagcgtgattcaaagcggcaggatttactccaaacaatttccgaaggccaggttgttgttggtaaagtcaaaaatgttactgagtatggtgtatttgttgatcttggtgggcttgatggtctccttcatatcacagatatgtcttggaagcgtatccgtcatcctcgagaaatggttaatttaggtcaggagttagagttaaaagttctttcttttgataaagagaatcaaaaagtttctttaggtttgaagcaacttgttccagatccatggcaagacatcacagaacgctttcctgaaacttctcatcatgttggaaaagttacaaatcttgttgattatggtgtttttgtggaacttgagtcaggagttgaaggacttgtccatatttccgaaatgtcttggacaagaaagcttcgtcatccatctcaaatggttcatcaaggagatgaagtagaagttgttattcttggtattgatcaggataaaaagcgtatctctctagggatgaagcaagtcaagcctaatccatgggaattagtaggtgagaaatatccagaagggacaatacttgagggtgtagttaaaaatattacagaatttgggatgtttattggtattgaggatggaattgatggattaattcatgtttctgatatcagttggacgaaaaaagttcgtcatccaaatgagttatttaaagtaggagatactgttcaggcaaaagtgctcactgttgatcaggaaaatgaaaagtttacccttggcatcaagcagcttactgaagatccatggtcaaatgccccttctgtgtatcctgttggaggtattgtgaaaggcatcattacaaatattaccgattttggtttatttgttgaggtcgaggaggggattgaaggtcttgtacatgtttctgaattaagctctaaaaaaataaaatcaccctctgaaatttataaagatggtgaagaaattcaggcaaaaattattcatgttagtgctgaagagcgtcgtttagggctttcaataaaacaactaaaagaagatgaagagcatcgtaaatctcgggagtatagtagaacaggccctgactctggtcaaagccttggagatctgctaaagatgaaacttgaggagccaacagaaaattaa

SEQ ID NO: 9656 - DNA, 486 bp, Lawsonia intracellularis
gtgaggagtaactacttgaaatcggtagaagtattcacagatggttcttgtcttggtaatccaggggcaggtggatgggcagctattttacgttatggagactatgaacaggagatttcgggtggttttagttacacaacaaataacagaatggaaatgatagcagctatttatgctcttgaaaagctaaaagaatcttgtttagttatgttatatactgattctcaatatttacgtaatgctgtggagaaacagtggttagtgttttgggagaaaaataattggaaaactgcaagtaaaaaaccagtgaaaaatcaagacctatggaaaagactgcaacgtcaacttgagcgccataatgttatatttacatgggttagagggcatagtggtcattttgaaaatgaacgatgtgataatcttgcacgaatggaagcttctcgttcaaatttgcccaaagattgtgggtttatcaatgaggggtaa

SEQ ID NO: 9657 - DNA, 894 bp, Lawsonia intracellularis
atgttatatcaatggattattgcaagtagaccttggacatttacagctgcatttactcctattgctttaggaacatcgctagcaattagtgatggataccatttcgatctatttttattcattttagctttattaggtggtatttttttacaggctggtgctaattttcttaacacatatggtgactatatgtcaggggtagatactatagattcagctattacatgtcctcaaattgtcactggtattcttccagcatataaaatgaaatatgttgggattggtatgcttactactgctattatcattggcttatttttaatttttttatgtggttggcctgtctttgtttttggttttatagggttcttgggagctgcatcatatacaacaggatggtccccatataagtataaagggcttggacctatttttgtattttttttaatggggccatttatggtacttcctgcatattatatacaaacttactcattaaatatgaatatattctttgtatcaataccgatagcttttttagttacagctattatgcatgcaaatgatcttcgtgatattgaatatgataatgcttcaggtattaaaacaatagcgttatggttagggtttaagcgcagtttgttactttataaggtaatctgcataatggcttttgttgtgttagtatgtttagttgcgctaagaatattaccaacagttgctttattaccattagttctttttcctcttttaattagaaagttccaacgtattaaataccctgatataacagttgaaataaaaaatcttgtaaagtggacagcaggttttcattttctttttggtttattttttattattgggatattactaagtccttttgtttatgtatag

SEQ ID NO: 9658 - DNA, 627 bp, Lawsonia intracellularis
atgaaaaatcatacaccttctggacttcaagttttatttttagttttattagctgttattttttgggcaatagtctttggaacaacatacataaatttttggttaggtatgagctgttcttctatggtgttagcttttttttcttttttattgggttctccgtttcattatagtaaattttcatggaaagtatgcttgttaggtataggctctgcatttattttgtatagtattttttatcttggagatatgattgctacaaagttacttccttttgctcaagcacaagtagcagatatttatagtattcgtgaacagagtaactcagtacttatagggtttattttgctatttattactagtcctgcagaagaaattttttggcgtggattttttcaacgttgggctatgacacgttttggggacttaggtggttggctattagctggagtcagttatgcaggagttcatatatggtcaatgaatagtatgctaattttttctgctgctattgcaggattattttgggggctcattttttggaggacaagcaaccttattccttgcattgtttctcattctttatggaccctcatggtttttgttcttttccctattttaggttaa

SEQ ID NO: 9659 - DNA, 915 bp, Lawsonia intracellularis
atgttatatacatggattattgctacacgtccttggtcttttactgctgctttaatccctatttctttaggtacagctttagcttggtctggaacggtaaaaacacctggtgttccttttcattttttttgctttttgcttatattattatctgggcttcttttacaagcaggaacaaatcttcttaatacatatggtgactttatttcaggagtagatacgttggactcggcagtaacctgtccgcagcttgttagaggaatccttttacctgagaaagtgaagcaggtggggatagctttattagttctttctgttatcttaggtttaatcctttatttattatcaggttggcctatattactttttggagtaatcggtcttattggttcagctacttatacaacaggtagctctccatataaatataaagggcttggacctatatttgtattttttcttatgggaccatgtatggttttaccagcctattatgttcaagcagacgtccttacttggagctcattttttgcttcattacctatttcgtttttagttacagctattatgcatgcaaatgatttacgagatattcaacatgataaacttgccaatattagtacagttgctatttggctagagcttaaaagtagtttggtactatatagaatattatgtttaggtgcatttgtatcactgatttttgttgttgcttttggtcttgttcctattacagggatacttccattagctcttactccgtatttaaatagtaaacttaaaaggctaagagcttctgaaatagataatgaattaatagtacttgaaggatggacagctcaatttcactttctttttggggtcttttatgttgtgggagttttgttatggggtattatacaagttatattatga

SEQ ID NO: 9660 - DNA, 627 bp, Lawsonia intracellularis
gtgttcattactatagagggtattgaaggatcagggaaaaccacattaataaatcgtctttcagaatactttagtagtagaggggaagatgttattgttactcgtgagcctggtggttgtgagttgggaggtttattaagatctcttgttctttcttcagagttagggcttacagcagaaagtgaactttttttatttcttgcggatcgtgctcaacatgtatctgagtgcatacagccggcgataatgaatgggaaaacagttttttgtgatcgttatgctgattcaactattgtataccaaggttatggtcgaggtatgaatattggtaagttgtgggaatttaatgaggtagctataaaaggtatatggccccaaaaaacacttttattagatatagacgtagagaaagcacttgaaagagcatgtattcgaaatgaagcactagggttaaacattgtagaaggtagatttgaatcagaacctatggattttcataaccgtatacgtgatggtttcctacattgggcaggaagaaatcctgataggattactattcttaatgcggatacaaccccagaagatttatttcaacagtcggttagtgttttaagagaaatagtgtaa

SEQ ID NO: 9661 - DNA, 1059 bp, Lawsonia intracellularis
atggacggaatgcaatcttccaacaaaagttttaataaaaatcaatggattaaagatgttacgttaagtgaagaggtggcatctttgtttttaattgcagcaagttcacaacaacaagctaaaaatggacctttttggcgattagaacttaaagatgtaacaggtactatagaggcccgtatttggagtccaatgagccttgaatatccaaaaattccaactggaattatagcttatgtaaaaggaagagctgaaagttatagagagcaactacaaattaatattatagaattacatattatagatgaagatgagttactaactatagatataggcatgtttctacctgcaagtgtaagaaactcacaagatatgtttagtgagttagaagcaatatgtaataaagagtttacacataaaccatggcataggtttgtttttagtatattaaatgatcctgaggtgaaaccaaaactattagttgctcctgcagcaaagggtgtacatcatgcatgggttggagggttattagaacatattctttctgtagtaaaagtatctttattaatatgtgatcattataattgtttagatcgtcaaacgctactagctggagccatttttcatgatataggaaaactatgggaactttcaggaggattagataataactatacagatgaaggtcggttaataggtcatattaatataagtcttgaaaagtttcaaagttatcttatacagtcaggcttagaagaaggtcttgctatgcattttaaacatcttgttcttagtcatcatggtctttatgagtttgcttcaccaaggttgcctcaaacagctgaagcatttgctcttcactatatagataatctagatgctaaaatagctcaaagtattgcagcactacaggatatttcatcaggagagacaggttggtcttcatatcaaaaaacacttgaacgccaattatatcaagcaactaagaccccactagaaagtaataagttagaagatcagagtatcaaacagaaggttagccagtgttcattactatag

SEQ ID NO: 9662 - DNA, 756 bp, Lawsonia intracellularis
atgaacattcttttaacaaatgatgatggtattcatgcttctggactacgagcaatctataatgagttggtgaagttagggcataatgtattcccttttgcaccaaccgttgaaagatcaggagcaagtaactccgtttcacttaatgttccattaactactcaagatgtatatgatggagatttcaaaggtacagctataaatggaactcctgtagactgtgtaaaggttgggcttgcaaagcttcatgaaaatccaccggatcttattatttctgggattaatgctggacataatgtaggaacagatattttatattctggaacagttgctgctgctatggaaggatgtgttgcagggataccatctattgctttttctagaccacgtgaagaagtggatcccacacaaagctatgcagaacatgctgctaacttactaaaaaaaattgacttttcattagttccaaaaggccaaatacttaatattaactatccatctatatctattaaaaaaactttaggaattaaagtatgtgctatgtccacacagggatgggaacataagcttcataaaaaaaaggatgataatggaaaaccatattggtttatttctccttatattccatatagtcatggtatctcacaaactgatgttttttttctccttgaaggatggattacaataactccattaatgtttaatatgactgctcaaactacactatctaatcttgaacaacactcttttacataa

SEQ ID NO: 9663 - DNA, 924 bp, Lawsonia intracellularis
atgccacttaccggacctaaagtcatgtttgaaaaggcctacaaagaaggatacgccattggagcttttaatgtaaataatatggaaattatacaaggtatccttatggctgcaacagaagaaagggcaccagtcatcttacaagtttctgcaggagcacgaaattatgctggtaaaaactatattgtaaaacttattgaagcaggagtattagatacagatatccctattgttttacaccttgatcatggtgcagactttgcaatttgtaaaacatgtattgatgatggttttacatctgtaatgattgatggttcccatcttccttttgaagaaaatattgcactcaccaaacaagtagtagactatgcacatgcacatggagtctgggtagaagctgaacttggacgtcttgctggtgttgaagatgatgtatcttcagagcacagcgtatacacagatccagatcaggctgtagaatttgtccaacgctctggatgtgactcattagctattgccattggtacaagtcatggtgcatacaaatttaaaggtaaacctgaactagattttgctcgtcttgaaactattggtaatctactcccagacttcccattagttctacatggtgcatccagtgtttcacaacaatatgttgatatgtgtaacaaatatggaggaaaaattgctggctctgctggagtcccagaagaatttcttcgaaaagctgcctctttagctgtttgtaaaattaatattgacactgatattcgtttagctatgactgcatctatccgtaaattttttgtagaacatccagaagaatttgatcccagaagttaccttaaacttgcaagacaagctgtaaaagatatggtacaacacaaaattaaatatgttttaggatgtgctaatactatttag

SEQ ID NO: 9664 - DNA, 1002 bp, Lawsonia intracellularis
atgtcagttcgtattggacttaacggatttggacgtattgggcgttatcttataagacttatggcaaatcaatcatatatgccagttgttgcaataaatgctcgtgctgacaatgcatctttagctcacttgtttaaatatgactctattcatggaccctttaaaggttctatttcttatgatgatgatggacttattattaatggacaccatatcaatgtctctagaaaaaaagtaggagagtggatatggaaagatatggatgttaacttagtagttgagtctacaggagctatcaaaacaagagatggacttgaagcacacatccaaactggagcagcaaaagttattatatctacagctagcaaagatactgatgcccttattataatgggagttaatgattcagactaccttcccaaagatcaccatatcctttctgctggctcttgcacaacaaactgcttagcgcctgtagtaaaagtacttaatgatgtatttggtattgaacatggtgttatgaccacaattcattcatataccatgagtcaaagaatacttgatggctctcaaaaagatttacgtagagcacgagctgccacgctttctcttattcctacaacaacaggagcagcaaaagctattgggcttgttattcctgaacttgaagggaaaattgatggaatggctatccgtgtcccaacaccaaatgtttctttagtagacttcacttgcgaactaaaacaaccagttactgttgatgatataaataatacattaaaaaatgctgctgaggggaaactcaaaaatattcttggatattgtgatgaaccactagtatctattgattatacaggagatatccatggtggggttgtagatgcgctttcaacatctgttattagctctaaacttgctaaaatccttgtttggtatgacaatgaggcaggttttacaaaccaactccttagacttatcaatcttgtagaaaaatctatgtaa

SEQ ID NO: 9665 - DNA, 900 bp, Lawsonia intracellularis
atgattaatagagatgtattatctcaatatattgcaactgatgaagcagagttaaaaatttttgttggattttttgttgggataagtgcattgcttatttgtattatgttattttctttatggttagtttttactattggttctaataatcaacctgctacagtttctttgtttgttattcttttttgttttttactagtttctccaattagttggatatcagttgaattacttcttcatttttatatggggtggacagtaatgagtcctctcaaacttagaagtatagttattaggtttgcactacctatggtagagctttttgttagagtcataaaaggtccaattgagccagttcgccgctcgtttattgcaataaataacttgttgttattaaaggcaaagttatcatatgaaccacatgatgttcttgtgttagcaccacattgttcacaagcaagccgttgtaaacttcgtttgacatacaataatgataactgcgctcggtgtggaaagtgtcctattggctcattattagagttacgtgatgagtcaggagtaaaagttttatctgccacaggtgggacaatggctagacgtattataaaagaagtaaggcctaagatgattgttggtatagcttgtgaacgggatttagtggaaggtatacatgatattccttcttttttccctgtttatggttttcttaatgaatgtcctaatggcccctgtatagatacattgataaatgtgagtagattaagaaaggtattaaaaaaatttattccttctcttcacttttctaatgaagaaaagtcagaaactactcctttaaagaagtggattccaccctctgaatatactaatattgttgctcaatctgaaaagattatccaatag

SEQ ID NO: 9666 - DNA, 969 bp, Lawsonia intracellularis
atgatactacagaataaacctctacgtattgtttttatgggtacacctgagtttgcagcaataattttacaaaaaattgttgcatctgggaaagtagatattatagctagttattgtcagcctgatagacccgtaggtcgagggcataaagttcaattttcagctgtaaaaattctttctaattcattaagaataccagtataccaaccagttaactttaagagtgagtatgaaatagaaaaactatatgctcttaaaccagatcttcttgttgtagcagcttatggacttattttgcctcagtcagtgcttgatatccccgcaatttcccctttaaatgttcatgcatcccttttaccctgttatcgtggtgcagcacctattcaacgtgcacttatgaataatgacaagaagacaggagttacaattatacgtatggaaaaagggttagacacaggagctatgtttacccatgaagagattcctatcaatatggaagatactgctgcaacaatgcatgaaaagcttgctcaacttggaggaaagttattaataaatatttttgagcagattattcaggggaccttatctgatcctaccccacaggatgatatacaggcaacttatgcacctaagttgaccaagtctgatgggtgtatttattgggatatgcctgcagaaaatgttcatgctgttgttcgtggtgtaactccatggcctggagctcaaacaagctttaagttggttaaccgtaaccctataaatatattatttcaaccaggagaaataggtagtaatgaactttttaagtataatgagggtgattctcctttaccaggaagtattttaggtctaaaaggtaatgctattgctattgcttgtaaggatgttccttatttaatttatacattacgtcctgaaggaagaaaaacaatgactgctaaagacttttggaatggatatctttag

SEQ ID NO: 9667 - DNA, 516 bp, Lawsonia intracellularis
atgtctttaaaaatattgcagtatccagatataagtttacaaaaaataagccttgaagttcaagatataacacaagatatacataatcttgctaaacagatggtacaaactatgtatgatgcaaatgggatagggctagctgctccacaagttggttatcttttacgtcttattgttgttgatgtgagtggtccagagcaaaaaagtagcttactggttcttattaatcctaaaattacacctgttatagattctggatttattgagggcgaagaaggttgtctttctgtcccagactataggtcaaaagttaaaaggcatgctaaagtgttgcttgatgctattgatcttgatagtaatcctgtatcctttgaagcagaagggttgttatcagtttgtttacaacatgaaatagatcatttagatgggaaactatttattgatagagtgagttatttgaaacgtaaactttatgatggtcgattgaagaaaagattattaaaaaatgctatatga

SEQ ID NO: 9668 - DNA, 993 bp, Lawsonia intracellularis
atgttatataatcaacctcttcccttttctcctgaaacaccttggcttgcacccattgctggatggtctgatctcccatttcgtttgctctgtcgagaacatggagctgctgtatgttatacagaaatgattagtgctaaaggactcatttacaataatccagggacagaaagtcttttaaaaactatccctgaagataatcctcttattgtacaactttgtggatctgaagcctcatgtatgaaagatgctcttactatactcctagaaaaagggtataaatggtttgattgtaatatggggtgctctgtaccaaaaataacacgtacaggtagtggtgctagtatgatgaaaaatattgataactctattaagatagcagaggctatgatccataccgtaaacaaaaaatctataggatttaagttacgcttaggttgggatgaaaagcatgagacatggcccattttagcaaaattactagaagaagctggtgctggctggattactttacatcctcgaactgctcaacaaggttttacaggaactgcaaactgggaaaaacttttagaactaaaacagcaagtaaaaataccagtaattgcaagtggtgacttactcacagcatcacatggagttgattgcataaaaaaaacacatgtagatactgtaatgtatgcacgaggagctttaaaagatccaaatatcttcactaaacataatcaaattcttaaaggaaaacagattactacaaccaactcgaacagtttattttctatgataatgcgtcatagttacttagcatgtaaatatagctcttatgatactgcattattaaaaatgagaactattgttcctagatatattcgtcatttaaaaggtgcaaaacaacttcgtttaaatattattagttgccgtacatggagctcatttgaagatatattacaacaatttttaaaaaaagaacaagtagcctcctgtaatgaaaattag

SEQ ID NO: 9669 - DNA, 753 bp, Lawsonia intracellularis
atggatttagttggtattccatttatatttccaggagtctcaggggtccgttgtttatttcaaactccatgtttagataaaacaaaagaggggacctatcccaatgacttgggtaaccatttccctgctgatatagagaagaaaacttttggtcgtcgtcgaattatgaagcaggctaatattagccaacttattgaagttgagcaagttcatggggatgttttattgtttgaatcagaaccaacgttttataaagggaatgcctctggggtcactcaacaagcagatgggatcagtacaacaaaaaaaggtgtagggttattaattagaacagcagattgccaacctattttattagcgcataaaagtggccattatatagctgctattcatgtgggttggcgtggaaatcgtattgagtttcctcaaacagcagtaaaaaatttttgtagttattataaagtagaaccatcagaagttttagttgtaagaggtccaagcctttcaccagcatatgctaagttcacaagttttaaggaagaatgggatgaagattttgatccttggttttctatagaaacagaaacaatggatttatgggagttaacatgttttcagcttaaatctgtagggattctttctaagaatatttttagtttggatctttgtacgtatcttttacctgagctttttttttcttatcgacgtgatagcaagtgtggccgacaaggaagtctcatatggatagagtaa

SEQ ID NO: 9670 - DNA, 582 bp, Lawsonia intracellularis
atgtatatgctagataaggattttgttcgaaactcttgtattattcgccgtcaggcactttcatctgaagaggttcatagtgcttctcgtataattgcagcaaagttatttaatgatgatgtctggaggagagctcgctctgtagctttgtattcttctataaaaaatgaggtttctacagagtcacttttaaggcaagcctggcaggaaggaaaacaagtattattacctagatgtattttaagtggtgaacctgagttggaatttgccctttgtcgaggttgggaagagcttgttgttggtccttttgggatcttagagccagattataaaaggtgtattgctgtttctggcaagaatcttcctgagttaattatagtcccagcagttggattgacaagttttggagctcggttaggttatggtaaagggtattatgataaacttctttctaagtctggatgggatcggatagtaagggtagctttgatttatcaaagtcaaattgtagaatttaatcccagtatatctgatgtacctatgcatggatatataacagagttaggtttcatatggatttag

SEQ ID NO: 9671 - DNA, 2001 bp, Lawsonia intracellularis
atgtcagaaaaacatgaatattttcaaacagaaaagtctatttctagtaatagacacaatagcaataataaacctcacgcacaatatattcaacttaccctaaaaaaagatacaatgacacagttagaagaaactatccctgtaatggcagagcactctaatcaaaaaactgcttcaccaacaactcataaccatagcataattaatgaaatagaaactcaagatactcaacagacacttgaaagtcagcctatagtgactcatagcctaactttacaacaaacttcccaagcaacaccagaacattcagagcaaacaagtactaactcatggagtgaaaataatatatctaaaaaaatacctcataatgtataccaagctagtacaaaaaaactaaaaactcgttcacgttcaaaaaataaaaatagaacaacaaaaaattcaacactacctgtgcctacaacaaatcacttacctgcacttatatccaaaaactctggattagaacaaaattcccctgaaataaataaaaaaatgcttattagtgttatccctggtgaacaggtagaagtcgctatctctagtgatggtcaactttttgaatattttattgaaatgaaccatcatgcaaaaattagaggtaatatttataaaggtgttattaataatattgatgcaaatcttcaggcagcatttattaactatggcaatacaaaaaacggattcctacaaatagatgaagttcacccagaatactaccttcaacctcatgagccaacaaaactaaaaaaatatccacctattcaaaaagtacttaaagctggtcaagaaatacttgtacaagttgtaaaagagcctactggtaataaaggagctttccttaccacatggctttctcttgctggacgatttcttgtacttacaccaggacaagaacaaataggtatttccagaaaagtagaggatgaagaagaacgtacccgactacgtgaacttattaaagggcttgatccagggagcggtcttggagcaattgttcgaactgttagtattggtacaagtaaaacaacacttcaaaaagaccttagttttcttaagcgtgtttggagagaaattcgtaaaaaagctacaacagaaaaatccccatgtctaatctatgaagaacctggtctagctactagagccgttcgagattatcttgctgatgatataactgaaatttgggtagatgatcctgaaaccaaacaagctatacaagaagtaactacactgctctttcccagaaaaacaaaacttgtacatttataccaaaataacaatgaacctctttgggaacactttaaacttaacaaacaaattatacaggtacattctagagaagttataatgccttccggaggcagacttgtttttgatcaaacagaagcattaatggctatagatatcaactcagggagaattgcaggaaaaacaaactttgaatctatggcctatcgtacaaatatggaggctgctgcaactatagctcaacaacttcgcttacgtgatatcgggggacaaattgttattgattttatagaaatgaaagaacctgcccactgtagagatgtagaaaaagagcttcaactggctatgaaagcagatagagctcggcatgacgtagggaaaatgagttcttttggcttgttacaagttgtccgtcaacgtattgggtcatctgctatctctattagccaggaaacctgtccatactgccaaggaacaggtcaaagacgaaatattgaatggcaggctattcaaactttaagagaaattcataaaaaaatgcaacaaactgttaccgctggtaaacatgaatatattcatactctagatcaagaacttggtctttatcttcttaataataaacgtaatcgtttaattgctcttgaacaagaatttggcattcatcttgacattcgtatttcactcctacaaaaaatagaaaatagtgatttataa

SEQ ID NO: 9672 - DNA, 594 bp, Lawsonia intracellularis
atgaaaaaagtgcttatccatttatgctgtggcccatgtagtattattcctatacaaatactacaagataaaggctataaagttagcggatactttgctaatcctaacatacatccactatcagaatatttacgccgaagagaaagtactgaagaagttgcaaacaaaatgggtattactatgttttggcaagatgacatctataatgtttctaactggttagaaactgtctatcagaaaggaattgcagataacaaaggtggtcttcgctgcctttattgctatgatagccgattaaaacttacccaaaaaacagctcaagctcatggatttgatgcattcacaacaagtcttttttactcaagacatcaaagacatgaacttattttaaaagcaggagaaaaaattgaacaagaatctcctaatgttcaattcctctatcaagactttagatctggatggcaaaaaggcattgatactgcaaaagaatggggactttatcgacaaaattattgtgcttgtatttttagcgaaacagaacgcttccaaaagaagcttaataaattatcaaatgttactaccccttcttattaa

SEQ ID NO: 9673 - DNA, 1977 bp, Lawsonia intracellularis
atggagattccttttcttaaagacctagtttatattttttgtctttcaattggtgttttgcttatctgtctcaggttgaaagttcctgcgattgttggttttttattaacaggtgtactttgtggtccatctgctttagggcttgtagaaaatgtccatgctgttgaacttctttctgagataggtgttgttttacttctttttactattggcatggagttatcaggtgaagaacttgcacgtcttaaaaaacctgtatttgttggaggtactatacaggttgttttaaccacaggtgttatgtgtggtattgctatgctttttggaaggacattccctcagagtattttaattggttatcttgctactctttcttcgacagcaattgttttaagtatccttcaacagagaggtgaatcagaagctccacatggtaggcttgctttatctgtattaatttttcaggatttagctattgtccctatgatgctctctattccattattagcagggcagggagaggctgatcctatttcatttttgttatctgcaggacggttggttttaattttaggtggtggctggtttcttgcatatcgtgtagttccagttcttatgagacaagtaatgcgtactcgaagtcgtgaattgtttcttatgaccagcttagggttttgtttagctgttgctgttggtacagcttatttaggattatctcttgctttaggagcatttttagcaggacttctactagcagaatctgaatatagtatgagtgtagttgagggtatattgccatttaaagatgtttttactagtcttttttttattgctgtagggatgttgctagatgtacacttttttatagatcatattggaagtgtcattgcattggcagtaatattgatcaccatcaaagttttgctagcaattcctgcaatgacttttcttggttatccattaagagttgctataatggcggcaatgagtttgggacaaattggagagttttcttttgttcttgctaagtctggtgtagaccatggatttcttgatgctattggatatcaaaattttcttgctgctagtatcctaactatggttttaactccaggactcataagtatagccccaaagacagcaaggtttattgggaagttttttaatcatgataattcccaagaaaaacctcttctaactcatcaaggagaattacaagatcaccttattatagttggttttggtttaggagggaagtatcttgcacgaacagctagagaaacagggattccttatgttattcttgaaatgaatcctgatacagtccgaaggcttagagatcaagagcctatttaccatggggatgcttcacatccattagtacttaagcattttggggttgaaaaagcaagaatacttgttgttgttatttctgattctgcagcaactagaggtatcactgctgcagcaagaaagttgaacccatctttacaccttattgtacgtacaagatttttaggtgaggtcccatatttacatgagcttggtgcaaatgatgtcatccctgaagattttgaaacgtctatagaaatttttactcgagttcttggatactaccttattcctagacaaactattgaaaaatttgttcatagtattcgaagcgaaaactatgagatggtgagggatttaaactttcatggggcaaacttaccttcattgacagaagagcttctttctgggcttgaagttacagcatgtaaagtagaagctggatctgatatggaaaataagaaattgttacatacagatttacgtcgcaaacatggtgtaactattgtaggtattcgtagaaaggagaatataatagcttctcctggtcccgatgaagagttattagctggagatacagtttttctttttgggacatcttttggtatttctcaatctatagagctatttagagcacaggtataa

SEQ ID NO: 9674 - DNA, 1416 bp, Lawsonia intracellularis
atgcttttctcaccaattcgtcataaaattgaaaatttaaaaattattattgttggtgctggtgaagtaggctttcatattgctcaacgtctttctgaagaacataagcaagttattgttattgacacaagccaagaagcattacgaagagtccaagaaaacttagatgttcaaactattcatggttctggatcaagtccttccacattaaaaactgcaggcattgaaacaacaaatatttttcttgctgttacagatagtgatgaaataaatattacagctacactttttgcatatgctttatcaccccatattattaatttagcacgaattcgtaatgaagaatatgcctcttatcctgaacttattgaaaaaggtccattaaatataagtatgcttgttaacccagaagaagaagttgttagaactattgaacgacttcttatgcttcctggtgcagtagaatatggagagtttgatggtggacgaattaggttagttggtatacgtgtaatagatggtcccttaatagatcaacagctctatcactttcgagatattgttaataatgacggtataatggtagctgccatctcaagacaaaaaaaacttattatacctagtggaatagataccattcaaaaggatgatattgtatattttatatataaatccaaaaatcaaaaagaacttctaagagttttaaataaaagccatggaataattaatgtagcatgtattataggtgggggtaatattggtgtccgacttgcaaaagcttttgagcaaagagatattaaagtaaagctgattgataataatgaagctcggtgtaaaaaacttgctgatagattaaattctactcttgttttgtatggagatggcactgataaatctcttttagaggaagaacatattgatcaagctgatgcatttatagctgtaacaagtaatgaagaagtaaatatacttgcttgtcttttagcaaaatcgcttggcgtcaaagaagttgtagcaagagttaataaacatgcgtacttaccattaattgaagctacaggtattaaccacattgtaagcccaaggttatctgcagtaaatagtatccttcattatatacgacaaggtggtgtactctcaactttaacagttggaggagaagccgcagaaattattgaagtattagttcctgaaacatctaaccttcttaaaaaacctattagtaaactcaatttcccacatggagccttactcttaactatattaagagaaaataaaagctttattcctagtggacaaacgattattgagcctggagatcgtattgttattatctgtcttagagaaattatgaaccgtgttgaacaactacttacagaaccacccctagaagaaagtacctctgtcacgttataa

SEQ ID NO: 9675 - DNA, 1467 bp, Lawsonia intracellularis
atgcaattacgctctgttttttttattattggtgttctcttaatatgtattggaacatctattattttccctttacttacctctatttattataatgatggagtagcaaaagacttagcattgtctttatcagtagttattataagtggatttttattagcctttatttgccatcaaaataaccccataattctcagtaaccaagaaggatttgctgtagtaggcctatgttggattattgctagcattgctggttcactaccttatgtatatattggtatcccctttacagatgctgtatttgagactgcatctggttttacaacaactggagcaactattttaacagatattgaagccatacctaaaagtatactcctatggcgaagcttaacacactggcttggaggaatgggaatcattttactctcacttgctgtactcccattacttggagttggagggatgcaactatataaagcagaagttcctggtccatcaccagataagttaacacctcatatgcaagatactgcaatgcttttatggaaagtttatggtattatgactcttttccaaattatacttctctatcttgcaggaatggatctttttgatgctattaatcaaacattttcaacagtatctacaggtggattttctacaaaaaataattccattgctgccttcccaactccagtaattcaatggataattattctatttatgtttgcatcaggtataaactttactcttcactataaattactattaggactactaccacactacacccatgatacagaatttaatctatatacactactccttattataggagctatcactattggtgtgttacttattttttatcatatctatccttctaataccttatctcaaatagaacaaatagttagagctagtgtctttcaacttgtttccatctgtacaacaacaggattcatcacagaagactactctaaatggcctcaactagctcaaggtattctacttttttttatgttcatgggggcatgtgctggttctactgctggtggcctaaaaactatgcggattatagttattgcaaaagttgcctatcaagaaatatttagactattacatcctcactctatacgttttgccaaacttggcgataaaactattcaaaaagatgttctctctggtattataggatttctaattctttacctttttattttactcataaatacgcttgcacttatggcactaaactatgatcttattacctctttttctgctacacttacctgcctttccaatgtaggaccaggacttggtagcgttggaccagtagataacttccatcaccttgataacatagctaaatggtttcttattttttgtatgttattaggaagattagaaatttatgctatccttattttattcattcctgaattttggaaagcattaaaataa

SEQ ID NO: 9676 - DNA, 663 bp, Lawsonia intracellularis
atgaagggtatattaatgggtaaaacaaacttaggtattgatcaagaaggattcccctatattgctatttttgctttttcatcactcatttttgctatattaggctggtggcttttggctgttctttgtttaatagggacaatattttgtggccactttttccgtgatccagaaagaattataccaacagaagcaaatattgccgttagtcctgcagacggtaaaattattcgtattgaacctcgacaagatcctattagtggagaaagtcatacttgtattagtatttttatgaatatatgtaatgtacatgtaaaccgctcaccaataaaaggacaaattgaagcaattcaatatgtacaaggtcactttcttaatgcatccttagataaggcagctaaagaaaatgaacattgttcttacctccttagggatcaagatggtaagcaatgggtagttgttcaaattgcaggccttattgctcgacgtattgtttgtcgtaccaaagaaggagatattttaaatcgaggggaacgatttgggatcatccgatttggctcacgtgttgatttatacttaccagaagaatatactcctacagttaatcttggaaataaagttatagctggagaaactatcttagcaaaaaaaaatcaagaatag

SEQ ID NO: 9677 - DNA, 750 bp, Lawsonia intracellularis
atgcaagaaaaaaaaatcactcctaaaggggtatatatcctaccaaatatttttactctagctagtttattcttagcctttattggtatgatacaagttatagggaataaatttcatatatgtgcacttattattcttggtagtgctgttttagatgggttagacgggaaaatagctaggcttacaaatacatctagtgaatttggtgtacaactagattctcttgtagaccttgtagcatttggtgtcacacctgcatttttagcatggaaatttggcttagaacaatttggtaaacttgggatttgtatctcatttctttttattgcttgtacagcactaagattagcacgttttaatatttctacatcaattctatgtaaaaaattttttgttgggctaccttgcccaacaggaggatgttctctagcattgtttatcctatttacaccataccttcctaatttttttaataaaatacttccacacatactacttacacttacttttattctttctttacttatggttagtcgaataagatacttttcttttaaagaatatggatttttaaaaacacatacttttagctctatggttactgctttacttctttttgtattacttttatcagagccagcagttatgggttttatcctatgcataatatatttattatctggcccaatctatacatatattttcctacctaaacgtagttatcctttagggaaaattgatcttctttaa

SEQ ID NO: 9678 - DNA, 651 bp, Lawsonia intracellularis
atgataaaagaaaatacaataaaaaagcagcgtgcagcttgtgtattatcactattaaaaaaaagatatcctacctttgaaacacatttagtagcaagcaatccttgggagttactaatagcaacaattttatcagcacagtgtacagatgcacgtgttaatcaagttactcctattttattcacacgttggcctgacccttctgctttagctttagcaatgttagaggaggttgaacaagtaataagaacaacaggtttttataaaagtaaagcaaagcatattatagaaacagctaaacgtattatgtataattataatggagtagtaccacagactatggatgaacttatcactcttccaggagtagcacgtaaaactgctaatgttgttctttggggtggatttggtattaatgttggtattgctgttgatacacatgtaaagcgtatttcctatcgtttaggtttaacagcaaataaagatccatctttggttgagaaagatttaatgaatttgttcccccaaagtgaatggggtgctataaatcatagaatggtttggtttggtaggcatgtatgtaaagcaaaaaatccactatgtactctttgtgaaatgaatacattttgtccacataatggtataaaatag

SEQ ID NO: 9679 - DNA, 321 bp, Lawsonia intracellularis
ttggttatacttgtttacatcacagcaccaaatgaaaatgaggcagagtatcttgcgactatgttagtaaaacaaaaagttgctgcctgtgtaaacattatccctaaagtacagtctgtttatctatggggaaatagcattcataaagataatgaagttattttattagtgaaaactattgaatcccactttaacaagataaaagaaattgtatgtagcatccacagttatgataccccttgtattattgcactgcctattatcttaggagagaataagtttcttgcctgggtagaagatacagtcaaagaggagcattaa

SEQ ID NO: 9680 - DNA, 942 bp, Lawsonia intracellularis
atgatctatattgctggttcattagcttatgacaagataatgaatttcccagggaaatttgaagagcatattttagcagataaactccatgttcttaatgtatgtttcttaataaatggacttatagaaaaacgtgggggaacagctggaaatattgcatataccctttctcttatgaatgaaaagtcttatatcctttcttcagtaggaactgactttgaaaattatgaaaaatttttatcatccttaaaattacctcttgatgggatcagaaaaattccagatacactaacagctgtagcctacatcacaacagatcaaagtaataaccaaataacaggattttatcctgcagctatgaacttcccatgcctatatgacttacctcagcttaacaaaatgcatgattgggctattatttctccaacaaatatagaagacatgcaaaaactaccaactatcttctatgaaaaacaaataaaatatatttttgatcctggtcaacaacttccagtcctttctaaggatgatcttttaaatgcaatcacaggatcatctattcttgtaactaatgactatgaatttgaaatgatttgtaaaaaaacagataaaacaagagctgaattacgctctctaacaggagcaattattactacacttggtgatcaaggggcattaatacatacagataaagaaatatctattggaattgcagttcctaataaaattatggaccctactggtgctggagatgcctttcgtgctggacttctaaagggcttaatacataatttggatatagtagagtctgcatatcttggttcgactgcagccagcttttgtatagaaaatagtggaacacaagaacatacatttacttatactacattttcagagagatacaaaaaagcgtttaatgaatatcccacactatcttggtag

SEQ ID NO: 9681 - DNA, 1725 bp, Lawsonia intracellularis
gtgataaaaaaagacattttataccaagacattacattagatagaaataataataataataaagaaaaaaaaatagctataacaaatagccaccaaatatacaataaaaacaatgtattaacaaacctactttcacttgataaagaaattattaccctacttgctaagcgagcacatttactttcaaaacttccaaaaacaggtttatcagcccatgagaaacaactacgtatttcatgggaaaaaagtgttacaatgctcagtaaagatccacagtttactcgtcaactgtttaccttaattcaaggaattgaagtcataccagaagctatagaacagatttctgctttctgcctttcaccaaaaaataaacctgtgaatattgtattaccaataccatcatgttttcgaacaacacagttaaacattgcaatggctgtctgttctaattctgaagggacattacaacatgtattactaaatgaccctatcatagaatgcataaaagcatttaaccaattaggtgcatctctccactgggaagaatctggctgtattatttgtagtaacccaaactttacaagaaaacattataaaaagtctatacaaatagatacagttatacatataggtaatgataccttatccttatacctccttattttttttatagctacttgtccagcacgagttaagtttatagggaaaaactctcttaaacttgcagacttttcacctttacgtaaatttcttcctatgattggttctagacttataaatattattcctgggcaagatgggcttcctataagaattgaatcttcagcaatacttccatctgaaattataatccctacagatttacctgttgatgctgttattgctttgtttattgctgcaacacggtgggataaagagctacttattgatattaaagaacatcctaatgtaacatatattttagataagataattccactatttgaacagtggcaaataccttttcaaaaaattatattcaataaacaagttacagcaatatctattactccaaataaaataacttttcctgaaaatccaatgataggaacatacgtccctgggacagcaacattactggccctacctgcatttgttggaggaacagttactttaaaacgccagtaccaacaacataccgatatttgtttattaatagaagtattaactcaatttggtcttaatattacagaaacagcagatacaatttgctgtacaggaagacaaataggtctcacttcctcttctttgaatataaagacacttcctaaagaactatttccacttatactcacattactatgcattccattactcaaaagtgaaacaaaccttcttccagagcttcctgactatgttgatgaatcaatcctagacagttatttagcacaacttggacttgtcagaatgggttcaaaagtaaaacttatttcaccaacacaaacaccttggactagtccttcagacacatggggattagctatctctttagcagcctttttacgcccacaaattaaacttagtaatcctggatgtgtagaagctatttatcctaactactggaaaatatataacaaactaccaacaggagattatacaatgcaatcttctaaaaaatattccccaacacctgttgaactatctgaaacaaaaaaagttaatcgacgtagaattattactgaataa

SEQ ID NO: 9682 - DNA, 834 bp, Lawsonia intracellularis
atgggaaaaagttcaccatcaaatccaccatgcatactcactattgcaggttctgattcaggtggaggtgctggcattcaggcagatcttaaaactattgctattcttggtggatttggtttaagtgttattaccgctcttaccgcacaaaatggacttggagttacaggtattcatacaccagatccaagctttatagaactccaacttaatactatttacaaaggtttttttgtaaatgtgttaaaaacaggaatgctcttttctgttcctattattgaaatagttaaaaatatcataaaaaaacaacagactctagcagtaattgatcctgtatgtgtaagtcaaagtggataccaactactagaacatactgctatagatgcattaagaactcatattctgcctctagcaatgttggttactccaaataaacctgaagcagaacttcttacagaaatgcaaatagaatctgaaaaagacatctatattgctggtaaaagactcattgatatgggagcaaaagctgttcttattaaaggtggccatttttataaaaataacttagtaactaattatgttgattggtatattgaaaaaaatagtactaatccaatacctctttctcaaccagctataaaaacaaaaaataatcatggaacaggctgtaccctttctgcagcaatagctacctatattggccttgggttagaactaaaaaaagcaattctacaagcacaaacctatttaaactattgcctcaagtttagttatactccagggaaaggtatagggccacctaatcatacagcatggctcaatagaaaactataa

SEQ ID NO: 9683 - DNA, 816 bp, Lawsonia intracellularis
atgatattaacttattggggaaatatttttgaccacttttttctaggtatattttcttttataatttttagttgttgtggctgcgaatctaatacttcccttaataatcttacagaagcttatcagtatatagaaaaaaaagagtggagtgcagcagaaaggtatcttgaattatacttgcatgaggaagaaagattagatttacgttttgaggcatggaacaaacttttagaagttggcggttaccttacatataatgatagttggatgattagttgcttagaagaaatgtatagtgaatttgaagaccagcctgaacaaataaagtctgtattatggcgtttagcattagcatatgatcgtattagaaattataataaatctatggaatattgggagaaactttttattcagccaggattatctgttgaacagcaggcaaacattcttcgtaagttggcaagtagtagtgttaaaatacatcgttttgatatagcaaataattatcttaaaaattgtttagaattaccactatcttcaactaaccgactagaatgcttattagatagagcagatgttgcttcttcaatggggctttttgatgaaggtgcatcttatgctttacttgttttagagtcagacgaagcttcaattgaattaaaaggtaaggcaggatttatccttgcagatattaaagaacaacaaggtaatattcaaaaagcaatagaactatttaaatctataagggaatattatcctaatgcaatggttgttgatcagagattacaattattacaagcaaagaataagcattaa

SEQ ID NO: 9684 - DNA, 2463 bp, Lawsonia intracellularis
atgtcgcaaacagaacaccatatatctatagaacaggaaatgagaaaatcttatttggagtattcactcagtgttatcattgggcgtgctattcctgatgttcgtgatggacttaaacctgtacatcgacgtattttgtttgcacaacaagaactgggaaatagttatacacgtccacctaaaaagtgtgctcgtattgttggtgatgtcattggtaaatatcatcctcatggtgatagtgctgtttatgatgcacttgtacgtatggcacaagatttttctatgagagaccctcttgaagaaggtcagggcaattttggctctattgatggtgatgcaccagcggctatgcgatatacagaagtccgcatgtcacgattagcaagtgagttcctatcagatattgataaagaaactgttgattttcgccctaactatgacaactcattagaggagcctattgtattaccaacaaaagttcctaatttgttactaaatggttcttctggaattgctgttggtatggctacgaatattccaccgcataatcttggggagctttgtaatgctctcttaaaaattattgatgatccagatgttcctattgataatcttttaaacattatacatggtcctgatttcccaacaggtggttttatatatgtggggcaaggtctttatgatgcttatacaaaaggtcgtggaacagttaaagttcgtgggaaagtagaaattgaagagagaaaaaaaggagctcaatctattgttattagagaaattccttttggtttgaataaatctagtctggtagaaaaaatagcaatattagttaatgagcgaaaaattgatgggattgcagacttacgagatgagtctgatcgtaaaggaatccgtgtagttattgaacttaagaaaggtgttattcctgagattattattaatgcattatataaatttacaccactagaaacttcttttggtattaatatgctagctgttgtagataaccgtcctcaacttttaactataaaaagtgcattaacatactttcttgatcatagacgtgaagtaatagtacgtcgtactcgttttgaacttaacaaagcagaagcaagattacatattttaattggtcttattcatgctcttgatcatatagatgaagttgtaaacttaatacgaagttcttctactcctgcagaagcaaaaatacgacttatagaacgtttttctctttctgaaattcaagcacaatctatcttagatatgcgtttacaacggttaacaggtttagaaagagaaaaattagaagaagagatgcatgagttacaaacaaaaattgcttggtatgaatcaatccttggagatacaaaaattctttggggtgttatccgtgacgaagttactggaatcaaagaaatgtatacaacccctcgtcgtacagaagtaatacgtgaaacccttacaaatatagaaattgaagatcttattcctgatgatgatgttgtaattacactttctagaagaggatatattaaacgaacaaatcttgcaatttatcaacaacaacgtagaggaggaaaaggtgttgcaggacttcatacaagtgaagatgattttgtacaagagtttataacaacaacaaatcatcaatttttattgctttttactaataaaggaagaatgcatcaattaaaggttcatcaagttccagagggtagtcgtacagcaaaagggacacatatagcaaatatagtcccattagaaaaagaagaatgggtgacaacaatcctgactgtaagagaattttcagacaataagttttttctttttgccacacgtaaagggatggtaaaacgatcaagtgcttcttattatgctaggtctcgtagaacaggtttacttgctgttggactacgcgaagatgatgaactgattatggttaaagaggttactaataatgactttattgttcttgcaacagcagaaggttttgctattcgttttagttgtgaggatgttcgtaatatgggtcgaggagcagctggagtaaagggtattgctttacgccctggagattcggttgttgcttgccttattcttcaagaaaaacaagatacaccagcaattatgactgtatctaatcttggttatggtaaacgtaccagtattgatctttatagagttcaaactcgtggcggcaaaggaatcattaattttaaggtgacacaaaaaactggtcttgttataggagctaaaccagtttctgatgataatgctcttgttttacttacctctacaaataaaataatccgtatgagtgttgatgaagttcgttctgccggtagagctactatgggggtgagactagtgaaattagatgatggagcatatgttgttggttttgatacagtagatggcacagtagatgatagttgtgatgatgccacaatcaatacttag

SEQ ID NO: 9685 - DNA, 2400 bp, Lawsonia intracellularis
atggcatcaaatagcgaaataataccaaaagattatacagcagattctattactattcttgaaggccttcaagctgtacgtatgcgtccagctatgtatattggaagtactgatacacgtggacttcatcaccttgtttatgaagttatagataactcaatagatgaggctatggctggtttttgtactcggattgatgttgttcttcatcttgataatagtataactgttagagacaatggtcgtggtatccctgtagatatacatcctaaagaaggtgttcctgctgtccaagttgttatgacaaaactccatgctggaggaaaatttgataatgacacttataaagtttctggtggattacatggtgttggcctttcttgtgtaaatgctctttctgaacaacttgaagtaacaattttacgtggtggttatcgttggaaacaaaaatatagtcgaggtgttccactagaaaacttacaacgtataggtgaatctgataatcatggaacaacaatacgttttaaagcagatgaagaaatttttgaaacaacagaatattcatatgaaacattaaaaagacgatttgaagaacttgcttatttaaataaagggcttgaaattcattgtacagatgaaagaacaagtgaaacacacctttttaaagctgagggtggaattcatcagtttgtaaaagatataaatacaggtgaaagcatattacattcaattatttcaagagaatccattgttgaaggtgtaatgattgattttgcactacaatataatgctggttataaagaaaatacacttacgtttgcaaataacattcgaacaaaggaaggtggaacccatcttgctggatttaaaacagcattaactagagctataaatggatatataaaaggtcagccagatttatctaagaagttgaaaggacaaactctttctggagatgacgttcgtgaaggtttaacagcagttttaagtgtaaaattaccaaacccacagtttgaaggacaaacaaaaacaaaactagggaatagcgaaatagcaggaatagttggtggagctgtatatacaagtttagacacatattttcaagaaaacccaaaagatattcgatgtataatagataaagctattgatgcagctagagcacgtgaagctgctcgacgagcaaaagaacttgttagaagaaagggagcgttgtttgataatgcactccctggtaaacttgctgattgtcaaagtaaaaaccctgctgaatctgaactttttattgttgagggagattctgcaggtggttctgctaagcaaggaagaaatcctaatattcaagcaatattacctcttagaggaaaaattttaaatatagaacgtacacgttttgataagatgctagcaaataaagagattaaagcattaattacagctatgggagctggcattggagaagaagatactgactatcaaaagcttcgttattataaaattgttatcatgacagatgcagatgttgatggggctcatattcgaacattattacttacattcttttttcgtaactatgttggacttattgaacgtgggcatttatacatagcacaacccccactataccgtgttcataacagtaaatcagaaaaatttataaaagatgatccttctcttaatgattttctccttcatcgtgtaagtagtgaactagaaattcaaacagagagtggaaaacttttaaaaggttctgatattattacaactatgaagcagatagaatctatatcacaacgaactaaagatgctgaattagcaggaatttctgaaaatctttttatgttattaattactagtcctaaaaaacttacttctgacgttttatcttcattagaagaaattcaattatatttaaatacatcaggttacaacattactgtagaaaatgaaagtcatgaggatggagatagattatttactatttttgaaaataaaaatggacataaaacacgtatacctgcagatttttttgcttctaaaatttattccagtacttgggacgtgatggattcacttctaacaatgtgtggtggaataaattttattgtttttcatagtggaacatctcatacaattaatgatctttttaaactttatcaatttacacttgatgaggcacgtaaagggataaatatacagcggtataaaggtcttggagagatgaaccctgaacagctttgggtgacaacaatggatcctcaaaatcgtacacttcttcaagtaacaataaatgatgcagaagaggcaaatgagacatttgaacaacttatgggtgaacgtgtagagcctcgccgtgaatttattgaacgtaatgcattaaatgtaagagacctagatatttaa

SEQ ID NO: 9686 - DNA, 1152 bp, Lawsonia intracellularis
atgttgttatatataaataaagaacacattattgatggtcttcaaaaagttgcaaatattattcctgcacgctcaggtgctgcatatttacgtacactttggatgaaagcagaacattcaacgctgacaataatggctacagatgcaaatattgaatttatagggaattatgaagctgatataaaagaaactggacttgtaggagtaaatggaagaaatttaattgatcttattcgtagattacctgcaaaagaactttgtctacgttttgattcaacatcaggaacacttattcttgaacaagaacgtcgtacatataaaatgcctattaatgaccctatttggtttcaacctttaactttattcccttcagaagaaagtgtagtatggtcagctgacttttttcaagaagtcattgatcgagtatcattttgtattagtgatgatgaaggttctgatgctatttcatgtctttatattcaaccttctaatgataactatataaatgtatgtggtttaaatggacatcaatttgctttaacacggtttataaataatgagttaagtgaaaaaattcctagtgaaggaatacttattcctaaaaaatatataacagaacttcgtaaatggttaggagaaacagaaatagaaatagctataacagaaaaacgattttttgcacgaacaatagatagtaaagaaacaataagtgtcccaagggcgatatttacctatcctgattatacagcttttctcactcgactaacaggagacaatatgtcttttcttaaacttcaaagaaaagattgtcttgagtcacttgatcgaatatctatttttaatactgaaggtgatagatgtacctattttgatataaaggaaaatgaactcattctatctgcacaagggcaagacacaggatctgccaatgaatacctagatgttacttatacaggtaatataaataaaatagcatttccgactaaaagtcttatggaaatatttaatcactttgaatcacctactatcactttagcaatgtcaagtgttgaagggccatgtggaataacaggtgatgaagataaagattatactgtaattattatgcctatgaaaattgttgaacaaaattattatacagaagaagtataa

SEQ ID NO: 9687 - DNA, 1323 bp, Lawsonia intracellularis
atgaaagaacaattacgtcgatctcttttagcctctcaaaaaaatttttgttctaatgaagaacttcaaagttggtttgatcctctaacaatcaaacatagtgagaatcctccatccatatatgttacttttccacatcgtttttttggatcctggtttgctaatacctttcaaaaaatatttgaagaaacctcatatgaactttggggttatggagttaatttttattatgatgaagttacaacaaaagaacctttatattatccaataaaacaaaacaaatctacacaacctactaacatatcacaacattttgataattttattattaatggaaaacatagttggattatttctattatagaaaatatactttgctcagtttctgaaaatatacttaaaaatacatctgaagaaattacacaactccttgttctatttgggaaacaaacaacaggaaaaacacacttattacgggcaatagccaatgaactctcaaaaataccatcctgttcttttaaatataccactactgatgagttagctttttctttaaataaagaacctctttttttatttagagaacatatacaaagtcatcatattattctcattgatgacttccaaagagtatcatcataccctgaacttcaattagaactaactattttacttgattattataaagataataaaaaaattcttataatctctggaacagatcatcctttaacatggaatgtatctaaagaaatatattcacgtcttgaagttggactctggggtgaactcccagaacctgatcttgatattcgatttagatatgcacagcaactttctaaagaaaagaaatatatccttccaaaagaacaactacttattatttcacaacattgtcatagtctacgttgtctctctggaattctacatagaacaattgctcataaaacattattgaatagagaactttcagaaaaagaacttattacacttattaagcagacaggagaaataacatctatttctccacaacttatcattatgcttgtaggagaatgttatggtttttcagctaatgatattattagtgaaagccgacagcaacaactagtattagctcgtcaagtagcaatgtatctctgtcgtgaacttctaggatattcctaccctgctattggtcgactttttggtggaagagatcacacaactgtacttcattcagtaaaaaaaattgcattattacaagataatgaccgagttatacacaccatgatacatgaacttatacaaaagtgtaaaaatgtaaaaaatgatgaaagataa

SEQ ID NO: 9688 - DNA, 1335 bp, Lawsonia intracellularis
ttgcaaaaatattatgtaaaaacatactctactggtgcaatctttttcatttttttcttactattaattggtggatatttcttttttttgaagcataaagaaatattctattcccacgggaaaactaatgaaaaaatttttttagaagaaagaagtactagttattcttttttgaacagtaaagataataatacaataataaagaaaaaacaggatgctcaacaggtacacattgtttctggagttgtaaagaaaggtcaaaatagttttgagataataggaacacatgtttcccctgaaaatttttataaaatagtcaaagcatcggaacaagcacattctcttaaaaaacttagagttggacaaccatatactctttttaaatcgtcttctaatggaagtttaattcgttttgaatatgagataaatcaaactaaaaagttggttattgaaagtaataattcagaatttaaagcatatcttcagcctatagcatacgactgtcaactctcatgtatttctggtgtgattcattctaatttatttgattcaattattgctacaggtgaatcacctcttttagccctatcaatggtagatatattaagttttgaaattaattttattagagatttaagggtaggtgattcttttaccatactggttgaaaaactttttaaggataatgtatttaaagggtatggtaagattttaggtgtaactttttataataatggttcttgttatgagggctatagatttatagatgataatggggttgagcagtattataatgctgaaggaaagagcttaaagcgagtttttcttaaagtcccattagattttaaacgtatttcttcaaagtatagtttaaacagggttcatccaatttattgtgatgttcgtccacacttggggatagactatgctgctccatttggcactccagtaaagtctattggtaatggggttattatgaaggctggttgggggaatggttttggaaagatggttattgtaaaacataaaaataatattgaatctatgtattcacacttatctggtttctcttctaatttaaaagtaggaacaaaagttaagcaagggcaagttattggatatgtaggtagtacaggtctttctacaggcccacatcttgacttcagaattagggaaaaaggacaatatataaatcctgaaaaaattttcaatcctcgtatgggacctgtttcacctcatcaacttgaaaaatataaagatttcattgttgagataaaatcttatatggatggtaatcgtaatcctgaagaatatactcctgacagttttttatag

SEQ ID NO: 9689 - DNA, 1101 bp, Lawsonia intracellularis
gtgtcttctattacagaaagtgattttttattatcttcttatatgttctctttacctaaaactcagattgcacaatatccctacgagagagggaaatcacgccttcttgttttaactaaaaaaaatagtactattattcacacagatttttcaaaaattgaacactatcttcctaacaattctttacttatagctaataattcccgtgtgttccctgctcgtattttttgctcttatgacaaaagaaatatagaagtttttttattaaccccaatatcttttttagaaattcaagctaaaagttctgatgaacactatggagcatggagtaccgccataggagagtgccttataagaccagctaaaagggtaaatataggatcaaagctttatttacagcaagagttagaaattgaagttttgaaaaaagaagactttgggcgtcatattgttaaattatgctggaaaggttctttatcaaatatttttttttcctatggggatatcccgcacccaccttatatacatcaaagtaataaggttcaggataaggaaagatatcaaacagtatactctagattagataagctgggttctgtagcagctcctacagctggattacacttttctgaaacgattcgtaataaattacaaaaaaatggtattagttgggcagaaattacactacacgtgggatatggaacatttagtcctgtacgctgcaatgacataagaaaacatattatgcattctgagtttgtagaagttcctgaaactacagttcaagctataaaaaaagcacggtttgaagggagacctatttttgcaatagggactactgttgtaagagcattggagggtgtaagtactatttgcggttcccttcaaccttatacaggttttataaatattttcatttctcctggatataagtttagttatgttgatggattagtcactaattttcatctacctggttcaaccttactaatgcttgtttctgcatttacaaagagaagcataatgattaatacttataataaggctattgaacttggataccgttttttttcttatggagatgcaatgttaattatataa

SEQ ID NO: 9690 - DNA, 1062 bp, Lawsonia intracellularis
atggagcaaaaacgtattcttataaaaggtaatgaggctgtagcttatgctgcagttgcagctggatgtcaatgttactttggatatcccattacacctcaaagtgaaatcccagaaatgctttcccacttacttccagagagtgggggagattttgtacaagcagaaagtgagatagcagcagtaaatatgttgcttggtgcaggtgcttgtggtgttcgtgcaatgacatcttcttcaagcccaggtatatctctaatgcaagaatgtatttcatatatggtggggagtgaaatcccaggtgtgattattaatatgacacgtggtggtcctggccttggaagtatagatgcttctcaggcagattattttcagtcaactaaaggtggagcacatggtggtgcaaggacatttgtcttagctccatcaacttgtcaggaatgttatgatatgactataaaagctttttctcttgcttttatatatcgaaatccagttttaatattgggtgatgctatggttgctcaggtcaaagaacctgtggtatgttggaagccagaaaaaaagttagaagataatgctgattcttggagattaaatggaaataaaggaagaagttctcgtttattacgttcactaaacttaaaagaaggtggacttgcagaacataataataatttattaagaaaatatctatcaatgcaacaagatattgaagcagaagagtactttattgaagatgcaaaacttgttgttgtagcatttggatctattggacgtatagtaagaagtgctattaataccttgagagaacagggatataaggtaggactatttcgtccattaacattattcccatatccttcatctatgcttgagtcattggctaaacaagggaaaaacttttttgttattgagcaaaatggtggccaaatggttgaagatgtaaggcttgcaatacgtcactacacagatgccaatgtacatcttgttcctgtaggtgtttctataggcgcagaagatcttttacagccaatatctgaattttttaggagaatataa

SEQ ID NO: 9691 - DNA, 804 bp, Lawsonia intracellularis
atgtctgtagtacctatagaaatagaagaacctagttatattataacagaagaaaatgcattccctatttcaccactacttaaagaagaaataacacactactgtgcaggttgccatcatgggatagcacaccgtttaattacagaagttcttagtgaaatggccttagcaggagaaacgataggtatagcttctattggatgctcttcttttatctatgactatatagatattgattgggttgaagctccgcatgggagagcctcagctgttgctacaggagtgaagcgtgcccttccagataaaatagtttttacctatcaaggtgatggtgacttgggtgctattggactttgtgagtcaattcatgcagctaatagaggtgagcatatttctgttttatttatcaataatacagtatatggtatgacaggtggtcaaatgggaccaacaacacttgtaggtcaaaagacaactacttctccaaaagggaggaatgcctcaaaagagggggctccattaagggttgcagaaattatggctggtcttgatggtgttgctttttctgctcgttgttctttacactccatgaagcatgttttagctgctaagaaagctatacgtaaggcctttgatattcaatataaaggtataggctatagttttgtagaaatgttagctggttgtccaacaaactggagaatagatccaagagcagcaaataaatatattgcagatgcaatgattcctgtatttccattaggaacatttaaagatattgtagaagataataaacgaggatag

SEQ ID NO: 9692 - DNA, 543 bp, Lawsonia intracellularis
atggtatcctatcataatgttgttatagcaggctttggtgggcaaggggttatgcttattggtaaccttttagcgcaagcaggtatggaggctggaaggaatgttacatatttccctgtatatggagcagaaatgcgtggagggacagctaactgtactgtagttatttctgaagaattagttggttctcctgtagttatttctcctctttctacaattattatgaaccaaccatcgttagataaattccaacatcgtatctgtgcagacggagtgcaaattgttaatacatcaatgatagaaaaagaagctattgacccatctaaaaaaacagtatgtgttcctgctaatgaactcgcagataaaataggtaatattaaaggtgctaatatggtggccttaggagcttttttaaaagctacaggctgtttatctcttgatgttgttataagtgcattagaaagagtcatttcttcacattatcatcatcttattcctagtaatatagctgctcttgaagcagggtatactttttatgcataa

SEQ ID NO: 9693 - DNA, 1293 bp, Lawsonia intracellularis
atggagtttgttcttgagtctatttctcctacaaaaaagaaacttactatctctttaacccctgatgaggtgaatacagctttagatagtgttattgctcaatataaaaaagatctttctttaccaggttttcgtaaggggaaagttcctaatagtgttgtctttaaaaaattttcagaagaaattactaataaagcaacagaagagacactaaaaatttatataaaagaaatttttcaaaaagagcatatcaagccactatgtaatttactgacagaagatacagattttattcgtaatgagagtttttcctctacattgacctttgaagttttacctgaaattacatttcctaactatgaaggacttgaagttcaccaagatgttgtaaaagtaacagatgaagaagttgcagagcttcttaagaatattcagctagctatggcagagttagtagatgttaaagaagatcgttcccctcaaaatggagatgttgttgatgttgattataaaggatttgaaaatggttctccagtaactgatgttagtggtgaacattttgttttaactttaggtcaaagacaggcattagaagattttgagcagttagttaaaacagctaaggttggtgaagaaaaagttggtattgtgaatttccctagagattatgctcataagggtttagcaggtaaaagtattgattttcatattaagcttaacagtattaaaacatctattcttccagagctagatgctgactttgctaaaaaagctggatatgaagatatagataaactcagagaggctgcaaaagtacagcttgagattaagaaaaagcaaaatgctaaatcaaatgcaatgaagaagcttataaatggtctattagaacaagttacatttgatgttcctgaaacaatgctagaaacaagaattgaacgaatattaggagatcataatattcgttcacaacaaacggtgcaggttcaaactggtgaggaacggtcagaatcagaagaagagttatataataatgcaaaagtggaagcattagctgttcttcgtcctcaaatttttcttatggctttggcggaaaaagagaaacttgttgttatggagcaagaggtagaaagagctttgtataatatggctattcgtgctagacaagactataataaatttcgtgacgcatattaccgtagtggtttagtttatgagttacaagatcatctccttgcagaaaaggcaatggaacttatatataataaagcaaatgtagtagaagtagagcagtag

SEQ ID NO: 9694 - DNA, 630 bp, Lawsonia intracellularis
atggatgatatttttaatatgacagtccctattgttgttgaaaataacggaagaaatgaaagagcttatgatatttactcaagactactaaaagatcgtattgttcttcttggtacagaagtaaatgatcaagtagcatcccttatttgtgcacaacttttatttttagagtcacaggatccagaaaaagaaatttatttatatattaatagccctggaggttcagtaactgcaggtctcgcaatatatgatactatgaactatattacaccaaatgtagcaacggtttgtatggggcgtgccgcaagtatgggtgctttgttattagctgctggtgaaaaaaatatgcgttatgccttacctaatagccaggtaatgattcatcagccattaggcggttaccaaggacaagctacagatattgatatccatgccagagaaattttacgtatgcgtcaacggttaaatgaaattttgatggagcagacaggacagtcacttgaaaaggttgcacaagatactgagcgtgactattttatgacggcagaagatgctaaagcttatggacttattgataaagtcttggtttcccgaaaagatttagatatagagcatgaaaaaacagaataa

SEQ ID NO: 9695 - DNA, 1254 bp, Lawsonia intracellularis
atgagtagaaatgatgaaaaaaatcctcaattattgtgttccttttgtgggaaaggggagtatgaagtaaagcagttgatagcaggagatggcgttcatatttgtgatgcttgtattgcttcatgtaacgaaattcttgttcgtcaggagttagaaacagtagaagagcaactactcacaccccaagaaataaaggaaaggcttgatgagtatgttataggacaggaagaggctaaaaaaattttagcagtagctgttcataatcactataaacgtgttttctatgcagaaaaaatatcttcagagcatggagatgttgaattagaaaagagtaatgttcttttagttggaccatcaggaagtgggaaaacacttttagcaaagacactagctaaaattctacgtgtaccttttgcaatagctgatgcaacaacattaacagaggctggatatgtcggggaggatgtggaaaatattcttgtccaacttcttcagaatgcagactatgatcttgatactgcaagtaaagggatcatttatattgatgaaatagataaaatttctcgtagaagtgatggtccttctataacaagagatgtttctggagagggtgtgcaacaggctctccttaagattattgaaggtacagaagcaaatatcccacctaaaggtggacgtaaacatccacaacaagaatttattcgtatgaatacatcaaatattttatttattgtgggtggagcatttattgggcttgataaaattgtagagcaaagaattcgtggtggttccatggggtttggggctaaagtttctggtaaaaaagagcgtcctcttggacaactacttgaacaggtacatccaaatgatcttgttcagtttggacttatcccagagtttgtaggtcgtatccctgtattaacgcatgttgatgatttaagcgaagaagatcttgttagagtgttagttgaacctaaaaatgctttgacacgtcaatatcagaaattgtttgagttagacaatgtaacattaaggtttacatcagatgccttaaaagctattgcgcataaagcaattgaacgtaaaacaggtgctcgtggattacgtaatgttatggagtcaattatgcttgatattatgtataaacttccttctatggttggggtgaaagagtgtgttattaatgatgttgtgataaatactaatggtgagccattgtatatttatgattcagaagtacaagtagctctataa

SEQ ID NO: 9696 - DNA, 2454 bp, Lawsonia intracellularis
atgcatacattaggagatgagcataaacaaactttagatgatgagtatgttgaactgccccttatgccattgcgtgaagtggttatgtttccccactctattattccattgtttgttggtcgagaggcatctataaaagcaatagagcatgctgtaactaattatgatagaaaaatttgtttggtagtacagcgtgaaccagaagtagagaagccttctcttgaaagtttatatcctattggagttgtaagtagaattttacagtttttacgtcttcctgatggcacaataaaagttctttttgaaggtttatatcgagtacattgggaacacttagactctgagaaaagtattgaaagttttcataaagttatggtgaaagctgtcaaagaatctacagcttcttttctagaaagtgaagcacttgttcgtgccacccatgaagccttagaggaatacacaaaaaataataaaaagattactcaagaagcattagctgccatttcaggtttacgtgatcctggaagacttgctgatgctataatgcctcatttaaaagtagactacattgagaaacagtctgttttagaacaattagatcctgttgctcgtcttgaaaaagtatatgagctattgagtggagaaattacagttagtacaattgaacggagaattaaaagccgtgtgaaaactcaaatggagagaaatcatagagaatactatttgagtgaacaaataaaggcaattcaaaaagagatggggcgagatgatgatcctcaagctgaattagctgatttagaaaaaaaactttttgaaaaaaatatgcctgaatatgcaagagaaaaaggtttaagtgagttaaaaaaacttaaacatatgtccccttctgcagcagagtatgcagttgtccgtaattatgtagattgggtttatgagcttccatggaatgaagtgaaagaaacagagattgatatttcaaatgctagacaaatacttgatagggatcactatggtctagaaaaaccaaaacaacgtattttagaataccttgctgtacaaaaacttacaggttcttgtaaagggactattttgtgtcttgttggtcccccaggagtaggaaaaacatctttagcacgctctgtagctaaggctacagagcgtgagtatgtcaggttgtcccttggaggtgttcgtgatgaggctgagatccgtgggcatcgtcgtacctatgttggtgctatgccaggtaaacttatcactgctctaaagagggttaagtataataatccattattttgtcttgatgaaatagataaaatgagtgcagactttagaggagatcctgcttctgctttattagaagtgcttgatcctgaacaaaatagtacatttaatgatcactatcttgatttagactatgatctttctcagattttttttattactactgcaaattcacttcaagggattcctgctccactaaaagatcgtatggaaattatagaactttctagttaccttgaagtagaaaagaaacatattgttaaagattttcttttgcctcgacaggttataaaacatggattaaaacctgaaaatatacgtatttctgaaaatgcattaacagaggttattcgttcttatacaagagaggctggagtacgtaatctagaacgtgaaattgctgctctttgtcgtaaggttgctataaaacttgttgaaaagaatgatatggataagactatttctattacacgacaaaacttaggttcacttcttggtgtgaaaaaatatcgtataaatgagagtgaaaaaacgcctaaaattggtgttgttaatggattagcttatacaagtgtaggtggtgtattacttaatgttgaatcagtaattatgccaggtaaaggaaatgtctctacaacaggaaagttgggagaagtaatgatagagtctgcacgtgcagcactttcatatgtacgttcccgttctgatatgtttggattaagaccagatttccatagtgaagtagatattcatatccacttcccagaaggagctactcctaaggatggtccttctgctgggatagctatcacaacttctcttgtatctgcattattagggattcctgttcggcatgatgttgcaatgacaggagaagtgactttacggggacgtgttttacctattggaggattgcgagaaaagttgttagctgctagtcgtgcagaggttactactgtaattgttcctcgtgaaaatgaaaaagatttaaaagaagttccagaagaaattctcaaagctttacatattcagtttgtagaacatatagatgaagtcctacccttggctttaatttctgaatcagaagatattttttcagaaatacatactgatgagccatttactacttctttacgacgacatactgtagaaataactacagcacaataa

SEQ ID NO: 9697 - DNA, 387 bp, Lawsonia intracellularis
atgtttaaagaaaaaatcactacaatgagccaggctcttaatgtacttagggtccttgatgataatacatcattaggaaaacttgtttgctctggtatacaacaactcataaaattagcagagccaatggataaaactatcccaaaaaattgtccttttaaacaacatttcttccatacattaaataatttacctctatgtgatgaagggcattggctcgaattatttgaagatcttgcctactttttcaaacaatactatacatcattccctgactcttatatccctattgagtgtcaacaggttatgaaatattttgaatcttgtggtgaatggacccctcaagatgggaaacttattagtataggatactgggcaacaagttaa

SEQ ID NO: 9698 - DNA, 990 bp, Lawsonia intracellularis
atgggagaaaataaaacacatggtatccttatcttaccatttattttaagtatattaggtatccttttctgtttttggaacttattagctccatctactgtaccatgtatatcttctggctgtaatctataccaaggtggtgaatttggtggattaacattttggtggtttggtattttgggatttggacttcttgctatattagcagtaattgggagggctaaattaggattatttattgctggagttggattatgtattgatattatcttatttataactatggtaatgacacttccttgtatggcatgtatgtttgttgggttattacttgctttaacattttatttttttaggaaaagagtttttttagctgagtcagattcagaagatgtagaaaataatcgttctttaatattaatatgttggtggtttttctttttattaaatataattctagtgattaagggtgcagtccccccatgggctttacctgttggagataccagttcttcatcatctgttgcgatatatttttcaccttcatgtacggcatgtcaaaagcttataatgaatttagcagagtctgaagttcaaaaaagttcatggtatcctgtggcagaaaagtccagtgatattgcagtgattgctaaacttgaacagcttcttaaaagtaaaaaatttacactagcagaagctttttctttatctatctcaactcagccactcactacattagaaaagttatctcccaaccatgtattgttacagttaaagttgtggattaatagatctcatgttttaaaagatggagatgggcgtatgcctttattagagtttaggggtacaccagctatgttgctttctagcattaagacaaatcatttgcctgtagtaggtaaagatgatgatatgctttctttggagtttgataaagtaggaatatgtggtgagggtgatgcacctaattctcaatcatgtactgaataa

SEQ ID NO: 9699 - DNA, 639 bp, Lawsonia intracellularis
atgtcattttatatcaaagaacttttttataccattcaaggtgagggagtacaaacaggtcgacctgctgtattttgtcgtttttctggatgtaatttatggtctggaaaagaaaaagatagagcaatagcaaaatgtcaattctgtgatacagactttttaaacgctgattttggtatcttagattctgaagaacaattagtagctaatattcttcaaacatttcctcaaaacaactatacccatcctagctataaaccatatgttgtttttactggtggagaaccatcattacagctaaatcaagttattataaacctactacataaataccatattgaaatagctatagaaacaaatggaacaattcctttaccaaaacacattgattggattacagtcagtcctaaagaggggaatgagttagtaaccactgtagggaatgaacttaaacttgtttggcctcaacaaaactgtgaccctgaaaaatatttaacccttgagtttgataatttcattttacaacctaaagatgacaaaaacttaagtaataatatacaaatatgtattgagtactgtatgaaacacccctattggaaactaggattacaatcacataagtggattggtatccgatag

SEQ ID NO: 9700 - DNA, 717 bp, Lawsonia intracellularis
atgtatcatctaaatcaaaaagcgttacttcttttttctggaggacaagattctggaacttgtcttggatgggcgctttctaactttagccatatcattactattggttttagttatggacagcgacatagtgttgaaatgcaatgtcgcactaatatacggaataaaatatcaaaactgtcaaaaatctgggaacaacgactgggtgaagactatattttttctcttgatattttttctcaactaggtgagacagctataacatcagagttggaaattgtttttgacaaacaaggccttccaaatacttttgtaccaggaagaaatattttcttcctcacaatagcagcagcatttgcatggagaaatagtatacgccatctcataataggtacctgtgaaactgacttttctggttacccagactgccaagataacagtataaaagcaacccaactggctttaagtctaggactaggggaagatataacaatacatacccctttaatgtggcttacaaaagcacaaacatgggaacttgccctacatttaggtggctctaaatttgtagatcttatacgtaatgagacgcactcatgctatcttaatgatcatactacatctcatgagtggggatatggatgtggtacatgtccagcttgcaaacttcgaaaaaatggatgggaaacatttttaatgaaaaaaagagctaattaa

SEQ ID NO: 9701 - DNA, 1374 bp, Lawsonia intracellularis
atggatcaggatgcttgtactcatagtgctgctcttatcttagctgcaggtaaaggaacccgtatgtgttctaataaaccaaaagttcttcatacactattaggagaaccactattattccatgttatttcagcactaagaccactatttggaagtaatatttgggtagtcattggccatggttcatctcttatacagtctatatgtagtgacctatcgttaaattttatttatcaagaaaaacagcttggtacggctaatgctgtgtcaatagctctaccggtattacaacagtcaagaattaaacgacttatggtaataaatggagatatgccacttattacatcagatttacttgaatgtatcataaaaaaatctgataagacagactttgtgtttgcaaccttaaaacttcctttacctaatgattatggtcgaattctaagaagagaagggaaaatttattccattattgaggcaaaagatattgagccttcattacaacatgatactactgtagaagttaatgcaggactctattatttttctttagaagttgtagataaatgtttacctatgattaaaaatgaaaataaaagtcaagaatattactttacagacataatagaactggcagtagaaaatggttatctagttgattctatttattttgaggaagattggcattttttaggagttaatactccaaaagatttgtcgtatgtggagtcaattcagcaagcttttattatagaaaagctattacaatctggtgttattattcattctcctgaaagtgtccgtattagtccttttgcaactattgaacctggtgtagaaatttatggtccctgtgaaatttacggtgcttcatatatagcctctggatccattatttattcacatagttggataaaaaatactacaatatcacatgatgtatgtatttactctttttgtcacttagatacagttattataaaagataagtgttctataggtccttatgcgagattaaggccaggttgtcatttagaggagcaagtttgtataggaaattttgttgaaatcaaaaaaacacaattaggaaagcatgtaaaaataaatcacttaagctatattggggatgctattgttggtgatgaaagtaatattggtgctgggacaataacatgtaattatgatggagaaaacaaacatcatacgtttataggtaaaaaagcttttataggaagtaatacagctcttgttgcacctttgactattggagaaaaatcattaattggtgctggatctgtgattattagagacgttcctgaaaatatggtttctatagctagaggaaaacagaaaaatttttctaagcggaagtag

SEQ ID NO: 9702 - DNA, 1563 bp, Lawsonia intracellularis
atgtcgtttatacttgttctctgtacagtaagttctctttttgttggaggaggtacagggatttttctttataaaaaagtgagtaaaaaatatattggggatgcaaaagaattagctatacgtatagttgaagaggccagaaaagaagggcaagcacaaaaaaaagaaattttgctccagggacaaaatgaaatttttaatcaaaaaaaagaatttgagtttgattttaaacaaagggagaaggagcttagtataaaagacaaaaagcttcaggtccaaagcgaaagattagaagaacgtcttgaaagagctgcagaaaaagagcatgaaattttaaaagtagaaaaagagctttctattaaagaacgtaatcttttaactcttgaagagcagctaaaaagtcgtatagatgaacaagaaaaacagcttcaaaaaatttccggattaactgtagaagaggcaaaacaatctctatttgaagaggtaaaaaaccgttctcgccatgagtcagcaaaaatgatgcgacttattgaagcagaagctgttgaaactgctaatcgtaaagcaaaagaaattattgcaaatgctatacagcgctatgctggtgattatgtttctgaacatacagtaactgcagttacactccccagtgaagatatgaaaggccgcattattggtcgtgaggggagaaatattcgtgcattagagtctgcaactggtgttgactttattattgatgatactccagaaactgttgttttatctgcttatagtcctatgcgtcgtcaagtagctaaaatggcacttgaacgtcttattcaagatggacgtattcacccagcacgtattgaagaaattgttcggaaatgtgaggaagatcttgcaattcaagttcgggaaataggcgagcaagctacatttgatattggtgtttatggtattcatcctgagcttatacgtattttaggccagttgaactatcgtactagttatacgcaaaatgtgttacgtcattctatagaagttgcatcattatgtggtatgatggctgcagaacttggtgttgatatcaaaaaggcaaagagagcaggtttactccatgatataggaaaagctgttgatcatgaagtagaaggttctcatgctattattggtgctgagttagcaaaaaaattcaatgaaactgaagagattgttcatgcaattgaagcacaccatgaagagaaagggaaaccagaaactgcccttgctattcttgttcaagcttcagactgtctttctggtgcaaggcctggcgcacgactagagcttcttgaaagctatgttaaacgtttagagcatcttgaaaatattgcaggtgaatttgaaggggtatctaaagcgtatgctattcaagcaggacgagaggtccgtgtaatggttgatgcagattccataggtgatgatcaaacataccttttgtgtaaagatattgctggaagaattgaagaaagtttaacatacccaggtcaaattagagttacggtaattcgagaacatcgtgctgttgggtatgcaaaataa

SEQ ID NO: 9703 - DNA, 759 bp, Lawsonia intracellularis
atgagatgtagaacattaatgcgtattgctactattattttacactatgggaatccaaagcttacagaaaaagtatatagagcactttgtgaaaaaacttcacaaagtgatattgtagaatcttctatctttgtttttgataatgcatctcaagtaccatatcctaatgcatggaagcgtagtagttcaaatttgtattgggctggtgctctatcttattgttttcttcttgtaaaagaaatggggtttacacatttatggtttcttaataatgatattacatttatagggaatggctcatatttagcaaaagcgtatgcttctattcaacgtatagagagagcaacaggaaagttagttggtatatggagtccatctttaatgtataatagctatcatccacaaatgtgcaataggaaagatttttcttatagtcaagtgaagctgatagatggtgtagctgcactatacaaccttacatgtcttgattctataggtggcatagatgcgttggataacttatatggatatggcgtagatttatggatatctatacgttctgatagaaaagggtggcttcttgtagtagatcactctatggttatacgtcatattcaacatggctccgccaaaaatattaagggctttatagagactgctgctttttctgaagaagttttttttagaaagaggttaggaatagagtggaaacagcaaattgaaagtatgaaagaacaatattcatcatttactttttga

SEQ ID NO: 9704 - DNA, 459 bp, Lawsonia intracellularis
atggttaaacaaaatattaatgatgtctttatagctggattacgtaaaggctggcaaatgggaaccatgaatctcctgccaaacgtcattatggcttttgtacttatacaagcattaaatataatagggttactaaaaattattggagaactatttgcccctattatgtcaatatttagtttacctggtgaagctatgacagtcttgcttacttcatggctttcagctgtgggaggtgttggcgtagcggctagtctctgcactgaaggtatccttaatagcacccatattagtatacttattcctgggatatttctaatgggtggacagctccaatatatgggacgtattcttgcagtagccgggatagaaccttcacactataaggtattatttcttattagcataatgaatgcagccatgggaatgctcacaatgaaatacattattattcactag

SEQ ID NO: 9705 - DNA, 678 bp, Lawsonia intracellularis
atggaaaagaatacccatataccccaaattgaccaaagtaaaaaaataaaaataagttcatatattatacttatacttgttatcctctttttttctggatatttctcaaaatttcaaaactggcttggtatcatggacttcagtagattcattggtaagtttggaacaataggagactcaacacctactacatttgtaggactaggtggttctggagcttgtcagggatttttattcagtctttctcttatccctgggattatgttagcacttgggattgtagaacttgctgaacaccttggtgcactatatgctgcacaacacttattaacgccattaatgaaacctttgtttggattacctgggatttcagggcttgcacttattagcagtctacacagctctgattctgctagtgtaatgactcgagagctgtatgataaaggctttatttctaataatgaaagaacaatatttggtgcttttcaattttctgcaggagcagcagtcacaaattatcttactacaggtttagccttattcccatttctttctgtaaaaattattattcccctgtgtgttatacttttctataaagtggtgggaatgaacgtcatacgtctttaccttatactagttacacaaaaaaatgttactatagagcaaacccatggttaa

SEQ ID NO: 9706 - DNA, 1089 bp, Lawsonia intracellularis
atgtttgaatttaatatagaaagacaatctatccttatcaatggggaaaaattttctaaaacaaatatattaaaaaacaacaagaatgaaaaaattcaaagtgaactttttcaatttcttaaggaatggtttaatcagtcaatcacaattcaagtatctacatctggctctacagggaagccaaaaactctccatgtaaaaaaaacttgtatgctacaaagtgcttatttaacatgttcatttttaggattaaagcctaacgatactgctttactatgcatgcctctaaagtatattggtgcaaaaatggttgtagttcgctccttacttgctggacttaacttactctatgttacaccatcaagtagacctcttaaacaaataaaaagttcacctactttcgctgctatgacccctatgcaagtctgtacaacacttgaatataaaaaagacacaacatatctaaaaaatatcaaacatcttattattggtggaggatctattgatacatcactatcaaaaaaattagcagatttccctcatgctgtttggtcaacgtatgggatgacagaaacactttcacatattgcccttaggaaactcaatggagtaaatgcttctgagtggtatacaccctttaagagtataaaagtctcattatcaccagaaggaacacttgttataactgctccaaacatatgtaaaaaaccacttgttacaaatgatattgctgaagtaaatgaatgtggtaatttccgaataattggacgaaaagataatataatcaatagtggaggaataaaaatacaaattgaactagtagaaaatctactaaaaaaatttatattacaaccttttataataacctctattcctgatcataaattcggagaacttgttgttatccttgtagaaaaaaaagtatgtgattacttagctatttgtaaagccaacctacctttatactggtgccctaaacatgtcattcaggttcaaaaattaccaaaaaccgatacagataaagtaaatagagctaaagctaaagaactagcatataaaattttttcacaacaatttaatagtaaataa

SEQ ID NO: 9707 - DNA, 822 bp, Lawsonia intracellularis
atgtcaaattatgcatgggaatccattacaacatataaagaaattttattccaatattacaaaggaatagcaaaaataactataaatagagagcgttatcgtaatgcattcactcctacaacaacatttgaaatcagtaatgcattattatattgccgagaatgccaagatattgctgttgttataataacaggttcaggtgataaagccttctgtagcggaggagatatgaatgttaaaggtcgtggtggatatattgatgaaaatggtgtcccacgccttaacatattagatgtacagaaacaaattcgctttctacctaaaccagttattgctatggttaatggttatgcaataggaggggggcatgtattacatattgtatgtgatctaacaattgcatctgaaaatgcaatatttggtcaaacaggacctcgtgtggggagctttgatgctggacttggctcatcatatctagcacgtattgtaggacaaaaaaaagtacgagaaatttggtttttatgccgtcaatatactgcacaggaagctcttacgatgggtcttgtaaataaggttgtaccactaaaagatcttgaaaaagaaaccgtagcatggtcagaaataataatgcaacatagcccattagcattaagaatgattaaagctggtctaaatgctgagcttgatggacaaattggaattcaagaacttgctggtgatgcgactatgctttactatctaacagatgaagcacaagaaggtagtaatgctttcttagaaaaacgtaaacctaactttaagcaataccccaaattaccttaa

SEQ ID NO: 9708 - DNA, 435 bp, Lawsonia intracellularis
atgaaaaactctcaacaacataacataataacatacaatactaaatacaaaaattctcttattggacatcttggtatcctattccatgagagtaaactaggtacagtgattgcctctatgcctgtgacaaatcatacatctcaaccatttggttacttaagtggaggtgcatcccttgcattagcagaaagtattgcaggtcatggctcatatttattatgtcttgaaaatgaattcccatgtggaattcaagttagtgggaaccatattaaaaatgttcctattggtaaacttgttaaagggaaaggacaaattatacataaaggaaataccacacatctatggcatatagatattgtaaatgaggaagaagagatagtttcaacagcacgtgttgtaaaccatattataaaaagtaactcaaataaaggttag

SEQ ID NO: 9709 - DNA, 390 bp, Lawsonia intracellularis
atgaaacgtttagttatagtactttctattgtatgtgttttatctgctgcagaatcagttttcgctcttaataaaaagcttgatatcatgaatggctcccaaatggacatttatacattaaaagtttccccaacaaatgctaatcaatgggaagaaaatcttttacaagaagagacccttaaaaatggtgataaagcaatggttgaaatcagtagaacagaaaatgctgaagcatgggatattactgtaacagataaaaatgggaatgaatctagttggattgggttaccattagataaggcaggggatgttacacttcttcctgatggacaataccttacagataaagatatgactatagataatatgaaaaaagtaatgaaaaaataa

SEQ ID NO: 9710 - DNA, 714 bp, Lawsonia intracellularis
ttggaggttaaaatggagattcttcgtgatggtaccaaaggagttgcatcctctgttacttctatatttatgagatatgtttattggtggatgaccataggcttgttagtgacagcaggatcagctttttatgttgcaaactcaccagctttacttcaaacattattcagtaatacgttaagccttgttattcttgctatagctgttattgctcttcctcttgttttaagtactatgatctcacgtttatcttctactgcagcaacattgttatttattttatatagcttgttaatgggggcttttttatcctctgttttagttgtttatacaggaacatctgttgtacaagcttttgttacaactgcaggaacttttgctgcaatgagtatttatggtacagtaactaagcgtgacttaacaagtatgggaagttttttgactatggggttaattggtttaattatagctatggttgttaatatatttttaaaaagtccaatgatggaatttattattagtgccattggtgtattgatttttacaggtcttacagcctatgatacacaaaaaattcgtacatttggtgagaatgcccctttaaatgattctttagctatacgacgtggggctcttttaggagctttaacactttatcttgattttattaatttatttttaatgatgttaagacttatgggcgatcgtcgctaa

SEQ ID NO: 9711 - DNA, 1011 bp, Lawsonia intracellularis
atgtttgaaattcccctccttcttatccttattataataatagcattaatttttgattttaccaatggtgcacatgattgtgctaatgccattgcaactgttatatctacaaaagctcttacaccacagacagctgtattaatggcagctgttttaaaccttcttggagcatttttaggcacagaggttgcctcaacattaggaaaaggaattgttaacacagaagttgtatctggaaatcaaatactagttcttgcagcactatctggtgcaataacttggaattttattacatggtactatggtattccatcatcttcttctcatgcacttattggtggacttattggatcttctatcatatctgctggctttactagtcttaatatcttatccatcttacaaaagattattttacccttattccttgcacctctcttaggtttttttactggatttagctttatgactcttcttagtttcctatttgccaaaactcataggaaaaaactcactaaaaaatttacacatctacaaattctttctgctgcctttatggctacaagccatgctttaaatgatgctcaaaaaactatgggtgttattactcttgccctctttatttttaataaaattgaatctattacagtaccattctgggtaaaagtagtctgtgctatagcaatggctgctggtacagctgttggtggatggaaaataataaaaactatgggtaatagcatctttaaattagaaccagtacatgggtttgctgcagaaacatctgcatcagcggtgattacaattgcatcaatattaggtgctcctataagtactacccatactattacagcttgtatctttggtgttggttctactaaaagactttctgcggttcggtggtttgtagcaataactcttgtgaaagcatggatgattacaatccctgcatcagcgattataggtattgcttttttttactttttctcttttataggtttatctaactaa

SEQ ID NO: 9712 - DNA, 636 bp, Lawsonia intracellularis
atgttggcacgatttatgccccaatcagttccattttttgaattacttgctaaacaaggcactattctacaaaagcaaattcaccaacttataataattaatgaacaagcaaaaaacaatcaccccatagaaatacaaacacttcaaaatacaaaagaagaaataagtcaactctataatactattacagaacacctctctcgaacatttatcacaccaatagataaagaagatattcatgctattaacttaggacaactatatttatcttgtacctgttatgaattaggaacactatttttttattgcagaatacctaattctattccatcttctctagaattactaattgctaacgagcaaaatatgatagatgatattctaagtatgataaaagaacttcctaaaaaaacagatattagttccaatcttcgagaaattagagaaaaaaaagaaaatggagcaatccttctagtaatggggttaaaaaaaatacaagattttaactttactgacattagtactactaaagaactttttattttatcaaaatattatgataaattagctctagctatggaacaaacattgaatctcgctgatatattagaaaaaacgatgattaaatatgtttga

SEQ ID NO: 9713 - DNA, 1626 bp, Lawsonia intracellularis
gtgggagcaaacaatttcttttttatagtttcagaggtaaccttagttcgtttagatcaatttttatataataatttatgtacacatggagtttctcgtgaaagattaaaaaaagttattgtatcaggaggttgtaagattgatgataaggtatgcttttctccaagtacacgattaaaagtaggaatgcatatttttattcagctacctgaagttgtttcagcattgctcccggaggaaggatttttagagattcttttttctgatgaacatcttgctataataaataaacctcccggattaacagtgcatcctgcaccaagctgtcaagagtcaacgttggttcatagattgttaaagtatttcccaaagcttatagagcaaggtggcctacgtccagggattgtacatagaattgataaagacacaagtggacttctttgtattgctttaacggaagacacacgtttaaagctctcaaaaatttttttagatagaaagattaataaagaatacttagcgttagtccatggtgttccttctatggagggatatatagcagtaccacttggaagagatccaaaaacaaaagtaaaggttgctgttaacccaaaagggaaaccagctcatacagaatggcgtgttttgcatagaggtaaaaatgatgtttattcaatattagcattgacaattcaaacgggaagaacacaccaaattcgtgtacatatgaagcatattggtcatcctttagttggagataaactttatgctggaggacatgttaataagacttttcaatgtaacagacagatgttgcatgcttggaaattgagttttgagcaccccattacaggcaaaaaaatgaattttttatgtcctcccccaaaagattttttagatacagtatcacttttagaacaagaacctatacggattgttattactggagtcgccgggtctggaaaaacaacagtattaaaatattttgaacaacatagtgatattattatatggagtgctgataaagctgtagaaaaactttattctccaggaggagaggtttggagtattcttcaagaaagatatggagatagatttgtcccagataaaaatcgttctgtggataaattaaggttgttatctgccctaaatggagaaacagaaccgcttttagatataagagatttaaactatatagtacatcccattatgttagaacagttgtcaaaattttggggggaagcgttttataaaaaatataaatatgctatagcagaggttccactatggtttgaagtcgatcatatcattagtcaattagtaaaagaaaatagagtttcatccaatattagacccaattttgttataggtgtttcttgtcctgagaatattagagaaaaacgtttaaaggaggctcgttgctggtcaactgcacataaaactactattgataattggcaatttcatcaagatatgaagcttaaactatgtgactatattgttgataattcaggttctgaagttcagttaaaaaataacatacaggatattatgatgctaatagaagcaaaggttacatcttttcaagatgactttcttcagtttttacagaaaattattacataa

SEQ ID NO: 9714 - DNA, 786 bp, Lawsonia intracellularis
atggctagggttattgctattgcaaatcaaaagggtggtgtggggaaaacaacaacagctattaatttagcagcatcacttgctattatggaaaaacgtgttttacttgtagactgtgatcctcaggcaaatacaacaagtggtttgggtttttctgttaatatgttgtcacatagtttatattctgtccttttccaaacaaaacctgttgagtgtgctattatgtctactgtttcttcatttctttttcttcttccctcagggacggagcttgttgcagcagagctggaattggtggataaaataggtcgagaatattatctttcagaattattagctccgctggagaaaaagtttgaatatataattcttgattgtccaccttctctaggacttattacgttaaatgctctttgtgcggcaaaagaaatccttgttcctctacagtgtgaattttttgcacttgaaggaattgtaaaactacttcagacacatgatcaggtgaaaaaaagattgaatcctaaactatcattattaggaattgttttaactatgtatgatggacgtaataaagtaacacgtcaggttcaacaagaagttatacgttgtttcccaaaccatatttgtgaaactgtaattcctagaaacattaggttatctgaagcccctagtcatgggaaatctattttacattacgatataaagtctaaaggggcagaagcataccttgaacttgcccgtgaaatagtaatgagaaaagtaaaaactgacgtactatcaatataa

SEQ ID NO: 9715 - DNA, 960 bp, Lawsonia intracellularis
atggcaactcaagaacgtggacttggtcgagggttagatatcctttttggtaatacttcacctgaagttgagcaagatcatataaaaaagcatagtaaagatggattagtgctaccttcaattacaaaacttcctatagctattttgcgtcctagttcaagtcaacctaggaaaagttttgataaaaatgccttggaagaacttgtattatcaatcaaaaaccaaggtgttgtccaacctattttagtaagaccgtatagagagcaatcatctattcgttatgaaattgttgcaggagaaaggcgttggcgtgctgccaagttagctgggcttgttgatgttcctgtttatattaaggagcttaatgatgaagatgtattaactatagccttaattgagaaccttcaaagagaggatcttaaccctattgaagaagcattggctatagagtcattaagaaaaaaattatctcttagtcaagatgagcttgcacataggcttgggagaagcagatctgctattgcaaataccttaaggttacttcatcttacacctgaagttcaagagggactttgtaatcataccatttcttctgggcatgctagagcactattagcattatctgatatggagttacagcaagtgctttataaagctatttgttgtaatcaactatctgtacgtgatgttgaaacatctgtcacatactggaaaaaaaatggagtactgccaccttctatcagtggtatcacaaaggatacagtaaaagttaagcaaaaagaaagatcagaacgtcttaaaaatgttgttaatacgttacgttttaacttacatcctaaagtaactatctcaggttcagagtgtatgggtagaattacaatcccttatgattcacaagagcagtttacaactattcttttaaagcttggaataaatgcttctgatacaattgacacataa

SEQ ID NO: 9716 - DNA, 1038 bp, Lawsonia intracellularis
atggttgatagccattctgcagtgatggtcaaatctgattttgtacgattattaaatgataagcctgttcttgtcgttggtgatataatgttagataattatcttattggtgtttcagatcgtatttctcctgaggcacctgtccctattgtaaaaatagagaatgaaaagcaatctcttgggggtgcagggaatgtagcaaggagtattgctgctctgggtggaaaggtaacgattattggggctgtaggacaagaccaaagtggagaaaaaattcaagatcttttaagtacaaggggaattttatcttcaattataacatttgcaaatcgtcaaacaacagtaaaaacacgtgtgatggctcacagacaacagatgatacgacttgatcatgaggaaagtacatcatataattctaaagaattagctatggtattaagtaattttgaaaaatatgtatctcaacatgagattattattttatcagattacaataagggtcttgtatcaaaagagtttatgcttggttttcaggatatactgttagctaagaatcctaatgcaaaagtattaatagatcctagaccatgtaacataatgtattatgcattatgtaaaaatatatttgctcttacacctaatacaaaagaaactggagaatgtgcaggtggtatggctacttctagtcagccagaattgttagctgcaggtcatactataatgaaacttctttctacaaagcatttgttaacaactcttggtgatagtggtatggcattgtttctttctcctaaaaagatatggcatattcctacagtaggccgtgatgtctttgatgttactggtgcaggagatacagtaattgctacatttggccttgcattaagtgcaggacttgatccacttatctctgcgatattagctaactatgctgctggcgttgttgttagtcaagtaggaactgcaacagtatctcctgatgagttagaagaagctattacatctttacctcaaccaaaattagctttttggaattaa

SEQ ID NO: 9717 - DNA, 1194 bp, Lawsonia intracellularis
atgctgctttatatacatatccctttctgtaaaactcgttgttattattgttcatttttttctaaacctctagacacatcaagtatagatgggcaacaaaaacttcaaacatattttgttacgttaaaaaatgaactttcatactgggggaataaacttcaaaaaccaacgatagagactattttttttggtggagggacaccaagtctactctcaccccaatatatttacaaaatattagaacatatctctcaatactacagactaacatcaaaaatagaaatcactcttgaagctaaccctgagtccctaaccactttatctttaattaaagaatatttaatggctggaattaatcgagtttctttaggttttcaagctattaacaataaacaacttcatcatttaggaaggacacataatataattgatgctatacaatcatataatatgcttagagatgcattatgtacaaatattaatattgacctcatatggggactacctaatcaaactgtacaaaaatggttaaccacaataaaatatgttgctgaacttaaaccaaatcatatttctagctataatttaactctagaaccagggactatttttaataaacaatatgttaataaaaaacttactctcccatcagaagaagaacaaataacaatgttttttcaaacaaaaacatacttagaagaaaaaggactactacaatatgaaatatcaaactttgctcagcctggctatcaatgtaaacataacaatggatattgggaagggaaagattatcttggtgttggaccatctgcaacttcaacactaaaccactatcgttggacaaatccagcagacctttctctttggagtttattagtagaaaagaaaaaggaaccccccaaagaatatattgataataaaactcaagtactagaactttttatgttacgcctaagaacaacaaaaggacttaatattaatgaatataatactatagcaaaaaataactttatagatagctataaaaatctaattttcaaattagaaaaagaacaacttataaaaatagatagtaattatctaaaacttacaccattaggacaattagtttctaatagtataataaaagaattttttgttatgtatcaattaatactaaatacaaaaaaatctaaagttgctaacagtatatga

SEQ ID NO: 9718 - DNA, 948 bp, Lawsonia intracellularis
atgcaagaaaaaaatgtatttaattggctacataaagacttactggatattgatcagctttctcagacagatatctttaatatattaaatacagcaagtagcttagatgaaacaaatagtagagtaataaaaaaattaccaacattgcgtggtaaaaatattatactattttttgctgagccaagtaccagaacaaaagtttcttttgaaatcgcagggaaaagactctctgcagatactataggggttaatgcttcttcttcaagtattcaaaagggtgaaagtttaaaagatacagctttaaccttacaagcaatgtccccagatgttattgtattgcgtcattcaagtagtggtgctgcattgtttcttgcagatcttttagagtgtagtgtaataaatgctggggatggttggcatgcacatcctacccaagcacttcttgatgtattttcactatggaaagtttggggaaatcattttcatggtaaagaagttcttatagttggagatacagcacatagtagagtttgtcgttcaaacgttacattacttaatttaatgggggtaaaggttaggctatgttctcctagaacattacttccctcaggagtagaacattggcctgtagaaatatatacagatttgcatcaagctatttgtggtgtagatgctgtaatatgtctaagagtccaattagaaagacataaaaagagttttttccctagcatagaagagtatgcaaaacgtttttgtttaactccaaaacacttaatgtctgcaaaaactgaagcaaaagtgttacatcctggtccatttttacgaggtgttgatcttgcatcttctcttattgaaacccctcagtcattaatttttgatcaggtttctgctggtattgctatacgcatggctatattatttctttttttaacttgtaatgacttataa

SEQ ID NO: 9719 - DNA, 1272 bp, Lawsonia intracellularis
atgtcctccttgtttctatataatgcttattatgatggaaagcttgtatcattagaagttagagatggaaagattattacattaaaggagggagaacaaaatagtacttctagtccaatagatttacatcctgtagatgcaaaacagaaacatcttttccctagctttattgatgttcatactcatcttagggagccagggtatgaatggaaagaaactatagctacaggactagctgcagctgctcatggtggatttggaagtgtattatgtatggctaatacaaatcctgttaatgattcagctacagtaacatgtaaaatccttgaaagtgggaaatatgcatttcctaatggaccttatgtttatcctataggtgctgcaactatagggcttaaaggtgaacagctttctcctatgcatgaattagcagaagcaggttgtatagctatttcaaatgatggtcttcctataaagaatactgagctgtttcgaaggatattagagtatgcttcagatttaggacttattgtgattgatcattgtgaggatccttatttagcttgtgatacacatatgaatgaaggtttcattagtggtaagctcgggctaagtggacagccagatattgctgaaacattacaggctattagaagtattttgttagcagaatacctcaatgttcctgtgcatatagcacatgtttcagcaaagcggactgttgaagccataagttgggggaaatctcgaggggttaaagttacagctgaaacatgtccacattatttgttattagatgagagggctgtaatagggtataatacaaatgctaaggtcaatccaccgctgagaacacaagaagatattatggctttgagagaggctattaaaactggaataattgatatgttagctacagatcatgctcctcatgctgcttatgaaaaagaagttccttttgataaagctccaaatggttttacaggctttgatgtagctatccctgttatgtactctcttgttagagaaggcgtcctttctgagtctgatttgataagattgtggtctaacaatcctgctggtgtatttaatctacctataaataactttaagccaggagatcctgctaacttttttttatttgatccagagttagaatggactgtttctaaagaaaatctttattctaaaagttggaatacaccatggttaggtgaaacactaaagggtagagtcgttatgcattggattaatggggtaaaagttgtttag

SEQ ID NO: 9720 - DNA, 774 bp, Lawsonia intracellularis
atgcgaattatccgtgttcaatataatgagttctcattctatgcagctcttggcgctgaaaatactattcaatgtttacatagtccccttggacttaatgaaccaattccactatcaaaaataaaagtgttacctcttgtttctcccacaaaaattatttgtattgatattaattatcatgaaaaagctcaagagctacaacaaccaattccaactaatcctacgttttttttcaagccacctagtagtattgttggtaatggacaacctattttgttaccaacaaatataggccgcgttgtttctgaggcagaactttgtatagttataggacaaacttgctataaagttactcctgaagcagcatctaattatatttttggatatacatgtgctaatgatataacagcaaaagacattcaacagcaagaatatactacaagtcatgccaaagcatataatacattttgccctgtagggccatggattgaaacagatgtccccaatatagaaaatcttcaaattagaaatagcattaatagtgaactagggcaggtaagcactactgctgatatgatattcccaccattggaacttattagttttctttccaacattatgacactaaaccctggagaccttatcttaacaggaacacctaaaggttcattacttattagtgatggggatatagttcaaacaagcatcgaaaacgtaggaatattgattaaccctatagaagaatatttacccatggagacaattgttcagtaa

SEQ ID NO: 9721 - DNA, 1374 bp, Lawsonia intracellularis
atgttacagcgtaattttcatataattacatttggttgtcaaatgaatacaaatgattctttttggcttagttgtagtcttcagaaaaaaggatttcaagaagtttcattagaggatgcttctattataattattaatacatgctctgttagggaaaaaccagaacaaaaggtctatagtatacttggtaaaattcgacatgccacaaaaaataatcctgactcatttgtagttatagcaggttgtgtagcccaacagttgggggcaacattttttgaaaaatttccacaagtacgacttgttagtgggagtgatggcattgctatggctcctgatgctattgaacgtctttatgctgagccagatctaaaattaaatcttacagatttttcagaatactatcctgaaagagaatatgcattttcaaagttaactctttcaaataacaacacgctagcattaatggcttatgtaaatattatgcaaggctgtgataattattgtacatattgtattgtaccctatactcgtggcaagcaaaagtcacgttcagtacaagctattgtagaagaatgtcaacagttaattgatagtggtgttaaagaaattgtgcttcttggacaaaatgtaaatgcttatggacttgataaggataagaattctcctgcaaatggagtaaactttgcaatgctagtccatactatagcaagtttacctgggcttgagagattacgtttttttagtgctcatcctaaagagttttcttctgaacttattgatctttttggagaattttcaactttatgtccaaggttacatctccctttgcaatcaggttcagataaaatacttagacgtatgggacgaaaatattctatggacgaatacatatctattattacaaagttaaaaaaagtacgtcctgatatagcgttatctactgattttattgtaggtttccccggggagacagaggaagattttttacaaacattacagtcaataaatactattaaatttatgtctagtttttctttttgttattctgatagacctgggacacgttcttctactttttctaataaagttgaccatgaggtaaaaattaagcgactagagcaacttcaagcaacccagctagaacattcaacaagttggctaaaaagtagagtaggggtagaaactacagtacttttagaaaaagttagtcgtaaaaaagcagaggataataatagttggcaaggtcgagatccatggggaaatgttgtaaatgttattttacctcaatctactaatataagtaatactcttcttcctgttcgtatcatagcatcaaaaaaacattcattggtagcagaacctttaattatttaa

SEQ ID NO: 9722 - DNA, 684 bp, Lawsonia intracellularis
atgattgattttcatattgaagtttcttgtctaggaaaagggttattaccatcagaagcattagcttttgcttctttttctggatttaattcagtaggtcttgttattaaatctgatgctattagttataagtatgagctaccattattaattaacacaatacaacagagtttattatatacagagttaaatgtatttcctggagtagtttttgctcatgtccctccagaattacttaaagacgttgtatgtagcgctcgagaactaggagcacagcttatattagcacaaggagagggtagttttttgggttattcattatcgactgcaataggaactaactttgcaataattaactctggaattgatatattgacatgtcctggattgatttcaagtgaagatgcagcatttgctacagagaaaggaatatctatagagttaacaggaggctatccctgtaatttgtttaatggacatatagtatctatgttttctttatttaattttaatctaacaatttcttgtggaattacaaaaaaaagttgtttttcttctccagagattacaagaaactttttccaaggaattgcctttggtgctggacttgataaaaaaagttttgattatattcattgtgagtcaagaaaaactgttcaaaggttattattaagcactaaatag

SEQ ID NO: 9723 - DNA, 1092 bp, Lawsonia intracellularis
ttggatatactacttccctttgaaaaaagacgtgaacagttacataaggttatgtctgaaagaaaactggatggacttttagtatatcatgctgctaatagatactatttatcaggttttgaattacataatcctcaatgtaatgaaagtgcaggctgtttaattatattagctaatggtaaagactggttatgtacagactcaaggtacactgaggcagcaaaacgtctatgggatgaggatttcatatatagttatggacacaacattccagaacaacttggattacttataaataaaatattaccaaaaggtagctgtattggttttgagtcaaaagtactttcagtaaatttttttgaagcttttgttgaacaattacaagatattacacctgtaagtgctgatggtatagttgaagatttaagagtaataaaagacgaacaagaagttcgattaatggaacaatcgtgtttattaaaccatcaacttttaacctgggttccatcaatattgcgtcctggagagagtgaagcttctgtttcttgggaaatagaattattttttagaaaacatggtgcaaatgaattagctttcccaagtattgttgcatctggaggtaatgcagcattacctcatgctattccaagttcagatacacaaattgagagtgaagagttagtacttgtggatgttggtgctaggctatatgattattgttcggatcaaacacggacattttgggttggagataatccctctaaacgttttcagcaaacattagcattagtacaggaggcacagcatagagctattaaagctattcagcctggagtgttagcaaaagatgtgtataacacagtttatacattttttatagaatatggggtagaaaaagcttttaagcataatcttggacatggagttggtcttgaagtgcatgaagcaccctcattagggccacgtagtgaaacaatccttaaacctgggatggttattactgttgagccaggcttatattatcctgagtggggaggagtccgttgggagcatatggtgcttgttacagaagatggtgcaaaagtattttaa

SEQ ID NO: 9724 - DNA, 1059 bp, Lawsonia intracellularis
atgcgtattgcgtttatcaacgctacaaagcgttggggtggtgtaaaaacatggatgttagaatttgctaaaattttttctaaaaaaggtcatcatgtttatatttatggtcgtcaagaagcgtttattacaagtgcacaaaaagaagttggccacggccaactagtttcatttggtttagatttaaatcctaaatctattttgtatttttggagagagtttcgattacatcaaattgatattgttattgttaatatagaaaaagatctgtccacagcaggcattgctgcaaagctttctggtattcctgtaatacaacggattggtttaccacatgatatcccttatcgtttaaaaacacgtcttatccatacatttattaacccttcatttttatgtccatgtgaatatattgcttctggatttaaaaaatcactttcttatatacctccacagcaggtaaaagttataatgaatggtagaaaggctacaagtgaatttttaaaagtacatagtcctcttaagtttatttgtacacaacagttagaacctaataagtgtcattctgttttattagaagcttttgcaagagttaaaggaagttttgaatttcatatatggggcacaggctctgaagagaaaacacttaagcagatggcttctgagctaggattaactggccaagtttttttccatggattttcagataatattattaataagctagaaaaaggagatatttttttgttagcttctgttagtgagggattgccaaatactcttattgaagccatgtctgttggattattacctattgtaagattggtaggtggcgtagatgaagttcttacaccagaacttcgtgattgggttttaccttatgaagcaagttcagaagattttcaaaaggttatttctatggctcttagtctttctgtagatgaattaacaggccttcgagagagtgcacgtgaagcatgtagacgtttttttgatatagatatacaagcaactaaacttgaagagtggttttatgaagttgtgaatagagaggtatag

SEQ ID NO: 9725 - DNA, 1287 bp, Lawsonia intracellularis
atgaaaatatttttctgtaattggcggggattagaatctaattcatctagacttcggtcagtactctttattttttttagtttgtcaattttattatttcctcttggacaagcattaagagttattctacctattctttgtttacctataattattttactttacatacaggattggaataactctacactccgtatattaccctttcgctggctatttattatttttatagcaagttttataatacaactagttacatctgagtggttagctgcaagttgggcttcagtaaaaccaaatttgttaagagggattgttttagcttttgtgggaatggaagttgtccgttcagagaaagatttgcgatggcttattattatttttgcggtaacatttttttatgaagggttagatggtgtatggcaggtcttaacaggatttgactatataaagcatacagctattatgtcaggaaggttaacaggttctttagggacatatcgagtaggtaattatatggcaataatagctctacctgcctttgggatctggactcttcttcctatgaaaaataatagattacgtatagttgctgtagcagtattgttatctccaggtttatttctttggttaggttcatttacccgtataggatatttagcccttttaggggctttatatattttgtggatttgtatttggacaaaattctcattattaaaagttattgttcctccaatgttattgctagtagtattaagtatgtttggaattgcaagattaagctgggaaacaatgcttaatgatccacgaatagagttatggataagagctatagaggtaggaaaagagcatttatggcttggaactggtagtagtacttttatattagctctacagaaacagggtataattttacagtctgtcccctctatggatcttggtcatcctcataatatctatattcaattttttattgatgggggacttattggatttactagctatattttattttttgttattataactctttggacattgtttcatattcgaaggggtgtccaaaaagaaatacaaggtttattccctggatgttattggcagttactttcatttatttgggctggttgggttgcatatttaattacaggattttgtggacatgatttttatcgaacatggtggctatctactgctgccacattgttaggaattcttatcggaggatgtcagtggggcaaaaaagatagtaaaaaagagttggatagtgtttccttagtttga

SEQ ID NO: 9726 - DNA, 210 bp, Lawsonia intracellularis
atggcaaaacagtgtgaaatatgtgggaaaaaaccccttgttggtaattatgtaagccactcaaatattaaaactaaaagagttttcaatcccaatcttcaacatatgcgtaatcaatttcctgatggaagaataaaaactattactatatgtacacgttgtatccgctctggccatgtgaccaaaccttctatccacaaaggctcataa

SEQ ID NO: 9727 - DNA, 2016 bp, Lawsonia intracellularis
atgaaaataaagctacttcaaaaaatttgtatcatattattccttattaactatagtctaatatcaggatgttcttcaactaaaatagtagtcccagaaggtaatagttctgatttgttagaaaaaacacaggatataaaaagtatagaggatcaggataggaacatttctgctcaggcagaagaagcttggaagaataacaatatgcttgaggcgcaaagactttacaggattgttgtgacacagtctaacttaacagcttttgaacgtaactccgcatgggaaaggttaatcaagtcatcaattgctaataatcatttccatatagcactagaatttttaactcaatggaagcttagtgatccaacagctaatatgcaaccagtttggcaagattcatggggaatagctgtactaaaatcttcacgtgtacaagcaatatctcatgcacaacaggtctgggaagatgcttctttacctattccattacggggaatagctggaggagtattgatgattttaagcccaaaagaaaataaaacattgatagcaagtaaactatcagagctttataagcactcagatcatgcaaattgtatgatgctagaacaaagattatttacgttgcttagtaatagttctagtgaggaattgttagcacttgaatttcttacagggcctgagagagattttatgtatccttggtcaattattattcttgatgtattacgtcgagagtggcctagtaaaactaatcgtactgcagagttgctggggaaaattaattacccaggcgtattttcagactcttcgttgcttgcttcagctattcatgtagctgagcctaaatcgttgttagttgatcatactaatatattattttcaccaggttgttatgcgttagtacttccaatgagtggaccatatagttctattggttggaatattgctaaaggagctaatgctgcccaagaggaacttataagcgcaggggttgatgttgaagttgttattataaattctgaagcagtaggttggttagaaaaactagaacagttaccacagaagtgtattattgttggtggtccattacaggcagagatatatgcagccataagagaaaagaatatcctttcaaataagatattttttacatttttgccttcaattggagaaggtgatgaaggtataactgcttggcgttttttttcaagcccagaagatcaaattttagctcttcttcgttttagtcatgaacttgatattaccatgtgtggagtattatatcccgaagatggatatggtagaaaaatgacagaattatttgttaaattagctgagcaaagtggaatatctgttatgacaactggatacaatccacatgacacatctagttggtcaaaattattagcaaacgttacaaaaacaagaatgatagggaaagttcctgtaccatctactccttttcaagctgtttttcttccagatagctggaaaaatattgaagtattattgccatatctttttttccaaggggaagataggcttgttttaatggggacaaacttgtgggagcaaggtctttctcatggagaaaaaaattttataaggaatatggatcttgctgtattcccaggaagttggaataagtctacacctaatgccacagctgccatgctaatagaacgatttacaatggataatcaagaggaacctgacttttgggttgggctagggtatgactttatacgtttttcttcagcattaaatatacatgaagttaattggcaagcatctcaggtaaataaaagcatagagaaagctcaacaaatggattggagcatagctcctatttattgggaaaatgggaaagctcaacagaagttatttcttttttatccaacatcttcagggggtaagttattaaatactaatttatttaaaaagcgtcttgatgcaattaaaaaacggcacttaaaacgtgtttcggctgctgaaagggaggtgtctaaataa

SEQ ID NO: 9728 - DNA, 1068 bp, Lawsonia intracellularis
atgtctaacccacaatctattgtcgttcttggaggaggaagctggggtacagctgtagctcatctattagccacaggaggacataaagtacatttagtattacgtagtcaaaagttagctgactatatcaatatgcaccatgagaataatatataccttcctggattctctattcaccctgcaatccacgctgtaacagggaaaattagctttcttactaaagaacccgctcatgtgttagcaaaagcaacaattgtaattctttctgtcccctgtcaatctttacggcctgtattacaagaacttgaaccacttttgacaaaaaattgtatacttgtgaatacagcaaaagggattgaagtagaaacattaaaaacagttgaacaaatgatattagatgaaatggctcatcgtgtttctcactatgctgtactttcaggaccttcttttgcagaagaagttatgtgtgaaaaacctacagctgtcgtccttgcatgtcgcaatgaacaactgggtgaacatctacgagaaattttctctactccatggtttagaacatattcaagtacagatgttacaggtgtagaacttggtggggcaactaaaaacgtaattgcaatagcagcaggagtctctgatggtctaggttttggtattaatactagagtagccttaatgactcgtggtcttgcagagacaactcgcctggggaaagctcttggagcttcaccacttacattttcaggattatcagggcttggagatttatttctaacttgctcaggggagctgtctagaaataggcaagttggattacgtcttgggaaaggagaacttttaaaaaatataacaaactcaatgaatatgattgctgaaggtatcaaaacaacttatgctgttaatactcttgccagtaagctgaacgttgatatgcctataacaaaagctgtatataatgttcttgaaggagttatatctcctcatgaagccgtacaaaaacttttatgtagacagttaagaaatgaaagccttgacgaaactcaacctatatggacagatattccttag

SEQ ID NO: 9729 - DNA, 1107 bp, Lawsonia intracellularis
atgaccgggaaaggttgtatcattgaactaaaaaacgtcagcaaaatatttgaagatacctgtgcccttgataatattaatctacagattgcaaatggtgaatttttaactttacttggtccttctgggtgtggaaagactactatcttacgtattatttctgggtttgaaaccccagatgttggagaaatattaattgcaggggttaatgtaagtggcttccctccggaacgaagacaagtgaatacagtctttcagcattatgcattatttcctcatatgactgttcgtgataatgtagcatttggtttgcgtatgcaaaaatgtcctcgtgaaaaagtgaatgagttggtttttgaagcattacgaatggtccatcttgaaaattttgctgatagacgcccttctcaactttctggaggacaacaacaacgagtagctattgcaagagctgtagtaaataaaccattacttcttttactagatgaaccttttagtgctcttgatcataagttacgacagattatgcagcttgaaattaaacatttgcaacgtaaactgggcattacttttgtttttgtaacacatgatcaagaagaagcatttgctatgtcagatagggtagttgttatgaatcaaggtaggatagagcaaattggtactccacaatgtatttatgaagagccagttaatttgtttgtagctcggtttgtgggagagattaataatttggcgggaactattctttcttgtaatgatgagggaatatatgaagctgcaattgcaaatgaagtttttccattaagaacaccacatcgtttttctccaggagaagctgtgaatgtattgttacgcccagaagatatacggatatacttattagatgaagaagttttgaaagtccctcaccttagaggtcgtattgaagaaacagtatataaaggcgcaacagtagatattattattgcattagacgttggtgggactttacgtgttgctgaattttttaatgaagatgatgcagaaattagctataatgaaggagaaagagtagctgtaacttgggttgatggttgggaagtggtattgccacatgaaatggcttaa

SEQ ID NO: 9730 - DNA, 885 bp, Lawsonia intracellularis
atgaaatggcttaaaggttttcaacttgttgtgatagcaccaactgtgatctggcttggtttatttgctttattacctaatgttggtcttttagttgttacttttttaacaagaggtgaccaagaatttgttattccagtattaaccttttctaattatgctagactgtttgaaccttcttttttaaaaattttatgggattctatttggttagctcttatgagcacacttttttgtttattggtaggatacccatttgcatatcgaaatgctcgttcaaaagcaaaaattaaaccatggttgcttcttctcattattatcccattttggactaactcattaatccgtacttatgcacttgttttgattcttaaagcaaatggactattaagtactgtacttatatggttaggtattattaatgaacctatatcatttatgtatagtgactttgctgtttttataggtattacttatacgtttttaccatttatggttcttcctttatatacgactattgaaaaacttgatccacgtttgttagatgcagcaaaagatttgggagcagggggatttcgtgctttttggcatataacgttacctcttaccttaccaggtattgtggctggatcaatgtttgtttttttaccttctttaggcgcattttatattcctgaaattttaggtggctcaaaagatatcttagtaggaacgtttattaaaaatcaattttttgtaaatcgtgattggccactaggtgcagcctctagtactattctaacaattttgctatttattttacttatacttcaccatattacaacacagtctttctctataaaaaatagagctgaaaatgatccacgatttaggaggcctgtctaa

SEQ ID NO: 9731 - DNA, 777 bp, Lawsonia intracellularis
atgaaaagattaggtcttatatggttatggattgtttatatctttttatatttgccaataatagttgttattggctactcatttaatattgctaagtatacatctgactggaagggatttacattacaatggtatagccaacttatgaataatactccgttgatagatgcagggattaactctttaagtgtagcagcattgtcagctagtttttcgacttttttaggtgttcttacagcattagctataagaaggtataggtttcctggtcggaaaattttgtatggttctatttatgttcttacagtatcaccagatatcgttatgggtatatctttattaatcttttttatattttttcatatcccattaggttttcttagcctttttattgctcatactactttaagcttaccgtttgttgttcttactgttttaactagattaatggagtttgatgaacagcttgttgaggcagctcgagatcttggtgcaaatgagtctcaagcctttcgctatgtgatattacctcttataatgccagctattgttgcagggtggttattagcgtttactttatctatggatgatgtcttaattagtttttttgtcactggaccaacttttgaaattttacctttaaaaatttattctatggtacgcctaggagtaaagccagaaatcaatgcactttcagctattatgttttgtattacagtcgtttttgtttttattgcatggctgttgcttcctaagactcgtcatacaggaaactaa

SEQ ID NO: 9732 - DNA, 1053 bp, Lawsonia intracellularis
atggagaaatacactatgaaaaaatacgttagcttagctctaattttagtaatatcttgttgtcctctttttgctaatgataaggacacacttaatgtgtttacatggtctgaatatattccttcagatgtactggctgattttacaaaagaaactggtattaaagtggttgtgtctacatttgagtctaatgaagcaatgtatgcaaagctaaaattattaggtggtaaagggtatgatattgttatgccttcaagttactttatagaaagattatataaagataacttattagcacgtcttgataaatcaaaaattatagggcttaataaccttgctcctgaatcccttggacattcatttgacccccataatgactattccatcccttatatgtggggtgctttaggtttattgtttaacaaaaaagttgttgatcctacagttataactagcttcaatgatttaaatcgtcctgagtttaagggaagagttttgctatctgacgatatgcgggatacatttggtgtagcacttaaagtaagagggtattctgttaatacgacaaatcctgatgaaatcaaagcaggctatgaatggttacaacagttaaaaccagaaattcgtgtgtttgatattacagcaacaaaacaggcatttattggagaagaggtattagctggtataagttggaatggtgatgcatttatagctatgaaagagaatcctaacttacagtttatttttccaaaggaagggtttattctttggattgataatttttcaattcttaatcaatctgaaaataaagaaaatgcatatgcatttattaattttttacttcgtccagaaatagccaagcgatgtgtagaagagtttttttatacaactcctaatatagctggtcgaaaacttcttgatcctatttatcaagaaaatcctattatctttccaaatgatggtgtaatgtcaaaaggagaattaattagtaatattggtaatgcaattaatatttatacttcatattgggaaaagttaaaaatgagccattga

SEQ ID NO: 9733 - DNA, 1269 bp, Lawsonia intracellularis
atgaagttattccaattcattaaaaataaaaaaaataaacctgaaactgtatcaggtatgcttcaaacaacaacatcagacactgcacaatctttattaaccttagaacagtggggaaatatttcttttggtctgacccctggccgccttagatctatccttcaagctgcagatgaaggaaatatcactgaacagcatcaactcttttctgacatggaagatcgctgtgaacaccttgctgctgaaatatccaaaagaaaacgagctatactaacattagattgggaaatagttcctgcaagaaaagataatcctactgctataaaaatagcagatgctataagagaacagtttaatagtatttactccatagaagatttactactagatatggcagatgctataggtcatggtttcagtgcaatagaaattgaatgggaatatgacggtcatatccacatcccaaaagcatttcatcatcgacctcaatcctggttccaaatgttaccacaaaataaaaatgtcttacggttaagaaataaagatcctgaaggagatcctctttggccactgggctgggttattcgtactcatcgatctagatctggatggctaccaagagctggactctttcgcgtagtagcatgggcatatttagtacgctcttatgctcttgaagccagtatcaactatgttcaaatacatggattaccatttagaattgggaaataccatattggaagtagtagttcagacaaaagagctcttctaagggcacttcaaacacttgggaaagatgctgctgggattataccttctggcatggaaatcattttccaatcccctacaaatacatcccatgatcttcctgggcaacttgtcacacgttgtgaactaggaatgagtaaagctatccttggaggaacattaacaactcaggctgatggacaaacaagtacaaatgcccttgggaaagttcataatgaagtcagaagagacttaatggttacagatgcattacaaatttcttcaactatctcaaaacaattaattatgccaatggctgctctaaactgcaaagtagaagatacaactctactaccatcatttagatttgatacacgtgcagctgtagaagtaggtatttatgcagatgcacttccaaaactttcaccaattatggatatttccgctcagtgggcacatgataaattaaaaataccaaaagctttatctaaagatgatattttaggaagccatataagataa

SEQ ID NO: 9734 - DNA, 444 bp, Lawsonia intracellularis
atgaaaaaattactttcagatactgaactagatttaaaagccttcccagaagcagtacaatttcttatcaaccttattggagaagatggtacattttcacttattcagcattatggcggtagcacattacgcatccctagaggagatactatagtaggaaggacaaaaattgacctgcttgcacaaaaaattgggaagcaagaagtacataatattgttcaaacatttggcggaacatgtatatacatacctaactgtaaaaaactccttacagcaaaacaacatgcaaaaataattcaagatagagataaacttgctgccaaaggtatttctgaaaggcaattagtatctgatcttgcaagaagatataagctttcagatagacatatttggcgtattttaaaaaaatcttatactattccagcagcttttaaaaattgttaa

SEQ ID NO: 9735 - DNA, 645 bp, Lawsonia intracellularis
atgccacagctactggacaaatcaacagtaaaaacaatgtcattaccaaaagatagatacatgaaaaatactcaagggcatttcatacttaaagaacacattaagcctattgatattgaaagaaataattttgttatgcaatgtgttaacaaagtaaaaaaaatacagaaacaactcaaagaattaaaaaaagaacttacaacagatcttaatacctttattcaacaaacagccaaacaatacaaagtagatatgggtggagtaaaaggaaatatcacacttatgtcatttgatggtaattaccaaataaaaaaacaaatggtggaacgcatctcatttgatgaaggactacaagtagctaaagcaattattgatgagtgtattaggatatggagccaatctagccctggagaattacgtgcagtaatagaacatgcatttaaaatagataaggaggggaaaataaatactaatgctatccttgcactacgaagactaaatattaaagatcctcgctgggaacaagcaatgcaagctatagttgatagtatccacttagtagaaacgaaatcatacatccgtatatatgaacggatgcctgatggaaaacttaaaaatatttcactagaaatgtcctcattataa

SEQ ID NO: 9736 - DNA, 741 bp, Lawsonia intracellularis
atggatatacaaaaaataggtgaaaaactaaaagcactacgtggtcaagaaagtagagactctttttctgcacattttggtatacatagaaatacactagctgcttgggaatctggtgaacgtttaccgtctcttgaatttctttctttacttgcacagcaaaaaaaactttctgtagcagaaattttaggagaggctggagtagtgagtacaaaagggctatcttcacctcaaaaagtacaacaagaggcagatactacagttaatagtgaatataaattagagagggagagggcatgttctcagttttcatggaaagggaatgattttacattgattcctcttgtaaaagcagttctttcagctggtggtggatcttttgaaactacagataaaatagaaggacattatgcctttagaaatgattttttatattatcgaggaaatccaaaaacaatgaagcttttccgggtagatggtgacagtatggaacctagggttagtgatggtgatatagctcttattgatcaaggccaagttgctcctagggctgggaaaatatatgcagtaagacttgaagatgtaatttatcttaaagtccttaatacacagccaggaaagctgatactttcaagctataatactgactatacacctattgagtttgatacacgaggtgatatggcggattgtttttccattatagggagggctgtttggattggacgagaacttgattaa

SEQ ID NO: 9737 - DNA, 2709 bp, Lawsonia intracellularis
atggcactactttctgagctaatccagcgtttacctttagtaaaaaatactcatatgagttcacagggcttttctctatggatatgctgggatggtgaattagataatgctgttccacaagcactgcaagattatggcggaatgagtgttgttatagacaggtcacaagctctttggttttttttctcttcagacgtatttctagcccttgcaaaacttactgtatggtctaaatttcatcctttgcctataagtgtccaggttttccctagtaaacttcttctaagtgttcgacgtgagatatcactctccattgatccttcattagctactcaagaagtgttagttcctcaatcactagaaatttgggtacatcctaaagcaaaagagattgcaggcattattcctggaataacttatacactaagtaaagagttgcaggggatggcgtctgttaagtgggaaaatcttgaagcagacccacggttaccttatatgtcttctcagggctggtatgtccttattcatcctgttgggaatcctttagataagctttttcagtcaggttggaaaacaatgtatgaggcaatagaaaaaattattcaggctaataaatttaagtataatctccataataactatcttatgttgtctattgataatttaagacaacttagaatttgggttcgagacatcctaaagtgtatatcagatgctaaagtgcaaggaacttattggccttgtgtctgtatctctattgataaaaagggattaaattttacaaatgatcttccaacaaaagtgggtattaagtgggataaccttattcctgacgtcccatatattacatatcgcaatgcatttttattaggagaagggttcaaaattacggatttaaatttttctagttcacatgtttcaatggatagttggtgtgcagttgaacttaccgaagatagttcttttgttagtgaagttattccaattcttatgcctgaaaaacttgtttcaggtgagaatacagggtgtttttactgtggttctaaaaatcatgataattctcaatgtgttacaagaggtatgtcactttctacacaaaatatttggaatgatttagcagaaatgagcgtagaggtgatgagtgaaggatttcaacttattgaacaggaactgaatggagatgatgttattgttggatatgaaaatatcctttttaaggataatacattagaacaaaggttattaaaagcaatttttgaaactaacttacctttacaagtaagaagtattaggaacatttggttagctacaggaagagagttcccaaaaagtggagatgtattttctagtaaaaataatgtaaaagatgatagtcttgcttgggggttacttgaacgattcaaaaagatacaagcttcagagctgctatcctttgaaaaagatgtgttatctgctagtaggaatgctccaagggactttcgacttcgtacactacttggatttattgcagttgaaaaaggtgatctatcccgagcacaacttttatggaaagaggcagaatcccttgcaagcacagggctacatcaagtatggcatatgtttttgcaagcaagacttcttgaaatacaaggacgtttttcagaagctatagagatatatcagaatgtacttcgtctatatccttcttggttagatgcagaatatcgtcaaattgtctgtcatgtaaaaatgggttttgctgaacaagtacagactaaaatttttcaacttattgagcaagactcctcattttttaatagattttttattgatccagaacttgacagagggtatttaagtatccttagtgaacttcttgtagctttagaagagaaaagaagattagctagtgatgaaaaaataaaagcagaaaagctacttatagagttagatgaatggtttccaaaggaccatgctattgctaatacatttcgtcaaaaacttaaactagttattaataacttatctttgaatacgtatgttgcatttctttctataattcagatgcgtcctattatagaaaatgatattacaaaacaaattaaatatgaaattaaaaaccttaaacaaatttttaaaatttatttgaagcagttagaaaaaatacgtgatgaagcagcatggttccctttccctaatatccttattgagtttaataaaaatttcaatgaatgtgcaaatatttttaattgggcatttacttcaaattttaatgatgcagaagtttttaagaaagcaagggggtatgcaccacttcttcaagaatatttagaaggattaacacaaaggttaaaatttttacggatagtacgtgacgtaacattgtttattcttatcttaggaaagacatttttttggatagaggttataggattattgctttgtgcaactagtgtccctttgattgctgtttttggaagtaaagttggacttggttggttaagtacattgataaaagaagagcaatggggattacagcgagttttattacttattattagcagtgtggcaataggtatttctgcaatacatacaacattagtttttgaacgtaagagggatcaattgattgcagaggcacgtggacagcgtgagaaaatacaacacataaggcttaaacatattaatgaagctaaaaaagaaaaacaaaaatctattgaaaaaatatag

SEQ ID NO: 9738 - DNA, 1251 bp, Lawsonia intracellularis
atggataaacttattattgaaggtggttacccacttaaaggcacagtaactgtaagtggttcaaaaaatgctgcactacctattctaatagcaagtattttagcaaataaaaaagttacgttacataatgttccgcagttacgagatattaggacaacaataaaacttctagaaatccttggatgcactattcagcaaacagagcaatgtatagaactaacaccaggaacattacaacatgaggcgccttatgaacttgtctgtacaatgagagcatcaattcttgttctgggaccactactcgccaagcttggtaaagctaaggtagctatgccaggaggatgtgctattggtgctcgtcctatagatcttcacatcaaagcacttgaaaaaatgggtgctaagtttaccctaaaagatggataccttataggggactgtactaaacttaaaggtacacatatttacttggatttcccaacggttggtgggacagaaaatcttcttatagcagcctcaattgctgaaggagaaactattcttgaaaatgctgctcaagaacctgaaattgaagatcttgcacgatttcttattgcctgtggtgcaataattaaaggacacggtacaaatgtcattcatatccaaggagtcccttctcttaatggttgtacatatagtatcatgccagatcgtattgaagctgggacttttcttactgctgctgctattacaaagggagaactgcttatatcaggttgtccctataaagaattggaagctattattaataaatttatgcaaatgggtatacacattgaaaaaagagaatgtggtatctatgttgcccctataaaaacactcaaagctactgatgtaacaacaaggccatttccaggattcccaactgacatgcaagcacaaattatggcccttatgtctattgcttatggaactagtacagttaatgaaactatctttgaaaataggttcatgcatgtacaagaacttgctcgaatgggagctaatatccgcctaaacggacacacagctattgttacaggtgttaaagagttaaaaggagcacctgttatggcctcagatttacgtgcaagtgcatctttagttcttgcaggtcttgctgcaaaaggaatcacaacaatacaaagaacttatcatttagatcgaggttatgaatttattgaaaaaaaacttaatgctgttggagcatctattcaacgtactaacgaatag

SEQ ID NO: 9739 - DNA, 780 bp, Lawsonia intracellularis
atgccttccttgttacgacttacatcatggaatatcaatggattcagggcaatcataaaaaaaccacattggaattggtttcatgagaatcaatccgatattattgctttacaagaaacaaaggtagatccttcacaactccaagataacctccaaaagccagaaggttggctatcttactggtcagcctctataaagaaaaaaggatattcaggagtggctgtatttagtaagcctaaaccacttgctgttacagctgaactacctaatcctacctttcaaggtgaaggccgtttactccatttagaatatccatcttttcactttatgaatatttattttcctaacggaactcaaggagaccaccgtctaagctataagcttggctattatgatagttttcttaattatgcagaagaagctagaaagacaaaacctattgtcgtatgtggagactttaatactgcccatagacctatagaccttgctcgcccaaaagcaaatgaggaaacctctgggtttttgccaatagaaagaacctggatggatcgttttattgctgcaggttatattgatacatttcgctatgttcatggggatataccaaacaattattcatggtggtcatatcaacagcgtgctcgagagcgtaatgttggatggcgaatagactatttttttgtttctatagaacttatgcctacaattcgtgatgcttggattgaaatggatattcaaggctctgatcattgccctgtaggactaacgttggaaatataa

SEQ ID NO: 9740 - DNA, 492 bp, Lawsonia intracellularis
atgactcgcctatttttatctattctaagcctctcccttttgatatatacaccgtatgcctttggagaaatgagtctctcatttttggggagtacttcaacctatactggactagaacagcacgaagaaagtaggactcttctatctgataaactatggaagtcctatgtatcacacaagcaaactttttcctcctatagcccaaaaaactctaatccatttatatctaaagataaaaaaatctctaataaaaaagaagctgctataaaggaagctagaattaagccttcaaattcaataaaaaaacaagaattatctaaagatattagtatacaaaaagaagctcagcttaaacttaacggacaaccagaaacacctaaagagtattctaatcaagcatctataaactcaactaaaaaagaacctacaactctcactagaaaaccatctattcttgagcctatcacatctataaagccatcattaatttaa

SEQ ID NO: 9741 - DNA, 735 bp, Lawsonia intracellularis
atgagaaaattatggattttactttcagcatgtttattatctatatcacctacaattgcttcagctgaacaaacaggattatatattgctcctaagttcatttggggatttgcacctgttgatatcaaaacaacaggaacaattggtatagtaaacgtacaaactatctcagactctgttagccataaaaaaacagaatcacttcctgggggagcattagctgttggatatgattttaatcatatgtttcaaactcctatacgtacagagcttgaatttagtttttttaaaaaaatggatataaaacacaatgggcaaaagacggatattacccttggagctcttctagtaaacggatattttgatataaaaactgattctccatttacaccatatataggtgttggacttggcattgctggtgtaaaaacaaagtctaatgctatcatagatagcttaggctacgatatcaaagtaaaacttgatgataaaacaaaaaagaactttgcctggatggctacagtaggtacttcatatgaaatttcagaaacttttgctcttgatttaggatatcgttttgctggatttggtaaaggtgaaactaaaagctggaataaaagtcaaatagttgacctcctaccattaggacctgttactgcaactgctaatgctagtttaaaaacaaaagaaatatttatgcatcaaattatattaagtgcacgtttaacattctaa

SEQ ID NO: 9742 - DNA, 2268 bp, Lawsonia intracellularis
atgggtaataacaataatgataatggaatatcagttaattctctaccatttagagatgggaagtcagcagaaccacactattctaatactatcccccaaagtaaatataaaatttctcaaagaccaacaccacctggagttgagcctatgacttcaggttcatttaaaactccagataatactacagaaaagattaaggctatggactcagttcgtgtcaatggtcatgatatggctattacaactaatcttggcgtaaaaatagctaataatcaaaatacacttagggcaggagtacgtggtccatcgttactagaagattttcatcttcatgagaagttagcacacttccatcgtgaaagaattcctgagcgagttgtacatgcaagggggtcaggagcttatggatattttcaagtatataaatcaatgaggcaatatacaaaagctgcttttcttcaggatccaggagtcaaaacgccagtttttgttcgtttttctactgtacaaggttttaggggttctcctgatactgcaagagatttacgaggctgggcaacaaagttttatactcaagaaggtaactttgacttagtaggtaataatacagctgtattttttatacaagatgctatcaaattcccagattttgtgcatgctgtaaaacctgaaccacataatgaggttcctcaaggacagtctgcacatgataatttttgggattatgtatcattacaacctgaaacattgcataatgttatgtgggctatgtctgatcgtggtattccaaggagctatcgcatgatggaagggtttggcatacatacatttagacttattaatgagcaggataaaagttgttttgttcgttttcattggaagccagtgtatggtactagttctcttctttgggatgaagcacaaattcttacaggacgtgatcctgattttcatcgtaaggatctttggcaagcaattgaagctggggattatcctgagtatgagttaggactacaaattattccagaagaagatgagcataaatttgactttgatattttagacgctacaaagttaatcccagaagcattagtccctatagaacttgtagggaaaatggtattaaaccgtaatccagataatttttttgcagagactgaacaagctgcattctgtcctgctaatattgtacctgggattgatttttcagatgatccactcttacaaggccgtattttttcttattttgatactcaattgcatagattaggtgggccaaattttaatgaaatacctataaataggcctatttgtcctgttactaatcaacagcgtgatggaaatcatcgtatgcaaattgattctactgttgctaattatgagccaaatactgtaagtggaaattggcctcgtgaagtacaaccatcagagcatggtggagggtttactacatataaaagtaaagttgaagggactaaagtacgtgagcgtagtccatctttttttgactattactcacaaccacgcttattttggttaagtcaaacagccccagaacaaaagcatataattgatgcatttagttttgagcttagcaaggtaatgcgaccatatatacgggagcgtatagtagatttacttagttatatagatcgtgatcttgctaaaggtgttgctactaatcttggtttaactttaagtcaagaacaattgtcatacgatcttcctaagccagtaaatggattaactagtgatccatcgcttagtttatacgctaaaaataaacaaaatataaaatcaagacgagtagcactacttgttgcagatggtgtaagtaaggagtcaatagaaactattagcaatatgttacataaagaaggagtatatccacagttttttgcgccacatatgggaagtattaagacggaagagggtaatgaaataacagttgatggtactattgaagggaatccttcagttgttgtagatgctgttattgttcctcaagggaaacaaagtctaaatacattattaaatgatggcaatgcaaaatattatttatgtcaagcatataaacaccttaagcctatagggcttcctggaaatacaaaagaaatgcttagctatatagggttatcagaaaatgatattgatgaaggattagtattggctcctgatagtccaaaaatgataggaaaatttatagatgctatgaaacaacataggatatggtctagagaatctaagataacaagcttctctgcatga

SEQ ID NO: 9743 - DNA, 1758 bp, Lawsonia intracellularis
atgcgctggaaagatatttctatttttaaaaagttattaataggcttttctatagttattcttgcaggggttattgggcttgcaaatgattattttgaagtgactaggattcgaaatattacagatcaagtcttattagctgttaattatagaaaagctattttgaatgctgaagttgcacaccttacatgggtaaataaagttgctaactatcttattgaaagggggaaaaatgaattacatgttgagttaaatgatcatctatgtacatttggtaagttactttatggggagcaacggaaagaaatagaagaacgtataccagaaactaagtctttatttctttttatagagggaccacacaaccgtcttcatcaatctgttattggcatcacagctgctatgggagaaggtaaaataaatgaagcatcacaaatttttcagaatgttactttaaaagaacttgatcttattcgaacaactcttaataagcttgttgtcgtttttgatgctaggtctacagttcttgaagattcacttataaatacaatccattttgcattagtcgttatattattatgtgtagctgtgatgctaattggtggtttacttttatctttattccttggaagaagtattgttagaccaatatggaagctagtagcttatgctcatgaagtaagtgaaggaaatttaaaagatccaacattaaatcaaaaagatgaagttggtcagcttgcaggaacattaggaataatggttaataaacttaagaaaactattgaagaagcaaatatgaaggcagatgaggcctatagaaaggaagaagaagcaaatgcagcacgtgtaaatacagagtctgctatccaggaagtaaaaaagaaacagcaagagctacaagatgttacagttcaattaaaaggtgttgtagatgttcttagtagtgcatcaaaagaaatgtctacacaaattgaaacatctgaaaggggagcaattttacaagcaaaacgtattaatgaaactgcaacagctatgtcagaaatgagttcatctgttttagaagttgctcgaaatgcaaatgtagcagcagaactttctgcagaagcacgtactcgagctgaagaaggatctggcattatgaataatgcagtagaaagtatttatgaagtccaaaagcattctttgatgcttaaagaagatatgcagattttaacacaacatgcacagaatattgatcaaattatgagtgttatttcagacattgctgatcagacaaatttattggcacttaatgctgcaatagaggcggctagagcaggagaagctgggcgaggatttgctgttgtagctgatgaagttcgtaagttagctgaaaaaacaattacttctactgcagatgtaggtaaagctattggtgctattcagcatagtgttgagaaaaacatgggacaggttgataaaaccgttcagtctattgagtcaactacagatttatcaactaaggcaggagagttattgagaaatattcaagagatggtagaatccacagcaagtcaggtacgttcaattgctacagcttctgaaaaacagtctgctacaagtgaagagattagttcttctattgaagaagtaaatcaagttgcaaaagaaactgcttctgcaatggtttctttaaataaagctatggtagatcttgctgctcaaagtcggggattacaagaactcattagaaagttggaacaagagacaataggataa

SEQ ID NO: 9744 - DNA, 1272 bp, Lawsonia intracellularis
atgtctataaacaaatctagccatcgatcctttaggattatatgttatcctaatgaaatttctttagtagaaaacttactttctgaacaaggatttatctttgaacctgatcctttcttatatttagcaagaaaaattatatatgagccattcccccttggaaaaagtttagctgcattttttggtttaatttatattcaagatcgatcgtctatgttgccagtattagctttacaagctaatgttggagatattatattagatatgtgtgcaagccctggtagtaaaacaactttactatcacaacttgtaggtaacactggacttattgtaggaaatgatcctaccaaaagtcgtctactaacattacgtaataatcttggtagacttaattgttttaatacagttacatgttcatggccagctgaaaaactacctatgccagatgctacctgggggaaaattttgcttgatcctccatgttctggatggggaactataaaaaaaaatcctcaagttacaaaaatttggcagggagaacgaattaatccacttattattttacaaaaaaaacttcttacagaggcaacacgtctattaatccccggggggaaaattgtttactccacatgtacaactaatatagatgaaaatgaagcacaaatacaatttgctataactaaccttggattaaaattaatcccgcttgaactccctttaggattctctgttataaaacctatatcaccctcttatgaaggggtaatccgtttacctaatacccatgactctcaaggattttttattgcttgtcttcaaaagcctggtaaaaatacaaccaaaattgatactactaatgaaaaaatagatatatcttcatatcctcactattcattagatacccttggaccttttggcattgatataactaaattaccacaaggaaatcttgttgacttcaactctaatctccattttattcctcatgctgccttaacttatttaccctatactctatattggcaaggccctattattggtaaaacatcaaagacaaatatcttaccttcaccacggctacgtctattacaatcaacaacagacctagcttattgtttacatattgataacgttcaacaacttgaaaaaattacacaaggacaaagcataatgacagattttaaaggtaaagaagtcccactattttggaaagaacttccacttggaaggcttaaagtaaaaaatggtagagttttttggagtgaaaagtaa

SEQ ID NO: 9745 - DNA, 1644 bp, Lawsonia intracellularis
atgcatcaaaaaagttgtttagttgctttatgtattatgtttattattatggtgcaagttcttcaggcaaatgcagctagctatgtggttttgccatttaaagtaaatgctcctccaagctatacttatttggaaaaagctatcccatctatgttaacttctagactttattgggaagaacgttttcaacctatcccggatgctaatgctattaaagcaggaaaggtagaagatataaaggaaatggataaggcaaggatagctacaggtgcagactatcttatatggggacaggtaaatattgtaggtgatgaagctacgcttgatgtacaagtttgtgatatagaaggatcaatttggaggaaaagtaaaaatacaaaagttgataatttaattactgcccttcaagatacagcagatgcaattaatagtgagttgtttgggcgtgcaactacaaaaccatcatcaaaagctactattgtagctcaaatgaactctggattgattaagggaaaaggaaatgaaaatcagtcatatcttaatccagaatttcgttatcaaggaagcaatctttcccgtggccgaagtcaagctcttccctttgcttcagttggtatagttgttggtgactttataggagataataaaaatgaagttgccatattaagtgagtataaagtccatatttatcgatgggaagaagaaaggttagctcttcttggagaatataaattccctcgctcactacagtctttacatattcgtgcttttgatgtggatcatgatggtgtacaggaaatcattgtttcttgctttgatccttcatatgcaaagccatattcgtttattcttagttttaaaaatagagtgtttaaagagttagccacaaacttaccattttatttaaatgtggttaaacttccaccagatttttctcctatgttaattggtcaaaagagtgacaattcaaggattttttctccctctggggtttatgaaatagaaaaacatggacgtaactatataatgggaaatcgtcttagtcttccaaaggaagctaatatttttaatttttcttggttaccatcagattcattaaaagatgaagaagctaagttagtacttgtaaccaataatgaaagattagttgtatataatacaaaaggtacaagactttttatgactgaagaagtgtattatggttcttctgttggtatagacgagcccagtaatatgcctggtcttggaaagtcaaaagagcttatcccttctaaatattttatcccaggacggatgattcctattaatcttgattcaatggggaaatgggagttgcttgtaagcaagccaatttctgttgcagcaaaattttttgaaaattatagatcttttgctgaaggcgaaattcaggctttaacatgggacggcttaggattaggtcttgtatggaatacacgtcgtattaagggaactattacagattttgccttagctgatatgaataatgatgggaagttagacttagttgtttccgttaatagccatacagggattcttggactagaaaaacgaaagacaattatagtattttatcctttagaggtagataaacaaggtatccctaaggctgttgaagataactaa

SEQ ID NO: 9746 - DNA, 1122 bp, Lawsonia intracellularis
atggcttctattgcccttatgttaccacggtttggactatatggcggtgttgagcagtttgcttatcgtttagcagaagcgcttgcagaagagcatagtgtagattttatttgtgctagggcagaagcttctcctccattgggtgttcgagttattattgtaggtagattgggttggtttaaatggttaaaaatagcttggtttgctatttgtgctgagcaagttcgtaaaaaaggttcatatgatcttgttattggtcttgggaaaacatggaatcaggatatagtccgtataggtggtggtccacaatctaagttttggtctctttctgagcaagcatggtctccaggctttcatcgttatagtaaaaagtttcgtagatatgttaatcctgcaagttggctaaattttattatagaaaaacatcaaatttatagtcagagtactttaatttgtgtttctgaaactgttcggcaatgggtacttgaagcataccctagtattcaatctccagaggttatttataacttaccagattttagtcgatttacacctactacttatgagcaaagagtagtggcaagagctaagtttgatctagacatgggacacattgctattgctacagcaacaagtaattttatgttgaagggaactagaagtttaatcaaagcaatgaagcttcttcccttaaattttaagttatttattgcagggggtagggatatatcctcttataaaaagcttgttcatttattaaaagttcaggatagagttgtatttatggggaaagtagaagatatgctttcattgtatagagcaatagatttatttgctcttcccacttattatgatgcttgttcaaatgctgtattagaagcaagggcatgtggattaaaagttcttagtagtaaatatgatggttctagctcatttttaccccaacattggttaattaataaccctagtaattctcaagaaatagcaaataaacttttgtctatgagccaagaaccacctcctagtcctatgtatataccaagtactataaaagcaggtcttagttcttgggtgaattttattgaatttatgcttcaaaagaagtctttaatgaagatgtaa

SEQ ID NO: 9747 - DNA, 795 bp, Lawsonia intracellularis
atgaaattaaaaatattttttgtagtaactattctcttaacttcattttatacagctacagcacatgaattccttataaagtctgataaagataatgtagtaaaagaagagaaaataacaattgatgttgttgaaactcatgtttttataaaacctgaagagcttcctgtacttaaggatgttttactttcttttatacaaggtaaaaaatcatcagaaacaataaagcttgaatcaatttcaaaagagaatttattgcgtggcattattgatcctactactagtgaagatattgttgtttttgctaaaagattacctcaatattggagtgaaactacagaaggtatattagaaggtgatagagaaattttagaagcacaggggaaaaaagttttaagtgttggaagttatgaaaagtatgcccttctttttatccctggggaagattcaaaaactatttcaaactatgttgttccaggtgaacatccaccattatttcttgctccaatgtttaatccttatgctgtgaaagtgggacaaaaaattaaatttatggtgacaagcgaaggaaagcctgttgcaaatgcttctatttcagctacctatgatggattcagtgataaagaaaatgtttatgctataactacaaaaacctgtaaaaaaggtttagtccagattagtccagattctcctgggttatggttaattacaacagaagtaaaagataaacttgttgactctattgctgatgaaaagagcattcgttcaacaacactattttgggtaacaccctaa

SEQ ID NO: 9748 - DNA, 1338 bp, Lawsonia intracellularis
atgaatatacataacattgctattattggtggaggactttctggatgtgaatgtgctctaaccctagctaaattcggtttctcagtcacactatttgaacaaaaacctcagctattctctccagcccataatacacctctacttgcagaattagtttgttctaattcattaagatctaatgagcttactacaggtattggtttactcaaacaagaacttagagaacttaatagtcctcttatggccatagcagatacatgccgtgtccctgcaggaaaagctcttgcagttgatcgcgaacttttttctaaacaagttacacaacttattgaatctcaccccaaaattcaccttatcagagaagaagtttcttctttgagtacatcattccttgaaaaatatgatcgtattatagttgcaactggtccattagctagtccaaacatttctaactcactatcaacccttattggggataaatatctttatttttatgatgctatagcccctattgttactgcagattcaatagatatgtccattgctttctggggatcacgctatgaagaacaaggagaaggggattatcttaactgtcctatgtcttatgaagaatatcaaatattttattcttcactattaaaaggagaaaaagtaaccaactcaaaggtggaaaaagaaatacactttgaaggttgtatgcctatagaagcccttgctgaacgtggggaaaaaacacttctttttggtccatttaaacctgtcggtcttattaatcctcatacagggttacgcccctacgctgtcctacagttacgccctgaaaatcttaataaaagtatgttaaatcttgttggttgccaaacaaaacttacatatccagcacaagataccatatttagacttgtacccggcctttcaaatgttgagtttgttagatttggaagtatgcatcgcaatacatatatcaattcacccaaaatacttacagatcaattagcactccgtaattttccatgtatacatcttgcaggccaaataacaggtgttgaaggctatgtagaatctattgcctgtggtctctgggtaagtatacttttgcttgcactttctaaagataaaaaaattctaagacctcccaaaacatgtgcccttggaggattacttgaacatatatcatgtccatcaaaacaatttcaaccatctaacattcattttggccttgttccagaacccacagaaaaaattaaaaagaaagagcgtaaagaatggtatgcacaaagggcaagaatagatttttatcactggttaaataatgaattaatacatataatgtaa

SEQ ID NO: 9749 - DNA, 636 bp, Lawsonia intracellularis
atgaataattataattatacttcattaaatagtgacactatcaaaaacatagtccaatttttctttgaagcaggaatgcttcgatatatccctcgaagtggttatccttttcttgggacaggaaaagaaaatgtagcagaacattcttatcgaacagcaattataggctatatccttgcaaaagaatgtggtgcaaaccctgaacatacaagcttactctgcttatttcatgattttccagaagtacgtataggggatcttaactacataaatcatatatatgtcaaagctaataccagaaaagctttaaaagattctatttcaggtataaatattggagaaagtattctttcattatgggatgaatattctaactgtcaaacactagaggctatctttgctcatgatgcagaccaacttgatcttgcccttaatctcaaagttgaacaaaatttaggaaatccttatgctaaaaactggttagaaaacctttttagtcgattaaaaagtagtctagcaaaagaactttatcatgttattcttatatctgatcatactgactggtggtataaacaaaaaaataaacgttggtgggaaaccagagagttaaaaaaagatgatagtcacaaaaagtaa

SEQ ID NO: 9750 - DNA, 1218 bp, Lawsonia intracellularis
atgacaaacaacttatctccaaaatatgattatgaacatgattatgatgtcgtcattcttggagcaggtgcatctggactcatgtgtgggctcacagtagctcaaaaaggtttatcttgtataataatagatcattcacctactatagcgcgtaaactatgcctagcaggtggaggaaaaggtaatataactaacttaaatttaagcccaaaatggtatgtaggagaaaatcctatattctgtaaagatgtcttattacaatattcaccccatgatatcatcgatctcctaaaaaaatataatatcccttgggaaatacgatcccatgatcaagtcttctgtaaagtaaaagttgctcactttgtaaaatgtcttatagatgaatgtaaaaaaaataatgtccaatttttattaaaaaatagtatacaaaaagtatctgctaacccaaaatcatttgtaataaaaacttctactcaacttctaaaaacctctaatttagtgctagccttaggaagtcaagcgtggcctgccacaggagcaacagacttaggaatacatatagcaaaacaatgctgtcatactattattccaactcggccaattcttgttccatttattcttcaaaaaaactctccattacaagatttagcaggaattagccttaatgttagtatcactataggagcagataataaaaaacgcacatttcattatccacttctttttacacataaaggtattagtggtcctgctgctttgcaggcttcatgtttttgggaaaaaggacaaactattactataaatttcttacctcatatttctcttattgattatatgcattcctttagtaatacaaagcaaacagtaaaaagcttattaaaaaacttttttcctactcgatttattgataattttattcctattaatctccagtcacaaaaagtcgctgaaataagtaaaaaaaaccgtatatggcttagtaacaaacttcatgcttatgttgagagccctcttgaaacagagggtataaaaaaagctgaagctatggctggtggtgttaatacctatgaagttaaccctcatacccttgaaagcaatataataccaggcctttatttttctggagaaattcttgacattacaggccttttgggaggatataatctacattgggcttgggcaagcggctatgttgttgggaaaacaattcaacgttaa

SEQ ID NO: 9751 - DNA, 327 bp, Lawsonia intracellularis
atgaatcctactagtgaagcattaatggcagcatgggagtttcgttatgcttgtaaagagtttgatcctgtaaagaaaattagtgaagaagactttcatataattcttgaaggtggtcgtctttctccaagttcttttggttttgaaccatgggagtttcttgttgtacaaaatgttgagttgagatctgtaattcgtgctttttcttggggtggacaaacacaaattcctacagctagtcatttggtaatcatcctagcacggaagccagaaactatggggccaaactcttcatatgttcgaaaaacaattatggaagatacttaa

SEQ ID NO: 9752 - DNA, 300 bp, Lawsonia intracellularis
ttgaaacatgattttaatttactaggtaatgaaagagcttgttttgaatgggtagcaagacaatgttatattccattagctaatatgatgacggcagcagcatttttaggaatagattcttgtgcaatagaaggctttataaaagcagatttagaaaaattactatcagataaaggatacatagatccaaatgagtttggggcagcatgtatagtcacttttggttatcgtaaagagtcatctccaccttttttaaaaacacgccgtccagaaaaagaggttgttcattggataaattaa

SEQ ID NO: 9753 - DNA, 408 bp, Lawsonia intracellularis
gtgtctgtaattctagcaaaatatattggtaattttcaagtagaatgtcttcatgtaagtagtggaacaaaaatcataacagatcctccattaaataattatggccaaagttcttccttttcttcaatggacttgtttgttacatctattacaacctgtattataacagcaatgcatattcatgcattactacataatattaagctcattaaattagaagcagagacgaaaacaatagttacccatgagcctaaaagaatcaaaacaatagaaatcatattaaatatatctacaataaacattacagagaaagataaaatagctcttgaaactattgctaaagactgtcccctttgccatagtcttcatccagcattagaacttttgattttatttcattggtcgtaa

SEQ ID NO: 9754 - DNA, 1320 bp, Lawsonia intracellularis
atgggacttacaccaaaagaatgccaaaaactgctaaaagaaagcaatccattacgtgtttatggtaaagtaaataaagtagttgggttggttgctgaaggaacagggttaaagtcgcctctaggtgctgtatgtcatatgctctctgggaatgatgaacatggagaggctattgctgcagaagtggtaggtttccgtgaagggaatctgttatttatgccttatggagaaatgagaggtatccaacctggaagtcttattagaaatactagtttacctcctgtgttccccgtaggtaaagagattcttggacatgcattcaatgcttttggagaacctcttagtggcggaaatccaattataccagaaaaattaatccctctttattcaaatcctccatcaccacttgaacgaccacgtattaaagatcctcttgatgtaggggtacgtgctattaactccatgattacccttggtaaaggacaacgagtaggtattatggcaggatctggtgttggaaagtcaactcttatgggaatgatggctcggtacacttctgcagatgttaatgtaatagggttgataggagaacgtggtcgagaagttgttgagtttatggaaaaagagcttggtccagaaggaatgacacgatctgttcttattatagctacatctgatcaatctcctcttgtacgtatgcgtgccgcttatgctgcaacagcagtagcagaatattttcgagatcaagggaaagatgttctgcttatgatggattcagtaacccgatttgctatggcagcgcgtgaaattggacttgctgttggtgaacctcctactacaaaaggatatacacccacagtttttgcacaactacctaaacttcttgaaagaacaggtcgtagtaatactggtacaatcacaggaatatatactgttcttgtagatggagatgattttaatgaacctattgctgatgctgttcgctctatacttgatggacatattgttcttacacgtgacctggcagatcaagatcatttcccagctattgatgtattacgctctattagccgtttacgatctgatatttgcactccagaacaggttcaagatgggcgtattgtggggagatatatggcaacatttcgtaaagctgaagatatgattaatattggagcatatattcaaggctctaatgaagaaatagataaagctataacaatgcatggtcctatagaatcatttctaaaacaaaatattagtgatcgttctacattagaagattcctttcgtttattacatgatcttgctcataggtag

SEQ ID NO: 9755 - DNA, 1446 bp, Lawsonia intracellularis
atgaataataaaaagttctctacagatgaaaaaaaccatcccaaaaataaactgaatactgggacagtttttatgggaccttctcctgataaagaatcttcattaaaacaagtcataggtacacatgaacaagaagtatggaaccgtcggactgtttcagaatacatgacacgtgtgagagagcgtgcaacaatacatgtacaagcaatgcttgataaagcacgtgccaatgcagaaacaattagaaaaacagctaaacaatgggcagaaaaaaccaagaaagaaagcgataagcttcataagcaagctcaacaagcattgaaagaagctgaacgtattcgtgaagaagctgatcatattagagaattagctcatgaagaaggataccgattaggcattgagcaagctcaagaagagataaaagaacaaataaaatctatccacatgactgctgcttctatactgaagactattgaaagacaatacactgtcatttttgataactggcgttcagatttagtaaaactattacatacagctacagaagttgcaactgattggatattatccaaagaacacacggcgatactagatagcgttcttaacaaggctgttcaacagcttgaagaacgacaacgtgttactatccgtgttaatccaaataataaaaatactattatcgacctcattactaacatcaaaaatcaatttccagaattaaaaaactgggaaataaaaatagatgtaacaatgggcgaaaatgatgtaattgtagaaagtcgttcagggatggtagatagtaacagccaacttcgaaaagaagaagttagagccatactccaacaattaattatacctgaaagtgaaattgacattgttgcagctcaatctatagcagatattgcagatataacaggaattacagcattatcaaaagaggcagcaatactgcaacatactcctgtacaaaatgactcttctgaaaaaactccttccagtaaggaaacattatctcccaatgataaaaaacctatctctccagctgaaatagacttaataaacccaccatcagaagaggtagaattcacatttcctgaacttgaaggaatagaattgcctcctgatattccacaatatgaaattaataaagaactttcttctggtctatcttccactgatgaatctactataactaatccttctctttcaacatcactcactgattcttttacttctgatatatctactgataacaactccatactaacatctcatcatactgatataaatgacaatatagaacgggatatattttctgaactaccaaaaaatttgcaaatggaagaattctcttctgctatggtagagcaaggtagtaatcatgaattaaatatggataatactccatctcaagtaaccttaacaaattttacccccagtgaataa

SEQ ID NO: 9756 - DNA, 996 bp, Lawsonia intracellularis
atggaattaactggaacacaaaaagcagcagttttattacttgtgttgggtgataaattcactgctgaagtgttcaaacgtatggaacgcagagaaattgctgctatatctaaagctgttatagacttagatacagtttctaaagatactgtagaagatgtattacgtacatttcaccaagatttagttacaggaaaagatctcattattggtggtcaagatagtctaaaacgtatgcttatgaaaaaccttgatggtgaaacagctaaatatattatggattcacttaacgttgagtccggacctgctccttttaaagaacttgaaaaagtaagcccaaaacttctttcccaaatgttacgtaatgaacatcctcaaactcttgcgctaatccttggacaccttagcccagaacaagcagcaagcttacttattatgcttcctgctggagttcgagctgaagtacttattagacttgctaaactagaatcagttccagaagatatgttagtagaagtcgatagggttttacaaagccaactcattgcaatgggtagtaaagaagggaaaaaagttggtggtgttcaatctgtagctgaaatccttaacgcagttgaccgtgctacagaagaagaagttcttgctgagattgaagaggattctgcacagatggctgaagatattcgtaatctcatgtttgtatttgaagatataaaaggacttgacgatcgatcaattagagaagttcttaaagaaacttctaatgaagaactaacattggccttacgtggagcttcagatgagcttaaagaatacattttcagaaatatgtctgaacgtggagcaaatatggtacgtgaagaacttgagttcatgggaccaacaaagctatctgatgttgagcaagcccaacaaaatattgttaaaattgtacgacgacttgaaggagaaggcaaagttactattaaccatggtagtggagatgtctttttataa

SEQ ID NO: 9757 - DNA, 1665 bp, Lawsonia intracellularis
atgcaaaactttattagtcaaattatcgcccgaattactgaattttggaataatagtaacctcacacaaaaactttttattggtggctcagcagtatttgttaccctcatatttataggactcatgttttggattaatcgtactgattataaagtattatattctaaccttggtcctgaagatgcaaatcatattatcaaaacattacaagcagacaaagtaagttaccaattagcagataatggaaaaacaatccttgttcctgcttccagtgtatatgacttacgaataaaaattgctggcgaaggtgggatggtaggctctggtattggattcgaaatttttgatgctgttaatgttggacaaacagattttgtacaaagaatcaactaccaacgagcattacaaggcgaactttctcgcaccattagtgaattcccaaatgtagaaagtgcacgagtacatcttgttatccctcaacgcagcctgttcattgaagaacaacaaaaaccatcagcttctgttgtattaaaacttaaaaacccatctcgaaaaatggaccaaaaagaagttcaagggatggttaatatgcttgttatggctgtagaaggattagataaagagcatgtctctataacagatagtcttgggaaacctctttatttcccaaatgaagataatttagcagggcttagtgtcacccaacgtgaatataaattaaaagtagaacaagggcttgaacgtcgtattgatgaactacttatcccacttatggggcagggaaaagttattgctaaagtcaatgtagacttagattttaaccaaaaaactatccgtcgtgaaatttatgatcctaatagttctgttatacgttctgaacaaagaagtgaagaaacaaaccgaggacaatcaaatcttgaatctggctcacccgacgtaaactttcgaggagatggtccaaatggagctatgagtacacaagaaggaacaagagaaacccgtaccacaaattacgaaattaaccgtgaagaacaaaatattgttggagaagttggacaaataaatcgaatgactgttgctgttgttgtagatgggacttatgttaaagaaccaaatggtgaatataaatttgtaccacgttcccaagaagaacttaatcgtatacgtcttcttgtctcacatgctataggctttgatcgtgcaagaggagatacaatagaagtaagttctattccttttgatgaagcagacttacctatagaaccacctgcagcagaagtcattgctaagtatgctgaacgacttgggaaaccacttttgaatgccctattagcatttctatttctcatgttagttgtacgacctgttatccttgctcttatacgtccaaaagtagaatcagaagccattgtagaaggccttgaagggttaccttctgcagaagaacaattagcattatatgaaacacaagaagaagctgctaaagcagccgcaatggaggctgtacgaatagcctctgaggaagaagaagaatttgaatctcttaagcacttagaagatataaaaaattatacattacaacttgcagaaaataatatagaacaatctattttagttcttcgaggatggatgaaagatgatacaaaaacagcaatctcctcttaa

SEQ ID NO: 9758 - DNA, 348 bp, Lawsonia intracellularis
atggggaaaactatgagtatccagtcaacagggcttaaagcttacacaaatgtaatgagtgactttaaaaaggtacaagatacttttaaagaaaagtctgcagctataccccaaagtaaacctgttgaaaaaagttttgctgatacttttaaagattctctttcaaatgttaacgaaatgcaaacaacaaaaagtcaaatgattcaatcatttgcttctggggagacacaaaacgttcatgaacttatgattacattacaaaaagctgggttagctataaacatgacatcggctgttcggaataaggtactagaagcatataaggaacttagtagattacaattctag

SEQ ID NO: 9759 - DNA, 441 bp, Lawsonia intracellularis
atggacttcatgacagcttttgatattggtgcctcagcactaagcgctgacagaacgaccattaacgttactgcaatgaaccttgcaaatgctaaaacaacacgtacaccagaaggtggtccttatagacgtaaaacggtcatccgtgcagcaacagatgtagatgaaccattcagtaaacaaatgcaatctgctcttgatcgtgaactaaaaggtgtacgtattttaaatgtattaccagataatagaccacctaaacaaatatatgaaccaggccatcctgatgctgacgaaaatggaatggtctcttaccctgatattaatgttgttgaagaaatggcaaatctgatgacagctagtcgtaattatgaagcaaattcaacaactatagataccgtcaaaaatatgtatatgagggcacttgatataggtagaggataa

SEQ ID NO: 9760 - DNA, 414 bp, Lawsonia intracellularis
atgaaaagcttgtatgaaccacatgtaaaccttgttgctaaggttatggacatgcagctacaacgtcagaatgttatcatgagtaacattgctaacgttaatacgccacgatatagacccagaacaatagaatttgaagatcaactccaaaaagctttgggtctagacatgcgtggccgtatgtcacgtactgaagaaaatcatttgccagctgtatttaatcctgaaggattcaatgctgagtgggataaagcaataaaaccaaccgtagtccatggtgaagatagagtaaatcttgataaagaaatggcaaatatggccaaaaactctttacaatataatgcattaacacaagtgattaaaggtaaccttgatggggtaaaaaatattattatggaaggatcaaaggtataa

SEQ ID NO: 9761 - DNA, 759 bp, Lawsonia intracellularis
atgttgcttaaagtagaaaatattctctttaaatataacttacataattcttttatattacctactagttataacacactaaactatatttcattttcattagataacaatgaaaaagtagcattaattggagctaatggttctggtaaatctacattacttctaactattgctggctgcctaaaacctctagcaggaaccgttcaaattatgaataatgatattacagggagtcctaaaaaggcaggaaaatatacaagcctcctttttcagcaccctgatgtacaactgctttttccttctgtacgagaagaatttctttttgcactaacccaatcttctatctaccaaaaaaataaagaaatgcttattgaagcaatagctaaacaatatgactgttttcatttattagacttccccccacaacgactatcattaggagaaaaacaacgtgttgcgttagctgtattacttattagccatcctcaattacttctgcttgatgaacctactgcagcactagatcctaaatcaaggaaaaattttatccatttattacaacaaattgatactgcaatcttaattgcaactcatgatcttgatatggcccttcattttgcaaatcgagtgttaattcttagtaaaggagaaattaaagctgatggaccatcagcagaacttctatctaacgaacaactactcaaaaaatatgatcttgagttaccattatcattacaatcctgcatgtctctgacttag

SEQ ID NO: 9762 - DNA, 747 bp, Lawsonia intracellularis
atgaagtttgatttatatggtaaaccaaatcatccacttttagatatcttaactccaagagctggcttattttgtgcaatcattcttataataggaactattcttaaccattcattaattagcataggaatacttttttccatggctgtaattattgctctatggagtaaaagtattaaaaaagtattatcaatacttttacctatcaatatttttataatcattgtatggattactttccccttaacgatatatgatcctacccctatcacaatattcccacatttctctatttctttagttggtattaaactagcttttattctcacactaaaaacaaatgctactgcactttttttgataagctttgtaaccaataacccacatgagtttggtaaaacgctacagtcactaaaaatttccaataaacttattgttctttttattttattctatcaacatatttgcttattacataaagatattatctctgctttacaaagtctttcactacgggcaccaaaactaaaaggtattccaaaactaaaagcatatgcttaccttgtaggaacacttttagtgcataatatagaccgtgcaaataatatccgaatggtactattgcaaaaaaattccccaattatgtataattctaactcttatccaaaaacaacatataaagatatttcagtctgtattcttatactgcttatgacagtcactgtaacatattattttaatacttga

SEQ ID NO: 9763 - DNA, 636 bp, Lawsonia intracellularis
atgcacataagtgagggagtattatccgtacctgtactagcaggtggttggacctgtactattatattactagtaatatcattacgccgtattacttattcatgcttaccaactatggctgtattttcaagtatatttttccttacctctctaataagagtacctattggacctacctcagcacattttgctttactaggtcttcttggtcttattttaggttgggggactttcccagctatttgtatttcactaatgttacaagcaatattattccagtttggagggattgttgcattaggtgtaaattgtattgttatggggctacctgctcttcttattgcactaatatttagacaaaaactacactgccaatctcctaataaaataaaacttttttcttttatagcaggctttggagctatttttctagcaacatgcttattgtaccttgcacttattttaagtaatcaacaatttaaatatgttgcattaactttacttacagcaaatgtcccacttgctatattagaaggaattattactatactagctattgtatttttacagaaagttgcaccagagctcttgtcttctactaattgtactaccaataattattgtaatgaagtttga

SEQ ID NO: 9764 - DNA, 498 bp, Lawsonia intracellularis
atgaaatatttttttcttattatattcctactactatgttcttttgtccatgaagcattagcacatggcgtttcaggacaaattattacaacacaacagcctattggtgttgagtttctatattctacaggtgaacctgttccttatgcaaaaatagaagtctacagccctgaaaataaaaatattgaatatcaaaacgctagaacagataaatttggtcgatttgcttttatacccaatactcaagggacttggactattatcatgagtgataatgttggtcatcgtgcagagttaccaatcacacttacagaagatgatatccttacccaaacatctactacagtgtcatccttaaattccacaacacaagtatgtcctattatggcaatgcctttatggttaagagctcttttaggcgtaagtctcttatttaacatatttatcggattatttattatctttaaatataggaaatcctgtcatgcacataagtga

SEQ ID NO: 9765 - DNA, 1563 bp, Lawsonia intracellularis
atgtggctaacaacatcttataaaatgggaatggcagctcttattatggcaggaagtgttatactttctagggtcatggggcttattcgcgataaagtaatatcatgggagtttggagctacgtctgaagcagatatttattttgcagcatttgttatcccagactttattaattacctccttgctggtgggtatatttccatcacattaattcctcttctttccaagtcattccaagaagacgagcaaaatggttggaaattcttttccacagtcttttattgggcaacaatagctatcagtgttacaacattcatagcatggttttttgcttatgaccttgctaaaataactgcaccaggatttacagcctctaatcaggaacgtcttggattcttcctacgcattatacttcctggtcaaatattttttatttctggagcatgtatctctgctttactttatattcgaaaacaatttcttgttccagcgcttatgccaattatttataacagctgtattattttaggtggactaatttcttcttctaatggaatggaaggattttgttggggggtccttataggagctgcattaggtgctttcctcctaccatttggagtaggattaataaatggtatccacttctacttttcgctacgacatccactcatgaaacattttctttggctagcactacctcttatgcttggacaatccattattatacttgacgaacaattaatacgtatatttggttctcttgcaggagaaggtgctgttagcctcttaaactatgcacgacgcattatgcttgtcccagtaggagtcgtagctcaatctattagtgtagcctcattcccctttttagctacactagctgctaaaaataataatacaaaattcaatgaaacacttaataaagctctaaaaggtagtttaataattgcactacctataaccggatggatgattggtattgccctaccaacattaggaattatttttgaagggggtcgattcagtcatatacaaacagtgcttactgcaccattactacaaattatgctcttctcagtaccattttgggtagtccaacaagtaattggaagagccttttatgctcgacaaaatactttaaccccagcattaataggaactttttctacagtaatttttataccatttttctctattgctgttaaatcatggggtagtatagggatagcttctcttaccgccatatctattattacatatacgttcctcattagttataaatggtacaaaacttttggtattacagcatttactgggctaaaaacaattctcatgagatcttgctttatagtcattccatcaggattatcagcttggataattacaactttaacttcttcttttttaacatctttttcacccttcattttatatcttctcacaattgctattaatacaataacatttagtattttttatttcatacttgcattctattttttcccaccaatatccaatattatacaaaactatttcaaaaaattagttacccaattaacatag

SEQ ID NO: 9766 - DNA, 2082 bp, Lawsonia intracellularis
atgatccttccaggccaaaaagttactataggagttatagttcgaccgataaaaggcttccgtaataaaggtggttataatatagctaactactggtatagacaaaacgtttatttccaagcatggtcaaaagatgcagcagtccatcctattatttctgggacaccttattttagttcatggttacgtgggaaactttatcatcagtttatccaatgtattcagcaaacaagcaatatcaatcaacaatctattactacacaaaagtctacaactcttcatataccaccagaaaaaagttttatcccagccttattatttggagatcgattttttctttcacatacacttaatgcagttacatgctacacaggactggcacatagcttagctttatctggacaacacctagctgtaataagtatagcatctataactattatcataattcttataaaaattttaccttgttttttcctttcgttaccacgatacaaggctatcccattatttagtttgccctttgcacttctatatctatggattggaggtgcaccaccttcattacttcgtgcaacaattatgttatttatatggtctatttatcttatacaaaataaaccaatatgctttttagatattgcaattatagctctaatctgccttatcttatttgatcctcaagggatataccatatagggattcagctttcttttttagccgtattaagtatttcattttttaacccattgttacaaaaatgttggaaagcaatccacaaaaggatatctacaactataacctcagagatactttattcaactataacaacaagtataaaaattattatttttactataggtacaacacttattgtacagatatgcacccttcctctatgcctatatgtctttggctatattcctatttggtttccattaaacattatttggctacctatattggggatatttgtcttaccccttgcctttgttagtctacttttttgttctcttcaatgtacatctattgggatattatgtattaatctagcacaaataccttgtgaaattcttatccgtttattacttagcttaaaaaatacagaaataataagtcctatttggctacctagaccatcttggactatgctccttggttgttatcttatcttgttaagcattgggataaagctaggtagaacaggttttactacaccagcaaaacgtatattaattgctggtatgatactagttgttaccccactcttttttatcttatcaaaagataattctaataaaattagattacgtattatggatgtaggacaaggacaagctattcttatagagtgggggaaaaataaaagagcactcattgatgctggtggattttattctaatcgcttagatacaggaagagatattttggcacctatattatctacaactcattctctccatttagacttttttgctataagccatcctcatagagatcatattaagggctttctttttcttgcaaatgtatttaatgttgatcaggtctactctgctatcttaccagcaattgattctcccaaagggaatgcctcacctcttttgctacaacttgatacaatacttaaaaataaacgtataccaagaaaagctcttattcgtggagaacaaattccattaagtaacgatatctacttagaagtcttatcaccaccaaaaggtgtaattccaaaaggaaacacaggacttatcttgcgtttagttgctaaaaaccatggtcttgcttttcttcctggagatgcagaacataacgacctcaaagaactactcaaaacaaaccttgaagttcaatcagaagtccttgtattgcctcaccatggctctaaatcaagttttcttcctgaattatataaaaaaatccatcctactgttgctgttgccagtacaggaactttaaacactaatgactttccttctactaaagttcataatgcattattacaatacgatataccattaagaacaacagcagaagaaggtgaacttacctttgagtgggatcttgataagttacattaa

SEQ ID NO: 9767 - DNA, 861 bp, Lawsonia intracellularis
atgaataaatcttctcctattggtttatttgattctggtgtaggagggctaacagtactacaggctttacagaatcttatgccaaacgagaactatctttatttaggtgatacagcacgtttaccctatggaacaaaaagtccaaaaacagtattgcattatgccatacaatcagcctctactcttatagaacgacaaataaaactcttaattattgcatgtaatacagctacagcagcagctttacctttacttcaagaaacttttccatttattccaataatcggtgttattgagccaagcgcccaaattgcttgtaaaacttcactaaaaggacatgtagctgttattgcgacagagtctactattcaagggaaatgttatgaagaaactatccttcgatatcgaccagagattcttgtagagagtaaagcatgtccattatttgttcctattgtggaagagggttggtttagtggccctattgttgaatcaatcattatacactatctttcctctttattttttaatcgctcaattaaagaccaacccgactgtcttgtcttagggtgcacacactatcctctattatcagaaactatacaaaaaattattggaaatgacataactattgtagactccacagtagcaacagcaaaacttgttcaagcatgtatcattcaacataatatggtaaatccaaacacaaacctaattggttctactatttttcttacaactgacgataaagttcgatttgctaggataggaagtttattcttaaatacatccatacaagaagataaaatagaagttgttgacttacatatgactaatgtacaacccaactatttatcataa

SEQ ID NO: 9768 - DNA, 813 bp, Lawsonia intracellularis
atgcaaacaaaacaaaaacagataccacaacttctaagaaaccatacacaatcttctaccacaactagcatccgtataaataaagcattagctaatgctggagtctgctcacgccgtaatgttgataaatatatcctaaatggagaggtaactattaatgggaaatctgtcacacaaccaggaatatacattcatccagataaagatattatagcactccatggacgtcgagtagatattcaactaaaaaataaaaaatattactatctatcaatgtataaacccattaaagttatttcttcagtcaaagatcctcaaaatcgtcttactgtcttagactttattccattcccatggaaaaactatcgcctttatcctgttggtagactagactttttttctgagggcctcttacttataacaaatgatggtgaactcacacaacggttaacacatcctcgttatcatatatctaaagtttaccatgttcttattcgtgaacgtattttaaatacaacattaaaaaatatatccaaagggataacgctttctgatggaacaaagcttccacccgctaaagttcgtgttctatctagcataactgaaactaatacaacatggcttgaaataaccttacagcaaggaattaatcgtcaaattcgtcgtatgtgtaaagagttaggccttactattcttaaacttattagagttaaacaaggaaatattaatctatctaatcttcaaccaggtgaagtacgacctcttaaaaatgacgaaattaagttattaaaaaaaaatgtacaattaatctaa

SEQ ID NO: 9769 - DNA, 1818 bp, Lawsonia intracellularis
atgataaaaaaattattccctttttttttcttaaagaatcaaaatcaagaaaaacaaactattataagggttcttcaatatttttatccatataagtgggctgttataacagcttttattgcttcaggtattgtttctttgtcaacagcaggtattgcttggcttatcaaaccagctcttgatgatatttttattcgtaaggatgttgaggctattgtatatatccctattatttttattattttgactcttctaaagggtattggtcggtatgtgcaaaactggtgtatgagctatagctcttttggggttcttgaaaaactacgtcaggaattatttcataagattataaggttacctttatctttttatgaaacatcacagactggttctcttatgtcctatgttattaacgatgtaggaatgattcgtcagagtttaccagcaattatccaagctgtaagacagtttttaacaataggtggactactatatgttgtttttacacaaaattttagtttagcttgttgggcattaattgttttacctattgcagctttcccctttgttatgtttagtgtagcattaagacgatatggtcgtcgaagtgctgaaattatagcaaagacttctagtttactccaggaattattaagtggcattagaactatcaaagcttttgctactgaaaaagaagagatagagcgttttgatatagaaaatagctatatttctaaacttagtttacgccaatcaaccatttctgagttatcctctccggttatggaacttattggttctattggtgtagctatagctatttggtatggtggaactgaagttcttgaagataaaatgacaccaggaacttttttttcttttgtagctgcattaattatgctttatgagccagtaaaggcgctaagcaatgccaatatgtctttacaaaatgctttagcaggagcagagcgtatttttagtatactagatgattcaaagctgcatatagaaactggagggagtgtattatgtggaaaagagttttatgaattaacgtttgaccatgtaacattacgttatgacagtgttagtgaacctgcattaaatgacgtaagtcttactgtaaggactggagaaaaaattgctctagttggtccttcaggagcaggtaaaagtacttttgtaagtttgataccaagattttataatccacaggctggttctattttttttaacggaagattgttaacagaatatgatcttgtctcattacgtcaagctatggctatagtttcacaagaaccatttttatttaatatgagtataagagataacattgcttatggtcaacctttggaagttagagataatattataaaaattcaggctgcagcagtagcagcatttgctgatgaatttattgatttactacctgatggttacaatactaaggttggtgaaaggggtgtgaaactttcaggaggtcaaaaacaacgtattacgattgcaagagcattgcttaaggatccttctttgttgattcttgatgaagctacaagttctcttgattcagagtctgaaaggatggtccaaggtgcattggaaaatcttatgagaaatagaacaagtttaattatagcacatcggctttctactattttagaatctgaccgtattattgtatttgaagatggaaaaattgtatcttctggaaaacataaagagttgttaggaagttgtgagttatatactcgtttatatatgatgcaatttagaactggtgagtttcaggatgcgcctatcgaaaaaggttgttaa

SEQ ID NO: 9770 - DNA, 645 bp, Lawsonia intracellularis
atgcgcctatcgaaaaaggttgttaaaccactatgtaaaatattagagtggcctctttatggattatattgtctatggtgtgggacacttcaatataatgcgattaataggcaaagcgttgactctagaacagatgctggacttccggttatattatgtttatggcatgatgagttatttcctctcatttattttagggggaaattaaaaatcattactgttgtgagtaaaagtaaggatggagatatactagctaatgttattcaacggatagggttagaaacagctcgtggttctagttctcgaggtggctcagaagcattgcgtaatgtaattaaacggatgaaggatgggttttgtgcttgtatcactgtagatggccctaaaggaccacggcataaagttaaaaaaggtgtaatttttttggcacaacagacaaatgcacctatagtacctattcgaatatttatggaaaagtctaaaaagataagtagttgggatagatttcagctacctataccttttagcaaaattcacgttatatgtggggatgcatattatgtatctccttccttaacaactcaagaagaacttactgatcaatgtaggttattagaagaacgtcttaataacctgaggttataa

SEQ ID NO: 9771 - DNA, 885 bp, Lawsonia intracellularis
atgggggatatttctacacttacttctttaacatataaatatttccctctgctatttcataaattaggtttgtctaagttacgtcttattgctagtatactaagtacattatcatggtggtgcctaccttttaggagagggttagctttaagagcaatagaaaaacacttagatgtttctttaccaacagcaaagcggttagcaaaagagagttttactgaaaattttttatcatttcttgagagtatgctaattccttcttttggttttgaatgttcttcattaataatggctcaaggagatcttttaaaaaaaatacaaatgttgcaaagacctattgtggcaactacagcacatttgggagcctgggagcttttagcaggtctccttggggacttttcaacagtaacccctagtgctgttgttgtaagaaattataaaaatacatttatacatgagataacaacaaaactgcgttcaagtcgtggagctatagttttaggacatcgtcaagctacacgttctattttacgtatactgcataaaaatggtacagtagctttcttagttgatcataataccagtcaaaaggaagcaatttttttacctttcttaggagagctagcagctataaacataggtccagcattacttgctataaggtcaaaagcccttgtcctccctttgtttcttgtaagagaaaataataagtatattttttgggttgatgatcctttagatacctgtcttcttaaagggaataatactgaaaaagtagaaacagtagccagtttttatacagaagctgtggaaaaagccattcttcgtactcctaatcaatggttttggatgcataatcgttggaaaacacgtccatctatctag

SEQ ID NO: 9772 - DNA, 1371 bp, Lawsonia intracellularis
atgataacaggacatgaaattattagtaccctgaatatgatacaaaatgaaaaccttgatattcgtactataacaattggtataaaccttttcgactgtgctagtcatgattttgatatttttgcttatcgagttagctctaaaattattcgttatgcaactgaacttgtacctatttgtaaacaggtagaagaacattttggtattcccattataaataaacgtattagtgttagtcctattggagtacttggggcatctttttctacagagcaatttatcaaaacctgtcaactcattgatgaaacagcagaaagtgtaggtgttgattttattggaggttatagtgctcttatagaaaaaggaatgactcctggagagaaaaaccttattgaatcactacctgaagcacttgcagtaactaatcgagtatgttcttctataaatgttgcttcctctcttgcaggcatcaatatggatgcagttgctcttatgggacaaaaaattcttgatgttgcatcagctacaagtacagctaatggtattggttgtgcaaaacttgttgttttttcaaacattcctcaagatataccttttatggctggtgcatacttaggaataggagaacctgatgttgttattaatgttggtgtttctgggcctggagtaataaaaaaagctattgatagagctttgtctacttgtgatacatgtacttttactgaattatatgatattattaaacaaacagcatataaaataactcgagttggagaaatcgttgggaaagaggttgcttccagattaaaaatcccttttggtattgtagatctatcattagcaccaactccttctattggagattcagttggagaaatctttcaaagtatgggattatcctctattggtgctccaggatccacagctgctcttgctatgttaaatgatgctataaaaaaaggtggtgcttttgcctcttcacaacttggaggattatcttctgcctttattcctgtttcagaagatgctagcattgctgctgcagtccaatcaaatatattatccctagaaaaactggaagctatgacaagtgtctgttctgtaggacttgatatgattgccatccctggagatacacctgcatcaactatttcaggaattattgctgatgaaatggctattggagtaatcaataaaaaaacaacagctgttcgtataattcctgtcccagggaaaaaagttggtgaaaaagctttttttggtggattacttggcgaggctactattactcctgtccctaaaggtaatgcaacaacctttattaaacatggaggatgtataccagcacccctctctagcttgagaaactaa

SEQ ID NO: 9773 - DNA, 564 bp, Lawsonia intracellularis
atgaataaaagtgttatttctattattggaatggactctcctggagttatttataccgtctctgatacattgttaaaacttaactgtatgtttgataccgtcagtcaaacagttattaaaaatcaatttgcagctatttttattataataaagcctgacagattagataatcatattattcatcaacaattatctaacacctttttacaaaaaaatatggaccttcacataacaattcatccatttcatgatcctatacctttacatcttagtacaaataattcgaaatttatagtgactgttaagggtaaagactctatcaatcttattaccatattatcaaaagtaataacacaatataagattaatattgaaaaacttgttgttgatacagatgataggtctcaaacttcttttgttagttgtgaaattacattatcatctttaataaataaagacgctttatataatgacctcaaacttcaattacaaccacatagtagtaatataactatccaacattctcaaatttttgaagctatgcatcgtataccaatactataa

SEQ ID NO: 9774 - DNA, 1776 bp, Lawsonia intracellularis
atgtcattaagcccattgaattatgctgattgggaaatagcccaggcagcagaaaaacatatgaaaacagtatatgatcttggtaaagatcttggattggaccataaggaaatatttccttatggtcattatatggggaaagtagactataagtctgtactttcaaggttggagcaatcatctgatggaaaatatattgatgtaacagctattaccccaactcctttaggagagggaaaatccactactacaattggattagtccaaggccttgcaaaacgtgggaagcgatcttctgcagctatacgacagccatcaggaggaccaaccatgggggttaaaggttctgctgctggaggcggtctttcacaatgtattccacttacacaatattctcttggttttactggtgatattaatgctgttatgaatgctcataatttatcaatggtggcgttaacttcacgtatgcaacatgaacgtaattatagtgatgaaaaattgtatgctttatctaatatgaaacgattagatattgatcctacaaatatacctatgggatgggtaatggatttttgttgtcaatcattacgtaatattattataggaatagatggggtgagcgggaaatcagacggatatatgatgcgttcgcattttgatattgctgtttcgtcagaggtaatggcgattcttgctattgctaaagatttaaaagattttagacaacgaattagtaaaattattgttgcatatgataagcaaggaaaagctattacaacagcagatcttgaagtggatggggctatgactgcttggatggttgaagctattaatcccaatttgatccaatctatagaaggacaaccaatttttgttcatgcaggcccttttgctaatattgctattggacaaagctcagttattgctgatcgtttaggtttaaaattaagtgaataccatgttactgagtcaggctttggtgttgatattggttatgaaaaattttggaatttgaagtgtcattatagtggccttactccagatgctgcagttattgttacaacggttagggcattaaaaagtcatggaggcgcaccaattcctattccaggacgtcctctcccaaaagaatatacagaagaaaacgtagggtatgtggaagttggctctgcaaatttaatacaccatattaacacagtaaaaaaatctggtgtaccaccagtagtatgtattaatgcatttacaactgatactccatctgaaattgctaaaattagacagttatgtgaattggttggagcaagagttgctgtttctaagcattgggaatatggaggagacggtgctttagaattagcggatgctgtgatagatgcttgtaatgaagaaaagaattttttgccattatatgattggtctcttccattgaaagagcgtattgagaaaattgcatttgaagtatatggggctgaaggagtggagttttctgaagaagcaatctataaactaaataaattacaagcagataacaatagttccgacttgggtgtatgtatggtaaaaacacacctttctttgtctgatgatcctaaacaaaagggtgtccctgatcattggaagttacatgtaagagatatcatgttctttggtggtgcaggatttgttgtacctattgcaggttcaattacacttatgccaggaacaggttctaatccatcttttcgtcgtattgatgtggatacagatacagggaaagtaaaaggaatattttaa

SEQ ID NO: 9775 - DNA, 894 bp, Lawsonia intracellularis
atggctgcagatattattaatgggatggaaattagagaatctattcttgaggagttacgtggagaggtagctaatcttaaaagggattataatgttgtcccaggacttgttacaatcttagttgggaatcatccagcatcattaagttatgtcactcttaaaataaaaacagctattgagttaggttttcatgaaattcaagataaccagtctgagacaattacagaggaagaactcattggtattattaaaaagtataatgaagatcctcttattcatgggattttagttcaacttcctttacctagtcacattaatgaggggaaagtattacatgcgattgatccaaataaggatgtagatggatttcatcctatgaatcttggaaggttagttataggtggtaatgctattacttttttaccatgtactcctgcaggaatccaagaacttcttatacgttcttctgtagaaacgttaggagcagaagttgttgtcattggtagatcaaatattgttggtagaccaatatcaattatgcttactcaaaaaggagtaggtggcgatgcaactgtaacattggttcatacaaagtcaaaaaatattgttagacattgtcaacaggcagatattgtgattgctgcagtaggtgttcctaattttgtaaaagctgaatggattaaacctggagctactgttattgacgtaggtgtaaatcgtattggttttaatgaagatacagggaaaccaatactttcaggagatgtggattttgttaatgtaagtcaggtggcaggaaaaattacacctgtaccgggaggggttggtcctatgactattgctatgcttatgaggaatactgtacgttcagcatttttccatctttctttatga

SEQ ID NO: 9776 - DNA, 1344 bp, Lawsonia intracellularis
atgattaaatcaccagaaaaaaaatatactaatagaaaaaaaacaaaaacagctcgtgaaatagcaacaatagcactgcaaaaaattaaagaaggccaacctatccaagtattattgaataatatacttttgacatatccattatccaaacaagatattgctttagttactgagcttgtttatggatacttacgattagaaatacgtatagtatggattctagagcaatttttaaaaaaatctgaacatcttccttatgaagtaaaacttatcataggtcttgctacctatgagttactatttctcgataaaattcctccttatgctactatacatacagctgtttcaactattaaatctaaatttggtaaaatccttgcaggagtagctaatgctagccttcaaacaatatttagaaaaagtaaacataatgatggacctaaatataataccttttataaacaaagactaccagaagatatccattatctttctatttggtatagcatcccactttggattattaaactatggatttctaattatggaacacaaaaaacattaaaacttgcagcatcctctttacaaagaccatatttttgcattcgagtaaacccaatatatgacaactggagggaactatatgaaaatctttgtcaaaatggtggaatccctataggtcgttcaggaatatatttcaaaccaaatagaaaaccaaaggagctacaatattatcttgaacaaggatacatctctatccaaggagcaggtagccagattgttatggatgcccttgatatccaaacatggaagatacctatatgggacgcctgtgcaggtagaggtgggaaaacatcattattattagaatggggtataccaatttttgcagcaagtgatatttctcttagtaaattacaagggttaatagctgagactaaacgtcttaaacttttaactccatctatcttctgtagttcttctacccagcctgcactaaaaaatgtcctctgctctcaacttaaaactatcttattagatgtaccatgtagtggcctaggaacactttctcgtcaccctgatataaaaaaatttcgtacaccaaaagatgttgataaacttatccaactacaaaaaaaaatacttaatactgcttgggagtttcttccaccacagggggaacttatttatataacatgtacagtaaatccatccgaaaatgaacagcaagtcatacaatttctaaaagactatccacaagcttctctaaaaaaacaatgggaaggaatacctgatcgttttggaacagatattatgtttggagcaatcatacagaaaaaatag

SEQ ID NO: 9777 - DNA, 1374 bp, Lawsonia intracellularis
atgcctgaacatattttacttattgatgatgaaaaaaattacttattagttttggaaaccctcttaaaagatgaagggtaccaagttacagccctcaatgatcctgaaacagcattagcatttcttgaggagtcagaagtagatattattgttacagacatgaaaatgccaaaaataagtggccaagaagtactagaatatgtaaaacaacgttggccacatatcccaattcttataatgaccgcttttggctctattgagaatgcggtagcgacaatgaggtatggagcctttaattatatcactaaaccatttgctaatgatgagcttcttctttccataaaaaatgctgcagaacttgcaaaaattcacagacaatatcgtatacttcatgaaagtcttgaagaacgttttggaaagcatcaaattattggacgcagtaatgcaataaaagatatgatgaaacttgtaacaagagcagctccaagcagagcaacagtacttattacaggtgaatctgggacagggaaagaacttgttgcaagagctattcatttttcttccccacgaagtcaacaaccttttatttctgttaactgtatggcattaagccctacactacttgaaagtgaactatttggccatgaaaaaggttcatttactggtgctgttgctatgcgtcgaggccgctttgaacaagcaaataaaggaacactctttttagatgaagtaggggagcttacacctgaattacaagtcaagttacttcgtgtattacaagaaagaaaatttgaacgagtaggtggaacagaagagttagatatagacatacgtattgtaaccgcaactaatcaaaacttacagtctatggtacaaaatgggacttttcgtgaagatctctattatcgacttaatgttgtccatattcccctaccccctctacgagaacgacgagaagatatccctttattagttgcacattttattgaaaaaattgcatcagaaaatgatattaaatctaaaaattttacagatgaagctctcaactatcttactggatatgaatggccaggaaatatccgacaattacaaaatgttatagaacgatgcctagtccttgttcctaatgacataatttctattgatgatctcccatctgaaattaaagatgaagaagctcaatttaaaagtgctgtagatttactccctgtagaaattgatttagcagctacacttgaaaaaattgaagcaacacttattcgccgagcccttgctaggacaaactttacacaagtcaaagcagcagaattattaggattatcaaaaagcttactacaatataaactaaaaaaatataatattactggacattaa

SEQ ID NO: 9778 - DNA, 1443 bp, Lawsonia intracellularis
gtgtcccaaaaacctgctataaaaacaaaactcccttttggccttacacgatttctctcatggatatctttagtccttattcttatctcaagtattgtacttgcattatttattggtaactctgctcgacatactttattattaagacagcaacagtatgcgttacttatcgttggaaatttaaatcatcaaatttatcgtcgatttactctaccaaccttcttaacatttggtagaatagcattacggcaacctattcaatataaacaacttgatgaagttattttatctactattcatggacttcatataaatagcttacgtatttatggaatggataaaattgttacttattctataaataaagatgaacttggacaagatggtcatattcctccaacagcagaacctgctatagaaacaatttcaccctcttttgaaattctttctacgttaagtctactatctgcaatgtttaccttaaaactaccacctaatagctttatattacgtactattttccctcttacaattccttttactggaaatgaagaaacacaaccttctgaatccattgtaacaggacttcttgaaataacacaagatatcacagatgattatggttatatcattcgattccaatggcttatacttgctacttgcctaagttcttcaattatactctttatccttctacaattttttattgttaaagcagaacggatcctctcagaacgtatgacaaaaaatcatcgtcttgaaatggaactacatcaaaatgaaaaacttgcaagtatgggaagaatcactgctagtattgcacatgaaatccgtaatccccttgggattattcgctctagtgcagaactattattacgtcgtgctgtggatataaatcctgataataaacaaatattaactgcaatatatgatgaatcctgccgtctaagtcaaactgttaatgactttctagattatgcacgccctaaaatacctaaacaagaacttcttaatcttaattcagtccttgaacaagtactaggattcttacaaggagaagcaacaaaaagacatatcacaatttcaaaagatatttcatcagaactccaactttatggagatacatctttactctatagagcattatataatatactcattaatgcttttcagtctattaataaagatggtttcatacatattaatggagaaaaaaataaagatggctttattgaacttactttcaaagacagtggggcaggcttccctcaggatcaaatccaacatgttactagcccattttatacaactaaagataatggcacaggtttagggctacctattgcaaatagtattattcaaagccatcatgggaagcttatactaaaaaatgattccaatggtggtgcactaatacaaattttacttcctacttcaaaataa

SEQ ID NO: 9779 - DNA, 1335 bp, Lawsonia intracellularis
atgtattacattaattggaatcacgcatgggaaggccgtctaacccaatctttacaatcaccacttccaattgaagaatacataactcggctaaaccaagatctatctgatgacattcttccttttatttctatgagttatcaagaaaaacttaaacaacaaattaatcatattaccccattattacataaatttaaatatatggttgttttagggattggaggttctgcattaggagctaaagcactacaaaaagcttttgcacctgaacaagatagacctaatcatagtggtaactggctttggattatggataatattgatagtgaaagcatgaatgcactacttacatctttaaaccctaaaaaaacattagtagttactatcagtaaatcaggagaaactattgaaaccatggcacaatatttccttataaaaacatggttacaaactactttaaaggattcttggcaaaaacattgcttatttattactgatccggattctggattcttaagacaagaagctcaaaaagaaaacattcaaacattaccagttcctaaaaacttaggaggacgatactctgtactatctgcggttggtctcattccttctgcatttttaggtatagaatgggaagagcttcttaatggagccaatcaaataatgctcccattacgtcatgtaacaatccaaagtctccaaaaacatcctgcctggacaatagcaaaatggtgttatactcttttaaaaaatggatatactcaacttattttctttaattatattgctacatggtcaatgtttggacaatggtttatccaactttgggcggaaagtcttggtaagtctggacaaggaagtatgcctctctctgcaataggagttacagaccaacattctacccaacaaatgtttcttgatggcccaaaggataaaggttgtatcttattatcaacaaaaaactatatacctggacctgtctttccaccaactatccctgaaaactggtcttggttaaaacatagacaacttaatgaacttattgaagcagaaaaaataggaaccgcagctgctcttgttacacatgatgtaccattattacaacttcaatttgacaacacaaactgttatgctgcgggggaactgatgggacttttaatgaccacaacactctttaccggctggttattacatattaatcctcttgatcaacctgccgttgaacttggtaaacgtcttgctcgagtcaaattaggagataaccattatcctaaagaggcagctatccttcagtcatttcttaatactacctctctggaggatcccacctaa

SEQ ID NO: 9780 - DNA, 789 bp, Lawsonia intracellularis
atggaaaaaacaattatttatttcccgaaaggttgtgttattgggaggtttgttaaaagatataaacgtttttttgttaatgtccttgtggacggtgaagaagtagtagcacatacaaataatactggttcaatgttaggattacttaattctgggactccagtattattatctcctgcattaaatccaacacgtaagcttcaatggacattagaacttgtttggacaggagggacatatcctgatgaaaacaaacttccttcatttccaaataaagaaggaggggtaactccattccattctggtttaggtttttgggttggagtcaatacattaatccctcataaattttttaaattagcttttgaagcaggtttatttccttggactaaaggttattctatctgtaatactgaaactaagataggtatgagtcgtttagatatttgtttacatggaaatggagttccacgattatgggttgaatgtaaaaatgttacattagttgaaaacaatgttgctttatttccagatgctgtttcactaagaggtcttaaacatcttcaagagttgaaaaagattatagatagtggtgaacgagcagcaactttttattgtgtgcaacgtaaagatggtaagttttttggtcctgccgcttctattgatcctcaatatacagaaatgttttggaaagtaaaaaagagaggggttgaaatatacccttatcatatagatattacaactaaaggtcttagtcttggccctatattgccattattatccgaataa

SEQ ID NO: 9781 - DNA, 1101 bp, Lawsonia intracellularis
atgagtcttctatttcgttatctaataaaaaataatacaaaaattttactattgactctaactatcggtattggtgtatatattttaacagatctttttgaacgtttagataattttatagaagctcatacttcaactaaaattattctaacatattttatatataaaacaccttttgctattgcacaaatattaccatttatatttttaatttctacggtaattcaattatgcattatggcaaaaaaaaaagaattaatagcacttcaagctggaggcatatctttcactcgaatagcctctattataattatagcaagtttattttgggggacaatacagtttattttttcagaatatataggaacagcttgtggtcgaaaatcacttcaaatatggcaagaatatgtccataaccaacataaatcaaaaactattctaaaagatatctggtttacagataaaaattggatagtatccataaatacactcaagcctgatgatacaggtagtggatttagcgcatatcttttagataaaaatggtcttacaatagaaaaaatcatctgggcattatctttttctattcacaataatgaatggatattaaaaaaagttgcagtctcagaaccagctttatattcacaagaaatgttgcaagagttaacacttacttttaaccaatcatcagaaacgttaaaattcatccaaaataataatgcacctcaacaactttctttttgggaattaagagaaactattcataaattagaacgttcaggatctaatgtagaactattaaaaactagttggcacaccaagctttcatattcattctcccttgtagtaatggcattattagctacaactattgtagcatggaaaaataatatttatattgctatagctttttctcttctttatacttttatatataatgcattaaatacaataggaatatctcttgggaataaaggtattatatcgcctattataggtgcttggattgcaaacctagtaataatgagtgttactatatggaaactcttttttattacccccataaaaaattttcttttaaaaatacattctgctaactaa

SEQ ID NO: 9782 - DNA, 1155 bp, Lawsonia intracellularis
atgatccccctccttcaacgtcaaatattccgtgaaagcacatacatattcttcctagtagtaggagccttattaacacttattattataaatcgtgctatacaaatgagagacctttttataggtcttaaattagaaattttagatgttctaattctttttagctacatggtaccattatttcttatattagttatacctattgcttgtatgttaggtgtatttctaacctttcttagaatgaatttagataaagagcttattgcattaaaagcttctggtataagtatatatcaaatgcttcctgcacctctagcatttagttttttttgtacattacttacattatggatatcactcttttggatagcatggggaatggaacaatttaagacaacacttttagatatagctagaacaaaagtaaaaatttccatacaacctggagtttttaataacaacttcccaggttttgttctttttgctcgacaggtagaccctctttcaggagaactacatcaaatcttactagaagatcgctctcaaaaagatcgccatcttgttatccttgctccaacaggaacaattgaaacaaatcctacaaaaggagaattaatctttaacctaacaaatggtaatatctacacaatgagtctaaataaaacatcatttctttcttttgatcaatatcttgttcgaatcccacttactactcttcttaaaaatataaacttcaacgagttacgccctaaagaaatgtcttgggaaaggcttataaaagagtataatataacaaatactatgcaataccaaaacaaaatttctgttgaacttcataaacgttgggcttacccagcagcatgtattgctcttacaatttttgcactacctttagcaatcatgtttgaagggatacatagacagtttggacttattctggcgcttatcatgttttttatttattatggattaatgtcttttggatttagcacaggcgaatctggtactatccctcctgccattggcttatggcttccaaatatactcttcttcttacttggactctatggtatctatcttacatcacgtgaaaaaactgcaaatattgtataccttatcccaaatatactaaggaaaataaaaggtataagatga

SEQ ID NO: 9783 - DNA, 693 bp, Lawsonia intracellularis
atgaatacaactattatttggcatggacactctaactttcaaattaatgctaatggaatatctgttcttattgatcccttttttacaaacaatccaagatgtacaaaaaattggaatgaaattcaaaaacctgatattgttcttataacacatgatcattcggaccatcttggtgatgccattgcaatctgtaaatctacaggtgcactttgtggttgtattgttggtactgcagataaacttatacaacaaggtatgccacaacacctcattattggtgaaattggcttcaacattggtggaacaatagagagaaaaggtgtacgtatcactatgacacaatcttttcatacatctgagtctggttctcctgcaggatatattatcactatgcctaacaattttacactataccacccaggagacacaggaattttccaaactatgaaaacgttcgggaaactatataaccttcatttatcacttttgcctattggaggattctttacaatggattcttatcaagcggcatatgctgcaaaaatgcttaaatgtaaaatggttatccccatgcactggggaacgtttccagtccttgaacaaactcctgaacggtttaaaaattatcttaaggcaatggcccctgaatgtaagtatattgctatggagccaaatacatcaaaagagctctaa

SEQ ID NO: 9784 - DNA, 1926 bp, Lawsonia intracellularis
atgtctatagtaattggaacagcaggacatattgaccatggtaagacatcccttgtccaaatacttacaggtatcaattgcgataaactatctgaagaaaaacggcgaggcattacaattgaccttggatttgcatactatgtttctcctacaggggaaaaactaagcattatagatgtccctggtcatgaaaaatttatcaaaaatatggtagctggtgcctcaggaattgacgttgttatgcttgttattgcagcagacgaaggagttatgccacaaacaaaagaacatatagaaatttgttcattgttagggataaaacatgggttcattgtccttaccaaaactgatatagttgataaagaatggttagaagttataaaggaagatattaaactattccttaaaaacacttttcttcataatacaccaatattacaagtatcttctactacaggagaaggaatcaaaaaccttaaaactcatcttaatcattatctttctatacctcactccaaacaaaaaacagatatttttcgtctacctattgatagagtctttactattaaaggacatgggactgttgtcacagggactattgcatctggttctatagctacaggagaagctattactattcttccttcaaacaaaaaaacaaaagttaaacaaatccaatatcatggtaatatagtagaaacagcatatgctggccaacgtactgctattaatttacatggaataaatacttcagaagtcaaacgtggtgatatacttgctcatcctgacactttagtgctttcaacacgttggctgatatccctaacctgcctaccatcttcacctcgtccactaaaacattgttcagaagtccacttacatcatggaacacaggaaattctagcacagctatatttttttaataaaaactctcttgcccctggggaaactatcctatgtgaaatcagattaaaaaaaccattagttggaatatttggtgaccatgttgttattcgaaccttttcaccattacaaactgttgctggtgggagtatagttaaccctatagcgtcacctatctcacgccatactattactgatcacactatagatactcttctttctcttccatctgcaacagaagaagaacttgtcaaaaaacaaatagaatttttagatgccacaggaatatatttaacaacattatctatagtaaccaatattgaacataatcgtcttctatctatattaacttcttttatagaaagaggtataattatatgttttgataaagaaaactatggatatctgtctgttaacacaatgaaaacattagttgaacaatgtttagttgctataacaaattttcataaaaaaaacccaattaagcaaggaatagaacaaggaaccttttttacaaattataaaatatggggtaaaattcttcctcataaacttattggttttattatcaaccaactaattcaaaaaggaaatttaacctctgaagggaattatatctatttaccttcacatactatttctctttcttttgaacaacaacatctctacgacaacatattaaaattatatatagaagctggttatacccctccaaaattgagcaatattcttacgacattaaatagtactatcaaacaagccactcctattattacattacttttagaaagaaaagctcttactcatataacagaagatatgtattactctacacaagcaataaaaaaactaaaatctatacttcagaattggtttaattcccataaagaacttgatattgcaacatttaaagagttatctggaggacttcccagaaagtatagtattccattactagagtattttgataaagaaaaattaaccattagaataggtgataaaagacaactcaggaatccttag

SEQ ID NO: 9785 - DNA, 1458 bp, Lawsonia intracellularis
atgacaagtgatatacacctttctcttgcacaaattcataatttacttatctcaagagaaaaaagtgttgaagaagttacacaagcttgtcttgatcgtattattgctacagagcctactatcaatgcttttataacaatctgtgcagaagaagcactaagtgaagcaaaaaaactagatcagtctactcctgatcctaaaaaacccctttggggtatacctattgcggttaaagataatattcttacaaagaatatccctactacagcagcttcttgcatgttgaaacactttatacctcagtatgatgcttttattatacagcaactcaaaaatgctggtgctattattataggaaaaacaaacctggatgagtttgcaatgggttcttctacagaaacctctttttttggtccaacatataacccttggaatacaaaatgtgtccctgggggatcaagtggaggctctgcagctagcgtagcagcttttcaatgcttttcggctattgggacagatacaggtggatctattagacaaccggcagcactatgtggatgtataggtttaaagccaacctatggaagagtttctagatatggtattattgcttatgcttcttctttagaccaagctggaccaataactcgcacagtagaagatgcagctataatgctttctgtcttggctaaacatgatcctcaagatactacatcatcctttaaagcaacagataactattatattaacctaaaaaaacaagacttaacaggtataaccattggtatcccaaaagaatttatttctgaacatattgacccccctatacttgatatctaccaacaggctatagaacaagcaaaagaacttggtgcaaaaactattgatctttcacttcctcatgccacagatcatgcgattgccacttattatattattgccacagcagaagcttcatcaaatcttgcacgttttgatggtgtacgatatggatatcgtgcaaaaaatagtcatacattagaagaattatatataaactctcgaacaaaagggtttggagaagaagttaaacgacgtatcttacttggaacacatgttctttcaactgactattatgaaaattattatcataaagctgctcaagtacgctacctcatcctccaagattttttatcagtatttaaaaagtgtgatatattattaacacctgtttctccaataacagcttgggaaataggttctactataaaaaaacctattacaatatatcataaagatatttttactgtttctttaaaccttgctggattacctggcctgagcattcctgcaggacttgtaaaaggactccctgtagggatacaactaatagggcaagcctttgacgaatctactcttttatctattgggaatatactacataaatacttagggccaacttcacaacctaacctttag

SEQ ID NO: 9786 - DNA, 284 bp, Lawsonia intracellularis
atgttaacaatagaacatttaacttatcttgcacaactggcaaaacttaacacatccagtgaaacacttaaaaaatttaatgatgaatataaagatatattacatgatatagaaaaattagttcaagtagaaacaacaaatatacctgccctttataacccatcaacaattatgcaagataataaaagaaatgatattcctataccaacccctaacccaagggaattccttacaaattcaccagaggcaaacgaaaaattttttgttgttccacgaattgtata

SEQ ID NO: 9787 - DNA, 486 bp, Lawsonia intracellularis
atgagtatccgtattaattatgctaatgaattacaacgacaagaagaaactaaaaaaatatctaagcctatccaagggagttcttttgaaaatctcctttcagaagaactaacagcaacaagtactataaatccctctaaggtccttagtgggaaaagtagcaatgttgagcaaatgcttctaatgggacttgctaagccaaaagcagcaaaatttgttaaagatgctacattaacttctattacagaacaagcaagtatactcttaaattcatgggatgaatatagctcagcactagaagaaggaataacaacacgtggagcttgggaaaaacttaccactatagaaaatcatactaaaaatttacaaggaaatcttgcaaacatacaacctcctaattctgatttagaatctatggttaatgagctaagtatcatggctgtcgtagaaaaagctaaaattaaccgtggtgattatatgctataa

SEQ ID NO: 9788 - DNA, 453 bp, Lawsonia intracellularis
atgcctgtattaaataaaattgtttgtgcgattgatttatcggagcaaagtagaactattgctgactatgctgtaatgcttgctaaaatgtctaatgcttctattatagttgtatatgtagctccaacacttactcaatatacaggatttcatatcccgccaaatactattgatagttttgttggtgaaattgtttctggtgctgaacaagctataaaaagttttgtggatacacattttcaaggagttaatgcacaaggaacagttgttgttggttatgcagctgaagaaatattatctttggctgagattgaaaaagcagatatgatagttatgggtacaagaggaagaaaagggcttgatcgtattttatttggatctgttgctgaaaaggttgtaaaaagttcaacatgtccagtacttacagtacatcctgtagaggaaagtgtatag

SEQ ID NO: 9789 - DNA, 633 bp, Lawsonia intracellularis
atgttaaaaataatttctttaaaagaagctgtaaatttcatcaatcaagggaaacttattatttttcctacagaaacattctttggacttggatgcaaaatttttaataatgaggatacaatacaacaaatttttatagctaaacaacgtgctattaatatgcctcttccacttattataggtaactgggaacaacttactataacagcagaagttcctcaaattatctatcctttactgcaacacttctggcctggggcactttctatcgtacttaatgctaaaaaaaatatttcaccatatattacagctagtacacaaaaagttgctgttcgtctttcttcacatcctattgcaaaggaaattgcagatcttgttggagaacctattatagctaccagtgcaaatataaataaaaatcctcctgttacaaaaattactcaacttgatataagactttatccctatatagaaggaattatagatatacctcctatccctactggcggattaccatcaacactcattgagttacatccaaataatacaataagtatactccgtgaaggtattattaaaagtaataaagtcaaagaaaaagcagcagaactatgtggtatcatatcactataa

SEQ ID NO: 9790 - DNA, 4023 bp, Lawsonia intracellularis
atgaataatacatgtgtactaagtctaataaattatattaaactattatatataataaaatttttaaatagatatagattagtaaaatatattaataatataaataataactctaaatatttaacaaaaattaatataaaaagtataccatgtattctgatactacttttttctatagtgtgtattaaagtaactataacttttgctatggataaaaatagtgatatgaatgataaggaggcttctactccaaatatttcaaactttctcaagggattagtaccaaaaaaacttcactgctaccttgatgatgaacagacagagcttgatattaacgttacagctataaaagaaagtcaaaaaactaaaaatccaagtcaaaaatcaattattattaactgcactataatacatccacaactcagagaaccattaatatttggtagctatactcaggtaaatcaaagtgagcttgaattattaaaaacactagttcaacaaccgataacaattagacaactggcacaactaggactatcaggtgcagaaagcagtaataaattacaaacggctgcacagttaacttcaccattaggctctaagagaaaatacgctccagtgtcatcaactgaaacgcttaccactagaacctcaagctctatagaaactagtagtataccacagtctactcaatcagcttcaagctctataataacaacttcaaacctagaagaacctgttgtacgacctaaaattccatcaactaaacaggggaaaaacaaagctcccttagataaaccccaaactctagtgacagcttctaaaagatctgtattctctcttaatctgcaattactagaaaatcttggattacaaaaaattaaagcaatctatgaggaaggacaaagtaccctacatatactactacaaaccattaaagatttacatagagaagggcaggctgataaagaattaacagaaaaatatcgtagcatgcttgaacaacaagtagaacttgcaaagtttattaaagaaaaagaagaagaagaagaacaacaacaaatcaaacaagtaatgaaaagacatgaaaacgttcaagacttattagaaatgctaaagaaaaatatatcctgctctacctctacacccgaacaaataaattttgatctactaagcttacctgttgatcaactaagtcaacttgatttaactacattaaaaaatatttttgaacctgtagaaagcaaaagacgcacgctggaagaccaaataagacaacaaattaaagaaggaaaacaagttgatccaacattacaacaaaaatatcaatacctagttactctgcaaacagatgtactaatggctactaaaaatttctcagaagaaaaactgtctcaattaccaccaaccagtggacttgcatatagattacaagaggtaaaagcaataactcaacttctgaaagaaaaaattcctccctcccccaaaagtgaagatggcaacaatatacaatttatcatattagaaaaaaaagatgatagaagaagtgaaacatctaaaacaacagttagaataaaccaacaaggaattcaaaccacaaatacaaaggaaaaaacaaaaaaaaagaatctaatagctacattagacaagtcttcttcacttttagagacagatatcgaaccaccacattcatctgagcaacaatcttcttctagctctaatagcactaaaaaaaagaaaaaagagaaaaaaacaagtcctgttaaaacacatacattttcagcaaacattccatcagaagaagttataactacaacctctataagctctgaacaaacaacagtacaaatgccattagaagctaaaactcttgttgctacaggggacaaacaacaaccttcttctagctctcatcataaacagaaaaagaaacaaacacagacttcaacgctatctagcaaccaatcactactttctatacatgcaaatagtccctcgccatctatagaatcaacctctcagcaatctaatgctatgcctcttaaaacaaaagaggctatagaaaatgaatgcactccagatatcccaaggaaaaaaaaagaaaagaaaaagcatctgaaacatacacctaaaaacccctcaagttccatcccaacttgttgtgaagaagaaaaaacttctactagtaatgaagattctaccattccctatccaaccctaaatagacctgaatttgaagaactaaaaattccagatactccaaagaaaaaaccaaagaaaaaaaagaaacctggactcggtacacttgttggagattctctgctttctgaaggaagaacaactagtacatctgacaccacacctatacaaccaccttctggctttatcaatcaagaccataaagacaaaaaagaagcattaaaaaactgtccattaagtccaccagatgaattctcagatgatgataatactaaagaagattctggaccaatgtatatcccaggagttttctgtggtaataatttagatctggagagtcctagacctaaaaaaccacatacctatcttcctaatattataggagatgttactagtattacaactgaaacattagaaactcttgatatctataatagccccctaggagaaggggaagaagataacgaagacccccaaaaaaatgttggtgaaaatgaagaaatccaagtagctgtaagagaaagtgaacaatctcaagctcaacaacaacaacaacctcaatgtacaaataatacagggacaagcccattaggacaaaatactcctcaacatccaattgttgcacaaactcctgcacagcctactccactcccagggaatggaagaagagctagaagacaacaaactaggcaaacacaactgcttacaaaaaaacatccctccactaactccttaatcgcagaactcttacctgaaggacaatttagttctttacaaagtttacaatttgctctatctgacacctctgagtttatctcagaaaccttaaagtctcttgctctaaaggcccacttctctagtaaacatctctccactactacacataaaaaattacaactttgcttaaataatagaaaaacttctggctccctcaataaatctactattgaaaatactaatattatagaggcactacagcctactaaatcttacactgtatttacttctataaataagtataccactaacttagaaaacaaactccgttcagcacaagcaggtattatgcttaacttctctcctacaactaatattggcttagcttataactttaacaaaaaagaatacaaagaatattcaggaacacaacttaattctagtaatggttctgtgaagtctaaatcaacaactgatggtttagctgctatttttactttaaaccctgaaaaaaaagggattacaggtactatgataggtttctatagttgggggaaagttacaaattctcgtcgggttacccatggagagaagcatattgttacaaaaggcagccctgacataaccttaactggtggattaatccatcttggctataacatacctgcaataaaaactttaatacttacaccatatattggatgccttgtctccaatgttagatggagtccatacactgaagaacaatctcctgttgtttgtaaaattagtgagaatagggaaaaccttttagaaaaaagtattggtctgaaaactaaatgggaattgacagaatattctcaactacaaacatggatagttggaagctctggtttaaaacaaacaaatagtttgagttcaaactcaatgataacgcctctatttaaatatactatttcggctcctagttataagaaaaaatatacaaaggcagaaggtggcttatcatatgaagtacaactctcaccaacattaactcttgatatagatgggatactttcttttgaaaaaagaaaaaaaattgaaaagaaacaacatatttcctttcatttcaactattactattaa

SEQ ID NO: 9791 - DNA, 474 bp, Lawsonia intracellularis
atgtcttcaaaatcattacgattaattgttgtaggtcggttacgtatacctttttggagagcagctgcagaacattattataaacgtatttcttgttggagagcaatttatgaaactatcattaaagatggaaactcttcattatctgtttctcaacgcaaagcaatggaaggaaaaaatatacttgcagcccttgaacctatagatatacctatttgtttagatgaaaaaggtaaatctatctcttcacaagagtttgcaaattttcttagaaattattttgaaaatacaacaaagcgaccatgttttattattggtggtgcctttggtcttgatagtagtgtatgtaacattgctaatgactgtttatcgttagggaatataacattcccacatgaactagcaagagttatatttcttgaacaggtttatcgtgcagagactttattacgtaatataccttatcatcattag

SEQ ID NO: 9792 - DNA, 1698 bp, Lawsonia intracellularis
atgaagatacatagtagtgcatggatcattattggagctttaggcctatggtttggtgtagaaaatcctatatgttatatcccaggtcttatttttttctatcctttatctttaattatattaggacataatgcaccaggaaaagttgatgcattaagagctggctggattctaggattactaggatcatctttaagtctttattggctagctgttcccatacatactataggtggtttaccatggttgcttgcttgcccttgtgttgtccttgttggtggttctttaggatttttttctggtttgttttcattctttgttttttgttttcatcatatacaattttggcagaaaagcttaatgctaggattggtatggtatttaattgagtggataaaaagttggttttttacagggttcccttggcttccttttacaatgggatttgcacgatatcctgttatgttacaatgtgcatctattattggttcatatgctttgagtggactatatgtagctattctttgtttagttttctatagtattctctattctcagtccaaagatattcataagtgtagtattaagtggcccttaataagggctctatctgtagcctgtattctttttataagtattgtactttttggatacataactttaaagacaaatcccattgatatgaatatacaagatggagttactatagctattatacaggggaatgatgatcagattgttaaatggaatcctcaaacaaaatatcgatctgctcaaaaatatgttagggctagtgaggagttgttaaaaaatatttttcgacttcatgaaggtgggaatacatattatcctgacgtttttttgtggcctgaaacagtcattttatttgattttaaagctgaagttgaaaaaggcatacataatcctttaacatattttgtaaataaatatcagattcctgttatttttggagcacctggaatagaaacagcagggaaagacataactatttttaatagattatattattatagtccaggtaactatagattagattgcagtgaatcaaataaaataaataaatctcttcagtggtatgataaagagcatttagtcccatttggagaatatacacctctttttttcaattttccttttttaagtcaactattgcaggaggtaggtacatatactccaggtgaaaaggtggctccacttctttttgaaataaaagaaacagtaaagaaaggaagtatagcatgctatagaactatttcaatgggtatacttatttgttatgaggtaattttccctgagttagcaagaaagcgtgtagctgagggggcacaagtatttattactgtaagcaatgattcatggtttggccatactattgcaccagttcagcatttacaaattgcccagatgcgatcaatagagtttggacggtggatggctcgagctgctgtaacagggatatctgcttttatagatccttatggccgtattatagattcaacaaaaatttttatccctacataccttgttggaactataagacctattatagataatacggtcttcttttggatagagccatggcttccaacttttgctatcttagtattatgtattatgttgtggaaaaataacttaataacccattcttgtggacataaaagtagagggtgttcatga

SEQ ID NO: 9793 - DNA, 1089 bp, Lawsonia intracellularis
ttgaaattttttggaggcgtctttgaccaaccatcttataaaaatcgtctttctgaaatagagaaaattctttcagcaccagatgcatggagtaacccagaagcattaacgcctatacttaaagagaagagtcaacttgaagcagataatcttcgatttgaaaaattacatctttgtcatacagaaatgatagactggtttgagcttgttcaagaatttttaacaactaatgagtccagtactgaatttttagaagcattaactgcactagaattacaggtaaaaaaatttcaagatgctatggaagaagcagagatgtatcttcttcttggagcagaagaagataaaatggatgctatattagaaattcatcctggagctggaggtacagaagctcaggattgggcagaaatgttagagcgtatgtatttacgctgggcagatttacatggtttttctaaagaagagatggattacctccctggtgatgaggctggtattaaatcagtaacattgagaatttctggtgagaatgcttatgggttgcttaaaggagaaagaggaatacataggcttattcgcatttctccatttgactcgtctggaaggcgtcatacgtcttttgcatctgttgacgttattcctgacgcaggtgaagaagttgttatagatataaaagattctgatttacgtattgatgtttttcgctcaagtggtcctggaggacagagcgtaaatacaacaagttctgctgttcgtataacacatatccccacaggaattgttgctcaatgtcaaaatgaaaagtcacaacaccataataaagagtctgcaatgcgtattcttagagctaggctttatgagcaagaaattaaattacgtgatgctgcaaaacaagctcaatatatggggaaagaagcaattagctttggaagccaaatacgtacatatacaatgcagccttataggctagtcaaagatcatagaacaaactgtgagtctagtgatgttgaggctgttttaggtggacagattgataaatttattaactcttatttattatcaacatatagaaataatagcttataa

SEQ ID NO: 9794 - DNA, 276 bp, Lawsonia intracellularis
atgaacaaaagtgaacttgtgaagtctttatctgaacaggcaaatatttctttagatgaagctacattggttgttaatacgtttgtagatagcatgaaagaatctcttctcaaaggtggtcgagttgaggttcgtggatttggtagttttaaagtaaaagagtatgaaggatatgctggccgtaatcctcgtacaggcgaaaaggttgttgtacaaccaaaacgtcttccattttttcgtgcaggtaaagagctgaaggaatatcttaatagctag

SEQ ID NO: 9795 - DNA, 846 bp, Lawsonia intracellularis
atgtttagcagagaagatatacctagtatagaattttttaaacttcatggttgtggaaatgattttgtttttattgacaatagatctctttttattcctaaagaaaaaatgtctagttgggcagaggtaatttgtagacgtaagagaggcgttggagctgacggtattgcattttttgagctatctacaatagctggtgctgattatatgtggcatttttttaactctgatggttcaagagctgaaatgtgtgggaatgctagtcgttgtatgggggtattagctgttaagataggtcttgctaatatgcagcatacattaagtacggatgctgggttaataagtattactgttggtgatgagttacaggatgcaactgtaactatgacagatccaacaaatattttgttgaatgtatctctagaagtagaaaaagaaacacaacaagtacattttgttaacacaggggtaccacatcttgttgtatttcatgataatcttattgattatgatattatacctaaaggaaagttattacgaggacactctcatttttctcctgagggagtaaatgtaaattttgttaagattgaaagtccaaattctatgtttgtaagaacttatgagcgtggtgtggaagatgaaactctagcttgtggtacaggtgtatgtgcatctgttattattgcaaatcaacttgggttagttggaactaacgtcaaagtcatgacggcaagtaaagagataatagagcttaatttgaataatggaaaagtattaatgaaaggacctgttgttcatgtttacacaggacaactgcaattgtcagagctaggtcttttttga

SEQ ID NO: 9796 - DNA, 906 bp, Lawsonia intracellularis
atggagtatgttatggggcaaatacaatttcaaggagcaatcacagcactagtcacaccttttaaaaaaggagagatagatcttgagtgttatcgagaaatcattgaatggcagattgagcaaggtattaatggattagtttcttgtggtactacaggagaaagtgcaacattaacatatgaggaatataagttattaattaaagcatgtgttgaacaaacaaaaagccgcgtccctgtaattgcaggtgctggttcgaatgatacagctaaagcaattcagcttacaaaaattgcaaaagagttaggggcggatggagtattacatgttactccatattataataaaccaactcaagagggtttattccaacattttaagacaatagcaagtcaggaatctattcctatcttattatacaatgtcccagggcgtactggttgtaacttactgcctgaaacagttgcacgtattgtccaagatataccagaagttgttggcataaaagatgctacaggaaatttagaacaattttctgaaattattgaattttgtcctattgggttccaagtattaactggtgatgattttactatattaccatctatgatcctaggaggatgtggcgttatttctgtaatatctaatattgttccagctatggttgttgagctatgttcattaattgaaaaaaataaattagaggaagcacgtcaaatccattataatttagcgccactatgtaggttaatgtttgttgaaacaaatcctatccctgtaaaaacggctctttctttaatggagaagttagagcttgaatttaggttacctttaacagagcttagccctataaattttactaagctagagtctacactaaaaaatatagggattataagtaaatag

SEQ ID NO: 9797 - DNA, 1164 bp, Lawsonia intracellularis
atgttatatattaaaaaaagtcttatagcattatcttttggtacccttggactgggtattgcagaatttataataataggcatattaccttatattgctactgattttggtataactatacctactgcaggacatctcatttcagcatatgcttctggtgtatttattggtgctccttttttaatatttgttcgtcgttatcccctaaaaaatattctattggctttaatagttattattatgttaggcaacctgatagcatccattgcttttaactatgagacaatgatgttagctcgttttatttctggacttcctcatggatcctattttggagttggttctattattgctgagaagttatcagataagggaaaatctacagaagctatttctataatgatatctgggatgacggttgctaacttatttggtgtcccattaggaacattcttaggtgttacgctctcttggagaataggttttttgattgttgttggctggggactagtcacatttttttatgtatggcgatgggttcctcagatagagaatgtaccagatacaggccttaaaggacaattttattttcttaaaagacttgcaccttggttactaattattgctactatattaggtaatggagctgttttttgttggtatagttatattataccattattaacaaatgtatcaggtttttctcctcatagcgcaacattgcttattgtttttgcaggtgtggggatggtaataggtaatttttttggtggagtattgtctgatcgtttgatgccaattcgtatagcaatttttatacaagggttgctcagtattgtccttatttgtatcttttttttctcttatatcccatgggtttccatcttattgatgatattaggtactgcttgtttatttgctttaagtagtccacaacagttattattaattaagttttccaaaggcggagaattgttaggaacatcaagtgcacaaatggcttttaacttggggaatgctattggggcatattgtggtgggttacctattcaaatggggttaggatatcagtattcagcattagttggtgttccattttcagtaataggttgttttatattatatttcttttaccaaaaatttggtatgataaaagtaaattga

SEQ ID NO: 9798 - DNA, 783 bp, Lawsonia intracellularis
ttgcccttaattggtgcagattctcatgcacatttagtgtttcctgagttatttactagactctctgaagttattaagagagcagcctctgcaggtgttgcttttttagggaacgtttttttaagtattcaagagtatcaagagtataatgaagttttaaaaactattcctggaatattttttcttttaggcattcacccttgtgatgctatgaagtttaataaaaatatccttaaaattatgtatgatctctttcgttgtgatgaacaattaaaagcagttggtgagatagggttagatttttatcataaagattgtactgctactctccaagaagaagtttttagagctcagcttaactttgcaagagagatgagaaaacccatagtaatacattcacgtgatgctgcaagggatacgattaggattcttgagtctgaaggatgtatagcttaccctgtactttggcattgctttagtggtgatgcagtatcttttctagatagaattttaagtaatggttggaatatttctgttgcagggcctgttacatatcctgggaacaaagaactacaagaagtaatccctatgattccagaagacaagttattaattgaaacagattgtccatacctttctccagttccatggagaggaaagtgcaatgaaccagctttggttgtttttactgcagcatatatagcttctttaaagaagatagatattatagaactttggacacaatgcggagaaaatactaaaaaattttttatgttatcataa

SEQ ID NO: 9799 - DNA, 642 bp, Lawsonia intracellularis
atgtctattacaccactcaaaaatagttacgtttcaactaattatgaaaaaaaatcatctactgaaaacctacattcaaatactgagacaaaaaatacagaagcagtaaaaaataattctcaaagaacacaaaaaaacaacaactatctttcaagtaatcctataagttggttacaacaagctgtaagtgccaccatggatggtatgggacttgggcctactgataaaatatctttttcaactattatttcttacagagatcaactccaaaatgaatttgatactaaagtaaaagaaggattaaaagaagcaggattagatgaaaatgttaaatttcaacttgtttcaggagatgaaggaggaataaaagttattgcagactcaccagagaaagaaaaagtagaaaaattttttgaagacaaccctgatcttgttaaacaatttgaaaaaatacaagctcttaacaatgttgaagaatcacgaaaacaacaacgaattgatgttaatgctattagacaacgtgttcaagttgaatctatgatggcatggtattcaggctctggaggagggggcattagttctattatggatttctcgggaggacaaacttcttttttcagtggaattaataaacatgtataa

SEQ ID NO: 9800 - DNA, 402 bp, Lawsonia intracellularis
atggctgtaattttgttaggtaatgaacatatatggaagttacctttttgtcgtttagaatttgttgctattcttgagaaaatgttatcttttgcaaagttacaaacaatagaagtttatttagtatcagatacaacaattgcgttttttaatcttcattatatgaattgtttagggataacaaacgtcctttcttttcccatggatgacgaagatcttgctggaagtattattttatctgttgatgctgtttgtcgagaatcattattatatcgtcagcctattttagattattgtttatcattattatctcatggaattgcacatattgctggatatactcatggagtagagatggataaattttgtagtaacttattattaccttttaagttagcttag

SEQ ID NO: 9801 - DNA, 318 bp, Lawsonia intracellularis
atggctgaagttatatacaaaggaaaaaacttcgaagtcgatgaagatggttttttattaaattttgaaaattggggcccagagtgggttgattatgtaaaagaatctgagggtattagtgaagtaacagatgctcatagaaagattatagaatttttgcaagattattataaaaaaaatggaattgcacctatggtgagaattatttctaaaaatactggttataaacttaaagaaatttatgaatttttcccatcaggtcctgggaagggcgcttgtagaatggctggattaccaaagccaacaggctgtgtttaa

SEQ ID NO: 9802 - DNA, 1023 bp, Lawsonia intracellularis
atgaaaattatccattctgcaatttttgctgttacattattaacagcatggtcaacagtttgctttgctgcagaagttacagctagttgtactaaacgtgttgaaagctataattatcttgtggattattcaggctctatgatgatgaaacatgttgctgttagagagcctaaaatagaattagcaaaagaagctatattaaaaattaatgcggcaatgcctaaaatgtcatatcaaggtggattatatacttttgcaccttattctgtaattattccccaaggttcttggaattcatgtgttgccgaatgtgcggttaatacaattaagtctgatttagaaatttttggtcgtcttactcctatgggagacggcataaaaatgcatgaaacagtcattaatcaaatgccccctcaggcagccgttattcttctcactgatggtcataataatttagggatgaatcctgttgaggaagtaaaatctatatatcaaacaaatcctaatgtttgttttcatgtagtttcatttgcagatgatgctgaaggcaaagcaataattgatcaaattgttgcacttaatagtggaagtgttcttgttgatggtttacagcttctacaaaatcctgctgtttgccaagaatttgttaatagtgttttttgtcaagagcaaattcttgttacagaagaagttgttgtacttcgtggtgtaaactttgcttttgattcttttgcattagatgatactgctaaagctattttagaagaaacagttcgtcttatcagagcaaatccagattttaatgttcgtttgcttgggtggacagatagtactggtcctgatgcatataacttgcgtttatcacaagaacgtgctgatgcagttaaaaacttcttggttaaaatgggtataccttcaaatcgtttatttgctaaaggaatgggtaaatcctatcagtataataatgctacaaaagaaggacgatatatgaatcgtcgtacagaacttgtcttttttgattag

SEQ ID NO: 9803 - DNA, 471 bp, Lawsonia intracellularis
ttggattcaagccctttttttgtgaaggggttttatatgaaaaaattttttttctttttagttatgcttataccttttttaagtataattcctcaggtagaagtgttagctaaagttaatatacaatcagaacaagaggtaaaagaaaaattagaacattttgcaaaagaatatctatgtcaagctaataaaaatttaaaatgtaatagagatgcaaaatttattactaaagttggggatgaatttatagctaaattccatgaagttgacatagatagcctttcaatagagttatatcctagttcttcttcaaaaagtatattgtatgttggctatgtgatatatatagagaaatgttatgagtgtagggcaaaaacaaaagttgaagctgaacaagggaactttaaagttacagcaggaagaagagttcgtgagttagcaagatttacaaatgggaaatggataatatag

SEQ ID NO: 9804 - DNA, 4167 bp, Lawsonia intracellularis
atgagccttgatgaactttttactgttcgtagtacagcaactgcaaatgctacacaaattcgtaatcttaaagctattcaaatttctattgcttctcctgagaatattagagaatggtcatatggtgaagttaaaaaaccagagactattaattatcgtacatttaaaccagaacgcgatggtttattttgtgctaaaatttttggacctgttaaagattacgaatgcaactgtggtaaatataaaagaatgaaacaccgtggtattgtctgtgaaaaatgcggtgttgaagttattgcttctaaagtaaggcgtgagcgaatgggtcacatagaacttgcagctccagttgcacatatatggtttctcaaaactctaccatctaaaattggtacccttcttgatatggctatggcagatcttgaaaaagttttatattttgactcatatattgtacttgatccaggctctactaacttaacaaaaatgcaagttatttctgaagatcaatacttacaagtcatagagcatattaatgaagaatcttttgttgtaggaatgggtgctgaagctatacgtggacttttagaagaattaaatcttgaaacactgcgtaactccctacgtgaagaatctcagtcaactaaatcacaaacaaaaaagaaaaaacttaccaaacgtcttaaagttgtagaagcctttattgagtccggaaaccgacctgaatggatgattatggaggttatacctgttattccaccagaattacgtccccttgttcctcttgatggaggacgttttgcaacatctgacttaaacgatctatatcgtagagttattaatagaaataatcgtttaaaacgacttatggagcttggtgctccagaaattattattcgtaatgaaaaacgaatgcttcaagaagccgttgacgctctttttgataacggacgtcgtggacgtgctattgcaggcacaaatggtcgacctttaaaatcactctctgacatgattaaaggaaaacaaggtcgattccgtcaaaacttacttggtaaacgagtagattattctggacgttcagtcattgttgtaggtcccaagttaaaactacatcaatgtggattacctaaaaaaatggcactagaactgtttaaaccttttatttactctgaacttgaaaaaagagggcatgcatctactatcaaaagtgccaaaaaaattgttgaacgtgaagaacttgttgtatgggatatcctttctgatgttgttcgtgaatacccaatactacttaatcgtgcccctacccttcacaggctaggaattcaagcctttgaacctctccttgttgaaggaaaagcaattcaactccatcctcttgtttgtgcagcatataatgcagactttgatggcgaccaaatggctgtacatatacctttatcagtagaagcacaggtagagtgtcgtgtgcttatgatgagtacaaacaatattctctctcctgcaaatggctcacctgttattgtaccatcacaagatattgttctaggtctttattatatgactgtagaacgctcttttgaaaaaggtgaaggaatggttttctgtgccccatgggaagttatttcagctattgataataaccaagtcaacatccatgcaaaaattaaagtccgcatggaagatgggaatatatataatactacagcaggacgtattcttgtttgggaaggtctgcccaaagggcttaaattcgaatacgttaattgtgttcttactaaaaaaaatattgctactcttgttggaaatgcttatcgtgatgctggaatcaaagcaactgttattctctgtgaccgcctaaaagacattggatatgaatatgctacaagagcaggcatcacaattggtgtgaaagatctcattattcctgctaccaaaaaaacaatcattgatacagctacttctgaagttgacgatattgaacgtcaataccgtgatggtattatcacccgtacagaaaaatataataaagttgttgacgtttggactaaagctacacaagatatttcttcagaaatgaccaaagaaatttctacagaagttgttaaagatccaaagacagaaagaacagaagtcaaccaaagctttaatcctatttttatgatgtccaactctggtgctcgaggaaaccaggatcaaatgcgacagttagcaggaatgcgtgggttaatggctaaaccttcaggtgaaattattgaaacaccaatcacttctaacttccgtgaaggattaacggtactccaatattttacatctacacatggtgcccgaaaaggtcttgcagacactgctctaaaaactgctaactctggatatcttactcgtcgtcttgtagatgttgtccaagatgttattgtttataaaaatgactgtgggactgtagatggtattgaagttaaacaagttcaagatggtggagaaatcaaacaaaaccttagtgaaagaattctaggccgagttcttctctatcctatctatcatcctgttactaatgaaatcatcttccctgaaaatactcttatagacgaatatgttgttaaaaaacttgaagaaattggtattgcttctgtcactattagatctgcattaacttgtcagtctgaacgtggggtatgtgcattatgttatggacgtgatcttgctcgtggccatcttgtcaacataggtgaaactgttggtataattgcagctcaatctattggtgaacctgggacacaacttaccatgcgtactttccatattggtggaactgcctcacgcgaaattgaacgctctaattttgaagctcttcattctggaagaattgttcttactcgtgttaagtcagttgaaaatcgtgatggcgtccatcttgtaataggtaaaagtggtcaactttctatcgtagatgaacaaggacgagaaagagaaagatattctttacctaatggagctagactttatgtaaaagaaggacaagaagtcacaaaaggtacttttcttgcagaatgggatccttttaacgaaccttttgtctctgaagtaaatggatttatcaaatttaccgatcttattgatgggaaaacataccaagaaaaacttgatgaagctactcatcaatcatccatgacaataattgaatacagaactactagcttccgtccttcaatatcaatatgtgatgcagaaggccaaacaaaacaacgtatcacaagtacaacacctgcaatatatagtctccctgcaggagctattataatggtcaaagatggtcaagaagtacaagctggggacattatagctcgtaaacctcgtgaaacttcaaaaacacgtgatattgttggcgggcttcctcgagttgctgaattgtttgaagtccgtaaaccaaaagatatggctgttgtttccgaaattgcaggtatagttacttatgcaggtgaatccaaaggaaaacgtaaacttattgttactcctgaaataggtgatcctaaagaatatcttattccaaaaggtaaacacattaacgtttctgatggtgactttgttgaagcaggagatctcttaacagaaggacatcctgaacttcatgatatccttaaaacaagaggtgaaaagtatcttgctgcatatcttgttgatgaaattcaagaagtttaccgctttcaaggtgtaggaattgacgataaacatattgaagtcattgttcgacaaatgttacgtaaaatcactgtaacaaatcctggaggaacaacgttccttgttggagaacaagtagataaaggtgactttaaagaagaaaaccaaaaaattgtggaagaaggattagaacccgctacagcagaaccattggtattaggaattactcaagcctcactaacaacttcatcatttatttcagcagcttcattccaagaaacgacaaaagttcttacagaagcttctctaaaaggaaaaatggattacctgagaggactaaaagaaaacgttattgttggtcgacttattcctgcagggacaggttatagggaatatatggagttagatattgttgttcctgaacaaaaagaacgtccaaacaaatttcttgaagaacttgaagaacgtcctgttttaatagagatagattcttag

SEQ ID NO: 9805 - DNA, 4122 bp, Lawsonia intracellularis
atggttcaacttacaaaacagtttggaaaaattaaagttgaagtgccaattccgcaccttcttaatctccaagtagattcatataaaaaattcctacaagaaggactcttagagcctctcccagaagaaggattagaaagtgttttccgttctgtctttcctattgaagactttaatcgcacatcaagtcttgagtttgttaactacaaaattggtgaaccaaagtatgaccaagcagaatgtatagccaaaggccttacttatgaagcaccaataagaattaaagtgcgactaattatatacgatgtagatagtgatactgaaagtagaactgttcatgacattaaagaacaagatatttactttggcactttgcctctcatgactgaaaaaggaacattcattattaatggaacagagagagttattgtaaatcagttacaacgctctcctggaattatttttgaacatgatagtggtaaaacccatgccagtcgaaaggtcctttattcatgccgaattattcctatgcgtggctcttggcttgactttgactttgatcataaagacatcctttatgttcgtattgaccgtcgtcgcaaaatgcctgccactattttacttaaagctatgggcatgggaaaacaagatattcttaactttttttataaaaaagaaacatatattttagataatgatggacgtataaaatggaagtttgatcctagcttgttccgaaaagatattgcttatactgatatacttgataatgacaataacctccttgtagcagcaggaaaaactattacaaaacgagtatggagacaaatggaggcatctggacttgaagcctttgaagtagatccctcaacagttataggacaattccttgctgaagacattattgatacttcaacaggtgaaatccttgctgaatctgctgaagaaattacagaaggtctcatacaaacatttcgtgatgctgggattactacctttactgtattacacacaagaggtaatgatacctcgtcatctatccgtgatacattagtccaagacaaaatacctacaacagaaaaagctcaagaagaaatttatcgtcgcttgagaccaagttcacctcctacgcctgaaattgctgcttctttctttgataatctctttagaaataatagttattatgatctctctcctgtaggacgttataagcttaatcagagattagataactatgaaaatgcaactcttcgtacgctttctgataacgatattcttgaggcgattaagttacttacacatctaaaagatagccatggcccagctgatgatattgaccacttaggaaatcgacgtgtccgcttagtaggagaacttgtagaaaatcaatatcgtataggccttgttcgtatggaacgtgccataaaagaacgcatgagtatccaagaggttgccacactcatgccacatgatcttattaatcctaaaccagtagcagctctccttaaagaattctttgggacatcacagttatcgcaatttatggatcaaacaaactctttatctgaagtaacccataaacgtcgtctctctgctttaggtcctgggggattaacacgtgagcgtgctggttttgaagtccgtgacgtccatgtatctcactatggaagaatttgtcctattgaaacacctgaaggacctaatattgggcttattgtctcactaacaacatatgcaaaagtaaacgattatggattcattgaaactccatatagggtagtccgtaacggttatgttactgatgaaatcatacatctagatgcttcttgtgagtttagtgaagttattgctcaagcaaatgcatccatcgatagtgaaggacgtcttatagatgactatgtaactactcgtgcacgaggtgatgttttgatgtctgcaagggaagaagttacccttatggacatttctcctagccaaatggtttctatttctgcagcgcttatcccattccttgaacatgatgatgcaaatcgtgcattaatgggttcaaacatgcaacgtcaggctgtaccattattacgttctgaacgccctttggtaggaacaggaatggaagtagatgttgctcatgactctggctcatgtattttagctgaaggtgatggtattattcgttatgctgatgctaacagaattattgtttcttatgacgatcccaacctttatcctgaattcggcggtgtccgtgcatatgatttactgaaataccacaagtcaaatcaaaacttctgttttggacaacgaccatcctgtatcccaggacaaatcgtcaaaaaaggagaagtacttgctgatggcccagctatccgtgacggaggtcttgctttaggaaaaaatcttgttgtagcttttatgccttggtgtggatataactttgaagactctattcttatttcagaacgagtcgttaaagaagatacatatacatctgtacatattgaagaatttgaaattgtggcaagagacacaaagcttggtcctgaagaaatcacaagagatatccccaatgttggggaggaaatgctttcaaatcttgatgaaaacggtattatccgtattggtgcagctgttaagccagaagacattctagttgggaaaattacacctaaaggtgagacacaacttactcctgaagaaaagttattgcgagcaatctttggtgataaagcacgtgatgtaaaaaatacatctttaaaagtacctccaggaatagaaggaacggttattgatgtaaaagtatttaatcgtcgttcaggagaaaaagatgaccgtacccgccttatagaagactatgaaataagtcttatggatagcaaagagcaaaactatattaaatccattacccaacgcatgaaggaaaaaatccttccccttataaatggaaaacaactaggaacaactatacttggtaaagggaaaggagaagtacttgcagaagaaaatagtgccataactccagaactgttagattcactacccttaaaaaaactggagggtgcatttaaaagcaaagaacttaatgaaactatcacagaaatgctttcacaatatgaaaagcaaatcaactatataaaaacaatttatgattctaaaagagggaaagttacagagggtgacgatttacctcctggagtcattcgtatggttaaagtacatattgcggtgaaacgtaagcttgctgttggagacaaaatggctggacgccatggtaacaagggtgttgtttcttgtattttacctgaagaagatatgccattttttgctgatggttcacctgtagacattgtactaaaccctcttggcgttccatcacgaatgaatattgggcaaattatggaaacacatttaggctgggccgctaaagagcttggacagcagttaaataatatggttgaacaaggtgttgcaatacaatcacttcgtgaacaagttaaaagtgtctttgaatcaccagaaatctctgcagaaatagatgcaatggatgatgatacatttcgtacttctgtacaaaaactcaaaaaaggcattatcacaatgactccagtttttgatggtgctggagaaagcgaagtatgggactggttagcaaaagcaggacttcctagtgacggaaaagccatcttatatgatggtcgtacaggtgaagcatttaaaaatagagttacaactggagtaatgtacatacttaaacttcaccatcttgttgatgaaaaaattcatgctcgctcaacagggccatactccctagtaacgcaacaacctcttggagggaaagcgcaattcggcggtcaacgactaggagaaatggaggtatgggcattagaagcttatggtgcttcttatttattgcaagaatttcttacagttaaatctgatgatgtttcaggtcgtgtaaaaatgtatgaaaaaattgtcaaaggtgataatttccttgaagctggcttacctgaatcatttaatgttttagttaaagagcttatgtcccttggacttaatgtaactctccatcaagaagagggtaagaaaaaacccaagagaactggattaatagataaagaataa

SEQ ID NO: 9806 - DNA, 1293 bp, Lawsonia intracellularis
gtgcaagaagaatcttcaaaagaactttattccaaagctgtaaaacttatacctggaggagtaaatagtcctgtaagagcttgccgaaatgtaggatgtgaacctgtctttatagagtccgctaaaggagcatatctcactacagtagatggtcaagaattattagactttgttctttcttggggagcaattattcttggtcatactaattctactgtaacaaatgctataaaaaaagcagcttcaaatggaacaacctttggtgcaccatgtaaagctgaagtactattagctaaagaaattattgatgcattccctggaatggatatgattcgtatggtaagctctgggacagaagctactatgagtgctctacgtcttgcgagaggtgttacaggacgtaataaggtattaaaatttattggttgttaccatggtcatgcagatccttttttagctagcgcaggctctggagttgcgacactatctatccctgggactccaggagttcctgaagtcactgttcgagacactctcttagctccatataatgacttaagtacagtaaaagacttatttgttatgtatggtaaagatcttgctgctgtatttgtagaacctatagctgcaaatatggggcttatacctcccaaagaaggttttctaaaaggccttcgtgcattatgtgatgctcatggaacactcctcattatggatgaagtaattacaggttttcgtgttgcatatggaggagcacaaactcgttttgatataactccagatctcacaacattaggaaaaattattggtgggggactacctataggtgcatacggaggaaaagcaaaatatatggagcatattgcaccattaggagaaatctaccaagcaggaacattatcaggaaatcctcttgtcatgactgcaggatttgaaacattacaacttcttaaagatataaattatacaatacttgaaaaacaggttgctacttttgctaacgagcttgaagtaatcctcaaagacaaaggtgtccctgtacaagtatcaaattttgcatctatgtttacagttttttttacaaataatgaattaaaaagttttgatgacgtaaaaacaactaatacacaattatatagtattctttttcgttcaatgcaaaaaaataatatttttcttgttccttcaccatttgaaacaaatatggtatcttttgcacataaagaaaaagaatttgaaaaagctcttattgcagccaaaaaaataatgtttaatataactgatgttaattaa

SEQ ID NO: 9807 - DNA, 501 bp, Lawsonia intracellularis
atgagctactctttctcagaaatagaatgtgctatccttagaatggttcaaaacaacatccctgactctatgacaccttatgcagatattgctaatgctgttggtacagaagaacattttgtacttgaactattacaacagatgaaagatgatagtgtaattcgccgatttggtgcaagcataaaacaccaacaaactggatgggaacacaatgctatggtagcttggaaaatagatgatacattaatagatgaagcaggagaacaagcagctcaacatccttctatttcccattgttaccacaggccctcaactgccgaagattggccatatacattatatacgatgattcatggacgcaataaaggggattgtgaaaaagttattgagcagttaaaaaacaaaacagtacttaaagactatgctatccttgaaagtattaaagaattaaaaaaaacatctatgaaatattttcaattagttaatgagaggaacatatag

SEQ ID NO: 9808 - DNA, 1092 bp, Lawsonia intracellularis
atgttagctacacaaaagctgagtgatccagttctatgtaaggttttacttaataaattaaataaccttttagatcgtcctttaagatttatggaggtttgtggaacacacacagtatctatttttaaaagtggtataacaacccttctcccaaaagggatagatcatctttcgggacctggatgtcctgtatgtgtaacacatgatagtgaaattgaactttttttaaggtttgcagctaaaccaaatgtaattattgctacttttggtgatcttatgcgagtacctggtcctaataggaaatcacttaagcatgcacaagcagagggtgcaaggatttctattatctattctcctatggatattttaaaaattgctattgataatccaaaagatatagtaattttaccagggattggttttgaaacaacagctcctactatagcagcaacaatccttatggcagaaaaagaaggtattaataatattgctgttattccatgccataaactagttccaccagcacttgaaatgttactagcagatccagattgccaaattgatgggtttcttttgcctggtcatgtatctatggtattaggtttagagccatatgcatttgttgttgagaagtgggggaagcctgctatagttgctggttttgaaccagcggatattttagatgcgttatgccgtatggcaaaacaactacaaacaggaaagtacaaagtagaaaatgcctatccacgggctgtttatcaagatggtaatccacaagcacgtaatattttatataaggtgtttcaagtaggagactctcaatggagaggattagagtttctcccaatgagtggccttacttttagagatcattataaaaaatttgatgcgttagaacgatttgatataacaggagtcaatgtacatcctaacactggttgtatttgcggagaaattcttaaaggtaaagttacaccttctgcatgtttattatttgggaaagagtgtactccagaagaaccgataggtccctgtatggtatcaacagaaggaagttgtgcagcatactttaaatatcatatgataagataa

SEQ ID NO: 9809 - DNA, 780 bp, Lawsonia intracellularis
atgaaatatgttttaattgatcccattgctttttcttttggctcatttgatgttcattggtatggcattatgtatttaattggattcctttgtgcctggatacttggaagatatagagcaaaaaaatcatattctattctaactactaatgatgttggagatctactgacttggggtatgattggtgtcatagttggtggtcgttttggttatattcttttttatgactttaatatattatatacagacccactagaggttttcaaaatttggaatggtggaatgtcatttcacggtggatttctaggtgctactgttgctgcctgtatttggggatataaaagacaacttcactgcttagctgtattagactttctatcaccattaatatcaccaggacttttttttggacgtattggaaatttcattaatggtgaactttggggagctattacagataagtcctggggaatagtttttccaagtggaggtccatatccacgacatccctctcaactctatgaagcattttttgaaggtattattctttttataatcatgtggagttatacctctaaacctcgacctgaaggtaatccatctggactatttatgttatgttatggattatttcgttttggaatagaatttattcgacaacctgatgcacatattggttatcttgcctttggttggcttacaatgggacaattattatgtgtaccattaattattattggcttctggcttattacaagacacagacaaactcatacttaa

SEQ ID NO: 9810 - DNA, 678 bp, Lawsonia intracellularis
atggaacaacataccatcatcacaattgatggaccagctggtgttggtaaatctactcttgcaaaaaaacttggaacaatactaaatttaccatatctagatacaggggctatgttccgtaagcttgccctccaattaggaaacaaagcagaaacactgccagactctatactgcaagaacaatgtaaaaaggttacctttcaactccaaggggttggtaaaaattctttactcatgtgtaacggggaatctataggacatgaaattcgtagtgaaacagctggaatactagctgcacaactaggagaacgaaccataataagagaatatcttaaaaatattgaacaacaaataggaaatactatgtcaattattgctgaaggtcgtgatttaggtacagaagtttttcctaaagcacaatttaaattttttatagatgcaaacccaataattcgtgcgcaacgacgctttaatcaactaaaaaaagaaggaatatttcaagactataatgatattcttcattctattaattatagagataaacttgataaaaatagaacaattgcgccattagaacccgcaaaagatgctatactcattgatagctcaataatggatattgatagtatactaaaaataatgcttaactatattactataccacatctgtcacaataa

SEQ ID NO: 9811 - DNA, 897 bp, Lawsonia intracellularis
atgtatttccctaccgcaggagtagaaacctctttttttatccctccgttagcttcatttattgtatcattttttatgtcaatgcttggtctttctggagcatttcttcttataccattccaaatttcttttcttggttatacaaacccatcggtaagctctactacacaactttataatgtcatttctaaccccgtaggagcactccaatatgcaagagaacatcgtatgatttggcctcttgcttggattattatttttgggggtataccaggtgttatggtaggtgcgcttattcgtattacctatctttctgatagtcaaagctttaaaatatttgtagctacagttcttttaattattggggcaaaattaacccaaagtttacttagttcctttttccctaaaaaaagtatccatccacttataaatattaaatcttcttctactaaagttatacaaaaatcattacgccaaataagttatacctatgctaataatagctatacattttctgtaattaaaactttcttattaagccttcttgttggaattattggaggtatttatggtattggtggtagtgctatcatagtaccattccttacttctatatttggattaccaattcatacaattgcaggcgctgctctcatgggtagtggagtcatatctgtaataagtgttttattttactcttttttagcattactatatcctaatatatcagttgctccagacttactattagcattattatttggaattggaggtatcattggtatgtatttaggcgcatactgtcaaaaatttatccctgggatttggttaaaactcttcatgattctagttatctttagtgttgctgtaaaatatacactagattattttcaataa

SEQ ID NO: 9812 - DNA, 1902 bp, Lawsonia intracellularis
atgggtaaaattataggtattgaccttggcacaacaaattcttgtgtctatgtcatggaaggtaaagaaccaaaatgtattacaaatcctaacggtggaagaacaacaccttctgtggttgcttttactgataaagataggcttgtaggtgatgcagcaaaacgtcaagcaattacaaattctgctcgaacaatttttgctgtaaaacgtcttatgggtcgtagggcagactctccagaggttgtacactggaaagaacatgctccatataagattgtagctgcttctaatggagatgctgctgtagaaattgatggaagagaatatagtccacaagaaatttcagcaattattttaagcaaactcaaagcagatgcagaagcatatcttggagaatctgttagtgaagccgttattactgttcctgcatattttaatgatgctcaacgtcaagcaacaaaagatgctggtcgtattgcaggattagatgttaaacgtattattaatgagccaacagcagcttcattagcatatggttttgacaaaaaagcaaatgagaaaattgcagtttttgaccttggtggtggaacctttgatgtttccatacttgaagttggggatagcgttgttgaagtactagctaccaatggagatacatttcttggtggtgaagattttgatcaacgtattattaattatcttgtggaagagtttaagaaagaacaagggatagatctttcaaaagataatatggcattacagcgtttgaaagattctgctgaaaatgcaaaaaaagagctttcaacagcaatggaaacggaaattaaccttccattcattacagctgatcagtcaggacctaagcatctattaattaaactcactcgtgctaagcttgaacagcttgttatggatcttgtaggaagaacaatagagccttgtagtaaagctttagaagatgcggggttacagacatctaacattgatgaggtcattcttgtcggtgggatgactcgtatgcctttagtgcagaagaaggtagcagagttttttggtaaagagccaaatcgttctgtaaatcctgatgaagttgttgctatgggtgctgctatccagggtgggattttagcaggagatgtaaaagatgtcttattgctagatgtaacacctctttcccttgggattgaaactatgggaggcgtttttaccaaacttattgatcgtaatacgactatccctactagaaaaagtcaaacgtttacaacagctgcagataatcagccttcggtgtctattcatgtcttgcaaggtgaacgcccaatggcaagtgataatatgacccttgcacgttttgatctgacagggattcctccagcacctcgtggagttcctcagattgaagttgcttttaacattgatgcaaatgggattgtaaatgtttctgctaaagatttaggtacagggaaagagcagtctattcaaattacagcatcttccggactttctgaagcagatattgaaaagcttattcgtgaagctgaatctcatgcttctgaagataaaaagaagcaagaaattattgaagttcgtaaccatgcagatggattaatttatagtactgaaaaatctattaaagatttggaaggtaaaattgatgctgagttacaagcagatattacatctaaaattgaagcattgaaaaaagttatggaaggcgaagatagtgcagctatcaaaaaagcaactgatgagttagcctctgcttctcataagcttgctgagcagttatataaacaaacacaagaaacttctggagcatcgggtgacccaacagacactagtgcaagctccagtaagagtggagacgatgtagtggatgcagactttacagaagtaaaataa

SEQ ID NO: 9813 - DNA, 1416 bp, Lawsonia intracellularis
atgcatgaattccgtaaagaacatgatagcttaggagaagtgcttgttcctatagaagcttattatggctgtcaaacactccgtgctgttgaaaactttcaaattacaggtgaagttattgggaaatatccctcattaattacttcattagctcaagttaaacaagctgcagcacttgcaaacaataaacttggtcttctttctgataaaaaaaaagatgctatctctgctgcatgtaatgaaatcataaatggagaactccttgatcaatttgttgtggattgtattcaaggaggtgcagggacaagtacaaatatgaatgctaatgaagtaatttgtaatcgtgctcttgagcttatgggacatgagaaaggagaataccaataccttcatcctaataatgatataaatatgtcccaatcaacaaatgacgtctatcctacagctttacgtattgcacttattaaagaattaaaaagtcttattactagtatttcatatctttgtgatacaatagataaaaaagccgatgaattcaaaaacattataaaaataggtagaacacaactacaagatgctgttcccatgacattaggtcaagaatttcgtgcttggtcaataatgatgagagaagatattgaacgaataaaagaaacatcaaaacttatgcaagaaattaaccttggggctacagctattggtacaggtattaatacagtcccccagtataaagaacttgctacaacatatcttacagaaattacagaattaaccctcactagttctccagatttaatagaagctacacaagatacgggtgcttatgttcagctttctggtgttcttaaaagagttacagttaaactttctaaaatctgtaatgacttacgactactctcaagtggtcctcgctgtggattgggagaaatcaatttacctccaagggcacctggttcctcaattatgcctggcaaaattaacccggttattccagaagttgtaaatcaaatagcttttaaagtgattgggaatgatataacagtcacaatggcagcagaggctggtcaacttgaattaaacgtaatggaaccaataattgcatatagtttgttccaatcaataaatatcatttctaacggatgctatacacttgcagataaatgtttcaacggtattatagcaaatattgaaaaatgccgagaatttgttgataactctattggtattattacagtacttgtgccttttcttggctatgaagtatgctcaacaatagcaaaacaagcatttgaaactggaaaatctgtaagaactattctattagagcaaggtcatattacgcaaaatgaattagatgaaatgttaaagccagaaaatatgatacaccctattcctttcaaaatgaaagtcatgtaa

SEQ ID NO: 9814 - DNA, 888 bp, Lawsonia intracellularis
atggctgtcattgcgtgttttacatggatacataatatttatgcagcaccacgaaaactaaagaaaaaagaatcactttctcgtgctccatttcaaaaaaacaatcgacatggcaaactaaaatcttcacaacgtcaagaaaatattacaactcttacagaagaagaaattagagactattttctaaaaatgcgtaactttgataagccattccccacagatatcattcttcaagcgaaagaaaaagcattacttgatagtagcatggctaagctaactgcaattcaggatatagtaggacatggaaggttttacttactcagtgtagacgaagcaattaatgtagcaaaacgttcttctatagaaaatttttcaaaaaaagaaattctttttctagaggagttattctatgttgatgcatctaattatggttttatggataaaaaacctttaaactccttcacagcaactattccccaacataatgtttataaagttcctggaatggggaattttatatataaggggttagctcaaaaaaaatgggcagaaatacaaaaaattattggtaaggatgttgttcttactagtggagtccgtggtattataaaacagttttatctttttcttgcaaaagcacaaaagcataatgggaatttatcactagcctctagatcactagctcctcctgggtattcatttcatggaattggtgattttgatgtaggccaacgtggttttggttaccgtaatttcacagctgattttaccacaacatctgtatataaacaactttcagttagtggttatctttcgttacgttatcctaaagataattttctcggtgtacgttttgaaccatggcatgtcaaagttcactcatcatga

SEQ ID NO: 9815 - DNA, 924 bp, Lawsonia intracellularis
atggttcaaaaaacagagtatatttggtttgatggggaatttattccttgggatcaggcaaaaattcatgtactttcacatgcgttacactatggtacaggagcctttgaagggattcgtgcataccgttgtatagatggcacatctgctatttttcgtctttcagaccatgttaaacgattattccactccataaaaattcttggattacgtattcctcacttagaagaagatatctcctcagctattattgatacactaaaaatcaataaacttacagagggatatattagaccattatcttttgttggtgaaggtattatgggtgtacatcctggagataatcctattaagactattattgctgtatggccatggggagcataccttggagaagaaggtcttaaaaatggaataaatgtaaaaacaagttcttttgttcgtcatcatgttaatgcaatgatgacaaaagctaagctttcaggaaattatgttaattctgtccttgcaaagatggaagctaagtctagtggatatgatgaagcgcttatgttggattcagcaggctttgtttctgaagcttcaggagagaatatttttattatacgtgatggggttattaagacaacacccttaacctctattttaggtggaattacacgtaattcagttataagcattgcaagtgacctaggttatacagttattgagcagcagtttactagagatgaactttatatatctgatgaagctttttttactggaacagctgcggaagttacaccaattcaatcagtagataatcgtatcattggtgaaggtaaaataggtagtataacacatgctattcaaaaaaaatattttagtattgttaaaggagaagatcctttttataaaaattggttaaccttttttaccatttag

SEQ ID NO: 9816 - DNA, 1725 bp, Lawsonia intracellularis
atgaagcaggtatcattggctatcagatataggccacagtcttttaaggaggttgtggggcaagaaattgttaaaaaaattttatctcgtgctgctgctgaaagtaaagttgttcctgcgtatttgttgagtggtacaagaggggtagggaaaacaactattgctagaatttttgcaaaagccttaaattgtcaacaggcgcctacagctgaaccttgtaatacttgtgagcagtgtaaacgtattactaaaggtatacatgtagatgtagtggaaatagatggagcttctaatcgaggtgtagatgatgctcgtcgattacgggaatctattgcttatgctccaatggaagggcgctataaagtttttattattgatgaagcacatatgcttacacgagagtcatttaatgcattattaaagacattagaagaaccacctcctttttctacttttgtttttgctacgacagaacctcataaattccctgtaactattataagccgatgtcaacattttgttttaaaaccacttactaaagaagagcttatttataaccttattcatgtacttaaacaggaaaatatttgttatgaagataatgctattcagttaatagctcgaagagcatctgggagtatacgtgatagtatgtcattacttggacaaacattaatgtttagtaatggcatattaactgaaaatgttgttcgaaatgtattagggttagcagagcaagaattctatgaaaagcttcttagagcattcaaagatcaaaattacgaagaggtagtaaaacttaaccaaatattattagagaaaggagttgatttagggttttttcttagagaatttgctacgttgtggagaaatctatttttattgagaaaagtttctaagttagatgctaatatgctgggtatgcttcctgatgaaataccacgtttaacttcattagcgaatttatttgagcctatataccttcatgctgcttggcagatggttcttgaaaatcaacgccaaatacttatgagtcttgaacctccagtagctttagaacttttatttcttaaccttacattattacctcatcttgtatctcttgagcaaatttctaatgggttagctgcattatcttcaacatctttagaaacagagatatctaataaacttagagataactctatgaagaaagatgtcatctctgctagtacagaaagtgaatctatttctaatacaaaatttcaaaatgagtaccaagaagttgttgagggagatttgcaatttatcagtgttaaagatgtaaaaagtaagagagatactatttcctcttctatgaatgaaggggagattattgaagaaccaacatgggagggctttttacaatactgtagcaaaaatggttcaactataaatacatattttttaaataaacttacaggtatatttcaacaaaataccttagttataacagtagattcacaatttttatatgaaaaacttatatctgataaacttgaaaaattatatgagcttgtccataactatgctggggaaaaatatactgttcaacttatagagcctaaaaatacctttaaattagaaacagaaattaaaaaagatattgtttctcatcctgttattcaaattttacaacaaacttttgatgcagaactattacggtgtactccaactacaaatttacatattaaacctaataaatga

SEQ ID NO: 9817 - DNA, 312 bp, Lawsonia intracellularis
atgcaaaatatgaatgaattagtacgtcaagctggtcttatgcagaataaaattgccaatttacaaagagaaatgggtgatcgtactatagaagctacaagtggtggggggatggtaaaagttattgcaaactgtaaacaggacattaaatcaatagagattgatcctaaagttatagagtcaggagatattgaaatgatacaagatcttattcttactgctgtaaatgaggctatacgtattagtcggaatacaatggaaaaagaaattagtgctataactggtggtatgcaacttcctggtatattataa

SEQ ID NO: 9818 - DNA, 612 bp, Lawsonia intracellularis
gtggatcagcatataccagaaatattaaggactgttataggtcaattaactaaacttcctggattagggccaaaatctgctatgcgtattgctatgacgtttttaaagtggcctgaaagcgaaactcgtagtcttgggaaatctatttatgaattacgagataaactaggactatgttcttcttgtggtgcactgtcagatagtaacctttgttttgtatgtgcagatagtgaaagattagataatcttctttgtattgtttctgagtgggatagtatggtgacattagaagaagttggtttttttcaagggcgttatatgattttaggaggattactagcacctcttgataatatgggcttagacaaattagagattgatcggttaatagatcgtttaaacaagggagaggtaaaagaagtaattcttgcattaggctcaacaattgaggcagaaaccacagctacaatgatttatagtttaattagtaaacgtttcccttatattcgagttacaagattagctcagggtatccctcttggagcagaagttaaatttatggatagagaaacactgaggcagtcattacaatataggcaagagttatcttaa

SEQ ID NO: 9819 - DNA, 591 bp, Lawsonia intracellularis
atggaacaagttcaaactatctcatcttccaacagtacattttctaataaaacaatccctaatcactacttagtattagacatagaaagtcgttattctgcggaagaagtcggtggttggcaatttgcagaaaaaatggaaattagtattgctgttacttacgactctactacagatacttttactagctatacacaagaaactatttttcccttatttcaacgtttaaaaaaagctgatttgattatagggtttaaccatacaacatttgattatgctgtattacagccgtttgccccctataatttacagaaccttccttcacttgatttactcaaagaaataaaaaaaagcctatcccacagaatatcactagataatctagcacaagctacattaaatataaaaaaaacagcaaatggattacaagcattacagtggtggaaagaaggcaatctagaaaatattattgaatattgcaaaaatgatgtttctatcactaataaattatttctttttgggcattcaaatcaatatgttcaatttataaataatgataaccaatgcataagaattcctgttgattggtaa

SEQ ID NO: 9820 - DNA, 900 bp, Lawsonia intracellularis
atgttttttggtaactatcatattatactacttaaagaaaaaaacggtactagtaaaaacctttatattaaaggctggcttggtagttcactttgtatttttcttggagtagtgattattagtaatatcttattatggcaacaataccaaaatactaatatactccaaagacaactttctgaatctgaacgtacaattgaaacacaaaatactcaactaatgggtttagtaggaaaaattagttcactccaagaagacctttcaagagtacaacgtcttgactcaaaacttagagttattgtcaatattgaaaaagatattgaagctacatccattggtggttccagaacagaagaattttctcgaacctatcttcccttacatagacaagaattaatggttcgaaagctcaataatttccttaaacaactatcagaagaagtaagacttgaagaagttcgtcaacaagagcttctccaaactttacgtgacaagaaagaagctttagcttctatcccatctatttggcctatttctggttttattacttctcactttggaaatagaccatctccctttactggccgaattgaatatcataaaggtttagatattagtgcagcaattgggactcctatacaagcttctgggaatggacgtgttatccttgctggctgtgatggtgcatatggaaactgtgttgtattacaacatggctcagggctaacatctcgatatgcacatatgagcacagtagatgtcaaagtaggacaaaatgtccgtcgaggtcaaattattggatacgttgggagtacaggacggagttcaggacctcaccttcactatgaagttaaagtaaatggtatgaatgtagacccattacgttatattcttgattaa

SEQ ID NO: 9821 - DNA, 1287 bp, Lawsonia intracellularis
atgagagtattagtaataggttctggaggacgtgagcatgcactgacatggaagctaaaaaaaagtgaaaaggtttcagaaatttttgtggctcctggtaatggggggacagcaaaatgtgctactaatattcctataaaggaagataatattcaagaactagtaaagtttgtaaaagaatattgtatagatttagtgatccctgggcctgaattaccattaacactaggtatttctgatgcaatgaaagctataggagtagcctgttttggtccttcacggtggtgttctcaacttgaaggaagtaaggcttttgcaaagcaacttatggttcaacttggtatacctacggctaattatggtatttttcatcatattgacgacgctagagattttataaaaaatactggtacacctgttgttataaaagttgatgggctagcttcaggaaagggtgtttttgtcagccatacagaagaagatgctctaaaagctttagaatatatcatggataaaaaagtatttggagagtcaggtgctactattgtaattgaagaatttcttgaaggagaagaagtatcattattagctttttgttctggtgatgtagtattacctcttccttctgtgcaagatcataaagctgcttttgatggagatgttggtcctaatacagggggaatgggggtatacagtcctgctccttgtttgccaaaagatatgctagaagaaatggctaatcttacgatccttcctatagtcaaagaaatgtctaagcaaggccatccatatgttggtatattatatgctggtttgatgatgacaaaagatgggcctaaggttcttgaatacaacatacgttttggcgatccagaatgtcaggtattaatgatgagacttgaaaatgatctcataacattaatagagagttgtcttacaggctcactttcaggtataaatttgaagatacattcaagtagtgctttgggcgttgttattgttgctgatggatatcctgatacttaccctaaaggtatgcttattgaagggatagaaaaagtaaaagagcaaaaagggatagaagtattccattcaggtactcaactagataatggccaattttattctaatggcggtcgtattctttgtgttacctcattttcttctactttattaaaagctcagcaagatgtataccaagcacttaaaatgattcatatagagaagacaagatatcgtacagatataggtttgaaaggattaaggtataagaatgaaacatgttaa

SEQ ID NO: 9822 - DNA, 516 bp, Lawsonia intracellularis
atgaaacatgttaaagttgcaatatttataggttctccttctgatgagtcgattgtaagcccttgtacagaaattttaacgcagttaaatattccctatatatttacagtaagttccgcacaccgaactccagagcgtacagctgaacttatagatagcctagaggcaaatggatgtgaagtttttatttgtgctgcaggaatggcggctcatttagctggtgctgtagctgcccgtactttaaagcctgttattggtattcctattacctcttcttctttaggcggaatggatgcactacttgctacagtacaaatgccttcaggctatcctgtagcaacagttgcattggatactgcaggtgcgcgtaatgctgcatggttagctgctcaaattttagcattacatgattcaaaaataaaaaaacagttagatgctgctcgtaaaaaatttaaagatgatgtactttcagtaagtaaaagtatagaagataaatatactagtattattagttaa

SEQ ID NO: 9823 - DNA, 633 bp, Lawsonia intracellularis
atgggtagtatagtaaaaatgtttcagtggttacgtaaaacagttttttgggaatatttagaagctatattttgggctggatgtatggctattattctcacaacgtttgttatccaagcttttaaaattccctcaggttctatgttggaaacattacaaataggtgatcatttattagtaaataagtttctttatggattaaaaaatccattttctgatagttatttaattaaggggattgatccaaaagttggagatgtcattgtctttcgttacccaaaggatacctctgttgattatataaaaagaatagttggtgtccctggtgacattctcgaaatgaaagataagattttatatcgaaatggtgaaaaagtagtagaaccctatgtacaacattcccaagaagatattattgttcctgtaagagataattggggacctatagttgttccttctgaaagttattttgtcttaggggataatcgggatgattctttagattctcgtttctggggatttgttaatcagaagaatatttgtggtaaagcatggataatttattggtcttcacaaggactacataatatacgttttgatcggattggaaagtttatccatgaggataattaa

SEQ ID NO: 9824 - DNA, 321 bp, Lawsonia intracellularis
atgtttaatagttacataggagctattcttatagcagcagggttagacattattgctaatctaatgttagctcgttctcaaggctttaaaaaaatctattatggtattctctctcttatatgtgtaggactagccttcttagctttagcttatgcaactcaaggtttagatcttgctgttgcttatgctatgtggggtggttttggcattttaggtacatctcttggtggttggtttctatttggacaaaagcttaaaccttctgcatggattggtattattatacttattgggggaattgtatctctaaatctagcataa

SEQ ID NO: 9825 - DNA, 378 bp, Lawsonia intracellularis
atgcaaccccgtcaatatacttcacaagttaagcactggatatacttaattatagcgattctccttgaagttataggcacttctgttatgaagctttcacaactaggaacttggatatttgaaccaaatattggctatctccttatgcttatctgtataggactttcttattatatgttagcacttgctgctacagggttaccaatcggagtagcttatgcattctgggaaggacttggacttatacttattacacttgttagtatctttgttatagatgaaaaaatgactattactcggctaatatctttatttgccctacttagtggagcaatactcattcaccatggaacagtaaatatttcatcaaataactaa

SEQ ID NO: 9826 - DNA, 1992 bp, Lawsonia intracellularis
atgaatatcaaattacatctcccaccctttatttatactataacaaaattcttatttttaatatggggcatactcatacttgcaagaataagtatgtttattttattatatgatgcactctctaacataccattttcacaaattttgtatgctttttatataggaagtaaatttgatatacgtattgctgtcatcatatctattccactgtgtttacttcttttaagcccatatttagaaaaacggctacccaaatacataccatatattcttagtttatatggcctgattattagtttagttcttattctttatattacagattttggatatttcttctatttaagacaacgtcttgacgccactctctttgattttcttacaactcctataatttcattacatatggtatgggaaagctaccctatcttttggataagtattgctttttgtcttaccctatctttatgccttttcttcatttatttaatactaaaaagtaataagataacaatgttatcatcctttccccgaggatgttggacaataataacattgattatactatttttatttgcttatggccaaattaatacaactctttttccacttcgatggagtaatgcatatttcagtatcaacaaagatcttgctatattaggattaaatcccattcaaaacctttatgatacctataaaataatgtctgcgattccccctgatattgctgcaacacatacaagttatcctcgaatagcagagtggcttaacgtcactaaccctaatgaaaaaaacctaaactttattcgtgtaataaaaggtcataagcaatcaactcccataaacattgtgattatcatcatggaatcattagcatggcctcgcacatcactagctccaggagaagataatcctactccaaatctaaaaaaacttgctaaagaatctcttcttttcccattcttttttgccccagcaagaactactgctcgagcaatttttacaaccatgacaggaattcctgatgtaaatcgatctggaggaacaagttcaagaaatcaaaaacttattgagcaacaccttatcatgaatgagtttaaaggatatgaaaaatattatatgcttggtggaagtgcaagctgggctaatataagaggtctattagatcataacatagaacaccttcaactttttgaagaaggcaagtggaattcacctagcgtagatgtttggggaatttctgacttagatctctttcgtgaagcaatcaaaatttttaataattctccactacctttcattggtgttatccaaacttcaagctttcataaaccatacaccatacctagcgataatgcagggtttataaaattaaaccctacaccagaattattagcaaattacggatatacaagtgacgaagaatataattctatgcgctttgctgatcatgcattaggtgaattctttgctcttgcaaagactcaaccatggttccaaaataccatatttgctatttttggagatcatggacttaatgatccatccttaaacatgacacctggatatctagcttgtcgattacaaagtaatcatattcccctattactttatgctccaggaagaattcaaccaggtgaatatccatacccatgtggacaacctgatatattcccaaccctagcttctcttgcaggaattacttatcataatcaaacaatgggaagaaatcttttagatccagcaacacaccatgactctaaacagtttattgcaggtgaaactgaagcgtttatccgacttgtacaagatgggtattgttatataaaagaagaaacagaagggctctattttcttgcagatacagagtgcaataacttaattgaaaaggaatctgaacgtacgcaatctatgagacaagctgctacagacttctttgctattgcaaaatatatgctttataataataaacgtcctaataaagagaattaa

SEQ ID NO: 9827 - DNA, 1515 bp, Lawsonia intracellularis
atgttctatcatacactcattataactattggagcctttttttcaaaacttcttggattaatgagggatgtttcaatagcttggcttttaggtagcacaacaacagcagatgctttaactatagctttacgcttacctttttttttccgaagactacttggcgaaggttcactttctataggtttaaccagtatttgccgacatgaatctatatgttccaatagtggcatacaactaactcttcgtattgctgtaatatttgcacttattataggtactattagtagtgtagtatggtttatccctactattgctcttgatatcttagcacctggatttaactgggaacatactgtacatagcgagacaatacaactctttcgtatttgtcttccttatattatttttgctattctgacgtctggttgtatagctgtattacatagtgaaagacattttcttttacctgccctctctcctgtactctttaatagttcagtcattatatttgcattaatttcaataggttataccccaatagataggggagtattcctttcttatggtgtactctgtggcggaatctttcaatggatgtcacaactaccattagccttatacttaaaaaaagcagaaccaaaagtagactataatatatcaatcctaacaaaaaacgttttaaaaattccaaaaaatatttttatagcatctatcccacaactcacatttattttagcaactgcgcttacttcttttttaccaacaggacatgtagcatcacttttttatgcagagcgactcatagaatttcctattggtattcttagtagcgctattgggatagtagctctacctgtgttaactactatatatagacaaaataaactatctatatttggagatgaagtatcaaaaaacgtcagccttatcctagcaataaattttcctgctgcattaggacttatagctatctcgatgccattagttcaagcaatattttatcatggtgaatttaattttcaagctgttaatataacaacctttgctctttgtgcctatgctcctgggctaccagccatagcattaagtaaaacactactttcaacatattatgctattaataatcaaacagtacctttctacgtaggtatgttaaccattacactaagctttctattgggagcattactcctttatttctttaatattattggtcctccactagctgcttctcttagtttatggttttactgctggttactatggaaaaaattacattgctttattcctgttcactttccttttaaaaaagtatcgctacaacttcttgcagcctgttgtacttttattttatgttacactacagtatattttttatctgatggggttccagtaattacaatatgtttagttgtacctattggtatcataagttatgttgcctcattatacttacttgataaaaaacaacttatccaaataataaaaaatattagatacccgacgtcaatataa

SEQ ID NO: 9828 - DNA, 1116 bp, Lawsonia intracellularis
ttgaatccaccaggaacatttcatattactgccacagatgggagtgcacgtacaggtgtactttatacagcacatggaattgtaaatacacctatttttatgccagtaggtacagttggtagtgtcaaagcaattgctccagatgatcttgaggctatatctgctgaaattattttaggtaacacatatcatttatatctaaggccaggagatgaacttattgctcgtaggggtggtttacatgtgtttaatgcatgggaaaaaccaatacttacagatagtggagggtttcaaatttttagtctttcttctttaagaaagttacataaggatggcgtaatatttcgctcccatatagatggctcaaagcatgtttttactccagaacgagttattactattcagcgtaatcttaattctgatataatgatggttcttgatgagtgtgttgctgcaaatgcagattacacatatacagcccagtctcttgatttaactatacattgggcaaagcgatctcgtgatgtatacccaaaaggggagggagataatcttttatttggtattgtgcaaggaggaatgtttaaatctcttagacatagttcagtctcacaacttatagaccttgattttgatgggtatgctattggagggttatctgtaggtgaaccaaaagaaattatgatggaattgttatatgatacagcaccattgctacctaagacaaaaccacggtatcttatgggtgtggggactccattagatatacttaaaggtattgaggcaggagtagatatgtttgattgtgttttacctactcgtaatgcccgaaatggaacattgtatacttctcaagggaagttaaacataaaacgtaaagaatatgcagaagatgacttacctcttgacgagaactgtagttgctatacttgtcagaccttttcacgggcatatttaagacatcttttccattcacaagagttattggcatttcgattgaatagtatccataatcttacatattttttaaatataatatttggagcacgaaaagctatacatggtggatatttttttaattataagcaacaggttgaacagctttattgtaattaa

SEQ ID NO: 9829 - DNA, 1146 bp, Lawsonia intracellularis
atgcccactctttctattgttatccctgtttataatatgggttattggcttcccattgctattgaatcctgcttatggcaatcacataaaaaaattgaagttattattgtaaatgatggctccacagataatacccaagaagttatcgaacactattcttctattacgaatactattagatatcatacacaaccaaacaaaggctctggaattgccagacaagttggacaaaaccttgctaaaggtgattttattacatggattgatgctgatgattttttagctccaatggcagcagaacaacttttaaaaatagcaattcaagataatgttcctttggtatgtggtaatgctgtaacattttctgataaaacacttaatactagagccaataatccacatgatgaaatccaccatacaactttttgtgaaaatcctgattattgggaatgtaacacaataggacgctggattttttctcttccatttctgaataatggcaaagcaggaagaccttttttacatccaaactttaaacttagtttaggatctacatgctttatatttgatgtactaagttcaaatgtacctttttctcaatgtattgatgaactatacttcattagacaagaacataaatatcttcttccatcgcccgaactacttgttgaacaaaaattagttcactatttagaagtaaaatctatcttattagatgcaaatgctatcaaaccatttattaattatcttaataaaaactattggaatgatctaaaaatgacattaccatatatgaatacacaaaatatacgttggctaaatcgcattattgaaattagctttgaactatttgcggatttaaatataaaatggttctctgatgattacttacatccagaagttgatgccgagccagatcttttaccttttgcagaagcttgtattaataaagaaagaaaaaaagttatacaactccttctcccattagtaacatcctctccacaacccaataatagtcaaggaatattccaaacacttcgtagtgaaattcaatcattattttataatcgctcaaaaagaactaaaaactatcttcaagctcttgaaaaacttgtaagtaatcgtataataacaaatagtttataa

SEQ ID NO: 9830 - DNA, 387 bp, Lawsonia intracellularis
atgtctgtaaccaaagaacaagttattgaatttatatctaatatgacagtattagaactttcccaatttattaaggaacttgaagaaaaatttggtgtttctgcagcagctcctgctgttgggatgatgatggcagcgcctactgctgcatcagctgaagctgaagctgaagaaaaaactgaatttgatgttattcttaaagaagctggagctaacaagattgcagttattaaagtagtacgagcacttacaggtcttggattaaaagaagcaaaagataaagtagacggagcaccttctaccctaaaagaaggtgtatctaaagaagatgctgaagaagccaaaaaacaacttactgaagctggggctactgttgaagtaaaataa

SEQ ID NO: 9831 - DNA, 519 bp, Lawsonia intracellularis
gtgaatagatctgaaaaagctgctctgatttctcaaatcaaagcaaaagctgatactgcatcttttgtagtagtcacagattttaaggggatatcggtggaagagctaacgtgcctgagagcaaaactccgtgaaagcggtggtgaatatcttgttgtaaaaaatacactggcacgaatagcattcaccgatggtatccatagcattataaaagatcagttcaaagacaattgtgctattgcatttggctataatgaacctgtggcaatagcaaaaactatcaacgactttgtaaaaactagtaagtttattactgttcgtcatggtagtcttgaaggaactcttcttacaacaaaagatatagaagatcttgccaaactaccaagtaaacctgagcttattgctcaaacacttggaacattaaatgctgtgcctaccaattttgtatccctgtttgctaatataattcggccacttttttatgctcttcaagctattgaggcaaaaaaagctgcatag

SEQ ID NO: 9832 - DNA, 708 bp, Lawsonia intracellularis
atgcccaagctagggaaaaaatatcgtaatgcagtaaaaggagtagacttatcactacacctttcttttgaagatgctgtaactcaatcaatacaaacttcttttgcaaattttgatgaaactgtagatattgctattggcctaggagtagatcctaagtattctgatcaaatggttcgtggtgctgttactttaccctatgggttaggaaagacagtacgagtagctgttttttgtaaaggtgaaaaagaagctgaagcaaaagaagctggtgctgactatgctggtgcagaagaacttgtagcaaaaattaaagatggctggcttgattttgatgcagctgttgcaacccctgatgttatggctcttgtaggacaagttggacgtcaacttggacctcgtggccttatgcctaatgcaaaaacaggaactgtaactttcaacgttactaatgccattaaagaacttaaagcagggcgtattgatttcaaagttgataaagcaggtgttttgcatgcaccactaggtaaagtttcatttggttcagaaaaaattcttggtaatctaaagtctcttgtagaaacagtgaatcgtcttaagccatcctcagcaaaaggcacttatataaaaagtatggctatatctacaacaatgggaccaggatttaaaatagataccaatcttgtaaaaaaatttcttgaaagttaa

SEQ ID NO: 9833 - DNA, 423 bp, Lawsonia intracellularis
atggctaaaaaagaacttgctaaaataaaactacaaattccagcaggtgtagcaaatccatcacctcctgttggtccagccttaggccaacatgggttaaatattatgcaattttgtaaagaatttaatgctcgaacacaagatcaaaaaggcatgattattcctgtagttataactgcttatgctgatcgttcttttacttttattacaaaaacacctcctgcagctgttctcattatgaaagcagctaaaatagataaaggatctggtgaacctaatcgtaataaagtagggaaaatatctatagaacaggttgaagaaattgcaaaactcaaactaccagatcttacagcaaaagatcttgattcagctaaacgttcaatcataggaacagctcgtagtatgggaattgaaataaaataa

SEQ ID NO: 9834 - DNA, 585 bp, Lawsonia intracellularis
atgactgaacataatgaacctcttgctcaagctaataaaacagctgatccaggaaagtctcgatggtatattgttcatacttattcaggatttgaacaacgtgtggaagccactataaaagaaatgatgcgtagtggacaagatgaaggtcttattcatgaggttgtcctaccaactgaacgagtcgttgagttaggtaaaggtggtctaaaacgtacgactacacgtaaattctatccaggatacatcatgcttcgaatgactatgactgattattcttggcaccttattcaaactatacccaaggtaactgggtttgttggagggaaaaatcgccctgcaccaatgaaagatgaagaggcttcaaagatcctttcactcatggaaacacgccaagaacaaccacggcctaaatttagctttgaacgtggtgatgaaatacgtgttattgatggaccatttggtggtttcaacggtattgttgaagatgtcaattacgataaagggaaacttcgagtttctgtatcaatttttggtagacaaacccctgttgagcttgattttatccaagtttctaaggggtaa

SEQ ID NO: 9835 - DNA, 1194 bp, Lawsonia intracellularis
atggccaaggaaaaatttacacgtaataaaccacatgttaatgttggtacaattggtcatattgaccatggtaaaactacgcttacagctgctattacaaaagtagcttctatgaaaatgggtggaaaatttgtaggatatgacgagattgacaaagcccctgaagaaaaagagcgtgggattactattgctacagctcatgttgaatatgaaactccaaaacgccattatgctcatgtcgactgccctggccatgctgattatatcaaaaatatgattactggtgccgcacaaatggatggcgctattatagttgttgctgcaactgatggacctatgccacaaacacgtgaacatattttgcttgcccgtcaagttggcgttccttatcttgttgtctttatgaataaatgtgacatggttgatgatcctgaacttctagaacttgttgaactagaaattcgtgaactactaagtacatatggataccctggagacgacgtccctgttatacgtggctcagcactgaaggcgctaaactcagatagcgcagatagcgatgatgctaaaccaatccttgaactccttgatgcatgtgatagctatatccctgatcctcaacgtgatatcgataaaccattccttatgcctattgaagatgttttttctatttctggccgtggtacagtagttactggacgagtagaaagaggtgtcattaaagttggagaagaaatagaaattgtaggcattaaacccactataaaaactacttgcacaggtgttgaaatgttccgcaaacttcttgaccagggagaagcaggtgacaacattggagttcttctaagaagtgtaaaacgtgatgaagtagaacgaggtcaagtactctctgcattaaaatccattacacctcatcgtaagtttaaagctgaagtttatgtactttcaaaagaagaaggtggtagacatacaccatttttctcaggttatcgtccacaattttattgtcgtacaactgacgtaacaggcgttattactcttaatgaaggagttgaaatggttatgcctggtgataatgcaacttttaatgttgaacttatatacccaatagctatggagcaaggtttacgttttgctattcgtgagggtggtcgaactgttggtgctggtgtagtgactgaaattgtggagtaa

SEQ ID NO: 9836 - DNA, 2730 bp, Lawsonia intracellularis
atgccacaaaattcaatttatgcttctaataataaaaagaaaactcaattcatgaaaaaacgactattttttatcttctctattttcctattaggagtatttatggccacttatatggttcaacctttagaggcaacctcatcaatcataaagacaaatgatattttacctgaaaatcttacaaaaaaacatcctattgttacacgattatgtaatggacttacagttcttgtacttgaagataatcgctttcctcttgtctctacaagactttatgttcatactggttcagcatatgaaaaaccagaacaatctgggatcagtcatatattagaacatatggtttttaaaggaacagaatctcgtccaaatgcaacaattagtcaagaagttgaagcagttggtggctatctgaatgcagcaacaagttatgattatactgtatataaaactgatatgccatctagccaatggaagttaggtatggatgttgtgagagatatggcatttcatcctatgcttgatcctcaagatcttgaatctgaaaaaaaagttatcttagctgaacttgcacgaggagaagataatcctcattcatttgcctttaaaaaacttcttgcaaaaagtcttgcaggaacgccatattctagaccaatcattggttatcctgaaacaattaatgctgtgacttctcaagacttaaaggattatattgctacacactatcagccacaagacatgcttcttgtcgttgttggagatgttaaggcaaatgaagtactgcaagaagcaaatcatctatttagtaagtataataatacacaaaatattatattacctttaccatattatgcagaagaacttcctcttaaagaaggacaagggactgtaactattattcctgggacatggaataaaatctatcttacagctgctgttcctgtttcaaacgcacttaatattgaatccaatacacttgatgtccttgcacaacttcttggtggtgataaaactagcttattttatcgtacatacaaacatgaaaaacaattagttgaagatatccaagttacaaattattcttttgaacgcacaggagtattcttaatcacagctgaagtagaaattagcaaaataagaccattttgggatacattgacaaaagatcttgctaatcttagtgctaaaaagttttctcaacaagaacttgatcgtgctaaacttaacttagaagataatctttatcgtacaaaagaaacactcccaggccttgcttcaaaacttggttattttgaatttttcttaaatggtgaagaaggagaaaaaaatacaattgaagctattcagagtgtagatatagatatgcttgatgaagctatttctaaatggattcgtccagaaagatttgctgctgtagttcttcctcctaaagacgttcctatgcctaatctacaagcaacattagaaaaaaactggcctaaaaaacatgaagaagcaactgtagtaaatcaatctaacaataaagaagaaattgttaaattaggaaaaaagacagttgttcttattccagataatacattaccatactgttctgttacactccttttttcaggaggagatgctcttgtctctgatgaacaacaaggattaccatctcttacagcaacaattctaacaaaaggaacatctaacaaaactgtaatagaaattcaaaattttctagctgatagagcagctgatctctctgcatcagctggtagaaagacattttctgttacctttacaggaccatcaaaatttaacaatgaactatttcctctagtattagatataattaaaaatccagttttttttcaaccagaagtatctcgtgggattcaagatcaacttgctgctattaaatcacaagaagatcaaccactaggtttagcgtttagaaaaactcctccatttctctttccccatagcgtatatggctatatgcaacttggaaatccggaagtaataaaaaaatttacacaacaagacattaaaaaattttgggaaaaacaaatagctcaaccatgggtacttgctattgcaggacaatttgatcgtgaaaaagttttacaatttgtaagagacttacctgaacctatcgaagacaaaatagtagtacctgaacctagttggggaaaagaaagagagcttgatattaatatcccaggaagaaatcaagctcacttattacttatttataaaacagtccctgatacaaatcctgaaacacctatatttaatgttatggagacaattcttagtggtcaaggaggactcctcttccgtgatctacgtgatgaacaagcacttggatatactgttacagcatttaatagacaaacgacagaaactggctatttaggcctctatattggtacagaaccaaacaaaatatctgttgctgaaaaaggattcaaagataccatacaacaatctcttatagacaaacttcttccagaaactgaacttaatagagcaaaaaatcaaattgaaggcgaatactatagagaaagacaaagtcttggaagtcgtgcaagtgaagctgctatgcttacattagaaaacagaccacttaactatgctatggaacaagtaaaaaaagcaacacatgtaactgcccaacagataaaagaattagctcaacgatatctccttagcgaaaaaccttatatcgttaaaatattgccttaa

SEQ ID NO: 9837 - DNA, 1278 bp, Lawsonia intracellularis
gtgtttagcttagaaaaaaataaggtgttgtctgagttaattagtaaacatatagataaaattgcattagaagagagattaacctctgagcaaattaatttaggaatttgttctggtacaatggttttattaggtaacctaaaacatagtgatgttaagccaacacttataggacagcctgcacgtattaaggtgaatgcaaatattggaacctctccattagaaagttcttttaacaaggaaatggataaacttaaagtagcctatgaagcaggtgccgatactgttatggatttatcaacaggtggtgatttatataagataagagaagaaatgcttgcaggaacttcattaccccttgggacagtccctttgtatgcagttgcccaaaaatatatcaaaaaacattctgatccagcaaagatggatccagaagagctttttgaagaaattgagagacaagcagatcagggggtagactttatgacacttcattgtggagtgacatataaggctgcagagttaggttctcaaaataatcgtgtattaggaattgtctctagaggtggagcccttttagctcgttggatgtttaaaaataaaaaagagaatccactatatacagaatatgatcgactattaaaaattgcttctaaatataatgtaactatttctcttggtgatggacttcgacctggaggggggtgtgacgctggtgattctgcccaatgggaagaacttatggttcttggagaactcacaagacgtggacaacaagcaggtgttcaatgtatgattgaaggccctggtcacgttcgtttacatgaagttgaagcacaagtgataagtataaaaaagcttacacatggtgccccattatatgtattaggaccgttagttattgattcgtctccaggatatgatcatatctcaggtgcaattggtgctgctgtttctgttcgtgctggtgttgactttttgtgttatctgacaccagctgaacatctctcacttcctaacaaagatgatgtttatcaaggagttatggcttcacggattgcagcacaggctggtgaagtgtctttagggcgtcctttagctttggaaagagaagcttgtataagcgaaagtcgtaagaaacttgattgggatggtatgcggaacgcagcccttgatgctaatgctgtagatttacgtcgagaacctcataagaaagaaaaagtatgttctatgtgtggagatttttgttcaatggatatgttaaatgataaatggtaa

SEQ ID NO: 9838 - DNA, 1398 bp, Lawsonia intracellularis
atgtgtggagtatttggtataactaatcatgaagaagcagcccgtatggcatattttggcctttactctcttcaacatagaggacaagaaagtgcagggattgcatcatataatggtaataatattacatcatatgtagatatgggacttgtaccagatgtatttagtgaagatattctaagtaaagaattaaaaggccactatgctattgggcatgtaagatactctactactggtatttcatccagaagaaatgcccaaccaatatctgtacgtatttgtgatatagaactagcacttgcacataatggaaatcttactaatgcaatgcagttaagaaaacaacttgaaaatgatggtgctatttttcagacaaatagtgatagtgaaatttttctccaccttattgcacacaaccttacaaacagaagtatagaagaagctatattatattcctgcacacaagtaaaaggagcttattcactagttattcttgtaggaaataagcttgtaggtatacgagatcctcatggatttagaccacttactttagggaaaatagaagattcatatgctcttgcttcagaaagttgtgcttttgatcttttagatattacacttataagagatattaagccaggagaaatggttattattgatgaaggacatgttacatctgtaccccttctacactcaaaaaacgtacctactcgtcaatgtatttttgaacttatttactttgctaggcctgactctattgtctttggagaagatgtctatcattgcagaaaaaacatgggtattgagctctctaatgaatgtaaaacacacgctgatcttgttatgccttttcctgactctggagtgtatgcagctctaggattttctcaagcatctggaatcccatatgagcaagcttatattcgcaatcattatgttggaagaacttttattcaaccttctcaaaatattagggattttggtgtacgtataaaacttaaccctgttcgctcaatgattgctaataaacgattgtgtattatagacgattccattgtaagaggaaccactgtaagtacaagagtaaaaaaactacgtgaattaaaagcttctgaaatccatttccgtgtaagctgtcctccattacgttttccttgtttttatgggattaacttttcatcaaaaggagaactcattgcagcaaaacatcctattgaagatcttcccaacttacttcacctagatacactttattatttaagccttgaaggtcttctgaaatctgtatctacttctaataactactgccttgcatgtctaaatggagaatatcctgttccatatgaacaaaaaagtgtatgctcaggttgtcccaaaacaaaagatagtactaaataa

SEQ ID NO: 9839 - DNA, 3231 bp, Lawsonia intracellularis
atgcctaagcgttcggatataaaaaaaattatggttattggttctggccccatcattattggtcaagcatgtgagtttgactactctgggacacaaggcattaaagccctcaaggaggagggatataatgttgtccttgtcaactctaatccagcaactataatgacagatccaacccttgcaaatcatacttatattgaacctcttgaattagaaacagttactgcaattattcggaaagaacgcccatgtgcattacttcctacactaggaggacaaacggcattaaatatagcacttaatttggctaaatctggaatacttcatgagtgtggaacagaactcattggagcaagcgcagatgtcatagaaaaagcagaaagtcgtgaaaaattcagacaatcaatggaaaatattggccttaaagttccatctagtgctattgcaaaaactatcgaagaagtccatcaaattgcattaaatatcccatttcctgttattgttcgccctgcatttacacttggaggtacaggtggaggaattgcttataacatggaagatcttgaactaattgcaatacaaggacttactgctagtcccacaaatgaagtaatgatagaacaatctgtcataggatggaaagagtttgaaatggaagttgttcgggatgcagctgacaattgtatcattatttgttccattgaaaaccttgaccctatgggtattcacacaggcgactctattactgttgcaccagcacaaacgctttcagatatagaataccaaaaaatgcgtaatgcctccatagctattatgcgtgaaattggtgtaaaaacaggaggatcaaatatccaatttggtgttaatcctaaaaatggagaacttgttgttatagaaatgaacccacgtgtatcacgatcttctgctcttgcttcaaaagcaacaggttttcctattgccaaaattgcagcaaaacttgcagtaggttatactcttgatgagctaagaaatgatattacatataaaacctcagcagcttttgaaccagcaatagattattgtgttgttaaaatccctagatttacttttgaaaagtttcctggtgcaaaagatgaattaacaacgtccatgaaaagtatcggagaagtaatggccattggtcgtacttttaaagaagcttttcaaaaaggactacgatcacttgaaactggtcttcctggatttaatagctctaactatacatttacagaagaagaacttcctatacttttaagaaaccctaattcattacgtattgttgctattcatcaagcattatcttctggaatgagtttaaaccatattcatactcttacacatattgatccatggtttttgtatcaattcaaagaactcatagaaatggagttgatacttcataactttgcactatctaatacaataactgcttctaatcctgaactaaggcctttattacttaaagctaaacagtttggattttctgataaacagcttgctatagcctgggaacgaccagaatctgacatccgtaacttacgaaaagaactagatatagttccaacatactatcttgtagatacatgtgctgcagaatttgaagcattcactccttattattattctacctatgagtcagcaaaagaactctctttagaaaaaaagaaaaaagttattataattggtggtggacccaatcgaattggtcaaggaatagagtttgattattgttgttgtcatgcagcatatgctctcaaagatagtaatatagaagcaattatgattaactccaatccggagacagtatctactgattatgatacttctgatagactctactttgaacctctaacatttgaagatgtaatgaatattattgctcaggagcaaccagatggtgttgttgtccagtttggaggccaaactcctcttaatcttgcattaccacttgttcgtgctggcgtaccaattctaggaacaagccctgaggctatagatagagcagaaaatcgatcaagattccaagcattactccaaaaattaaaactacaacaacctgcaaatggtacagcaacttctataaatgaagcagcttctattgccaaaactattggatatcccatagttgtccgcccaagctatgtccttggcggtagagctatgcaaattatttacgaagaaaaagagcttatacactacttttctctatatggaaaagactgtaatttagaccgaccaatacttattgatcaattccttgaatatgctattgaggtggatgttgatgctctctctgatggaactaatgtatatattgctggagtaatggagcatatcgaagaagcaggcattcactctggggattcatcttgtgttatccctccccactcattatcccaagaattaatagaagacataaaaagtcaaacaacagctcttgccaaagaacttcaagttattggactcatgaatatccaatttgccataaaagataatgttatttatatattggaagttaaccctagagcatcaagaacaactccatttgtctccaaagcaacaggagtaccccttccttacctagcaatgcaagttatgcttggagtaagtcttaaagagctcaatccttgggctatagaaaaaacaggatatgtttctgtaaaagaatctgttttcccttttcaccgcttccctggagtagatattgtattagggcctgaaatgaaatctacaggagaagttatgggaatagcttcaacctttgaagaagcttttttaaaaggacagcaaggtgtaggacagtacctaccaagtacaggtaaagtatttttttctgttaatgatagagataagcctcttcttatagatatagctaaacaatatctccaactaggctttgaacttattgcaacatcaggaaccgctgtactactcagtaaaaataacattcctgtacaacatgttcttaaggtatatgaaggacgacctaatattatagatcttataaaaaatggcgatattgctttagttataaacacaccatcaggaaaacaaacaactaatgactctagaactatcagacaagccacattacaatataatatcccatatagcacaacacttgccggagcaaaagctatcgcacgagctatccaagcttcaagagatactcctattcaggtaaaaagtattcaagaatattataatttgtaa

SEQ ID NO: 9840 - DNA, 483 bp, Lawsonia intracellularis
atggctgatcaatgtaagtgtcctcattgtggtaattatataaaagaatacaaaaatcctcttccagctgtagatattattatttatagtcctgatcatggcgtgatagttatatcaagaaaaaatgagccattaggttttgcttttcctggaggctttatagagtatggagaaactgtggagcatgctgccataagagaatcatatgaagaaacaggactgcaaattattttacagggtgttttaggggtatactctaagaaagatagagatcctagacatcacacactatcagttgtatttgtagcatgccctttagatattgaaaagcttaaggcaggtgatgatgcagctagtgcaaagtttttccttttaaatgatatgccagagcttgtttttgatcataaaaaaatttttgaagatttcaattgttttttacaagggaagagaccactagcacctcttgtagaaccaacagaatag

SEQ ID NO: 9841 - DNA, 852 bp, Lawsonia intracellularis
ttgagtttggatcgaagtacagagaaaaatttatggtcacgccttttaagtttttttcatggacgatctaatgattctcttgaacaagccattttagaagctcgagatgatggagagttagatacagaagaaggaagtatgattcttagcatcctaaagtttgatgagttacaagtgcaggatgttatgatcccaagaacagattttgattgtatgccttcaggctcgccagtaagcgaagtagcaagttgtattgttgaaacaggtcattcacgaataccaatatataaagatacaagagataatatagttggtattgcttatgcaaaagatctcatagaattacttttagacccttcaaaacatcatacacctatagacacaacaatgcgtgaacctttttttgttccagaaacaaagcctgttagggaattattacaggagtttcgtacaaggaaaaatcatcttgctattgccattgatgaatatggaggtacttctggtttattaactattgaagatgttcttgaagaaattgttggggatattgaggatgaacatgatgctccaaaagaagaagatatccatgtaattggagataattgttatgagctatctggtagagcatatctagatgatcttctaaaattaggtattaaccttgaagcagatgaggttgatacaattggtggctatctttcacttgaagcaggacacgttccagagcagggcgaaacttttgaatttgatggttggaagtttgaagttacagaagctgatgcaaaacaaattcgtaaagtgcgagtggaaaaattacttgatgaatttagtagtaaagaagaaaataattaa

SEQ ID NO: 9842 - DNA, 372 bp, Lawsonia intracellularis
atgccaactatcaaccaacttattcgccatgagcgaaagaaggttgtaaaacgtaaaaaaacacctgcacttcaagggtgtcctcaacgcagaggtgtttgtactcgtgtatatacaacaacacctaaaaagcctaactcagcactaaggaaagttgcacgtgttcgtttaactaatgggctagaagttacagcttatatccctggtgaaggtcataatcttcaagagcactctgtagtgcttattcgtggcggccgtgttaaagacttacctggtgtacgttatcatattattcgtggtacacttgatacctctggtgtgcaagatcgccgtcagcgtcgctcaaagtatggtgcaaagcgtccaaagtaa

SEQ ID NO: 9843 - DNA, 471 bp, Lawsonia intracellularis
atgcctcgtaaaggtcctgtccctagaagagaagttttacctgaccctatttataatagtcgacttgctagtcgttttgtaaatcgccttatgtatgatggtaagaaaggtgttgctgaaaaaattttttatggtgctcttgaaaatctttctgagaaaacgggggaagaaccccttcgtgcctttgagcgtgctctagacaatgttaaaccacaatttgaagtgaaagcccgtcgtgttggtggtgcaacatatcaagtccctatggaagtgagatctgataggcaaatttctctctctatccgttggttaattacttatgctcgctcacgtggtgaaaaaggtatggttaataagcttgcagcagaatttcttgatgcttttaataatcgtggtggtgctgttaagaaaaaagaagatactcaccgtatggctgaagcaaacaaagcctttgcacattatcgttggtaa

SEQ ID NO: 9844 - DNA, 2076 bp, Lawsonia intracellularis
gtgtcacgaacagtccctatagagaagcagcgtaacattggcattatggcacatattgacgcaggtaaaacaacaacaactgagcgtattttatattatactggagtatcgcacaaaattggagagacacatgatggtgcctctacaatggattggatggagcaagaacaagaacgtggtatcactattacttcagctgcaacaacttgtttttgggatggttatcgtattaatattattgatactcctggacatgtagactttacaattgaagttgaacgttctcttagagttcttgatggcgctgtagctgtttttgatgctgttgcaggagttgagcctcagtctgaaacagtatggcgtcaagcaaataggtatggtgtccctagagtctgttttgtaaataagatggatagaataggggctaattttttccgatgtgtagatatgattcaagaacgtttaagagcaaagcctgtttgtctacaacttcctattggtgctgaagataactttgaaggaattattgatttaatacatggggtttccttaaagtttgataaggaaacaaaaggccttgaagttgaaaggggtcctatccctccagaattaatggagttataccaagaaaaacgtcttgaaatgatggaggcagcagcagaagaagatgaggtattgcttgctaaatatcttgagggaacagagcttacagcagaagaaattatagcttgtatacgtaaagccacaattgaacagaggcttgttcctgtactatgtggttcagcttttaggaatataggggtacaacctttacttgatgctgttgttcagtatttaccctctcctcttgatattccacaaatggtaggtcataatcctaatagtcctgaggaggaaatagtttgtcactgctcagataaagagccattagcaggacttgtttttaagttggcctctgatccttttattggtcatctttctttcttccgtatctattctggatttgttgagtctggaatgactgttcttaatacaactacagaaaagagagagagaattggacgacttcttaaaatgcatgccaataagcgtgaagatattaaatgggctggagctggtgatattgtcgctttagtaggtttaaaacaagcttcaacaggtgatactctttgtgatgaaaagcgtccagttattcttgaatctcttgatattccagagccagttattgaagttgcgatagagccaaaaacaaagacagatcgtgatgctctttcaactggtctaaataagcttgcaaaagaagatccttcttttcgagtaaaaggaaacgaagagacaggtcaaacacttattgctggtatgggtgagcttcacctagaaattatcgttgatagattattacgagaatttaatgtaaatgcaaatgttggaaagcctcaagtcgcttatcgtgaaacaattactaagcctgggaagtctgatacaaaatatgctaaacaatctggtggacgtgggcaatatggacattgtgtcattgaaattgaaccaaatcctgggaatgggtatacatttataaattctatttctgggggggttatacctaaagagtatattcccgctatagataaaggtattcaagatgcattgaagtcaggcatattagctggtttccctgttgttgatataaaagttaatcttgtttttggttcttaccatgaggtagactcttcagaacaagcattttatgttgctggctctatggcaataaaagatgctatgcataagagtaatcctatattacttgagcctattatggatgttgaagttgtgaccccagacgactatcttggagatgttatgggtgatttaaacggacgtcgtggtaaagtccaatctatggaggcacgttctggagcacaagctatccgtgctcaagttcctctttctgaaatgtttggttatgcaacagagcttcgttcacgtacacaagggcgtgcaacttttagtatgcaatttgatcattatgagcgagtcccagcagccattgctgaagaagttataaaaagtcggagttga

SEQ ID NO: 9845 - DNA, 1095 bp, Lawsonia intracellularis
atgtacaaaaaattctttaatatttatcttaacattattaccactcatcatctacattttttcctatatttctttttattaacattactggagtgtattacatacaccacaagccatgctgcctctatagaaccaggaatccgacttgaaagtttatgcattgaaaataatcaaacaaaacttgatttagctatttggtatcccactctacaaaaacctatacaaataaactatggtgattggaatattatagcttcacatggtgcaaagccatatccaggtaaataccctgctattattttatctcatgactctgctggatctcggttttctcttcatgagcttgctacaacactaacccaaaagggctacattgtagtaagtgtaacacatcaaggtgataatgctgatgatatgagtcttatgtttactataaaacaaattacaggccgtgtacaccaattaaatattattatagattttttaatgaatgatcaggagctatttgatattcttgatacacaaaaaataggtattattggtataggtacaggaggaactgcagctcttttattaggaggagcaaaacttgatccttcagcatggtgggattattgtaacaatattatattaccgtcttcatccataatagtcaacgatgcttactgttcttcatgggtaaaacctaagatgaacatacttgctcaacaaattgatcctcaagaaacatataataaccctaggataacagctatagttgttgttgctccaggttttggaatgtttttttctaaagaaagcttagcttcattatcaagaccaatacttttggtagaagcaacaaaagattatattaatcctcctaaatatcactcacaatatattgaaaagcagctttctacttattatgaaatgattgtattatcagaagcttctacagctactcttatttctccatgttcagaaagcttagaacaagttctgccagaaatgtgttcaaaagagcttgatgttacaaaacaattaatacaaaaagaaattgctaatactagtgcagcattttttacaagatgcttcagtttatttaaaaaataa

SEQ ID NO: 9846 - DNA, 1869 bp, Lawsonia intracellularis
atgaggacaacatttgattgtatagttgttggtggtgggcatgctggctgtgaagcttctatggctttagcacggttaggccaaaaagtacttttaattacaggtaatgttgatagaataggacatttatcttgtaatccagcagttggtggtattgcaaaaggacatattgttagagaaattgatgctcttggtggtatgatgggtttatgggctgataaagcagggatacagtttagaacattaaacaggagtaaaggaccagctgttagagcaactagggcacaagtagatcgtgatttatatatgcaagctgtaaaacaagatattttttctcaacctaatttatctgtttggcaagatacagttgaggctattattgtaaaagatggacatacaggaggtgttaaaacagcacttgggcaattatttaatagtcaatatgtcattcttacaacagggactttcctttctggattgatgcatataggacaaaagaatttttctggaggaagattaggtgatgtaggaacttcaaagctttcatcatcacttcactctatagggttacatttaggccgcttgaaaactgggactactcctaggttacttaaaacgtctattgattttacatcaatggagatgcaattgggtgatacaccaatcccatcctttagcttccatggtccaaagccttctcaaccacaagttccatgttatatcacttggacaaatgaatatactcatgatgtaatccgatcaggaatggatcgttcacctatgtttacaggtgttattactggaacaggggcacgttattgcccatcaatagaagataaagtcgcacgttttgcagatagagatcgtcatcagatatttgttgaacctgaaggattaactagtcaggagtgttatattaatggaatttctacaagtttacctttagatatccaattagcattaatcgcaactattccagggcttgaaaatgcacatatggtgagaccaggatatgctattgaatacgactatgttgatcctatgcaattgcatcctacacttgaaacaaaggttctcccaggtctatggctagcaggacaaataaatggaacatcaggttatgaagaagctgcaggacaaggattatgggctgcactgaatgtattctgtaaaattacacgacaagagccatttattttaggacgagataacgcgtatttagctgtattagttgatgatcttgttacacaagggacaaaagagccatataggatgttcacctctagagctgaatatagattgttgttgagagaagcaaatgctgatattagattaacaccattaggaagaaaaatagggttagttggcgactatcaatggaatttatttcaaaaaaagatatcagatatagatacacttgttaatagattacagaatattaggataaaaccagatacattggaccctagtatatttttagaattaggagaaagcattcctaatagggcatatacattagaggagctattaaaacgtccttctattacattccaaaccttgagaaaaatatattctgatttacctataacttcagaagatgtatatttagagactgaaactattataaaatatgctggctatcttgaccgtcaagaagaacttgtacagcggtctgcaaagttagaacattcatatcttcctaaagaaatagattatactaaagttgcaggactttcttcagaagttatagaaaagttacaaatagtaagacctcagacacttggacaggctggtcgtatttcaggagtaactcctgctgctattacatgccttgaaatatatttaaaaaagatacatgcttttagataa

SEQ ID NO: 9847 - DNA, 522 bp, Lawsonia intracellularis
atgcttataaaattttttgtttttatgaaaactaaaagatcttttcaacattattacttattagttttacttattacttatgttaactttttatttggatgttcttcaaaagttattgtaggaggaggttactcaaagaaaaatacactacttacacagcatatcgtaaaaactgcacagagtcagataggaactcgttatgtgcttggtgggacaactccaagaggctttgactgttcaggtttagtttggtgggcttataaaaaacatggggtatgtatcccaagattgactgaagatcaagcaagagcaggtattgctattaagttccatgctattaagcctggtgatattattatttttaaaacctgtaaaggaagaagtggtctacattcaggactttatactggatgtggaagatttattcatagtcctagatcaggaaagcatgtacgtcatgataaaatagaaaatttatattggaaaagcaaactacacactatacgacgtattatacaataa

SEQ ID NO: 9848 - DNA, 1095 bp, Lawsonia intracellularis
atgcaagtacttctattagatcttggacttgaactacgtggaggacaacggcaagtttactaccttgcacaagaactccaacattctgatgtagtaccttttattgcatgtccaaaagctagcgctcttgcagtagtttgtaaaaaagaacggatcccttttattccccttcttggtagaagccctgcaaatccattaatactcttccaactagaaaaagcccttcggaaattatctattaatattatccatacaaatgacgcacactcagctgctttaggagcctttagtaaggcactacatggtaataatatactcctaatgcacagtagacgtgtatcttatcctctgcatactggtagccggatgaaaaaatatctacttgctgatagtattgttactgttagtgaagaaatacgtaaaagagttattcaatcagggattgaacctaataaagtatctactatccactcttgtattgatccatctctatactatcctaaaaaagatagaaaagatgggcgatttgtttttcaaagtattggggcacttactagtcaaaaaggatatagtaatttactccaagctatgcatattataaaaaaagcaaaagatctgcccccatgggaagtacgtattgcaggctctggtgaactatttcaatcattacttaatgaagcatttgaacttaatgtagcttctcaacttgctttattaggtcaacaagatagtcgagtaattttacctcttgctgatgctgttgttgtaccctcagtagagggtgagggaagtaatgcaacaataaaagaaggttgggcaacaggaattcctgttattgcttctaatttagaatcaaatgctgaacttattcaagatgaaattaatggacttcttgttccagtaaatgatccagttgcactagctatggctatgatccgctgtatgcaagaaccacgactttgtgaaaaaattgtatctgaagggacaaaaagccttgaaaattttacaactacaacaatggtaaagcaatatctacaactatatcgtaacttatttccaatgcgtactattcctcaacaacaaaaagctagttaa

SEQ ID NO: 9849 - DNA, 327 bp, Lawsonia intracellularis
atgtgtcgtatcttagcttccttcttagcttgctttatgctgatcatggttagttatactctctctgatgcaaagagtgataagtttcgtacaaaagggactgtaacatcagtcaatgaagaagaacaaatgtttacaattaaaaacaaacatggagaaaccatctcattcaaagttgaaagaaaaagcgattttgaaatagaacgttcaatttttgatgataaagatgtatctttcagtgaactaaaagtaggagacgaagtaaaagtaaaagcctataaaggtgagcctccagttgccgatgacgtaactatttatcgcaaataa

SEQ ID NO: 9850 - DNA, 951 bp, Lawsonia intracellularis
atgcttcctatactagctacaaatgccttcgtagaccatattcaatatcaactttgtccaggagcagaaaaacttcttgaattttataaccatagctctgaagatatttactatggtccaaaccaaatggtaatccctattgatgctcatcttgttcatcgtggagatggtgtctttgaaacactatctattatggaatatcatatccttcagctgaaggaacatataaagcgtatagttacttcaagcaaaaaattaaaactttctctcccatgttctacttcaaaattgaaaaaactcattatgactgttgctaaagcagttaataaaaatgagggtaatatacgtgtccttattggtagaggactaggtggttttagtattagttcattagaatatccaaattctagtttgtatattgtagtttataacacaacacaactattggagagttggtacaaaaatggacttactgcatgtaaaagtaatatcctatcaaaccctatcttattcttaacaaatataaaaacagtaagttatattttgggtattcttatggaacttgaagccatagaacaaaaagtcaatctaacactatcattcaatgaacaatggtgcttcacaaagtcagctattgctaacattgctattgtatcacaagataacactttaatcttcctagaatttcaaaacattttaattgaaacaatattagaaaaaacaattgaagcgttaaaaccgtctgtattgattgaactacagtgtataactgaacaggaacttttaacagctaaaaaaatattagttcttggaacaacacatctttgtataggaatcacaaagtataatggacatatcattggcaatggaacaacaggtcctataagcaatatgttaagaaacatgcttaaaaagaccttgttaaaacatggtatacctattaaccactaa

SEQ ID NO: 9851 - DNA, 1044 bp, Lawsonia intracellularis
gtgtctaaaaaacctgtaattgctatagttggtgccactggcgctgtaggaagagagtgtattaaactttttgaagaacgaaactttcctcttaatgatataaaactttttgcatcttcacaatcagtaggaataaaaattccatttaactctgatgaactttcagtacaagaaattactgatcaaagcttacaagatgtagatattgctattttctctgctggaagtgaagtatcaaaaaaatatgctcctattgctgtttcatctggctgtgtagtaatcgataattctagtcattggcgtatggacgatagatgtccacttgttatccctgaggttaatgcacatacactggataatcatagaggtattattgctaaccctaattgttctactattcaactgattgttgtattagctcctcttcataatataggaaaaattaaacgtattatagtttctacataccaatctgtttctggaacaggtcaaaaaggtatcaatgaaatagaaaaacaaactctccaaatttttaacctacaacaacctgaagtaactatttatcctcaccgtattgcttttaattgtataccccatattgatagctttcttgataatgactacacaaaagaagaaatgaaaataactaatgaaacaaagaaaatatttgatgatcctgctatcaaagtcactgcaacttgtgtacgagtacctgttttttacggccattcggaatctgtaaatattgaaatggaaaataaaataaccccccaacaagctcgcgccatcctctctcaagctcctggggtttgtgtttatgacaaccctaaagagaatatgtaccctactcctcttgatgctacaggagaagatctaacttttgtaggacgtattcgtgaagatcatagtatagataatgggcttaacctatggattgttgctgataatgttagaaaaggtgcagcattaaatgctatacaaattgctgaacatcttgttaataacgacttgctaaccattgataatcccaatctttttttataa

SEQ ID NO: 9852 - DNA, 585 bp, Lawsonia intracellularis
atgagtaaacgagctatattaaaaaaacaacaatatattttacttataattatagtaggtgctctttctattatttgtggaacaacttcctattttattgaacatccaacacttacaatgcatattgaacaacaagaagcctctgctattcaacaagataaaaatataactaatgctagtcaaacagacttactcacacttacacaaaagctacaagcaaatcctaatgatgctaggattttacttgaattaagtaaatattttatagaactctgcgaatggaaacaagcagaatattttcttctacatgcattaatagtagagcctaataatccagatatactttacttattaggtattacacaatataatcaagaagaatacattgatgctgttaattcgttcaaaaaagtacttataatagaacctgacccatcagcgcagtatagtttaggattgctctatctatactatttagacgaaaaaaatcaggggttacaatatctacaacaagttatagataatcccaaaagtacacctgaaatgaaacaaactactcaacagctattagctaatcataaataa

SEQ ID NO: 9853 - DNA, 684 bp, Lawsonia intracellularis
atgaagccactatggctatataccttagtttcactcagtggattaggaatggcattttgccaataccttatttactgctatgcacctattgaaagtgaactaggaattatccaaaaaatcttttaccttcatctaccacttgcttggtgggctctaataagtttttttatcgtctgtatagcaagtataggatatcttaaaacacgaaaaacttattgggatgcattatctggtgcaacagctgaaattggtgttattctaagtagtgcaactattattacaggttctatatgggggaaacaatcctggggtgtttggtggacatgggatcctcgtcttacaactgcattagtcctctggtttctttacagtgcttatctagtattaagacagttagatattcctcaagagcgacgttctttactatgctctgtcttaggtatcattgcatttttagacgttcctttagtctttctttctgctagaatctggcgctctattcatcccacagtttttgcctctaataatggaggactagattcagaaatgaaacttacgcttattgcatgtattatatgttttggattcttctggttatgcattattagtatacgagggaaacaatatatacaaaaagaacgacttgctgctcttactagtacacaaatttggaaaggaaaatga

SEQ ID NO: 9854 - DNA, 678 bp, Lawsonia intracellularis
atgtttactcatgctattatcattgcacaaaaagatataaaacttctgttctctagaggtataggggtcatacaggcattacttctgggattattactcatttttatttttagtttatcaaaaccattagatgaaaatataacagctcaagcagcagctaccatcttctggttagcttctatcttttgccaggttcttacatttaatattctctatcatattgaaaaaaaaagtgatacatggtcaggactgttacttacaccatgtcctgttcaagctatttggttaggaaaagctttaacagggtttattatcatttctgttgctcaacttatttttattcctgcaattgttgtttttcttaatcaagaacctggaatatgttgggcacaatcactactcattatatttcttattaatataggtcttgtatctataggttcactaatagggggcttatctcaagggcaatctacccaagagtctctcatttccattattttatttccacttgtagttcctcttcttcttgcaggtattcatacatgtactgatgcactctcttcagagtctacagaagctatgtattcatggatgcatattgttatagcttttgatgctatttttgctgcatcagcccttgctctcttcccagttatatctttaggagatgaataa

SEQ ID NO: 9855 - DNA, 636 bp, Lawsonia intracellularis
atgcttcttcagctaatagctatcagcaaagtatatagtaatcggcctatcctcaaaaacatatcacttaatattacttctaatactataacatatttaacaggagaaaatggagctggtaaaagtacattactcaagatcatggcagggcttctaaaaccaacgtcaggagaaattatatttaactgtagcttagaagaaattggttatcttgggcatactccatttatttatcaagatctttcagcctatgaaaatcttctcttttgggggcggctttataaaaaacgtcttgataaaaaacaaatagcaactgctattgaacaaatgaaacttactcgtttcatctatgaacgtacaagaacattttcacgtggcatgttacaacggcttaactttgcacgagtgctgatgttaaaacctaagcttctattattagatgaacctgaatctgggcttgacaaccaatctctttcaatatgttataatgaaattattaatgcaaagactgcaggtgctggtatagtttggatttcccataatcttattaagaatgaaaaggtagatcaacatattatacttaaaaacaaaaagattgaatataccaaaaaagaaccttatgcatttcaacaataa

SEQ ID NO: 9856 - DNA, 2007 bp, Lawsonia intracellularis
atgactatagctttaattgatatcttctggatagctaatacactttggccatggcataaattaaataaattcatattaataataaaaaataaatatcctaatcaatcatcaaaaaaagtaagccttacacttgcagaaattacttctataagtattacaatattgctttccattgcttcaggtattttaacgtatgcgttagctagttataacttttcattacaatatgtagccagttatactgatcaatttctacctcttttttatcgtattacagccttttgggctggccaagcaggttcaatgttattctgggcactatctacttccattgctagctgtatatttcaacatacttatctctataaaaaactttctatagacacaaaactttggttttggatactttatttaagtattatggcattctttgggcttcttctcattacatggaataacccatttattttacttgatataaaacctatagatggaaatggccttaatcccttactccaaaatccaggcatgatttttcatccacctttattatttttaggatatggttggtttactatccctggctgccttgctcttgcacaaacaataagtaatcaaaaagaggaacctagctggatagttatttctaagccatttatactctcggcatgggcatttcttactgctggaattgttcttggaggatggtgggcttatatggaacttgggtggggtggttactgggcatgggatccagttgaaaatgcatccctcattccatggcttatatcaacagctgcattacatactattattattcaaacacataaaaatgtactaactcacataaacgtttttcttatggcactaacaactctttccactttttttgccacttaccttgtacgtagcggcattgttcaatctgtacatgcatttggaacaagcaatgttgggaaacctctccttatttttataacatttgcaacaataactattatctctattttctatactgcatactcaacaaaagataacagtgaactttctactattaatagtcgtataggatttcttatctttacttcttggctattacttgctcttgcaatattaattcttcttgcaactatgtggccagtctttacttccttttggaatcaaataatattaggacaatcaattctccagtcttctacttccatcaatcaagaatctgcaggaagtataggacttacgtcagacttttataataaaacatgtcttcctctttttgcaatacttatggctcttctctctttatgtccttggttaggatggacaagaggtatccataatctaaaaaatattactcttgttcttattactttttttacatcttcatgcataatgtatctatcaggatatcagttacctatcgccattctaggagcttcgtctgcctttgctatcatgacaagtacagtattacttgtattagacaaacaaacacgttcaaataaacctatgttactagcgtatggcattcactttggagttgcgcttattgctatgggaattgctttctctggtccctataagatagaaattgaacaaatactacatgaaggagaaacaataaaagtaggaaattttgatataaaacttatcaaaatccaagaaggagaactagttgactatgcttatatagaaggcttacttgaagtacgtaaggatgggaagtttattgattttattgccccccaacgtcgtatttataaaaaatgggggaaaatgcaatttgctgaagccgatactattccttctcttggaaatgaactttatgcttctctcttagctgtagatcatcaaaatcgtgctctattcagattaagctctatgcctttagtcaattggatttggattggtggtgccattataagtttgctaccattcttctctattatatccagttataggggaaaaaattatgcttcttcagctaatagctatcagcaaagtatatag

SEQ ID NO: 9857 - DNA, 417 bp, Lawsonia intracellularis
atggataaaaaaacttctaatactacttatgtatatataatagctctcttattattcatagtaggtattggctatcttgcatttataggattctatgaaaatagtgtatattttcttaatgtaaaagaagccatagcaatgcctagtgaaaaacttaagtctgcaagactttttggtattgttatagcagaacattatacacagcaacatggaaaaactatttctttccaattaagagataaagaatatccttcaaacgtaatatctgttgaatatacaggagttattccagacaccttcagaacaggtgcagaagccattgtagaaggttcacttacccctgaaggaatctttcaagcaaaaacacttatgacaaaatgtccatctaaatacgaaaaagaagagaaaaaaagttaa

SEQ ID NO: 9858 - DNA, 1047 bp, Lawsonia intracellularis
atgataatccttttaggaactgtttttcttattgttcttatctctgcattatgctcaatgatggaagctgctatatactctatccctattacttatattgaacaccttcgtgaacagggaagcaaaaaaggagaaaaactttattatttacatagtaatattgatcagcctattacagccgtattaatattgaatactatagcaaatactgctggagctgcccttgctggagcaattgctacaacaacacttcatgaatctactatgcctttctttgcagcaatcctcaccttgcttattttagcttttggggaaattatacctaaaacactaggtgttgcttactctaaacgtattgctataattctccttaatcctctctgtattcttatagttactttaaaaccccttattatgctttcaagctacttaacacgacttgtttcacctcgaaaacgtcctacagttacagaagatgacatccgtgcacttacaagtctttccagagagtctggtcgtattaagccatatgaagaacatgtcataaaaaatatccttagtcttgatttaaaatatgctcatgaaattatgactcccagaactatggtcttttcacttcatgaaaaccttactgtctctgaagcttatagcaaccccaaaatatggaactatagtcgcatccctacttatggagaaaataacgaagacattactggcattatccaacgatatgaaattggacgatatatgaccaatggagaaacagaaaaaaaacttttagaaattatgcaaccagcaaaatttgtccttgaaagtcaaactgtagatcatttacttcttgcatttttagaagaaagacaacatctttttattgtacttgatgagtatgggggattatctggtgttgtttccttagaagatgtattagaaactatgcttggaagagaaattgttgatgaaagtgatacaacacctgatcttagagcacttgcaaaaaaaagacatagtgcattaatccaaaataataaaaatactcttttaaaataa

SEQ ID NO: 9859 - DNA, 318 bp, Lawsonia intracellularis
atgacgacagtaagcagtgatcgtatacgtataaagttaaaggcatacgattatcgcattcttgataaggcagtagcagaaattgtagatacagcaagaaatacaggtgcaagtattgctgggcctatccctcttcctaccaatatccataaatttacagtaaatcgttctgttcatgtagataaaaagtcccgtgagcaatttgagatgagaatccataagcgtcttatggatattttagaacctacacagcaaacagtagatgctcttggtaaacttagtttgcctgctggtgtagatgtagaaattaagctttaa

SEQ ID NO: 9860 - DNA, 633 bp, Lawsonia intracellularis
atgtctgaaaaaataggaattttgggtcaaaagttaggaatgactcaggtttttggtggaaatggatttgctgttcctgtaactgttgttcaagctgggccatgtcctatagtgcaaattaagacagtagaaaaagaggggtataacgctcttcagattgcctttggtgaagggaaaaagaaacatgtttcaaagtctatgcaggggcatttttctaaagcaggtttaagtctttatcgaaaaatacaagaggtacgtcttaagggtagcttaacaagttatgaggtaggacaagtccttacagtaggattattttctgtaggagataaagtaaaaattaccgggaaaagtattggtaaaggctttcaaggggctatgcgtcgttggaactttgctggctctaaagatagtcatggttgtgaaaaagtccatcgtgcagctggctctataggtaataatacattccctggacatgtctttaaagggaaaaagatggctggccattggggtacagagaaggtgacagttcaaaatcttgttgtagtagatattcggccagaggataatattattctgatacatggttctgttccagggccaaaaaatagttttttatttatatctatgcaatag

SEQ ID NO: 9861 - DNA, 621 bp, Lawsonia intracellularis
atggcgattgttacagtttataatcagcaaaaagaagaaactggtaaaattaatttatcttctaaaatatttgaagttcaagtgcagccagaaattctccatcttgtagtaagagcacagttggcagctaagcgtgcaggaactcattctgtcaagacaagaggacatgtctcaggtggtggtgcaaagccttggcgtcaaaaaggaactggacgtgcacgtgctggctcaaatcgttctccattatggagagggggaggaatagtttttggccctcagcctcgtgattatagttttaaagtcaataaaaagattcgtagcttagcgctatgtatggcattatcttcacgttttgcagaagaaaatcttatagtaattgataatattgtccttcctgagataaaaacaaagcattttgttggagttgcaaatatacttggacttcataaggctcttattgttgctccagtggagtcaacacaacttttgctttctatgcgtaatgtccctaatgttaaattgcttacttatgatcgcttaaatgtatatgatattcttaagtataaacagcttgtattattagagggtgctgttcaacatattgaggctcgtttaaaatag

SEQ ID NO: 9862 - DNA, 288 bp, Lawsonia intracellularis
atgcatcctacacaaattatattacgtcctgttataactgaaaaagtaactatactaagagacagtgtaaaaaaagttgcattttttgtacatcctcaatcaaataaaattgaggttaaaaaagctatagagttactttttaatgttaaagttatggctataaatgtagttaattatactcctcgggtacgcacacgtaatcgtcgtaaggtacatgtttctgggtgtcgaaaggcatatgtgactcttgccccaggagagaagatttcattttttgaaggattataa

SEQ ID NO: 9863 - DNA, 831 bp, Lawsonia intracellularis
atggctatacgtaatttaaagccaacttcaccaggttgtcgcttccagactatttcagattttaaagaaattacttgttcaagccctgaaaaaagtctaacatatgggctttgtaaaaaagctggtcgtaataatcatggtcatataactagtcggcgtcgaggtggtggtgctaaaaggttatatcgtcttattgattttaaaagagataaggtaggagttccagcaaaagtagcacaaatagaatatgatccaaaccgtacagcacgtatagcattattgcattatgtagatggagaaaagcgttacatattggctccagtaggtattaagcagggtgatattatagaaacaggcgtagatgctgatataaagcctgggaattcacttccaatgcttcatattcctattggaacactaattcataatattgaattaaatcctggtcgtggaggacaactttgtcgttctgctggagcttatgctcagctggtggctagagagggtaagtatgctttgttaagaatgccatcaggtgaggtccgtaaggttttagccagtggggcagcaacagtagggcaggtaggtaatattcaccatgaaaatatttcgttaggtaaagctgggcgtaatcgttggctaggacgtcgtcctaaagttcgtggagttgcaatgaaccctgttgatcaccctctaggtggtggtgaaggaagaagctcaggtggtcggcatccagtttctccatgggggatgccaactaaaggttacaaaactcgagataaaaagaaaccttcttcacgcttaatagttaagcgtcgtgggcaaaaatag

SEQ ID NO: 9864 - DNA, 282 bp, Lawsonia intracellularis
atgcctagatctttgaaaaaaggcccttttgtggataaagatcttatgaagaaagttgatgccgcaatagctaataatgacagacgagttttgaagacttggtctcgtagatcaacaattttacctgagatggtaggattaacgtttgctgttcataacggtaaaaaatttcttcctgtttttataactgagaatatggttggccataagcttggagaattttctcctacacgtactttttatggtcatgctggtgataaaaagacaaaggcaaaaaagtag

SEQ ID NO: 9865 - DNA, 339 bp, Lawsonia intracellularis
atggagtcaaaagcatgtgctaaatttatacgtgtttcacctaggaaggcaaggcttattgcttctaatgttaaaggaaaaactgttgagttagcaatgaatatattgaaatttactcctaacaagtcagcaggtattattttaggtgtaatgcgttctgcgcttgcaaatgcagagcataatgcaaagctagatgtagatactttgattgttaaagaagtaatagtgaatgaaggacctacatggaagcgttttatgccacgtgcacaaggtcgtgctactcatattcgtaaaagaagtagccatatttcagtggtattatcagaggggcaggaataa

SEQ ID NO: 9866 - DNA, 642 bp, Lawsonia intracellularis
atgggacaaaaagtacatccatatggatttaggcttgggtataataaaaattggcagtctcgttggtttagcaaaaaagattatgcaaattttatatatgaagattacaaaattcgtagttatataaaaaaattattatatagtgctggtatctctaaaatggagattgagcgtgcaggtggaaagatatgtttaatgttatctactgcacgtccaggtatagttattggtcgtaagggagttgaaattgaaaagcttcgtctagaattacgcaaaaattttggacaagaattttctcttgaggttactgaagtccgtcgtccagaagtagatgcacaacttgtagctgagaatattgctatgcaacttgagcgtcgtgtagcttttcgtcgagcaatgaaaagaactgttagtatggctcgtaagtttggtgcagagggaataaaaataacttgttctggccgactggctggtgctgaaattgctcgtacagaatggtatcgtgatggacgtgtacccttacaaacactacgtgcagatattgattatggttttgctgaggcacatacaacatatggtattattggagtcaaggtatggatttataagggtgaagtccttgataaagaggttgaaaaataa

SEQ ID NO: 9867 - DNA, 414 bp, Lawsonia intracellularis
atgcttgcacctaaaaaagtaaaatttcgaaaatggcagaaaggacgtttgcgtggtccagcattacgtggaatttctattgcatatggcgatattgccttgaagtcaactgagcatggaaagttaacaagtcaacaaattgaggcagctcgtattgcaatgatgcgtcatataaagcgtggaggaaaagtttggattagagtatttcctgatcatcctattacagcaaagccactagaaacacgtcaaggtagtggtaagggttctccagtaggttggtgtgcaccagtaaagccaggccgtattttgtatgaaataaaaggtgtaaatattgatcttgctagagaagcattaattcgtgcagcacacaaattaccagtaaaaacagttattgttttaaaagagaggctgtag

SEQ ID NO: 9868 - DNA, 267 bp, Lawsonia intracellularis
atgcctcagataatagcaaaatgtaatggtcgtgtgcttgttggtacggtgattagcgacaaaaatgataaaactattattgtgcatgttgaaacacttgtgaagcatcctttacttaaaaaatttattcgacatagaaaaaagtttactgctcatgatccattaaatgaatgtagtattggtgatacagtaaaaataatagagtttcgtccattaagccggaataaacgttggcatcttgtggcaatacttgaaaaggctgtttaa

SEQ ID NO: 9869 - DNA, 369 bp, Lawsonia intracellularis
atgattcaagttgagtctacacttcaagttgctgataattcaggggctaaaaaggttgcatgtattaaagtgttaggtggttctaagagacgttatgctactgtgggagatattatagtagtttcagttaaagaagcaattccacatagtaaagttaaaaaaggtgaagtattacaagctgtaattgttagaactaaaaaggaagttcgtcggatggatggttcatatattaagtttgattctaatgctgctgtattactttctaagcaaggagagccagtaggaactcgtatatttggtcctgtagcacgagaattgcgtgcacgaaattttatgaaaattatatctcttgcacctgaagttttatag

SEQ ID NO: 9870 - DNA, 321 bp, Lawsonia intracellularis
atgcaacaaatacgcatacataaaaatgataaagtaatggttattgctggcaaagataaaggtaaaattggcaaggttcttaaagtttgtcataagcataatagaatactagtagaaaaagtaaacatagttaagcgtcatgtaaaaccaaatccatatcgtcgtgaacatggtggcataatagaaaaagaattgcctatagttacttctaatctaatgattatttgctcttcgtgtacatctccaacacgcgtacactatcgttattctgaaagtggtaaaaaattacgtatttgtaaaaaatgtaatgagtcactataa

SEQ ID NO: 9871 - DNA, 540 bp, Lawsonia intracellularis
atgacacgacttgaaaaattttatcaagaaaaagtagttccagctttacaaaaagaatttctttataagtctattatgcaagttcctacaattgaaaaaatttcactcaatattggacttggtgttgctagtcaaagcaataaaattatggaagaggcaatatcagagctttctttaattgctggtcaaaaagctgttataactcgcgctaagaagtcaattgcatcatttaagttgcgtgaagggatgccgataggctgtagggtaactttaagaaaagagcgtatgtgggattttcttgataagttaatgaattttgcattacctcgagtccgagattttcgtggtgtttcagaaaatggttttgatggtcatgggaactttacacttggtattaaggaacattctatttttcctgaactggagatagatcgtattgaaaacactaaaggtatgaatattactatagttactagtgctgtattagacagtgaaggtaaagttctattagatttattaggaatgccttttaaaaaataa

SEQ ID NO: 9872 - DNA, 381 bp, Lawsonia intracellularis
atgatgactgatcctatttcggatatgttaacacgtattcgtaatgcacagttggctctacataaagatgtagcaatcccatattcaaagataaaatattctattgcaaatattcttaaagaagagggttatattaatgaattaactttgaataatggtactattactctttacttcaaatattataaaggcaaagctgctattgaaggcttgaggcgtataagtaaatctggaagaagagtttatgtaagtacacatgatattccttctgtacaaaatggattaggtatttgtattctttctacatcgattggtgtgattggctgtaataaagctcgttgctcaaaagtgggtggagagcttttatgtgaagtatggtag

SEQ ID NO: 9873 - DNA, 546 bp, Lawsonia intracellularis
atgtcaagaattggaaagttacctattatgattccagctggtgtggaaattacatttggtgaaaaaaatattagtataaaaggaccaaaggcaactcttgttacaccaaagtgtgaactcctttcttatgagcataaagaagataaaataattttaacttgtaattttgatacacgtgaatcattagcacagtatggattacgtcgaactcttttagctaattgtatagaaggggtaactaaaggtttttcaaaaacacttgaagtaattggtgtgggatatcgtgtttcagtaaaaggtaacatagttgaattgtctgtaggttattctcatcctgtacatattgaactacctgatggtattactgcaaaagcagaaggtcaaaagcttacaattatgggatctgataaagtcctagtaggtgagatggcagcacggattcgtcgtatacgtaaacctgaaccatataaaggtaaaggtattaagtatgaaagtgaaattatacgtcgaaaagctggtaagtcaggtggcaaggggaaaaagtag

SEQ ID NO: 9874 - DNA, 363 bp, Lawsonia intracellularis
atgagtattaaaagtaagaataaacttagacaacatcgtaaaattcgaattagaaaaaaaatttttggtactgctgaccaaccaagactagtaatttttagatctaacttacacatttatgcacaacttgttgatgatattacaggatctactcttttaacaacttcaactctttctttaaaagataatggaataaatattcgtgctaataaatctggttcaacattagttgggaaagagattgcacgtttagcaatagaaaaacagattataaaaattgtatttgatcgtaatggatatttgtaccatggtagggtaaaggcagtagcagatggtgctcgtgaaggcggattaaagttttag

SEQ ID NO: 9875 - DNA, 492 bp, Lawsonia intracellularis
atggaacaaagtgaattaggcttcattgaaaaagttgtttctttaaaccgtgtagctaaagtggtaaagggtggtcgtcgttttagctttagtgcgcttgtggttgttggtgatggtaaggggagtgttggttttggtcttgggaaagcacaagaagttcctgaagcattaagaaaagcaacagaacaagcacgaaaagcaatgatgaaaattcctcttattgaaggtactcttccatatgaaatacttggagagtttggtgcaggtagtgtaatgcttaagccagcatctcgtggtacaggtataattgctgggggtgcagttcgagctataatggaagcagcaggagttacagatgtacttgcaaaagctattggtacaaataaccctcataatgttcttcgagctacaatggcaggcttgtcagcattacgtagtgcacaattggtgagcaatattcgtggtaaattgttagaagcaccaaggaaataa

SEQ ID NO: 9876 - DNA, 450 bp, Lawsonia intracellularis
atgaacttaaccacactttacccatttttagaagagcgtaaattgcgtaaaagagtcgggcgtggttctgcttctggtttaggttgtacttcagggaaagggaataagggacaaaatgcccgctcaggtggaggcgttcgcccaggctttgaaggtggccaaatgccattacagcgacgtttaccaaaacatggatttaaaaatgcattttttaaagttgaatatgcaatttttaatttggattggttaacaactttttttaaagggaaaaatgaaattttacttgaagatatttatagccataaattatgctctgtgggtacccctgtaaaaattcttggttcaggtagcatttctaatatagtgacaattgaagcacataaatttagtcggtctgcattgaagaagcttcatgaagtaggtggtcaagcaaagattatagaaaaatag

SEQ ID NO: 9877 - DNA, 1308 bp, Lawsonia intracellularis
atggccgttagtactacaactcttaatgcagcacctgaattaaagataaaattattatggacagtaggacttttgtgtgcctatcgtattggcgtccatattcctgttccaggagttgacggaattgctcttactcatttttttgaaagtgtagcaggaaccttgtttggattatttgatatgttctcaggtggaggcttgagaaatgtatcagtgtttgcacttgggattatgccatatatttctgcttcaattattatgcagttattacaggtaattattcctgactttaagagaatggcaaaagaggaaggtgcagcaggacgatacaaaataacacaatatactcgttatggaacggtgattattactcttattcaaggaattggcattgctattggtcttgaaagtatgtatagtcctactaatatacctattgtattggaaccaggctgggtatttagaattgtaacagttttaaccttaactgcagggactgttctaattatgtggcttggtgagcaaatttcagaaaaaggtatcggtaatggaatatctttaattatattttctggaattgttgttggtattcctggtgcaatagtcaaaacatatcagttaataatacttggtgatatgaatatactaatcgcattagttttaatgttatttatgtttgctgtattaactggtgttgtttttatggaaagagctcaacgaagaattcctatacaatatgcaaaaagacagctaggaagaaaggtttatggtggacaatcaacacacttgcctctccgtgttaatacagcaggtgtaattccacctatttttgcttcaagtcttcttttatttcctgctacaatggctagttttgatatttctgattggttaaaagatattgcagtttggttttcgccatcaactatactttataattgtatttttttagtacttattttctttttttgttatttttatacagcaattatttttgattctaaagatatttcagaaaatttaaaaaaagctggtggttttattcctggtattcgtccaggagagaagacatgtgaatatcttgatggagtcctttcaagacttactctttgggggggggtatatatttcaattatttcaattttacctatgatgcttatttctcaatttaatgtcccattttattttggggggacaagtattcttattttagttggtgttgcaatggactttatgtctcaaattgagtcacatttcatatctaaacagtatgaagggctcatgaataaaaagactaaaggacgaggctaa

SEQ ID NO: 9878 - DNA, 771 bp, Lawsonia intracellularis
gtgaaaaaatatagaggtacattccttaaaaatgaaagagaaataggaattcttaaagaagcaaatcgtatggtagctaccatacttgaagaattagaaaaacaagttagacctggattatctactctttattttgaagacattgtgcaacaaatgtgtcgtgaattcaaagttaaaccagcattccagggttattatggatatccgtatgcactatgttgttctgtaaatgaagctgttgttcatggtgtcccatcagaaaaaaaaattcttcaagaaggagatatagttagctttgatgttggggttttataccaaggattttatggtgatgctgctaggacagttcctgtaggtactatttcatcggaagcatctcaacttatacagataacaagagaaagcttagaacttggtgtgttagagacaagagcaggaaatcatttatatgacatttcttctgcaattcagcatcatgtggaaagtgcaggctttcatatagttaaacgttttgtaggacatggaattggcatagggttgcatgaaaagcctgaagttcctaattttgttcctactgtaggtttaggaatacctttaaaggtaggaatggtattagcaattgagcctatggtaacaataggttctccagaggtagaaatattagaagataaatggacagctataacttgtgatagaagtttagctgctcatttcgagcacagcgttgctatacttccatctggaccttgtgtgttagatagtctagtataa

SEQ ID NO: 9879 - DNA, 369 bp, Lawsonia intracellularis
gtggctagaatagctggtattgatttgccaagaggtaaacgttcagatatagcattaagttatatttatggtgttggtagagtaacagctctaaaagttcttgatgctgtaggtattaactggagtcgtagtattgatgatctttctgctgaagagttgaatgaagttcgtaaagagcttgagaaaaattataaggtagaaggagagttacgtagagaagtgtcagctaatattaaacgtttaatggatattggctgctacagaggtcttaggcatcgaaagggtcttcctgttcatggtcagcgtactcatacaaatgcacgtacaagaaaaggaccaagaaaaggtgctgtaggaaagaaaaagtaa

SEQ ID NO: 9880 - DNA, 390 bp, Lawsonia intracellularis
atggctaaaccaaaacgtattgggaaaaaacgtgaaaagaaaaatattcctgttggagtagttcatattcaagcatcttttaacaatacaataattacatttacagacccacgtggaaatactattagttgggcaagttctggtcaaagtggttttaaaggttcacgtaaatcaactccttttgcagcacaagttgcagcagaacaggctgcacgtcgtgctcaagataatggtatgcgtactgtggggatatatgtaaaagggccaggttctggacgtgaatctgctatgcgtgctattaatgctgtaggatttaaagttgcttttattcgtgatattacccccattccacataatggttgtcgcccacctaagaggcgtcgtgtctag

SEQ ID NO: 9881 - DNA, 627 bp, Lawsonia intracellularis
ttggctaaatataatgatgccaaatgtcgtttatgtcgtcgtgaaggaactaagctttttttaaaaggtgatcgttgttttactgataagtgtgcatatgatcgtcgaccatatgctcctggacaacatggtcgtgtacggaaaaaaatgagtgattatgccatacaactacgtgagaaacaaaaagttcgtcgagtatatggtgtattagaaaagcagtttcgagaatattttgtccatgctgatatggcaaaaggtattacaggagtaaatttgctttcttatttagaacgtcgtcttgataatgttgtgtatcgtcttggacttgcaaattcacgcgttcaagcacgtcaacttattagacatggaatttttacattaaacggacataaggtcactatcccttcattgcaagttaatgttggagatagtattgaggtacctgaaaaaaatcgtaaaatatctgttgttgctgacgcacaatcgatagttggtcgtcgtgggtgcccatcttggcttgaattagatgcttccacttttaagggtgttgtaaaggcgctacctcagcgtgaagatattcaattccccattaatgagcatcttattgttgagctttactccaaatag

SEQ ID NO: 9882 - DNA, 1044 bp, Lawsonia intracellularis
atgctctttagagaaggaactaggcttattaattcacgtaactgggcaaaacttgtacgtccagaagcagtgataaataatatggaatccaatactacgacatacggacgttttgagtatgaaccacttgaacgtgggtatggtattactattggtaatgcattacgaagggtgttactttcatctcttcagggtgctgcatttgtatctgtaaaaattcttggtgttcaacatgagtttacaactattcctggaatacttgaagatgtaacagatattattcttaacctgaaacaggttcgtttagctatggatacagatgaaccacagcacctttctctttttgtatctaaaaaagggattgttactgccgctgatatccaaacgaatcaacatgttgaagttttaaatccagaacaacatattgcaacattaacagaagatattgagcttcgaatggagtttgaagttcgtatgggtaagggctatgttcctgcagaaatgcatgaagatcttcatgaggaaattggtcttattaagttagattcaagtttttcaccaattcgtaatgtaacttatgtagtagaacaagcacgtgttggtcagatgacaaactatgataagttagtgctggaagtatggacagatggttcagtttctcctgaagatgctattgcatacagtgctaaaattatcaaagatcaaatttctgtttttattaattttgatgagcgtatctcagggagtggtggaaatgaaggtagcggtagttcagatctgaatgataatctgtttaaaggtattgatgaacttgaactttctgtacgtgctacaaattgtttacgtagtgctaatatttcgactgttggagagcttgtccaaaaggcagaagctgatatgttaaagacaaagaattttgggaaaaaatctcttgatgaaattaaggcacttcttactagtatggggcttgattttggtatgaagattgacggatttgagaaaaaataccaagaatggaaaaggaagcaacatcatgaggcataa

SEQ ID NO: 9883 - DNA, 381 bp, Lawsonia intracellularis
atgaggcataaaaattctggtaaaaaattaaatagaaccccatctcatcgaaaagcattatttcggaatatggcaaatgaacttattaagcatggaaaaatttgtacaactgagacaaaagccaaagaattacggaggattgtagaacctcttatcacactggctttaagaaatgacttacattcacgtagattagcttttcaatcaatgggtgatcatcagttggtaaagcatctatttaataatgtagctccagcgtttgttaatgttcctggtggttatactagaattacgcgccttgcattaagaagaaaaggtgattgtgctcctatggcaatgattgagtttacttgtcaaaaaattgatgaaaagagtatttag

SEQ ID NO: 9884 - DNA, 1416 bp, Lawsonia intracellularis
atgaataacatttatcctatcattttgtgtggaggaagtggtactcgcttatggccgttatcaagagaatattatccaaaacaattcattaattttggttctggcactctatttgagaatacattgtcgtgtatagcttcgttaagaaatgtccaaaatcctatagtagtctgtaatgaggaacaccgtttttttgtttcgaaattgttacaacaacaaaatagggttgcaacaattattttagagccagaagggaaaaatacagcccctgcaattgcccttggagtatctgcggttagtgagttagaaagcgatcctcttattcttgttttgccttcagatcaccttatcggttctaattctatttttcactcagcagtaatgagtggaatttcagttgccattgaaggacattttgtaacatttggggtgaatcctacaggtccagagtcaggttttggttatttacaatatgggcaagaagttagtgatggtatttttaaaattttaaactttactgaaaagcctagtaaagctagggcaaaagagtttcttgcattaggcaattatgcatggaatagtggaatttttctttttcgtgcttcaacttatctaaatgagttagaattattagcaccacaaatttttagtgcttgtaagcaagggtgggatgagcgtactcaggatcccttaggttttttccgtcctaatagtcaaaagtttttacaatcaccttcaggttctattgattatgtcataatggaaaaaacagaaaagctttatatggttaaacttgaaaccaattggagtgatctgggttcatgggaatcattttataatgcagaggtacatgacagtatgggaaatgttgtatctggagacgttatagctcaagatactgaaaattgttaccttaattctacacaacgtcttgtatgtgcattaggtgttaaaaatattattgttgttgaaacagcagacgctgttctagttgtggatagaaatcaaacacaaaatgtaaaaaatttattggaacaattacgtatttcaggtcgtacagagtctgaaactcacatgcgtgttttccgtccttggggaagttatgaaacacttttttctagtacaggttataaagtaaaaaaaattactgtttctcctggagctacattatcacttcagttacatcaatatagagcagaacattggattgttgtatatggaatagctaatgttactataaataaagcagagcatatagtaaaagttaatcagtctatatatattcctgtaggtgtagaacaccggctagcaaactatggagaagaacctttggaagttattgaagtacagtcaggctcatatgttggagaggatgatataattcgccttgaagatgtttatggaagaacagagtaa

SEQ ID NO: 9885 - DNA, 1302 bp, Lawsonia intracellularis
atgattgatgagactgaaaaaccaaatgttgttgcattattcccgctagttatatttcttaccctctttattgggactggtatatttttaacttttatgggaacagagatggctttttatcagctttcagcaacagtcgctatcctcccagctatttgtataagcgtattacaggggaagtctaatttaagcaaaaatataacgatatttctctatggaatgggtgaaattaatatcgttactatgtgtttaatttatttattagcaggcgcatttgcttctgtaactacttctattggttgtgtttcagctacagttaattttggtctttctcttctttctccttcaatgattttacctggtctttttcttactggagcttttatctctacagcaatgggtacaagtatgggaactattgctgctatagctcctattgctgttggagtagggcagcaaacagatattagcctatcacttcttatgggagtagttataggtggagctatgtttggtgataatctttcttttatttctgatacaactattgctgcaacacgtagtcaaaattgtgagatgaaagataagtttcggatgaatttcttgatagcactaccagcagcactaattactatattcttactttgggctagtggtacatcttcctatgtggtgcataacgagtcatatgaatttataaaagttttaccatatcttgttattattactttagctatgataggtatgaatgtctttgtagtgttagctgttgggatacttttttcaggaatattaggtttaagcactacaaattattcttttttaatttgggcccaagatatctataaaggttttttggggatgaatgaaatatttgtactatcaatgcttatcgggggccttggagagcttataagatatcatggtggtattgcctggcttttaaaaatggtagatactttagtaactcatttatcaaaaagaaaatctccaaaggttggagaatggtgtataggtttacttgtaactttagctaacttatgtgttgctaataatacagtagcaattatcttaacagggaagatgagtaaagaaattgctgataaacatgggattagttgccgtaaaagcgctagtttattagatattttttcgtgtgtcatccaagggcttatcccgtatggtgcacagttattacttgcaggatccatttcacaggtttctccattttctatagcaattgaaaattggtactgtatggctttatttttagctgcttgtatctccatatggattgattaa

SEQ ID NO: 9886 - DNA, 1260 bp, Lawsonia intracellularis
atgaataatataattacagctattaaaggtttttctgacttatttcagccagaaagtaatatgttttcatacatagaacatactgctagagctattttttctctttataattatgaagagttaagaatacctcttcttgagcggacagaacttttttgtagaagtattggtttagaaacagatattgtacaaaaagaaatgtacacatttttagatcgtaaaaatcgatcacttacattacgaccagaagcaacagctagcattattagagcatatattgaaaataaaaaatatacacaagaagctgtgtctaaatttttaagtataggacccatgtttcgctatgaacgtcctcaaaaggggcgaatgcgacaatttcatcaagttaattgtgaatgtttaggagttacagatagttatatagatgctgaaataattattatgttaatgcaatttttaacagcattagagattaaggatattagattagaaattaactcattaggatgcgctgattgtcggccattatataaagatatattacagaagtggcttgatcagcttgacacacagactttatgtgatgattgtcagcgtagaaaagaaacaaatccattgagagtactagattgtaaagtttctttttgtaaagaaaagacaagtcaagctcctcactttttagactatcaatgtaaaacctgtcttgatcagttttcaacagtgacaactcttttaagcttagagaatattccatatattattaaccatcgtcttgtacgtggccttgattattatatgcgtacaacatttgaagtaatttcttctaatataggttctcaaggagccattgctgggggaggacgttacaatgggttggttgcacagcttggtggtcctgatatccctggtattggttttgcttgtggtatggagaggctagcattgcttctcccacgaaaagacttgccaaggcctgattttatgattggtgtttttatcgctgaaggaaaagataaagcattttctattagttcacaattacataaagcaggttttagtggcgaaatgttattcaacttaggtagcatgaaaagtttaatgagacatgctaataaggcaagagtacgttattgtttgttattaggaactgaagagttagcattgaattctatttctattaaaaatatggatacaggagtccaggaaaaaatttctttagataaggtcagttcttatttcataacaaagctaagtaaataa

SEQ ID NO: 9887 - DNA, 1800 bp, Lawsonia intracellularis
atgtctgaaagcaaaaaagaggttataatatgccagtcttgtgatggatggaagcgtagtcatacctgtggtgagttatcaataaaagatattggaaagcatgtaatactaatgggttgggtacaatcacgtcgggatcatggtggattaatttttgtagatttacgtgatcgctttggtataacccaagttgtttttagtccagatagctctttagaagcacattcaacagcacatattattcgtcctgaatacgttattgctgttgatggaattgttcgtatgcgtccagaagggatgattaacccaaatttggaaacaggacaaatagaaattttagtttcttcttggaagcttttaaatatttcgaaaacacctccttttcaaatagaagataatattgaaacaggagaaacactccgtttgcagtggcgatatttagatttacgtcgtccagtcatgaagaaaaatattatattgcgtagtaatgctatgcaaattatacgaaactatttatcttctcacggttttttagaaatagaaacaccatttcttacaaagtctacacctgaaggggctagagattttttagtaccaagtcgcttatatcatgggaagttatttgctcttcctcaatctccacagatttttaaacagttatgtatggttgctggtttagatcgatattttcagataactcgatgttttcgtgatgaagacttacgtgctgatagacagccagagtttactcagattgatattgaaatgagctttgttaacgaagaacaggtaatggaatgtgccgaacatttaatgcaaactctttttcaagaagcattatctacagagatttcacttcctttcccaagaataacatggtttgaagcaatgaagcaatatggagtggataagccggatatacgatttgggttagagcttcatgatgtgacatctatagtacatatgtcagagtttaaattgttttcacatgcaaagcttgtaaaggcaataagggtcccaggaggagcttcattaagtcggaaagaaattgatgactttacagagtttgtaaaaaattatggagcacagggacttgcatggatcaaaattaatgaagaggaatggcagtcaccaattgcaaagtttttatcagagaaagaaaaagaagagctttctatagaactgaatgtatcaaaaggagatatattatttttccaggcaggttctcctgaagttgtaaatgctgctcttggtaatttacgtgttcaattaggtaactatttaggattaatccctcaaaatacatggtcttttgtgtgggtaacagacttccctctttatgaatacagtgaggaagaaaggcgttatgtttcttgccaccatccttttactgcacctaaagaaagtgatattcattttatgaagactaatcctgcagaagttaaagctcgagcatatgatttggtccttaatggtaatgaagtaggtgggggctccatacgtattcatcaagctgagatacagcgtcatttgtttgaggatttaggattttctttagaagatattcaacaacaatttggtttttttatagaagctcttgagtatggcgcgccaccacatggtggtattgcctttggattagatagattagttatgcttatgagtaactctgagtctatcagagatgttattgcattcccaaaaactcaaaagggtgcttgtcctttaacaggagcgccagactttgtttcttcaaaacaattacgtgaacttggtttaactttacgtaataaaaattaa

SEQ ID NO: 9888 - DNA, 993 bp, Lawsonia intracellularis
atgaatcagaatagctatactaaacctcttatagaatgtaatagtttaacaaaacattttgctataaggcatggtgtatggcaacgtatacaaggatatgtacatgctgttgaagaggtttcactaacagtttatcagggtgaaacttttggtcttgttggtgaatcaggttgtggaaagtctacattaagccgtatgattgttgggttattacacccatctagcggtgagttgttttttaatggtcaatccatttttgattcagtgaacaaaaaagctcttcgacataaattacagatgatttttcaagatccattttcttctttaaatccacgcttacctataggaatttctattgcagaacctttaacagttttaaaggtatctgcaaagaaaaagttagaaagtatattagagatattagagtttgtaggtcttcaaccagaacaaaaagatcgatatcctcatgagttctctggaggacagcgtcaacgtatagctattgctagagctcttattgctcatcctgaattacttgtatgtgatgaggctgtatcggctttagatgcctctgttcaagcacaagtattaaacttactaaaagatcttcaagcacattttggtttgacttatatctttatctctcatgatttagctgtagtaggatatatgagtgatagggttgcagttatgtatcttggaagaatagtagagttagccccaacaaaatctttgtttgaaagaccagcacatccatatacgcaaattttattagactctatccctattcctgatcctttttctcgaaaaacatatagattactaaaaggggaacttccaagctctctttcccctccatctggttgtccttttcatcttcaatgtccaaaagttatgccaatttgtcgtaaagaacttcctcaacttacggtattaaaacagacagaactagtagaaaaaaatagatttgttcgttgttttctatatacataa

SEQ ID NO: 9889 - DNA, 765 bp, Lawsonia intracellularis
atgagtcaaatatcccctttatactatggaataattcctgctagatacggttcttcacgtcttcctgggaaaccattaatagatatttggggaaaacctatgttttggtatgtatatcagaatgcagtagaatctaatatttttagatctgttgtattagcaacagatagcgaagaaattgctgaatcagcccatcagttatcaattccttatgttatgacaagtgttgaacacattagtggtacagatcgtgtgtatgaagcagctataaagatgaatatagaacctgactctgtagtagtaaatatccagggagatgaaccattagtaaagccagaagctattcaacaactagtggagccatttattgatgtttctattcaggttactaccctttctacaagaattacagcaaatcaagcaatgttacctcatcaagttaaagttgttgtgtcttctaatggtgatgctttgtatttttcaagggcagccattccttatttaagagataacgatactgatggatattacttaggtcatattgggttatacgcttttcgtatgcatacgttggataaattcgttcatttgccaccgtcccaattagaacaatttgaaaagttagaacaactaaggttgctagagaataatataccaattcgtgtagtaaacactaaccatacttctcagggtgttgatacagtagaagatttagaaattgttcaaggattattagctcaaagaatggaggcagtaagtcgttaa

SEQ ID NO: 9890 - DNA, 1131 bp, Lawsonia intracellularis
atgaaagctttgctagcactagaagatggatttattcttgaaggtcaatctattaatggtcactgtgaaagtagtggtgaagttatttttaatactggaatgacaggttaccaagaaatccttactgatccatcttactatggacaaatggtatgtatgacatggcctctaataggtaattatggtattaataaagaagatatggagtctgaaaaaattcatgtatctgcattaattgttaaagagtgttgtagaaacccttcaaactggaggtctgaaacatctttacctaaatttttacaagaatataacatagctgggattgaaggtattgatactagagcactgacaagacacattcggataaacggagcaatgaggggtattatttctacctcgataacagaccctaatgatcttatattaagagtaaagaaagttccttctatggaagggcagaattatgttacaaaggttgctcctaattccccatgggtgttgtatgggcaatgtgttgtacctgctgatattaaagaggatggaagttttctttggaaacaaaataagatacctcttattgtttatgattatggtattaagtggaatattattcggttgctagaaggagcaggttttgatccattaatggtaccaccattattttctttagagcaagtaaaagcatcaggggctaaagctatatttttatctaatggtcctggcgatcctggaacacttatagatgagattcaaattattcgtgaattaatggagtattatcctattgcaggaatttgtcttggtcatcaattattagggcatgctgttggcggtactacaagaaaattgacttttggtcatcatggttctaatcatcctataaaaaatcttgctacaggtcatatagaaatttcctcacaaaatcatgggttttgtgtaaactttgaaagtaataatgatatagaagttactcatattaacttgaacgataatacgttagaaggtttcattcataaaacaaaacctattcttgcagtccaacatcatcctgaagcaagtccaggtcctatggatagccaatatttttttactcgctttaaggaggtagtactattaaagttaggatgctaa

SEQ ID NO: 9891 - DNA, 828 bp, Lawsonia intracellularis
atgtccaacgaattgacacgagtcagacagcaacttagccagattcgtacacagttacgtaaggataaaatccttcctgctattcaggcattacatcatgcaataacagtgattataaaaacaccattattaaaagcagaaaaagaagagtttgaacatatgcttcatgatgctttaggaagtattatggagcatccaaaggtgcgtgaaatttttcctctaactattatatatacaaaaggtcaagagcgccaattattgagcgatgtttatgagttgttaacagttgtagattcaactattcaggatgctgcaaaagaagcattaaaagattttgaaacacgcagagagagattgtttaatgaggggcagaagcagcttgaaaaaggaaatattttagaagctagagaagcttttagtaaacttgctaaagaatttaaagatgatccagaattaatgggccagattggtaaaatgtatcttaaatatgagtattatgaagatgcaattatatacttagagacagcgttaactattaatcctgagctagcatacctttataattacattggaatagcactacgtaaagttggaaagtttgatatagctgaaaaatactatctcagggcatctaagtatttagggaaagatcctaatcttttttttaatcttgggagattatatattgattggggagattgggaaaaggctattgtttcggcttcagcagcactaaaagtacgtccagattttatggaagccaaaaagttacgtaagtatgcagaaaggatgaaacataagaactcttcagtactttttgaagagtga

SEQ ID NO: 9892 - DNA, 660 bp, Lawsonia intracellularis
atgaaaaaaaagcatgctttgtatgaagaaaactattttcatctttttaacaatagggttgttacaccttcatactccctgggcttacccttctttaatccacccattcctgattcaacattatttaaccctttagcctatctctttggtagtatttattatctttataagggcatatggagaaaagctttaatacttcttgcacttaatattcctgctatgttccagccattacctattatacaaccacttactacacctttagagatcatctcttctatatgtttagtcatagggtgctttatactttgtatgatgatatttcttcaatatactgaggttataatagggcttattattttacttctaccaatattcatatactattgttttctttctactaatcaacatatttcaatcattgctactataagtttttggtcaacattaacttcattatttatattttttctacttaggaaaaaaagtaaccaattagtattaattcttttaatcggcattattggttggatggttggggtatctccacaaacattattatggtcattctttactgtattaccctacactcttgctggaattatgggtaaatatgatgtataccgtagtaaagtattacatgaaacattctactggtag

SEQ ID NO: 9893 - DNA, 1182 bp, Lawsonia intracellularis
gtgtttctttttataggagttcctatgcatggtttatttttattaaaaggtctaatcattttatggggtattggtgctgggttaataagttgttcttcaaatgaacaagcaagtatgccagctccacttgttgaagtgatgaccattgaatcaaaagatacgcctattgttttaacatttgttggacaaacagaaggctcaaggtctgttgaagttcgtgctcaggtttcaggcattttaatgaatagagcctatgaagaagggcaatatgttgaaaaaggacagcttctttttgaaatagaacctgatacctataaagctaacttagagcaagcccaaagtatgatggagcaagctaaagcaaagtttgttcaagctcaacaggaacgcgatcgtattcttccattgtataaaaagaatgccgttagtcaaaaggatcgtgatagtgctgtagcttcttataatgctgcaaaggcagatcttgatgctgcaaaagctgaagttacagaagctaaaattaaattaggatatgcttatgtaaaatcacctgtttctggttatgcaagtaaagaaaataagacaataggtaatcttattacggcaggttcatctagtgatagtttgcttacagtggttaatcaagtaaatcctatatatgcaaatttttctattccaagtcctcaatacatgcatataaagatgttaaagtctgaaaatcttcttactattgataatcctacggcaacaatgacattagcagatggaagtatatataaagaaacaggtaaagtaacttttattgataaacaagtgaatccatcaaccagtgttgttgcagctagggcagagtttattaatccagacgctcatgtgttaccaggacaatttgtacgtgtgaatgttcaaggtgttatattagtaaatgctattttaataccacagaaagctctcattcaaacacagaaaggtactgtggtggcagttgttaacaaggaaaataaagtagagatgcgtccagtaagaattggacaaaattatggagaaaatttttttgtatatagtggactctccaatggagatcgtgtgattgttgaagggaataacaaggcaatccctggtcaacctgtacgtctaaaagaatctatacaacccgcaatgaatgaagcaggcggtaagaagtaa

SEQ ID NO: 9894 - DNA, 3150 bp, Lawsonia intracellularis
atgagtaataaggagaatattacagaagtgaaagaaggattttttcttcgccgtcctattttctctactgttatttcattatttattacatttatagggatattagctattttttctttgccaattgagcagtatcctaatttaacacctccacaggtagagataaaaacaacatataatggtgcaagtgctaatactgtatctgaaagtgttgcttcagtccttgaagaacaagtgaacggcgttgataatatgagttatatgaactctgttagtgcaggaacaggtactatgactcttactgttacctttgatgtaggtacagatcctgaagaggccactattaacgttaataacagggtacaattagcaactccaaaacttcctcaagacgtacagcgaacagggatttctgttttaaaaaaatctccagcaattttacaaattgtctttcttacttctccagatgaacgctatgatacaatttttcttagtaactatgcgctacttaacattgttgatgatttaaagcgtgttcctggtgtaggggatgttcaaaattttgcaggacaagattatgctattagagtctggttaaaaccagatcgtatggaacagttaaaaattacaccaaatgatgtaattaatgctattaatgatcaaaatattcagattggtgccggacgtattggggatgagcctgtatcttcgtctattggggtaacttggcagataattacaaagggtcggcttgaaacgccagaacaatttgaaaatattattcttcgtacagagcctgatggatcaatcttacggctaaaagatattgcacggatagaacttggtgctcaagtttacaattttacaggtaggcaagatggacttgctgctattcctataggcatttttttagcaccaggtgctaatgcacttacaacagctgaagctgttcgtgttaagatgaaagaattatcaacacagtttcctgttggtgtagcctacgatatcccttacgatacaactacatttgttaatattgctatcaaagaagttgttaaaacattatgtgaggcaatgtttcttgtttttttagtggtttatttatttctacagaattggagagcaacacttataccttgtttggcagtaccagtgtctattgtaggtacgtttgcaggtatgcatctattaggtttttctattaatacattaacaatgtttggacttgtccttgctattggaattgttgttgatgatgcaatcgttgtattagaaaatgttgagcgacatatatctgaagggcagccagtgcatatagcaacagctaaagcaatgtcagaagtaactagtgctattattgctattgtgcttgtgttatgtgctgtttttatccctgtagcttttataggcggccttgctggacgtatgtaccaacaatttgcaatcactatcgctgtctctgtagtgatttcaggtgttgtagcattaacttttactccagcgttatgtattgttttattaagaaattatgaaccaacaactagtagtttttttaaaaattttaatgattggtttgctaatataacaggaaagtatattcatattgttaaggttttattacgtcgtactttattaactatttgccttttttgtttagtattattaggaaccacagcacttataaaaattgttccaagtggattagttccagatgaagatcagggatattttatatctttagttatgctgcctgatggagcttctctttctcgtacttctaagactgctagtatccttgagcaacagcttattaaagattcttctgtagagcatgttatgagtttttctggattagatgctattagtggtgcttctaaaacaaatgctgctacaatatttgttacacttaaaccatggggagagcgaaagaagaaagatgaatcttcttttgctattgtccggaaagtgtttgggctaggtagtgagatacctgaaggatatgttgttgcttttaatcctccaccaataagtggtatgagtaatactggcgggtttgagttgtgggtgcaaaatcgtataggagctagtgaagttgagctttatactatgatacagaaggtacttcaaaaagctcggggacgtaaggagttacaaggactaaatagttcatttggtgtaaatgccccacagttatttatagaacttgatcgtgagcaagctgaaactttgggagttagtatttcagatgttttttcagctatgcagtctacatttggctcctattatgttaatgattttaatctatatggtcgaacatttcgtgtatatacacagtcggagtctgactacagagctcttccagaaaatataaaggaagtttatgttcgtaataggaatggagagatggtgcctattatctctttactaaaggtaaaacctattgctggctctcaaattatagaacgttttaatggttttcctgctgctaaaataatgggaagtcctgcatctggatatagttctggtcaggctatggatgctattgagtctgtagcaaaagaagtcttaccagaagggtatacattagcgtggtcaggttcttcctaccaagagcgggttgtgagcggtggtggatcatttgtacttcttttatctttaattatggtatttctcatccttgcagcacaatatgaaagttggtctttacctttgacgatattaacagcagttccttttgcagcttttggtgctatcttagccatttggttaagaggaattgcaaatgatgtttattttcaagttgctctaattacacttgtaggtttatcagctaaaaatgcaattttgattgttgaatttgcagtagaaaaatatcgtctagatggaatgaatattattgatgccattgaagaggcttcacgattacgttttcgtcctattattatgacatctttagcatttattcttggatgcgttccacttgctattagtaccggagctggagctgccagccgtcatgcaataggaacaagtgttattggtgggatgttattggctacgattattgcaccattatttatcccattctttttccgctggattatggtgatttcagaaaaattttcaagtaagaaatccactcaggagtaa

SEQ ID NO: 9895 - DNA, 1380 bp, Lawsonia intracellularis
atgaaaagattgttactctgtattataacatgtgttattgtatcaagttgctcttttgctccagattacaatcgaccacatttagagttacctgaggtatgggttagttcaccagagacaggagttcctgcttctatgcagtggtggaaacgctttaatgattctacacttgatattttagtagcagaagctttgcagcataatagagacttaattgcagctgtggccagagtagattatgcacaagctcagttaggagttgctcgatcagatttgtttccacatttttcaggaaatgctcaagcaacacctgtatgggtagatcataagagggttacagatggacaatctccatatagcgcaaacttttcagcaagttgggaaattgatatttggggaaagatacggaatgccaaagatgctgcattttctcaattaatggctacagaagcagaaaaagagggtgtttttctttctattgctgcccaaacagcaaatgcttattttttgttgaggagccttgacttacaatgttctattgcagagaggacagtaaaaacacgtgaagatgcattaagtatctatactgcacaatatcaaaaaggatttattaacaaattagatttaactcgagcaaaaacagaagttgagacagcacgtacagcactttatcaaaaacgtattgcacaagagaatgctgaaacagctttatctgttttgttaggccgttctccacggttaattatggacacagcaattgagcgtggggtatctatgaaagatttatcttgtattcctgttattcctcaaggtattccttcagagcttttagaaagacgtcctgatatacgtcaagctgaatatacgttaaaagctactagtgcaaatattggtgtggcaagagcagcttggttaccatctatttcattaacaggattatttggtattgtaagcccacatttaagtgatttattaaaaaatcctttaaaaacatggagttatggggaaactggaactgtgcctattttagattttggtcaggtatactataatgtggaagcagcccaggcaaaagaacgtgaagcattagctaactatgaaaaaacagtacaaaatgcttttaaagatattcatgatgctcttatacggcaatatgaatcaaagaatatagttaattcacttgaacgaatggtgaaagagttacgtatagctgtacatcttgcacgtactctttacgataatggttatacatcttatcttgatgtgttagatgcagaacgtgctctttttcaaagtgaactagatcttgctagtgcttggagtgatcgcctatcttctattgtacaagtttgtttagcattaggaggcagttgggaataa

SEQ ID NO: 9896 - DNA, 426 bp, Lawsonia intracellularis
atgccaatttatgaatattattgtacacaatgtgataatacctttgaagagtggtcaaagaatgcgtcatctcatgaacataaaaagtgtcccaactgtggtggagatgcaaaacaacttatttctaatacagcgtttatccttaaaggaagtggttggtatgtaacagagtatggaaataaaaaaagtgaagagcagaacaaaaaaaatacttccgataaaacagaggtgtcatctgactcttctagcactacattagagtcttctggtgatggaagtagttctacagagactcataagacaccttcaataagtgagcctcaaaaaacatctaaagaaaagcctaaagttcaacagaacactaagtctgctgtaacagcatcaagtgaagtaacaagcagtaatgaagcaactattagtaagtaa

SEQ ID NO: 9897 - DNA, 1332 bp, Lawsonia intracellularis
atgattgatcgttatacacgtaaggaaatgggtcgtatttggacgttaaacaatcgttaccagacatggctacgtgtagagctagcagtatgtttagcttggaataagttgggtgtaatttcagatgatgccttcaagaccattcaggaacgtgctgtgattgatgtgaatcgtatacttgaaattgagagtattacacatcatgatgttattgcatttttaacagctctagaggagcaaataggaccagaagctcgttttattcatttaggttgtacttcatctgatattgtagatacagcaacgtcacttttacttatagaggcaggagagcttatattaaaaggttttgataagctacttacatctattgaatcccttgcattaaaacatcaagggttgctttgtatgggtagaacacatggggttcatgctgaaccaacaacatttgccttaaagtttgctaatttttttgctgaaatccaacgagataaagagcgttttgtacaagcatttaatggtattcatgttggaaaattttcaggtgctgttggtacatacacatttctcactccagaagttgaaactattgcatgtgatatccttgggcttaaacctgatactatttctactcaagttatacagcgagaccgtcatgctgaatatttcacagctcttgctattacagcaggaagtattgagcgactttgtgtagaattacgtcacttacaaagaacagaagtacgagaggtagaggaaggttttcagaagggacaaaaaggttcttctgctatgcctcataaaaaaaatccaatttctgcagaaaacatgacagggctttctcgccttatccgaggaaatgttcttgctgcattagagaaccaagcattatggcatgaaagagatattagtcattcatcagtagagcgtgtaataatgcctgatacaactatattgatggactatatctttcatcgtttatctgggatattagatgaattaatcgttcttccagaaaatatagaatgtaatatgcaggcctcatttggtttattttattcacaacgaattttgaatgctctaatagaatctgggatgggtcgtcaggaagcttatgtttctgtacagcgtaatgctatgcagagttgggagactaaacaaccttttcaagaagttattatggatgatacaaatattgtatcttgtttaggtcaagaaatgttagagaagttattcgatactagtttttatcttcgttatgaaaaagttatattagggcgaatatttggtgaatctactttacagaaatatcaagcaaataagaaaaattaa

SEQ ID NO: 9898 - DNA, 564 bp, Lawsonia intracellularis
atggatattttaaaaaaacgattagcaaaaattttttttgaacgttcatataaagaaggaaattttactttaagttcaggccgtaagagcgattattattttgattgcagacaaacagcattacatcctgaaggggcttggttaataggaaatcttcttaatgcattacttgttgatgtagatatttcggcagtgggaggaatgaccttaggtgctgatcctcttatttcagcaataactgttatttcatatgaattagataggcctctttcaggacttattgtccgtaaagaggcaaagttacatggaactgctcaatatgtcgaaggtcttgcaaacgtccattctggagatagagttgctgttattgaagatgttgtaactaccggaaactctttacttttagcatgcgaacgtattaaagcttccggattgactattgctattctctgtacaatatttgatcgtgaagaaggagggaaagaatttcttcaggaagctggttatgaattacgatctctttttacccgtaaagagcttgtagaccttgcaactagtctataa

SEQ ID NO: 9899 - DNA, 906 bp, Lawsonia intracellularis
ttggaggatgcttttttttttactataggtatccacttaacaacatttaatacttttataagtataaaagatatctttcaagtaaataaaatagctattgctgaaatgcattctagcatgattccaggaagaagggataatgtatctcttagaaaaccaagaaatcaggaaggtacttcgtatattagtcagttaaagaataggacagttcagtggaatgatgcttgggtaaaacgatcgttaactttttttgatttttattggcctgaagcatatacagtattccaaggtattccttttcaggaatataaagataaagaagtaaactcatttaaagtaaaccagtgggtagatagtttttgtggagagatccatgttgaaaaggaagcagaatattgggtttcatggtttcatcaatatttacgtatgcctaatagttctatagagggcattcgcaagctttattggaaggaaaatgaacaaggtgaattaaagattgttggtatgaagtggattcctcaggagcttgatttagaatcttcatatttagaaagtataacttccaaaattacagcttttatcgaagattggaggtttgcttgggaaacaggggatgttgaaaagtatgctgtttattatgccgaagattctattcagggtgataggcgtggaaaagacgcaattatagagcataaaagatcaacttggaatacaaggaagccaaaagaagtctttttaacaggtctgcgtgttatggctgtaaaagatggtattcaggttgatatggcacaaaggtttcatgatgcgttagcctatagtgataaaggaataaagacattattgttacgtcctactggcaaatcatgggttattgtccgtgaagattggagtgagatactacaatga

SEQ ID NO: 9900 - DNA, 936 bp, Lawsonia intracellularis
atgaatacaaaaagtagcatgttaagcctcattcttatgcatgacgatggtgaagcacgtagtatacgtataagcaaaagaggtctatggctactagtaatacttacaattttagctcctatagctggtcttataggtttatgggttggttgggaagcttgggaatctatgtctaactggcaacaagaaaaacttgcttaccaaactcagattgatgaattacgtgttcagttagaaagatttgctacattagaagcattattaaaacgtcaagatgctgcacttggtagtaaagttgataatcctcagctacagaaagaacgccaagtaaatacatcagaaaaaaaggatgtaaaaaaaactatagaggagaatgaaggagtagcaaaaaattcttcatctatgggtacaatcatgcctcctaaagctatcccccagtcttctatagtaccaacatccactggttcaggggttaaggaaatatcgcatgcttttgaatctcattcaagtgataagcaaaattatgaagggaatattcatactacttctatacaaccttcagtagttacaggaaaaagtgctcatacaacaggagagcaaagttctttcattgactatggagttgtcaaagttgaaaacgttcaaaagcagattatacaaggaaaacgtattcaagcacaaataagtttatttaatacagaaaaagttcctcaattatctggccacgttcagtttgcacttattactaatgatgggaaaaagtatgcgctctctggttctgatacaagttttcgtataacacgctttaaaagcatgttcatagattctgagttgccagtatcggatgcaattgcacaaaagagtaaattacttatagaagtagtttctggtgataaagttgttttccgtcaattatatcctctttctgagaaatag

SEQ ID NO: 9901 - DNA, 477 bp, Lawsonia intracellularis
atgtctaaagagtctctatggaaaagtccatggtttaagtatcttttaggcggctttatattggggataattgttattgtggggattaactggggtatgaaggtaacagactcaaggccattttgtgcaagttgtcacataatggagcaggcagcagtaacaaataagttatccatacatgctaacttatcttgtaatgattgccatgcaccacatgagttatggagaaaaattccatttaaagcaaaggagggaatccgagatttttatatgaatacaattgggaatgcacagttaccgattattccaggaacagaaacaaaagaagtagttaatgaaaactgtaaggcatgtcatgctatatcaaatatgactgtctcaagtacagaggcaaaaccctattgcgtggattgtcaccgtgatatgaaacacatgcatatgcagccaatcagtaaaaggatagtagccgatgattaa

SEQ ID NO: 9902 - DNA, 1554 bp, Lawsonia intracellularis
atgattaatcaaattatattaaagagtgtatatgggctgttactttgtttagtggttgttctttctgggtgtggtgatgtagatacagagttaaaaacaccagaatataacacaggattacctgcagatcatttaggtaatcttgcttttaaaaaaatatttcctttacattatgcatcatatgaattgaataatgaaagtagtattatgacagtatataagggctccgttccttatatgaagaatgataataaagatcctttaccagaaggatacaagtatgcacaaccttatttgaaaaatctttggctaggttatccttttatgtatgattatcgtgaatctcggggccatactcatgctataggagatgtcctagactcagatcgtcctaatcgttatgcatttaaaagtggtcttcctgctacttgctggaactgtaagactccacagatgcttaagtggaccaaagatgatggtaatgcattttggtcaaaagatatgaatgagttccgtgaacgacttcatccagaagatgatactgtaggatgtgtcaattgtcataatccacagacaatggaactacagctttatagtgaacctcttaaagattatttagtatctgtaggaaaagatcctgataaactttcaaggcaagaaatgcgttcgttagtttgtgcacagtgccatgtagaatactactttgaaaagacaggtgtgcctgctaaaccagtcttcccatgggcaaaaggatttaatcctgaagatatgtatcaatattataaagaacatggtgattctactattcctggatttgaaggccaattttatgattggatacatccagtttcaaaaacacctatgattaagattcaacatcctgaatatgagacatggattgatggtcctcatggttcagctggtgtgacatgtgctgattgtcatatgccttatatacgaggagagaatggtcaaaagatgtctagtcactattggacatctcctcttaaagacccagagatgagggcatgtcgtcagtgtcatgctgataaaagtccagagttcttaaaagagagtgttgtttctgtccaaaaagcaacatttgatcaattgttgatagctcaggagctttctgtaaaagcccatgaagcagtacggttagctgatgaatatacaggtccaagagctaataattatgatcaactcatgatccaagcaagagatatgatccgtaaaggacaactattctgggattatgtatctgctgaaaatggagttggattccataaccctgtaaaagcattgaataccttggcatcttcaatacaatatagtcaagaagctattaacctggctatggaggcaacaaaatatgccattgggccaaaccttcaaggagatattaaagaaatagttccacctattttggttatgtctcgtaaattacaacaagatccagagtatcttaaaacaaacccttggtttaagtatctaaaagtactaccaaaagctgaaattgaatgggatggtacaaaatacttaggtgataaataa

SEQ ID NO: 9903 - DNA, 1233 bp, Lawsonia intracellularis
atgcaaattcttgtacaaaaatttggaggaacttctgttgctacattagaatgtctaaaacaagtgcaacagaaagtgactaatgctcttaataacggatttaaagttgttgttgtcctttcagctaaggcaggaaaaacaaatacattattagagcttgcacactcatgtgcagaaaaccctgaccctttagaacttgatagtcttctttctactggggaacatgcatctattacactttttagtctattacttaacaagcaaggtataaaaacacgttccttacttggttggcaaattcctatcttaacaaataatgactttggacaagcaaggattatttccattaatggagacatgctttataagcagcttaaaaattatgatgctcttattatagcaggatttcaaggagttacacaagaaggacaaatcactacccttggacgtggaggttcagatacctctgctgtagctattgcggcttctttaggctcatgcaaatgtgaaatttatacagacgtggaaggtgtttatacaaccgatccaaacttatgtacaaaagctagaaagcttgcatatgttagttatgacgaaatgcttgaaatggcctctatgggtgctaaagtattacagattcgatctgtagagtttgcaaaaaaatacaatgtccctataaaagtactttctacatttagtaacgcatcaggaacaatggttactcaggagaattcaattatggaagctgttcttgtttctagtattgcatatgataatgatcaagcacgtgttactctctgtgatattccacatcacattggaacagcagcgtcaatatttgggcctctagctgaacaacacatccttgtagatatgattattcaagcttcaagtagaaataatctgacagacataacttttactgtatctcgtaaagatctaactagagcatgtaatctaatggaagagctaattaagtctattggagggaaaagcgttgaatgtgctactaatgttgcaaaagtttctctcattggtgttggtatgcgaaaccatgctggggttgctgcaaaagcttttaatgcattaaaagatgaaaatattgatattttattaattagtacatcagaaataaaaatttcttgtttaatagaagaaaagtatacagagcttgctgttcggacactccatgatgtatttgaattacaaaatgatgttgctagtctttcatag

SEQ ID NO: 9904 - DNA, 603 bp, Lawsonia intracellularis
atgtataataatttgcagaacacaccacctatgtcctctatagttacaaaaacttatacacaaaattctcctccctctgtaatatttactatttctaacccgaatagtatgacttattttggacaatatatagcaactcttcttgtaaactattcttttatgcctgttattttactctacggagaagttggaagtggcaaaacaacctttactcgtggattagtacaacatttcctgtataatgaatatgctgaagtctcaagccctagttttactatttgtaactattatccaacaaatcctactgttatacattgtgatctttatcgctgctctcatacaatccctgaagagatatatgaattgctttatgatcaccaagggttagtaatcatagaatgggcagaatatctcccagaagaactatttcctactgagtgtattattttttctctttcactagatgaaaaaaatactcgacaaatatcgtgttatcatcatggagtaatctcagctaaaattattgactctctgatacaacatcaacaggtaatccaattaaagctaatgaatacacaaaatctctcttcacctatagtataa

SEQ ID NO: 9905 - DNA, 897 bp, Lawsonia intracellularis
atggaacaatatcatggtcttttggttgtaaataagcctcaaggaattacttcagcagcttgtacgtattatttaaaaaaaatggggcaaagaaaaattggccatgcaggaacattagatcctatggcacaaggtgtgttgcttatccttttaggacatgggacaaaaatttttaactatcttcttgaaggaggagaaaaagtatataaggcaacagtttgttttggacaaactacagatacttgggatagagaaggaaaagtccttacaacacagagttgggaacatattacttcagaagaggttagggaacatattttttcttggaaaggtataaacaagcagcttatcccaccatattctgctgctaaatatcaggggcagcctttatatgctttatcccgtaaaggggaaaacactccacataaaacaaagaaaatagaaatttcatgtgtggaagttcttactattaacctcccatatgtaacctttcgagttacatgtagttctggtacctatatacgctctctagcccacagcttggggatgcgaatgaggtgtggggctgttctcacagagctgactcgagagtatagttatccttttgggcttgatacagcaattccatttgaggatcttgtaaccaatccagatttattactagatcggattattcctattacagcagcattgcctgactggtcaattgttgttgttaataaaagtgaggtttcacagattaaaaatggtattcccctttttagaagagatacaacatgtctctcaggtaaaaagacagtacttttgctggaagatggaacacctttagcacttgctgaagcaatgaatacttctaatggagctgtatggactttactcagaggattatggacataa

SEQ ID NO: 9906 - DNA, 2211 bp, Lawsonia intracellularis
atgagctttagaaaaccccccattcgtttagctactcaagttggtggtaaagaaattatttttgaaactggttatatggctacacaggcaaatggttctcttacagttcaatgtggtggtaccattgttcttgtaacagtttgttctcaaccccttgagtctgacaagggttttttcccccttactgtggaatactcagaaaagatgtatgctgcaggaagaatccctggaagcttttttagacgagaaataggacgtcctagtgaacgtgaaacacttatttctcgactaattgatcgtcctattcgtccaatgtttcctaaaggcttagcagaagatgtccaaattttggctaatgtaatttcttcagatcaagaaaatgaatctgatattttagcagtaacaggggcatcagcagctgtaatgctttcttctttaccttttgagtgtgctatagcagctgggcgtattggacgtttaaatggtcagtttgtattaaatcctacaattaatgaaatagaattaagtgatttaaatattgtttttgctgcgtcttcagaggctgttgtaatggttgaaggtgaagcaaatgttgttgaagaggaaatcattattgaggctcttgaatggggtcataaagaaattcagccaatcataaccctccaaaataaaatccaagaacttgctggacgaaataaaataccatttgttcctgttgaagagaatatagttttttctaaaaaagtagaagaattagcggataaatttggtatagtagaagctatgcaagttaaagaaaagcaatttcgtaaagaagctcgtaaagctgttaaggaaaaagtgttagctatattaaaagaagatcctctttatgctgaacatagtgatatacttaatacagtaagtgaaattattggaaatttagaaaagaagattgttcgtcaaagaatagtaaaagaaaatttacgtattgatggacgtgatacaataacagtgcgtcctatagcaattgaggtaggtttacttccacgtacgcatggttcagccctctttactcgtggtgaaacacagtcattatgtattacaacattaggaagttcaacagataatcagagagtagattcacttgcaggagatacagttaaaaattttatgcttcattataatttccctcctttttctgtaggagaagtaaagcccgttcgtgtatctagacgtgaaattggtcatggtgcattagcagaaaaggcacttaaatatattcttccttctcaaaatacgtttccttttacagtccgtatcgttgctgaaacattagaatctaatggctcttcttctatggctgctatatgtggtggttgtttatcattgatggacgctggtgtcccaatttctgctccagtggctggtgtagcaatggggctgattaaagaagatgatcaatttattgttttaacagatataattggtgatgaagacgcctttggtgacatggattttaagattgcaggcacaactaagggtattacagctgttcaaatggatattaaaattactggcttgactacagatgtaatgcgcaaagcaatggagcaagcacgtgaggctcgtatacatattcttagtgaaatggcaaaagcattagatgtcccacgttctaacctttcacagtatgcaccacaacacgctgagcttgtagtaaatcctgatgctattcggatgattattggtcctggtggtaaaaatattaaacagattacaactgttactggtgcagctattgatattaatgatagtggaaaaatttcaatttttgctcctacatctgaagcaatggaacaagcaaaacagatgattttatattatgatcaacgtccagaattaggtaaaaactataaggggaaagttcgtaaaattttagaaataggtgctattttagaaattatgcctaatgtggaagcatttgttcatatttcccaacttgctgttgagcatattgcacaggtgactgatgttgtacagctaggtgaagatatgataattaaagttattgaaattacaggtgatagagtccgtgcaagtcgtaaagcagtattactagaagaagaaggtataacttggactcctgaagagagtagtcgtttttctaaaggaaatcgtaatggtgatcgtagtcgtcacaacaatagagaacgtacacgtcggacataa

SEQ ID NO: 9907 - DNA, 1434 bp, Lawsonia intracellularis
atgagtcactttgaagccgtcattgggctagaagtacatgttcagcttggaacaaagtctaaactcttctgctcttgccctacaacatttggaactccaccaaatactaatatatgtgaaatctgcgcaggtatgcctggtgcattaccatccctaaataaactagctgttgaatacgcagttaaagctggacttgcattgcattgtacaattaatactcactcttttttttctcgaaaaaactacttttatcctgacctaccaaacggatatcaaatatctcagggtacccatgctctctgtacttcaggatatcttgatctgactataaaaaataacaataaaagaatagggatccaccaaattcatctagaaaatgatgctggaaagagtattcactctcctcatgaaaataaaagttttatagatcttaatagagcaggagtacctcttattgaaattgttagtaagccggatataaatactccttctgaagctgttgcttatttaaaaagcttacatgcaattgtaacatatcttggtatcagtgatggaaatatggaagaaggcaactttcgatgtgatgcaaatatttctttacgaccatataattctaaacatctagggactcgaactgaaatcaaaaacttaaattcattccgaaatgttcaacgagctcttgaatttgaaatcaatcgtcagcaagatatattagaagatggtaaaacaataatacaagaaactcgtctttataatagtgataaagatatcactacccctatgagagataaagaaacagcccatgattacagatattttcctgatcctgacttagtacctatttatgttactattcaggaaatagaaaaatggaaaggtgaaatcccagaattatcggatagtcgacaaaaacgatttgtaatagaatggggtttagctcatcaggatgcagaaatacttacatcaagtcgagaacttgctgacttttttgaaaaagcagttaaattatacccaaaacctaaaaaaattgctaaccttattaaaatattactattacatatgcttaatgagcataatataacaatccaacaatgtacaatgaagcctgaagcaattgctgaacttgcagctattattgatgaaaatcttattagtatcaaaattgctcatgatatctttgaagatttatttagcaaacaattaatgcctaaagattacgtaataaaacatggcttaacacaaatttctgatacaaagactattgatacaattgtagttgaagttcttgctgaaaatcctactgaagtagccgcatataaaaatggaaaaacaaaattattaagtttttttattggacaagttatgaaaaaaatgcagggacaagctaatccagcacttgttaatcaagcacttcataatatattatcaaaataa

SEQ ID NO: 9908 - DNA, 639 bp, Lawsonia intracellularis
atgaatatacacgattgtataactatgcttatagaatgttttgaactacaaacacaaaaaactatgctttggcatgaagaactacctgaaattgagccacccaaactaaaaactgtctatactccatctatttttaaagaacttgttgttattcaacatctatttaattttaaaatctggcatgaagaagatattgcacgtcggcgtgatatagaacctatactgattgcagaatgtaaacgatctattgatcaattaaaccaacaacgaaacgattttatggaacaaattgatatagcttttcttaaccttattcaaccattactacctactaatactaacaatgtacatacaaatactgagtcattaggaatggctattgatcgctcttctattttaagcctaaagatatggcatatgaatgaacaggtcgaacgtagcgacgttactattgaacatattgaaaattgtaaacaaaaattacatgtactaaaagaacaacatattgatcttaataatgctatcctaaacctagtaaacgaattccaccaaggaatccgaaaacctaaactttatttccaatataagatgtataacaatccttctcttaacccacaactgtattcactaacatcctaa

SEQ ID NO: 9909 - DNA, 858 bp, Lawsonia intracellularis
atgaaaacgcttaaacatgcccttattgtatataaagtaggaaatcctcaagcagaaaaaacagcacatgatatccaacattggttttataataagaatgtaacctcaaatctcttttcatctgatattcctgagtcacaattaaaacaatcacttgttcatacacaagtagctattatacttgggggagatggaactttccttagtatttcccgtaaccttattgaaaaacaaatacctgttttaggtattaactttggacaagttggttttcttgtagaaattcatcctgaaaactggccacaaatgcttgaacaactttattctcataagcttgttcttcaaaaaaaaatagtcctttcctggtcaataattcgtcataatcaagttataaaaaatggttttgctataaatgatgttgtagtaggacgtggagctcttgcacgagttcttgctgttgatgtttctattaataaacatcatattggagtgattcgctctgatggtattcttgtttctactcctcttgggacctctggttatacaatttctgctcatggaccattagttcatcctgatgtgcaagcacttacactgacctctgtatcgacactcttcagaagtacacctccgctagttttacctctatcaacaacaattacgcttacaccttcacctcatgctattgaaccattccttacagtcgatggacaagaaggttttgtacttaaacccaatgatagtgttggaattcaaggaataaaaagtgggcttcttatatacactacagccaactatagctatttacaacacctacaaaaaaaaggtcttttatcttccacagattttaacttatag

SEQ ID NO: 9910 - DNA, 636 bp, Lawsonia intracellularis
atgaataaagcatttcaacttattacttcccatttagaaacaggaataaaattacgttctgaattttttactgctcatgccagtacaatagttgagatggctcgacaaattgcttcatcagtagcatgtgggggtaaaattattatagctggtaatggtggtagcgctgcagatgctcaacactgggcaggagaatttgttaatcgctttcttttagatcgtcctccattaccagctattgcattgactacagattcttctattttgactgctattggtaatgattttggatttcatctcatctttgcaaagcaacttcaggcaattggtcaacaaggggatgtttttttaggtatttctacatctggtaatagtgtaaatcttattgaagcactgcatgtagctcgtaaacaacgtattaccacagttggattaactggcaagggaggaggagggatggcacctttgtgtgattttttgattgatgtccctcatcaatcaacccctttagttcaggaggtacatgcaactattggacatatgctatgtatgttaatagattatttcctttttgagaacgtttcagctattcaaccattattaaacgatccagcaccacatgaaaacaatgaataa

SEQ ID NO: 9911 - DNA, 930 bp, Lawsonia intracellularis
atgaaaaagatcactattgctacaagaggaagtaaattagctttttggcaggctaactacattaaagatcaattacaaaaaatgtattcttatcttgaagtagatttaatggttattaaaacaaaaggtgatcatattcttgatgttccactggcaaaagttggaggaaaaggtctttttgttaaagaaattgaagaggctcttttatctggagaggctgattgtgcagttcatagtatgaaagatgtccctatggagttaccttttgaactttgtttagctgctattacagaacgcgaagatcctacagatatgtttctttctataaagtatagtggtgttaaaagtctacctgaaaatgcattagtggggacaagtagtctgcgaaggcaagcacaacttttagcattacggccagatcttcaaattataccattaagaggtaacattgatactagactacggaaacttatggcagaagagtttgatgcaattattatggcaactgcaggaataaaacgtttaggccttatagcaccatatatgtcctcattgccttgtagtgttatgcttcctgctgttggtcagggagcccttgggatagaagttcaaaaagaaagacaagatgtattggagctattttcttttttaaatcataaagagacatatcattgtattcaagctgagagagactttttagcaggccttgatggtggatgtcaggttcctattgcaggttatgctactatttgtaaacaagaaactatctgcttagaaggtttagttgctaagagtgatggttctgttatgatccgtaaccggttagaaagatcagtaagtgatgcatatgatattggtatgacattatcaaaaatacttcttgctgaaggtgcggatgatattcttgcatcaatgcatactatcctgtaa

SEQ ID NO: 9912 - DNA, 2454 bp, Lawsonia intracellularis
gtggctaaagttttaccattacctgtatctcgtctttgtgcaagactctcgcctgaccgaatcccatgggaagtaagtagtgaaattcctaaaaatgtatctcaccgtctatctcttcagcctcgtgtgcataaagcattagagcgtgcacttgctataacgatttcaggttataatatatatctttcgggagaagcactgcttggccggtcatatctattaaaggaatttttagtcccacgtgctaaaaaaatgcagacaccaccagatttactttttgtacataattttaatgaagtagacaaaccatgtttactcactgttccttctggacaagggaaaaagatacaaacaggattaacaaaggttttgtctgaaattcgtaaacaagttcctttgtggcttgaaaatgaagaatatattaagaagcataatacaataaaagataagttccaaagtagccgtaataaacttcttaaagaaatgcgaggagtggctaataaacaagagtttaatgtagatcttgatgaacatggtggattaacattatatccgctagttgaaggaaaacgtttaagtgaagatgagtttaatcgattagacgttaatcttaggcaatcattaaagcaaaaaggagataacttattaagttcaatgtcaagtatggtacgaaaattaagaaatgcagaaaaaacattccaatctgcagaaaaaaatcttgatcaagaagtaattacaaatcttcttgataaactttttgtaccttttgttgaagaagtattacgacattgtcctgataacaaatcactaaagaattattttaatgaattacagaaagatatttttgagcacccagagtccttcatcacacgtgataatgcttctatagcattacatcagcaacatgatgttagtcagttatgtcctacagaaacagagcaatataggtattatattaatatttttgtagataatagtaatacaaaaggggcacctattgtttttgaagatcatcctactgctacacatttgttaggttgtatagaaagagaagctgaaatgggtgcattaataactgattttacacttataaagtcagggtcgttgcataaagctaatggaggttttcttatattacatcttgatgatatattacaacatcctttagcatgggaaggattattgcttgcattgcgttcaggtgtttcaacattagaagattttggagagacaacagatggaactatacgtacaaaagggattgaaccagaatctatccccttagatgtaaaagttattcttgttggaaatgaggatttttatgaaagattattggagcatgatgatcgttttagtaagctttttaaaattaaagctcaattaactactacaactgaaagaacagctaaaggaatccgaagttggctgttccaattatctaaaattatagatgatacaatgctattaccttttgatgctgaatcccttgcaggacttgtagattatagttcaagagaatgtgaggatcagaaaaagctttctttacgttttcctttaatacgagatgtaatgattgaagcatctgctattgcaaatatggcaggcaatgagcttgtgcaaaaaattcacttagatgaagctattgcttctaggctgaatagagtcaacttagtagaagaactctttattgaagaatatgatcgtgatcttataaaagttatgacaacaggatggagtgttggtagggttaatgggttgtctgtatcttggtatggtgattttgagtttggattaccacatcaaatttcttgtacagttggtgtcggtcatggaggaattattgatcttgaacgtgaatcagagttgggtggtcctatccatacaaaagctatgcttattttgaagagctatttagttgatcaatttgcaaagaaaaaacctcttgtacttacaggtagcctttgttttgaacaaaattatgctggagttgaaggtgattctgcttctggtgcagaacttgctgcattactttcagctgtatcaggtgttcctttgaaattatctcttgcctttacaggtgcagttaatcaatcaggacaaattatggctgtaggcggggttaatagaaaaatagaaggtttttttgaaatatgttcacgtagagggcttacaggagagcaaggtgtaattattccttatgataatattgatcatctaatgttaaatcctaaagtcattgaggcagtcaaagacaaaaagtttgctatttatccagtaaaacatattacagaagcattagaacttttaacagatatgccttcaggccgtcctttaaaaaaaggaggtttttctccaaactcgttatatgataaagttgatagcagattacaagagttaggtcatctagctgagcatgcattcagtaaaacttatagaaaaaaaactaggaaataa

SEQ ID NO: 9913 - DNA, 1203 bp, Lawsonia intracellularis
atgtttaaacatgactatactctcccaatgccttttcgtgaagcactgccttggataagcgcagtttctctattatttttatgtagttatatgactcgatctaccttagccccattacttgtctatgtagaaaatagtcttcaaataggccatatacaatctacaagccttcttcttatgcagagtataggatatagtattagtcttttttcctgtggatttttactctcaaagattactcctgcacatatggtagccttttccgtcttcttctcaagtatctgcctatgcttaatgccttatgtggagacacttagtgaagctcgattactttttgcattactaggttttggatgtggtttttattttccggcaggaatagcagtcctatcaacacttgtttatccctcagactggggaaaagctataagtattcatgaagttgcagctaatcttaattttatacttattcctttattagctcaattatttttacaagttactaattggcaaggtgtttgtgcttaccttggttggcctatgttagtacttagtatactttttatattttttggtagaggaggacaagaacatgtccctttaccatcttactctggttataaagagcttctttttaccccagcaagttgggctgttgttatactacttattattgctcaagctggagaatatagtgtctttagcatattacaattatatctcacagatgaggtagggtttacaccaggaagttctaatatccttatatctagttcacggctaattactccctttattgtaattttaggaggatgggcgtcagatcgttttaatgtatactttatcattaaattttgcctaattcttcatacattagcccttaccgctatggcatttgatattccatcactatctattataggtatcatcttccaaaccatttcgatatcatgtcttttcccttctatctttaaggcttttgctatacgctttccacttagccaacaagctctgttaatgtctttgtctatgacaagctcaggtcttatttcaaatggagggataacaatgtttcttggatattgtggggaacacctaacatttgggataggctttatttgcctagctctttattctattggttgtatttggataactaaccttttaaaagtcaaagtaaaacaagttatagttcctaactag

SEQ ID NO: 9914 - DNA, 483 bp, Lawsonia intracellularis
atgcatataaatattgttagagtaaggcatagaaggttacaacttatgtataatacacaaaatttatctttaagaacttttttttctcctcaaatattacctgttaagtcaaaattttctcaagtttctgcaattcaaaaaactgttattcttacaggttggcttgaagagcataaggcacagaatgtgctagcctttgatgtagtaaataaaaatttatgtatggatattgtagtgattttaacagctacgtcttctcgtcatgcaaaaggacttgcagatggaatccttgaggagtgtacaaaacaaaattttgaatatcttcgaatggaagggtatcaatatggtcaatggattttagtagatcttaatgatatagttataaatattttccaggcagggatacgtgagttatatgctcttgaaactctttggaaagggtgtcctttattaaatggacaattagccactaatactctttaa

SEQ ID NO: 9915 - DNA, 1533 bp, Lawsonia intracellularis
atgaatgtagtgccaatactattactaattcttgatggttatggtcttgcacctgatagtactggtaatgcagctaaattagcgtttacaccaaacattgatagaatgttagctatgtcaggtggaactcaaatacatgcttcaggtcgtgctgttggtcttccagatggatacatgggaaactctgaggtagggcatcttaacataggggcaggtagagttgtttatcaacaaatgacacgtattgatgtagctattgaaaataaagagttagatagtaatccaattttacttgacctttttacaaaagttaaatcatctaatggtcgattacatcttttaggattgttatctaatggtggagttcatagccatattagacatcttgaagctttattatccattgctaaagagcataatattcaagtgatattacatccttttatggatgggcgtgatactggtccaaaagatggtttaaaatttatgaaagaaattgtttcatttttaacatctacatctagcggggtaattggtagcttttgtggccgtttttatgctatggatcgtgataagcgttgggaaaggatcaaacttgcttgggatgcaattgtacatggagtaggcttgcatgtggaagattctgttaaagcattagagcaggcgtacgcatctggagaaacagacgagtttataaagccaagagtcatgggcaattctagtgtaaactgtgttcaggataatgatgcagtattattttttaattttagagcagatcgtgcccgagagcttgtcagtgcttttatccttccagattttaatggatttgatcgtggccgtgttccccatttatcagggattgcaacaatgacaatgtatgacaaagagtttaatattcctgttctttttaatcatgagaatataactaaaacattaggtgaagtcgtttctgctcttggattgttgcagttacgtatagcagagacagaaaaatatgctcatgttacatattttttcagtggaggacgtgaagaggttttcacaggagaagaaaggatacttgttcaatctccaagagatgtagcaacatatgatttaaaaccagaaatgagtgtgatggaagtaactgatcgcttactaacagcatggaatagtaagaagttttctttgattgtgtgtaacttagctaatccagatatggttggtcatacaggaaatattaaagcatctatttctgcacttgaagctgttgataactgtgttggacgtatagaaaaagcagtagctgaacagcatggttgttttattttaacagcagatcatggtaatgtggaagaaatgctggataaatctgggcagccacaaacagcacattcttgtaaccctgtccctttgatagcaatatatgatgggaagcctcttaaccttaaagaaagtggtaaacttggagatattgcaccaactattttgagtatatgggacgtttctattcctaatgagatgacaggtaataatcttctttcatcggagtga

SEQ ID NO: 9916 - DNA, 363 bp, Lawsonia intracellularis
atgtctaaaagtctagcattgtatgatgaagcattacatattggccaactggagttagatgcattaaaagctgaagaagtagaaaaagctgatgaatattgtaatcaccgtgctcaactcttagaaaatgcatggaatattcgtgatgctgaaaatgaacaaattcgatcaaaattacttgctataaaaacattacaagaagaacttatacaagaaggaacaaaacttaaaacaaatatccagcaacaactctcagcttcaaaaaaacaacaaaaagttttaaaaggttataaactatctgttggacaagcaacttcaatgctagataatgagttacataaactttcaattattgctcaatag

SEQ ID NO: 9917 - DNA, 606 bp, Lawsonia intracellularis
atgattataatcgacggtaataaaactgatatgcaaattaaaaatttttctaaccttgaagaaattttactttacgcagcaagcgattcacgtcttgaaaatagaattgttactgatgtattgttaaatgatgaactcttctctgaactatatcctcaccaagcagaagatattccaacaaatgaaataaattctgtagaaatacgctctattccttttggagagatggcatataatattacagaagaacttttaaaagtttctaactttattgctacaggcagcaaagaagttgctcaacactttagaagaggtgaagatgatgaaggacttgaactttttcaagacttactagatgttataagagattttatgacaatggtaagtgtattacgaactgactttattgttacagacgataacgtctttgcagattgcagtgaacaaatttcatctttattaagcgaaatgacagacgtgcttgaacaagaagattggatcatgcttgcagatctattagaatatgagttaattcctgcttgtgaacgttggaatattattattgaagagttacgcaaagctatccaaaataatcttggagcttag

SEQ ID NO: 9918 - DNA, 1593 bp, Lawsonia intracellularis
atgcatgctatcgttattaacctatcaagatttggtgacttaatacagacgcaacctgttataacagcacttcaccaagatggatatcaagttggacttatttgtctatccagctttgtagatgcaacatcatgtttatcacatataacatatgtgaatcctatctctggggggaaattactatcattgattgaacaaaattggatttatgctcttgctaatttccaagaatggatagaacaaatctataatacattcccgccaaaccgaattctcaatcttactcctcatattcctgctcgtctcttagcttacggtctttcacaatcaattattccagtagaaggatttagtgtcgataaatacgggtttggtgtaagtgactcaatgtgggcaaaactctttgaagcttcaacaaaaaaaagacgatgtagtccatacaatcttgtagatctattcagaatgatatctcatgttgaacatattcctgcatgctataaacttaaacttccccaaaaaacaaatttactaacctcaacaacacactttaaaaatcatatttttgaaaccaataaacaatatctaggatttcaacttggtgctagttcaacattgcgtcaatggcctgtatctcacttcgcacaattaggaaaaaagttatataatcaattaggaattatccctgtactttttggtagcgaatctgaacaacaccttgctcaagaatacatcaaaactggtgctccatgtattgaccttgtaggaaaaacaaaaattgcagaacttgcagctatcctattacatatctctcttcttattacaaatgatacaggaacaatgcatttagctgcaggaatgggtataccctctcttgctatctttcttgcaactgctcaaccatatgatactggtccatatcttgaagactgttgttgtcttgagccatcattaaattgtcacccttgtgactttgataccacatgtcctattgatacaatctgtcgtactacaatttctgctgatgctatctggccacttcttacttatcgtttaactaacaaaaaatggcctgaaaaagcaccaattgaaacatctactgtagcgcgggtatggataacaacaagagatcattatggtttttttaatcttcaatctctgtctggccatgataaagaagatagaagtagttggttgtatatccaacgatattattatcgtcaacttattgacttgttagataaccctaatacaacaaaaagttatcgtcctttatctacaaaggttatctcacagttatctcagaatgttaggcaacaagcatccaatactctagaacagatatctagccttctcaagttattagaacaacaaggccttctcctttctgaaaaacatatttcacaatttggtaaaaaatttctttctactacctataatattacagaactacttgaacaaaacgaattatttactgcactagggatattctggaaaatgtcgatccatgaacatgctgacaatttatcacatgtattaactattgctaactcctttcaaaaaatcattacaaaatggaataattctctaaaataa

SEQ ID NO: 9919 - DNA, 822 bp, Lawsonia intracellularis
atgtctgtaactattcatcctacagcaattattgcttcttcagcacaaataggtattgatgtaaccattggcccctatgtaattattgaagatgatgttaatgtaggagatagaacatatatagattctcatgcagtaattaaacaatacactaggataggaacagataatcatattcattcacatgctatggttggaggacaacctcaagatctaaaattttctggtgaaataacatggttagaaatcggtaattataacaaaattagagagtttgctacattacaccgtgggactgctggaggtggtggaataactaaaattgggaataacaatctttttatggcctatacacatgtagcccatgattgtattcttggtagtaatattgttatgtcaaattgttcaaccttagcaggtcatgtgcatatagataattttgctatattaggaggtttatcagctgttcatcagttctgcaaaattggtgaacatgcctttattggtggaatgacaggaattagccaagacattcccccctggatgcttataactgggaggaaaggtataatacatggtccaaaccttgtaggattaagacgtgctaatgtaccttcaacaactattgcagcagttaaagatacattcaagcttatttggaaaagtactatccctcgaccagaatcacttaaaactttagaaaaaaaatatccagatgttccagaagttcaaagtattattcgttttattcgcaatagtgaaagaggtgtgtgcaatacagctagtggatctgaaccctctgacgaacttgacttactataa

SEQ ID NO: 9920 - DNA, 462 bp, Lawsonia intracellularis
atgtcccatccattacctccaaatatccaagaaattctacagttacttccccaccgttatccctttttacttgtagatagagttattgaatttaatgctggcaaatatattaaagcttataaaaatgttagtattaatgaaccattttttcagggtcatttccctggatttcctgtcatgcctggagttctaattttagaagctatggcgcaatcaggtggaatcacagtactccaatcttttcctattaatgaactacaaggtaaagtttttctatttgcagggatagaaaatgtaaaattccgtcaacaagttattcctggggatcaacttattcttgagtgtgaaataattcgccataaactacagttgtggaaaatgtcttgccaggcatttgtaaataataagcttgtggcagaagcaatactaactgcagcaatgacaaacaaggaaaatttttaa

SEQ ID NO: 9921 - DNA, 1026 bp, Lawsonia intracellularis
atgccccagtataaactttcagaaattgctaaacttttaaacttaacattacaaggtgatgatattgaagttgtaggcgtaaatacacttcaagatgcatcaccaaatgagataagttttctagcaaatgctaaatatattcaccagcttgttttgtcacaggctggtgctattattctttcaaaagaatatgctagtcgtgttccacgagcactaatcagtactgaaccatatagagattttggtagagttctttctttattctctatacctcaaggatgttttgatggtataagtcatcaagcttatatacaccctacagcacaagtctctaaaacagctactatctatccttttgtttttataggatcacatactgttattgaagaaaatactactctattcccaggtgtatacattggtgaacattgtcatattgggaaaaattgtactatttaccctaatacagtacttatggcaaacacatcaattggaaatgactgcattattcatgcaggagtagtccttggctctgatgggtttggattcgcacttacagaagaaaaacaaaaaattcctcaagtaggaaatgtaattattaaagataaagtggaaatcggagctaatacaactgtcgatagaggaaccctaggaacaacgactataaatgaaaacactaaaatagataatcttgttcaaattggacatggtgtaacagttggtaaaaatactgttattgtttcacaagttggtatatctggttctacatctataggggataattgtattcttgccggccaagcaggaatttcaggccatcttactataggtaataatgttactattggtccacaatctggtattggtaaaaatatccctgacaatcaaatcctaggaggaagccctgcagttgaccgacaaacttttttaaaaacatctgtacttatgccacgattcccagagctctttaagcgtataaaaaagcttgaaaaaattttagaaaagaaaaaagagcataatatatag

SEQ ID NO: 9922 - DNA, 561 bp, Lawsonia intracellularis
atgaaagtaaaaactctttccatggctattttagcttgtttattagtagctaacagtgcattttcggctgacttccctattggtgtctttaattctcaatccattgccatggagagtgaagcagctaaggccgctcaaaaaaaattacaatcagaatttggtaatgaaaaaacacaacttgaaaaacaagcaaaagatttgcaaacaaaagctgatgatttacaagctaagtcagcagctatgtctaaccaagcacgtgaagataaacaaagagaatttcttgaacttcgtcgtaatttcgaagaaaaatctcgtgactttgcaatacgtgtcgaacaagctgaaaacacattacgtcaatatctagctgaacaaatctatcttgctgctgaaactatagcaaaaaagaaagggttaaaacttgttcttgatagtgctagtggaagtgtaatgtaccttgaaaaaaatctagatattacaaaagaaattcttgaagccataaatgctgcatggaaaaaaggtggaagtaaacttccagagatggcaaaccggaaaaaataa

SEQ ID NO: 9923 - DNA, 1803 bp, Lawsonia intracellularis
atgagcaacatcatttgtcgacaagccattgcaattttatccaattatatttattggaaaaaactgttatggatacctatcctagcttactttattgtcataaccaataataacataatacaagcagctgcacctacaagtccaggtgcacgttatgaagaagctaaaaaagcattaaaaaatcttcagtcagattctataaatcaaaaacttagagatccttggctaaaaatttctgatctattttttaaaatatatacttcatttcctgattggattaatcgtccttttgcactttattattcagctgttgcccttgacgaacttgcaaaacattctttcacagtttctgatgctgaaaaagctattaagtgttatcaatctgtcataactaaatatcctaaaagaactattactgaaagtgcattactaaatattgcaaaagtttatgctgaacgacttcataaacctaatgatgccaaaaagtatctccaaaaattattaacagactatcctaaaagtgataaaataaacgaagctcagatatacttaaaaagccttgaaaaccttaaagaggaacctcaaaaaacttcgactacaagcacatctaaagcaaaagaagctttccactcaacatccaaacaaaaaaattctcatttacaaaaaaaaacttccgaaaaaacattagcacaacttgaaaatatcagatgggaagtaaaaaagagctatcttaaacttattattactcttacagaacctatcacatgggatgtaatatctcatccagcaaaccctaaaacaggtaatcctatccgtttacttatagaattacacaacacaattccaaatccttgtataaaaccaggaatatgtattaaacaaaacaaactagaaaaactaagagtggatctctccactccaactgtcacaaaactcttgctagattttagtgatctaaaaacatttaaagtggaaacaacacataatccttttcagctcattatttacacatcacctactcctgatggaatagcaaatggaatgaaaattggccaaacaaaacattcacacccaaaatccacttctccaaaacctattgtggcacacgatcttgcacaacaactcggcttaacagtaaaaacaatacttatagatgcaggacatggaggcaaagatcctggagctacacataatggaattattgaaagtgaattgactcttgaactttctaaaaaacttggtcaaattttagctgcaaaaggttttactgtacactatacaagacaaaataacacatgggtagcacttgaagctcgctcacggaaagcgactacagttaaagctgatcttatgatttctattcatattaatgcaaataaaaacacacaaatccatggtcttgaaacatactaccttggacttgcaagatctaaagagtctacatatattgcccgaattgaaaattctacaagtgaaaaaacactaaatgatcttgatatacttttaaaagatgtgatgttaacatcaaaaaagcatgaatcacgtagacttgcagagtctgtacatcaaaatattcttacccaccttatacaaaaaaattataatactcacaatggtgggataaaatctgcaccttttcatgttcttataggacccaaaataccaagtattcttgttgaagtaggttactgtagtaataaagctgaagcacagcgtctggcatctagtaattaccaaaaagcattaatagaaggattagctaaaggtattttctgttacctaaaaaaactacaatcaccttga

SEQ ID NO: 9924 - DNA, 2655 bp, Lawsonia intracellularis
ctgtgtaatatactttattgtaatataatagccaatgctgcttcaaaagacgatccttctattgtggttctcccatttcaaattaatggctcatcaaatgatgaagagttacaaacagaactaccaatgcttcttgcaactgcattaaagaataagggatttcgtgtcatccctaataaatctgcattaaatcttctatataaacaaaatatctcccaacttaatatttctactgcaaaaaaggtagctcaacaactccatgctgactatgtagtatacggcagtttcaatcaaacaggtgaaaattttagtattgatagtaggcttattgatagtacaggtgtagcatctgcacgtccattatacatagaaaaaccaaaatttaatgagctaaatattgctgtaacagaacttgctgaacgtataagtaatggccttataaagaaaaacactattgctgatgtacgtattcatgggcttaaagttcttgatcctgatgtaatccttacacgactcactattaataagggagatcatactgatcatgccaaaattaatgcagaaatcaaaaaaatatgggaattaggatattttagtgatgtctctgcaagtattgaagaaagcggggaaggacgattacttgtatttactgtacaagaaaagcctaaaattacagatgttgttgttcaaggctcaaaagctgtaagtatcgataacattcttgctgcaatgagttctaaaaaaggatcagttattagtgatagactattgtcccaagatattcaaaaaattaccgacctctatagaaaagaaggctactatctcgctgaagttaattatgaaataaaagagaaagaaaatacttcttctgcaacactattgttaacagtaaatgaagggaaaaaactttatattaaagatgtccgaattgaaggacttgaaacaataaaagctaaaactttaaaaaaagagttagcattaacagaacgtaattttttatcatggtttactggaacaggtgtattacgtgaagaatatcttgaacgtgactctatagcaatctctgcctatgccatgaatcatggctatgtagatattcaagttgcttcacctgaagtaacattcaatgaaaaaggaattgttattacatttagagtaaaagaaggtaagcgctataaaataggaaaaatagactttaaaggagatcttattgagacaaatgaacaactccttaaagtaacaaaaattgatgatcataaaaactatgagcagtatttttctctttctgttatgcaagatgatgtaaaagcattaacagatttttattcagattatggttatgcatttgctgaagtagatcttgaaacaaccaaaaatgaagaagatgcaacaattgatgttactttccttattgataaaaaacaaaaagtctttcttcgtagaataattgttgaaggaaatactcgtactagagataatgttatcctccgtgaattacgccttgctgatggagatctttttaatggtcaacatctccgacgctctaatgaatgccttaaccgccttggctattttaaccaagtagatacagatacactgcctacagggaaagatgatgaagttgatctacttgtaaaagttcaagaagctcgaacaggtgcaatcacaggtggtgttggttactcaacacattctaaatttggtgtttcaggaagtatctcagaaagaaacttatggggaaaaggttatattttaagtattgaaggttttatttctagtaagtcatcttctcttgatctttcttttaccaatcctcgtgtttatgatacagactttggctttagtaataacatttatacgctacgagatgaatgggatgacttccgtaaaaaaacttatggagataccatacgtctatttcaccctataggagaatattcatctatctttgttggctatcgaattgatcaatatcgtctatatgatattccatctacagcaccacgctcttatcttgactatcaagggaaaaatatttctagtgtagtaagtggtggttttacttttgattctacagacagtcgtgagagaccatctaaagggcatattgcaaaactaattgttgaatatggaggtggtggtcttggtggtaatgataacttcttcaagccaattgctgaactacaaggattttactcaatttcaagaagtaaaaaccatataatacattggcgtacacgtgcaggtgcagcttataagaatagtaaaaaacctgtgccagtatttgaccgattttttattggtggtatagatagtattagaggatatgatacagaagatcttgcaccaaaagatcctcgctttggagatgaaattggtggtgataggatggcttttcttaacctagagtatatttggacattccagccagagctaggtcttgcattagttccattctatgacataggattccaaacagattctgtacaaacttctaacccattctctaaactcaaacaatcatatggccttgaacttcgctggcgttcaccaatgggagatttgcgatttgcctatggtataccactcaataaaaatgttagtggcaaaaaaactcgtggtagatttgaattttcaatggggcaattcttctaa

SEQ ID NO: 9925 - DNA, 708 bp, Lawsonia intracellularis
atgtcacaatatctattagaaaatatagtaaaacagtatgacagtccttctgaacctatttgtgtcttacataaaataaatctttctatagctcacggagaatcattagctattattggtgcatctggttctgggaaatcaaccctattgcatatccttggagcattagatataccatcttctggcactgtgttatttaataataaaaatttaagtcatatgggcccaaatgaaaaagcatgctttcgtaataaactactgggatttattttccaatttcacaacttacttccagaattctctgctgaagaaaatgttgcaatgaaagctcttattgctggtataccaaaaaagaaagctcttctgcttgcacgagaagcacttggtagtgtaggacttgaaaataaataccatcacagaataacaatgttgtcaggaggtgaacgtcaacgtgtagccatagctagagctattttattagaaccccaagttcttcttgcagatgaaccaacaggcaaccttgatcaaaaaacaggtgaacacattgccaatcttctaatctcacttaataaaacttttaatataactcttattgtagtcacacataataatgatattgcccattctatgggacgctgccttgagctgaagtccggagatctacatgacaaaacgcctgaatatatttcttctactgttactgtgtaa

SEQ ID NO: 9926 - DNA, 1284 bp, Lawsonia intracellularis
atgaagtttgaactttttattgctctacattatctctttgcaagacgaaaacaagctttcatttatcttatttcattaatgtcaattttaggagttgctattggtgttgcctctcttgtagttgtattaggggtttataatgggtttactatagatatccgtgacaaaattcttggagctaatgcacatattattattacaggaaactttgattcacctatagaagaacctacaagttttactcagctgtcaactacttctatgctgtcccaaaatgctcttattatcctaaataaacttcaacaaacttctgcgataataggtgctactccctttatttatgcagaatgtatgatatcctctcctcatggagtaaaaggtcttattttaagggggatagatccctcatcagcacaaaatgtcatttctatgctttctcatctaacaaaaggaaatcttgaagatcttatccctaaagttttagggactccagacggtattattattggtaatgagcttgcccaaagactcaatgtaacaataggtagtcgtgtaaacttactctcaccaacaggacaaaaaacatcttcaggatttcagccacggatacgaccacttattgtaacaggaatctttcatacaggtatgtttgaatatgacacttctcttgcatttacttctcttaatgcagcaagagaacttcttggactacctcacaattatatttctggaatagaagtcagtattcatgatgtgtatcaagcaaattatatcacaaaccaactgcaacaagagttaggtcataatttttctgtacgaagctggatggatatgaatgcaaatttatttgcagcacttaagcttgaaaaaattggaatgtttattatattagctatggttgttctcattggttctttttctattgttacaacattaattatgcttgtaatggaaaaaacaagagatattgctattctaacctccatgggggctacaagccaaatgatccgtcgtattttcattttacaaggaactattattggtattgtaggaactttgctaggttatctacttggaattactcttgcacttttattgcagaaatatcaattcattaaacttccccctggggtatatacaatagatcacttgccagtattacttaattggctagatatattcattattggtacttctgccatgctactatgtttttttgctactctctaccctgcccatcaagcggctcgactacagcctattgaaggattaaggtacgagtaa

SEQ ID NO: 9927 - DNA, 1374 bp, Lawsonia intracellularis
atgcttcgtgctgaatatgaagcctatagtgcatctgaacttgaatcactagacgaaatttttgcttgtgctggacgtattatctctctccggtcatttggtaaagtaatattctttcatatcatggatagaagcggtcgcattcaatgttatgcatctcgtgaaaatatgggagaagaagcatttagtacattcaaaaagtttgatattggtgacattgttggtgttaatggaaaacttttccgtacaaaaatgggagaattaactctcaactgctccactatcacattattagctaagtccttccgttctttaccagaaaaacataatggccttactaacatagaacttaggtatcgccagcgatatatagatcttattgttaatcctaaaacaagagatatctttagaaagcgtagtaaaattattcatgaaattagagcattcttagaagaaaatggctttatagaagtagaaacacctattcttcaacctattccaggtggtgcaatggcgcgtccatttactacacataataatgcaatggatatgaccctttatatgcgcattgctcctgaactctatttaaagcggcttcttgttggtggttttgaaaaactatttgaattaaatcgtagcttccgtaatgaaggaatctctatccaacataatccagaatttaccatgtgtgaattttactgggcctatgcaacatatctagatcttatggaacttacagaagaaatgtttgcataccttacaaaaaaaatctgtggtactatgactatatcttaccaaggaaatacaatcgattttacacctgggacatggcaaaaatatacatttcatgagtctcttgaaaaaattggtgggcattctccagagttttataataactttgaaaaagttagtgaatatattaaagaacatggagaaaaagttctgacaactgacaaaataggaaaacttcaagctaaactctttgaccttgacgtagaaaacaaactgattcaacccacatttatctatcactatcctactgatatctctccactctccaaaaaaaataaagataacccagaagtaacagatcgttttgagctttttattgcaggaaaagaaattgctaatgcattttcagaacttaatgatcctattgatcaacgtctgcgttttgaagaacaagttcttgagaaagcacgtggagacgaagaagcatgtcccatggatgaagattatcttcgtgcattagaatatggaatgccaccagcagcaggggaaggtattggaattgatcgactcgttatgcttcttacagactctccttccatacgagaggttatccttttccctctattacgaacagaacgctaa

SEQ ID NO: 9928 - DNA, 825 bp, Lawsonia intracellularis
atgaaaaatttttttgttttattgtatattatggcgttgtctgtagtacacgtttcggcatcatccttagaattattcaaagatcaaagcggagttttagatatagctggtggtacagcacacctccctgtaatgaagcaagctgctaaaaatataatgatggtgaatcctgccatcaaaattactgttacaggtggaggatctggtgtaggcgtaaagaagttagcagaaggacttattagcataggtaatacaggtcgccctttgaaagagtttgaagttgaacaatatggacttgtaagttttccttttgcaattgatggagttactattattgtaaatccttcaaatccgataacacaattaactaaactgcaacttaagaaaattttttctggaaagataagaaactggaaagaagttggagggaataatgctcctatttccctttatataagagaggacggaagtggaacacgagaggtttttgaagataaagtaatgcataaaactcatccttataaaaaagctaatgtatttaattcaacaggatctataaagacagctatcagccaagataagaatgctattggttatattgggattggatatttggacagttctgtaaaaggattagttgttgataatatgatccctacacaagaaaatacatttaatggttcttatactataagtcgtttactttacatgaatacaaagggagagcctaaaggtattacaaagttatttatagattatatttattcccctgatgggagagatatcattaccaaagcaggatacattcctattgaaagagaatag

SEQ ID NO: 9929 - DNA, 831 bp, Lawsonia intracellularis
atgagttggctcaaagttagtatatattttgctgtaagtatagttttaacaggtattttagtacttataacaatgcttattgctcttgctttacctataataagtaatactaacttggaaaagattatttcattaacttggcagcctaatgaaggctattttgggatccttcctatgttgggaggttctttttttttagctatttttgccctgtctctagcatggccattagctctgggcttgaatatttggatgttgaaggtagataaaaggtttttagctagagtggttgcttattttataaagcttatgatagctattcctacagttgtttatggttttgtagctgtttttttactagttcctttagttcgtgaaggagctggaggtacaggtttttgtttattttctgcaggtgttattcttgcattattaatccttccaactataaccttagtctttgaatcaggattagctacttctttagaaaagctacgtcttgaaggcattgcattaggtttttcaagattagagcttttttatttttttgtattaccaaaatcaaaaaaaatttttgttgtagcagcaataattggctttggacgagcaataggagatacactaatatctcttatgttatcaggaaattcaccacaattacctcagaatatttttgagagtatacgaacgcttacagcacatattgcactcacaagtgctaatgaaatgtctggtatggcatatgattcactttttttatcagggattcttttacttatcattaatgctacagtaagtatattagtacgccatataataaaactatcatga

SEQ ID NO: 9930 - DNA, 891 bp, Lawsonia intracellularis
atgaaccaagtatttttatttttattttctttactagcatccttttcagtagtcattattatggtagtcatttgtttttttatagcttttcttatttggaatgggttacctacattaaatatagcaatattttttgggaatgttccacctttaagggctttattaggtctagagcctgtatgggacgggatatggccagcagttctaggaacattagagctaattgggattacactatctttagctatcattcctggtataggatgtggaatttttttatcagagtatgcgtcagcatctcaatcttattatataagatggctagttgatatcctttcaggtattccatcaattgtgatgggattatttggttttttacttattatatttttacgtcatacaatatggccagaagctaatacttgtttattattagcaggaggctgtttagctttacttgtcctacctacaattattgttacttctcaagaggctttttctgcagtctcaaatgaactgtatttaagcgctacagcattagggtttactaaagaacaatttatttggtttataaaattacctgctgctagtcgaggtttgtggggaggggttttattagctattagtcgttctgctgaagatacagcagttattttacttacaggtgtagttgctaatgcaggacttccttcaggactaggttcaaaatttgaagcattaccttttattatttactatactgctacacaataccaaacacaacaggagcttagtcaagggtttggagctattattgtgcttctttttttaatagttagtttattttgtattgctaggcttattggttctaaaatttatagatttagttatagagaggggaaatgtctatag

SEQ ID NO: 9931 - DNA, 774 bp, Lawsonia intracellularis
atgtctatagctgtacatgtagttgatctaacagtttcttttcatcaacaagaagttctcagtcatataactatggatattccaagtcatggaatttttgttataactggtcgttctggatcaggtaagacaactttattacgtagtataaatcggctaaatgaagaatttgatggttgtgttactaaggggtacattgaagcagatttaggttatgggttaaaatctgtttttccatctattcagaagaactttacattatcaaagttacgtcagaaaattgggatggtatttcaaactccaaatgttttccccactagtgtatatcgaaatatttctattcctcttgaacaattaacacactatgctaaaaaagatattcctacatatgtttattctgcactagatagggttggtttattacaagaagttgaaaatcgtttagatattcctgcacactatctttctggtggtcagcaacaaagactttgttttgcaaggatgttagctttagagcctgctatacttctactagatgaacctacatcatctttagatattcatgcaacacagaaaattgagtctttactattagagttagctagtgaataccctattattatggtttcacataatatcacacaaatttgtagattagctcacgaaattgttattcttgagtatggaacaattattaataaattaacagaaaaagcctactataaagaaatattaactagtattattgaacataatattaatatcattaattaa

SEQ ID NO: 9932 - DNA, 456 bp, Lawsonia intracellularis
atggatgctcaaagccttattaaagaactagggcccattatcaatcttcctgatcttgctcttgatgaaaataatgtctgtcgtgtagaatttgacgacatgcctgtagactttgaagctttaccagatggaagtatgttatacatttatgctcaagtttcacctgtacctcctccaggaagacgtgaaaaactctttacacgacttctaacaggcaatctttttggaggagaaacacttggttctaccctaggctatgacataaaccaagagtccattgttatgcatattgctctagctgttgaaaaaaactctttctctgactttcaaaccactttagaacgttttcttgatcgtctaaagttttggcgtgaagaatgccaagatattgttcttggttcaggcaatagagacaacgctgaagatgtaaattataaagatggactacgtgtataa

SEQ ID NO: 9933 - DNA, 1410 bp, Lawsonia intracellularis
atggtaaactctacttcacactacagtagtgacatctatatttctaaccctatgccgattgctccacataacaggcctcgagaaaatacaaataggaatagaggacgtcgtatattcctagccctaattagcctagggatgactgaattagcaagacttgcattaagggcgtatagaacaagacataccccaaataataacactcctcaagtacgtcaagcacaaatagcacaacacaatctacaaataatagatagccatttagacccaaacaaactccctatgtttcctagggttaaagaaaatgttataatgagtacctcccaattttttgaagggatagatgtcccaaatcctaaaaactttattgatagtgcactacaacaacttagaaatgatataacaaattatcctaagttatcagaaaaaatgttcaaagaacttttaagtgctaaactaaatgatactgtattaaaagaacatataataaataaagttacatctcaaatttcaacgacttcagatgtcaaccttggacctatcgtacaatttcttttaacaaaatttaattcagaaatagaaggtgttctaactggtccaccttcgatgctaaaagaaagtatagaagaacttaaccgtcatataattatttcaacaaaaaatattattattcaagaaaaagttatagataagtgtattgaaactggccttaaagcagtcttaaatgcacttaatgcaacaccccaagaagtaatggctctcccacgccaaactattttaactaaactttatactgcagcagataatatagaaaaaactgctaatcaaaaaaacggaacacctactgaaatccctgcttgtgtttatgaaaaaattctttcacaattatcagattcgttttatagtactataatccaagctgggatccttacaaatgctgctacaaaagatagccacattacaatgatacttcttgaaaaatcaatgcatatagtttctaatagtaacatatctccattaatagaaaaaataacacaatcaccagaagatattaaagaaaagaaacgtacagctattcagctttctagacttctctgtgaccaagcacgcactgtatttaataatgagtgggatatatacccttctaacaaacaaaatctaattttgtctgttgtatatttactaacaaaacttaatcatcctcaattacaagatacaaccgtacgagaacaattatctgttcttgctaaagaaatagataaggatggcctaaacctagcaaaaaaattatcccaagctaactctaatgaagcagcagtaactcgtttaatggcacaatcaaactttctttcaaaaacactaattatgatattgagcttcattggtggaaaaggttatggattagaataa

SEQ ID NO: 9934 - DNA, 1392 bp, Lawsonia intracellularis
atgcctattagctcaacaatacagggtatttttgattttttgggttcatcaagagctcaaaatcgaccagaccaacctactactgttccaacagcaagttatttcaaaataggttgtcgtgttgctttgggatttgcaacactaggtgtatctgaaatagtaagatatgctatcacagcatatcaagccacatatggaaattctacagcaaaagtagaaaaacatagagttcaatactttaataaagaagttatagaatctgatctagatcatacaaaagactctaaattccctggaactgcaatcaaagttttaaacaaaactactcaagaattaaaagagtcagggatagaaatagaagatccacagtctactctggacgaaacattactatatttaaaaaaggagataataaaactagaagatcgtcttgattctgaacattattgtaaattattatgtgattctttaaaacttactgctctccaaagatgtattgaggctaaagtaaaagaagcttatgataaagatggacgacaagttgaacagtcaatattagaacgtgccataaaacgtcggcaaaaacttatcactgccttaggagaagttccgccaacgctattaaaagaaagatgcaatgagctagcagattatgtatataccacatgcttaaatatagaaaaagaagacagtataatagctacagtaatagacacagttgctaaaggtcttgcttgggcatttaatcttaatagttatcaaactaatccaaccttacgtgagactgtagggaatgtgttaaaaaaggaagcagaagaaactgaacaagaagcacaaaaaaacaataagggccctattaaagctgttcctgaagaaaagtataaagaaagactttctagctctgcagattcttactttcagtgtattaaagatgttggtatgcatttaagtaagctagtaaaagataaacaaaaatgttttaaaataataacctctggtttaaaagcatatgaagcattaaaagaatctggcacaatagtagttatatgtaatccactaataactcctgaagaactaagaaaacaactccctactctctatcatgaacttgaattatgccttattacagctctaggggaagatgattggagtgacttatcacaacatcaaaaagagctatatctccgtgtattatgtgcattactaacccgtaagcataagatattaggacccttcttaaaagaaaaccaacttcttatagaagaagtcaaagaacagttagaagaaattcagcagagaaataatgaagaaggagaaacctcttctaatgctgatgatatatctagttctctaaccttagtaaatctattcttaaagaaaaatactatttag

SEQ ID NO: 9935 - DNA, 1032 bp, Lawsonia intracellularis
gtagactgttctataaaaaataagaaaggtaaaaatactatggaaattaaccctataccaataggaagtataaatatcctaacgactcaatcattaacagaatcacagtctactgaagaagctaaaatcgaacagcaaaaatcatctcaatctaaatatgttttacgtacaaaaggaattccacgtattgctttagcatttctatcatttggaataactgaagttgttagagcagtacagtcctaccaagccaaaagaattataagtcaagaacctcgtttaagtaccgaatttgatcctagtctatttaaaaacaaaacagaacggtataatgcaagattattaaaaactgtatttgaagatactccaaatacttccacctctgatgtcttaaaaaatgccattaaaaaagttgaaaaagaacttgagcaaagcagtattagaaaaaatcctgatgctcaacctattataaaacgtgcatatcaacagctttggcttactcctaataaacaacataaactaacagaagaagaactttctacaattattagcaaagaaataaaaaatattcttattaaggaacaagtaataaaagaattacaaacagagcttgacaccagaggagtaaagtatgaccaaggttcacttgcagttctattacaaaggaaagcaaaaactatagaaggattatgttactattcgaatgaacgtctatcacaggaactaacaagtattgttataaaagtggctaacttagcagaatctttacaaaactacgggaaagccaaacgtgagattaaacaactctaccttgaagtaaaaggtattgacattaacagtcaggaggcgatgcaagataccgagctacgaaaattactactagccattgatgaaaaagctgaacaatatgaagcaagagagacttcaagaaatggtggagaaatgcctgtaataccaattggtgcttatagatatatctttactcaaacagcagaaccattttttgatactttagaaacacaacatacttaa

SEQ ID NO: 9936 - DNA, 957 bp, Lawsonia intracellularis
atgcaagtacaacttagaaatgtttcagattcttctcagaatcttgaaaatgtacaagctactgaaaacaagcagaaggctaacacacaagatggacaacctcgagtaggtaaaggggctattcctcgtattatggctgctcttaattctgctgttaactttgtgtcaagtacacttcaagaatataaaacagcaattctaacaactacacagtcaacaagtgtacaacaaaatgaaatacggcttcaaaatagagatttaataagtcagatgcttgatccaaatcaaccacaaccctttcctaatgctatagataatgctactaagcaaacaattaaggatcttgctggtatctctcataaagaagttggatctattacatctactgctttgaacaacctttctatgagtataacaaaactagaaactaaacttactgatgatataatgacttcactgcttactacagaaatgaaaaatattttactaaaagacgttgtagtacaaaatctaaaaaatgaactaggaacaagaggagtaccaaatgatgaaggtgcaatggctacactactcatgacaaaacaatatgagatgggtgcattagctcgtactccaaacgaaaatttacaaaaaactatagaaaatcttgtcacctctatgagtgataatgctgtaacacaacgaaattatactcaagcaaaaaatgaaatacaaaacacatacattgaagcaataatggttaataaagatatgactaaacaagaagcaagtcagcttcctgaacttaaagagctaaagctaaagcttgaccaggctgcacttgaacttgaagagacatacacaacaaagaatggtggccaattaccagaaataagcctacaagactatagagaaatctttcaaggagttgcagcaccatatttaaataatataggtattaatgctacaattctttaa

SEQ ID NO: 9937 - DNA, 999 bp, Lawsonia intracellularis
atgcttatgccaatgcttcctgtacgtttcactggtcctacaaatcaaacccctgttgatgatagagagcaacgtaccaaagtacttgcacaaatagatcatcaacatcaagctgaaccacctagatcattaggacaaagaattcttactgccacagggttggctcgtgtaggatggggattaggtacgctaggtttaagcgaattagcaagagctctccatggctacaacacacgtgaaagtgctggtgctgcacctagagcacttgctaatcaacaaattcaacgtgaaaatcgtcagcttcttcaacaactccatgataatgttgcaacaggacaattccaattcccacatcaagaagccgttgaaagtgctatggaaaaagcaaaaactgatcttcaaggtatagctagtacagacccacgacatcttcttggacgctctatattaagtctccaaagtaaacctagtgcttttgatgaaccaatcacagacaaaagccttagtcatttactttcaaaagaattaaaacaagaaatgatattagaagaagctaataaacaattaagacatgctctaggcaaacgtggaccatggggatatggtgccgatagagcaggacttttgtctgaacgtagtaaggacataagaggactaactaattatccaccagatcaaattaatagagaactagaaaaaattgtcagtgaaatggttactagaggagaaaatttacataattcttctgaagctaggaaaagtgctcttagtgcttatgtacaagctgttatggatagattccaactaacaaatgcacaagttacagggaacccagaatataagaagctaaaattactacttgatgaatcagcaggtacgcacgaacgtcaactaacagcccgcaatggaggacttatgcctcttatatctcaatcttcttatgaagaagcactacatagaacaacacaacaatttttaatagagctaggggtacgttag

SEQ ID NO: 9938 - DNA, 687 bp, Lawsonia intracellularis
atgttaacactcccaactgtttttatcggcagtcctattattagtgatatagataagcctccatttattactactcgacaacagactttaactacaccctctaactcttcaaaatacttacatcgtatttgcttaagcttaataacattaggtatatatgaacttattaaagttacttgtagtatatttaatagtaaatcaaaatcatcttttttttctatggaaaaagatgaatattctgactacggctatcatatattacaacctctctctgaagaaaaaacactactccctaataacataaaaagaacaatggagaatatacaaaatagttttactgctactacaaatactgctcccttacctcttgctaaatatggtctagaaatacctcaaacaaaaactaaccttacaaaagaaaatattataaaaaaacttattcaagaactaaaactaattatcattaaagaaaaaattttatctgacttgcataatgagttaaaaaataaaaatatctatatagacgaaatagataaatcttacttgcttcatacagaacatacaaaaattgtttcattagctctcaaccctgactatactatgtcaaaagaaataaaacagttagtttacaaattaattaaatatattgaaactaaatataatcatataattaattataataattaa

SEQ ID NO: 9939 - DNA, 1146 bp, Lawsonia intracellularis
atgattatagaacattctccatatacacaaggccctacagtagccactgataggaatctgtcatctacacaacaaaatcaaagaagatggccacaaggtatttctcgagtcttattagcaatagtaactttaggggtatctgaggcagtctttgcaatacaaagttattgtgcacaaagaaaccaaaatcaacaacctagagtaaaccaaacccaagcacgacagtataacaaaaagctattagaagatatgtgtaatccaaataaagaatttccttaccctaatgctattgaaaatgctgtacaaaaagttgaagaagaacttggttcttattctgaagattcacctgaagatattttagaaaaagctttgaaagcattgaagcctgaagtgcttcaattaccaacatgcttagatgaagaagtttttacaacaatatttatacaaaaattaaaagaactccttctccaaaaagtacttatagaggaggtaaagatagaatgtgacaacagaggcataccagtatcaagtacatccctcttgatattaacaggagaaaagcctgaattagacatatctggctgtatatcagaaaatgaaactaaattaaaagtagagcaagctgtatcaaaactagctaatacaatagaaaataaacataattcggacaaagcaatacaaaatgcttctattaagctcaaaaatttgattgctaataaaacaggaatacgttcatttcttgtatcaacccattgtaactacaaaaaattatgtgaaaattataaattagctacaatagtattagaatctactattaaaacaaaacacacagaaaataatgtacctgttataccagctatcctctttgaaaagctagcagaagaactatgcaaagagcaaatacaagattttgaaaatcagaatcatacccaaatctcttcagctcaacaacaatacagaccaaaaactcgtcaagaacgtattgagtatctcaaacagtcagaaaaaaaagctcgagaaaaaattgatgcagagagagctgctactcttgtaggagctacttcaagaaggactgattccatacaatcaagatatgaagagttagtaaaaaaactcctttcagaattagaacaacaagtaacataa

SEQ ID NO: 9940 - DNA, 1020 bp, Lawsonia intracellularis
atgcctgcctttcctactatatttggtggtcctatagtcagtggaatagaaagaagttcacgtatccccacacaaaaaaatacaactaatcggccatgtggtatccctcgaattctattaggaatagccacactaggtatttctgaacttgtaactgctgtacaaaactttcgtacagccaagcagttatcatccccagatgttcagaggaatataatacggctctataactataatgttgttgactccatgactaatccatatcaagagtctacatttcctggagctatgcatgaggctttggctttggcttgtagtgatttacgaaaatatggatttaaacctgatgttcaaaaacacttatcacatagtctaaaaacactcaaaatgaatactcctcaaatgaaagaaaagttaacctatgagttaatggttatgtatcttagtcaagagataaagtatcactgtcttgaagagatagtttcatctttaatacaatctaaactaagctctataaatccagtgactggatgcttagaatcagtagatgaacagcttataaaatatattatagaatcaagaggaaaacaaactctatataaactagctgctcttccttctccaaataaaagatcagaaaaaatgaaactaggagattcagttgttcaagtcactgaaaatcttgggaatcaattacaaaacatgttaaattcaacttatgttttaaatagaataaaagaaaaaatctgtactcttcttatcacctcaggtcagtatactgaagaagatgtaagacaatctaaactatataaagatactgctaataactgtagaattacattagatatggatgaccacaaaataagaagagagcatagaaataacactccacgaaagtctgttgaggactaccaaaaattattgtcttcagaaatcactatgcttcaacgtcaactacaaacgtataactcatctagccataataatagtaatagtagtatagtgagtactagtatttaa

SEQ ID NO: 9941 - DNA, 927 bp, Lawsonia intracellularis
atgtcagccgtctctactatatctaatggtgctatagtcagtggaacagacaaaaattcgaaaactcccacacaacaaagtaaaaatcgctcacatggtatccctcgaatcctattagggatagttacactaggtatttctgaacttgtactagctattcattcttattatacaagaaaagctcaagctcaaccacctcaagctatgagaacaccacttaatggtgttagacaccaaaattataaaataatatgtagttcacttgagtctaaaacatcaccttttccagaagctatacaaaatgctatattagatgctcaagactgtcttaaacctataattacttctgtagatgaaaatatattaaaacaaagcctaagtggacttcaaatgagacttcatgaatttcctgagccatttacaagtcaatcatttgaattagaacttacaaaagaaataaaattcaatcttgtcaaaaacttattctcaaaaactttaatagaaagattacaacaagaaggtatttctgaacctccaacagagtgtatatcacagatgtgcacagtagaaacatctacgttaaaacaaatttctacaatgccaaaagaaaaaatttcagaagcaatgaataaacttatcttaaagtcaacagcaataatactaagcaatgataatgctaaacaagctcgtaaaaaagtattagaagacttaaaactagatcttataactcaatacagtatatctgaacaagaagccaaagagcatagtaaatataaagaactttcaactaaactagtaaagtgttgtacagagctccaagatgctaaacaagcagaacatcctggtgaatatcctgtagtgactgttgatatgtatcaagacgcctttcttaaattcaatcaatcatttttatcatctttgatgtag

SEQ ID NO: 9942 - DNA, 1005 bp, Lawsonia intracellularis
atgcgaggagttacatcacgtattagtaacagtagtagtactcaacacattgtagaaacacatttcaaagaaactaatactgatagctcaagtcaatttggacaaacaaaaatgaattcaagtggtactagacgtattattcttgctgcattaacattaggtatttctgaagctgtaagagctattagctcttattgtacaaaaagctctgaacatcaaggagctcaagttgcagagaaagaaagccctagattacgtgctcgtgaaggaactccactaaatgaagctgctagacgccacaattatggagtaatacatagcacaatagaccctaaacaagactccccttttccagaagctatccaaaatgctatggtaagtgcacaagaatatcttaaacctatagttactcccggacatgaagacattcttacacgaagcttaactactcttcaaatgagacttcatgaaattcctgaaccatttacaagtcaatcatttgaactagagcttacaaaagaaataaaacttactattctcaaaaattcattctcagacagtttaatacaagaattacaacaaagaaaagttccacctcaaccagaatttatttcgcaactcagaacaatagaaacaccagtactcaccaacatttctaatatgccgaaagaagaaataccagaggcaatgaataagcttatcttaaagtcagcagcaacaatacataacgctcataattctaaacaagctcgcgaagagtcattatctatctatcagcatgttattacatctagatataatatatctgagcaagaagctaaaaaagataacggctataaaatgcttgaaactagattgatggagtgtagtacagaactccaagatgctgaaaaagcaaaacatcctgaatatcctgtagtacctttacgtacataccaagaagcatttattgaagttactgctccatttttagcaatatttggtgttacagaaacaaaattctaa

SEQ ID NO: 9943 - DNA, 972 bp, Lawsonia intracellularis
atgcaaataacaattttaagtggtaaagaaactaatcctggggataacccttggactcctctggaagccttagggaaacttactgtttatgatcttacaaaacctgaacaaaccgttgaacgtgctaaagatgcagatatactacttgtaggtagagatatactaacaactgaacacattgaagagctaccaaaacttaaatgtattggtgtattaggaacaggttataatcaaattgatattgaaactgctggtaaacgtggtatccctgttataaatgtaacagcttatggtgttgatgcagttgcacaacatgcatttgcattactccttgagttatgtcgacatacagcagctcttgatcaagcaattagaaatggtgcatggtcaagccctgactgggctccttggaaatatccacaagtagaacttacctataaatgttttggtattataggctatggtaatatcggccaaaaagctggatacattgctcatggatttgacatgagtgttcttgcttatgatgaaagacctgtacaaccaccttcatatacccctttttctttcgctgatcttgatgaagttttcaaaaatgctgatgttcttagcctccattgtccactcacagaagacaactttcaccttgtcaataaaaaacgtattgaaactatgaaagacggtgctattattattaatgtagctagaggcgcattacttgatgagcaagctgtagcagatgctcttatttcagggaaacttggaggtcttggatctgatgcttttgttgacgaacctattaaccttaataacccactattatctgctcctaatactgtctttactccccatattgcatgggaatctgttgaagcacggagaaatattgtacgaattcttgctgaaaatcttaaagcatggatggatggtaaaccacaatctgttgtgaatacagagtacttagtcaaataa

SEQ ID NO: 9944 - DNA, 615 bp, Lawsonia intracellularis
atgttatttcaatgcctccttataatcttactattactccctggatgtggactattatatagaagtccaatacctacatattatgttctccaaccatctataaaattaactcaacttcttacttctaaacatgatatcacaggaccaattgttgcaatagacactataactatccctggctatcttgatcaaccacaaatttttatacgagaaggagaagcaacagttgtccaattcgctgaactccatagatggagtgagtctctagctgaaggtattaatcgtgtattacaacaagctatctctaatgttttagcaccaataaatggattagctgttggtccaaactcaatgataaagccagattggatattaactgtaaacatttttcagtttgatggcgcccctaataatgaagtgatactagatgctatttggacactttcatcaagcacacataaaatttctcacacaggacgttttacaaaaaaacttatgacaggtccaagtattacagatatggttataacagagggaatcctacttgaacaactaggaacatttgttggcgatgaaattcgtagccatttaccttatgaacttctaaaagaataa

SEQ ID NO: 9945 - DNA, 960 bp, Lawsonia intracellularis
atgagtcatcaagtcagtaaaactcttattggagcatttgttgctggctctattttacttcttattatagctataattttttttggctcagttaaactttttaatagcacagctacatttgtcatgttttttgataaatctataagtggattgtcacctggttcccctgttgtctttatgggtgttcctgttggtcgagttattgacattaaagtcgacaaaatatccaatgatataggttttacaattcctgtatatgttgaactttatgaaaatacacatacaatatttataaaacataacttacctcaagaagaggaagaagaaacagagtatcttaataacctaataaaacaaggattaagagcaagtttagcacagcaaagtttacttacaggtcaactaatgattgaactaaattttattacaccagaatcacaaatggacacaacacatgttgttttttataaaggtacacctgttatcccaactgtaccttcaaagctagacaacattcttaaagagttaactagtttgcctctagacaaaatttcaggaaatatcttagaaatcacaaatagcctcaagatacttcttaatacacctgagacacctaacattattccacaactatccaattttttacatcaggggctagcagctgtagcagaatttaatcaatctcttattgatatacgaaaggcaagtaaaaaatatggtacaatggttgaagggcttaatacagaactctcccttaccttaaaagaagcaacaaaatcttttcaaacaattaacaatacaacagaacgattacttggtaataatagccctacacttttagacatccatcatatgttacaggaagtctcaaaagctgcaaaagctatacgtattcttgcaaacatgctggaaagaaatcctgaagtccttataagaggaaaaggtattaatcaaaaatga

SEQ ID NO: 9946 - DNA, 789 bp, Lawsonia intracellularis
atgaatactacaaatgaaccactcattacagtcaaaaaccttactattgcatatgatgactatattgttcaaaaaaatcttactttcacaataaacaaacaagatatttttattattatgggaccaagtggttgtggaaaaagctctttattacgggctttagtaggacttcatagaccatcagtaggtaatgtatactataataacgtagacttttgggcattaacagaagaaaaaagacttgaacaacttcataatattggacttctttttcaaagtggtgccctgtggacatctatgactcttgcagaaaatattgctctcccattagaacgttataccaaactgtctatagcagaaattcaggaacaagtatctttaaaactttctttagtaggtctatctgggtttgaaaactactatccatctgaactcagtggtggaatgaaaaaacgtgcaggacttgcaagagcactagctatagacccaaaaattgttttttttgatgaaccatcagcaggtcttgatcctattagtgcaggaatgcttgatgagttaattgtagaacttacaagtaacctcactatgactgtcattattgttacacatgatttagatactattttatctattggtactaatagcattttcttagacactgcaacacacactatacttgctcaaggagatcctaaacaactcaaagaaaatactcatcagccagaagtcatccgatttctcacaagagggaagcaacctacacaatatactctaggatctccactatga

SEQ ID NO: 9947 - DNA, 1161 bp, Lawsonia intracellularis
atgttgcaaaatacaacacatttaccaggtaaagatgacctacccccctctgctaatataacattatttaggcagacattagaaatcagctttagtggtaactggcaacttaaccaacctattcctgatgcaacaagatttgcttctcaacttaactatcctgtagttaaagaactatatctcaaaactaatagtcttggcatatgggacagtagtcttattgcatttataaaaacacttattaataaagctcaatcacaacagataactattaatgatcatgaacttcctgcaggaataaaaaatcttatacagcttgcctttcaaacacctcctaataaagaagcacataaaaaaactactcaaatctcattccttgaatatattggagatatcaccctatctctacctagtaccattcaaaaaattttaaccttccttggagaaatgaccctttctaccaaaagacttattacaggccattctgactgcagttcaacaaatatttggcgttgtatgcaacaagcaggagttgaagcattacctattgtttcacttattagtcttcttgttggacttatccttgcatttgttggagtcatacaattacgaatgtttggtgcagaaatttatgtatctagcttagtggcaataggaatgacacgtattatgggtgctgttatgacaggtgttatcctctctggaaggactggcgcgtcatatgcagctactattggaacaatgaatgtgaatgaagaaattgatgcactcatgacgtttggtatccgcccctcagattttctagttatgcctcgacttattgctctaacaactatgacacctttgcttgttgtttattcagattttatgggaatgcttggaggttttattgttggagtaggagtacttggtattgagccattagaatatataaactttacccaaaaaggctttgcattaaaaaatctttgggttggtattatacatggtatagcatttggaatcattattgctataacaggttgctatcaaggattaaatagtgggaaaaatgcatctgcagttggtttagcaacaacttcagcagtagtatattcaattgtaggtattgtcattgcaacagcttgtttaaccattatatttaatatatttaatatatga

SEQ ID NO: 9948 - DNA, 570 bp, Lawsonia intracellularis
atgactgaccatacccctcttcaaccaaaacatgaaataacagatcaagctgatcaagatacatcggctgaaatgcttgttgaagaagaagataaaaaagaaattggacctaattatattactgaagaggaagctcaggaaatacgtcttcgtgcgcttgctgaaatggaaaatttcaaaaaacgtcttcaaaaagatcatgatgaacaaatacgttatgctatagataatcttcttacagacatgttacctgtcctagatagtcttgaccttgctatacaatatggaagtaatgacgatgcatgtaaagatatcttaatgggtgtttctatgactcgaaaactattccttgatacactcaaacaatatggcgtaacagtattgggtgaaataaatgagccatttaatccagaacttcatgaggctattgcacatgaggagcgtgaagatatccctgaaggacatgtaagtactcttcaccaaagaggataccaattatatgaacgtttacttagacctgcaaaagtttctgtaagttcaaacaaaaataacagtaatacaaataaataa

SEQ ID NO: 9949 - DNA, 735 bp, Lawsonia intracellularis
atgatgaactcaaggatcattcaatgggtagtattgtcagtttgtatgacacaattattggcatgtggttctctttttagaggctttactggtgaaacgttggtatcagatgctcaaccttctttatctgtaactgtaaaaatgcctatgttgactgcagggcaaattacaccatatttatatacagattatggttatcagtttcctgtgacatttatcgctgtttatggtgtaaatgaaaacagccctatggctatttctacattaagctttactcccaataactggcaatgggatcccctatcctttaatatggtagatagtccagtaacttcttatgaatcctttgatggacataattttgaaggctctacacatattattaatggagcaaaggatccatttactattcttgttgccccacaggaacgtttagcttcaatttattggcttgtacagcgttatgcttatagagctttttttaataaagcaaaaattattcttgaatatagagaaccattaccaagcaatttgtcagaaactacaaagctttctgtaacaaatcctgagatacaagcatttcaacagcgtgctattaccgcatttattgtatcttttaactataaaggagtagaaaaacctacggcaccttacttgaagggtattaattcaagaatggttggtaactatcttggaagcatgagttttattgaaccaagaatgattgaacactag

SEQ ID NO: 9950 - DNA, 867 bp, Lawsonia intracellularis
atgcaaccttactttgttgatttacatacacatacaatagcttctgatggaacagatacacctagagagttagtcataaaagctgcaaagttaaagcttgctgcaatagctattacagatcatgatactattgcaggtttagaagaagctgaacaagcagggagagaaaatcaaattgaagttattcgtggatgtgagctaggtgttacaagtaaatatggagagattcatttacttggattatggttaccttatgataatatcagtcttaaagaaatgtttaaaacattacttaaagatcgacatgaccgggctaaattaatcataagtaaacttaataaactaggctataatataagttatgaagaaattatagcaaatattcctggtgaagctataggacgtctacacattgcacaacatttaacccaaaaaggttattttgttgatacgaaagaagcatttaagtcctgtcttggacataatggtttagcttatattccaaagacaacaatatctttaaaagaaggggttcgtgtattagtagatgctggagcaatggtaagttttgctcatcctatgctactaagatgtccaaaggattggcttgaagatactattgttatgcttaaagactatggtctttctgctattgaagcttatcatagtgagcattcacaaaaagatgagcgatactgtgttgacttagcaagccgatatcagcttggaatcacaggtggctcagattatcatggatcaggtaaatctaatgtaaagttaggtagaggccgtggaggagttcgcatgacattggctatgttagacgttttaaaagaaagacattttagaattaatcaaactatataa

SEQ ID NO: 9951 - DNA, 2814 bp, Lawsonia intracellularis
atgactgactataaggaaacattaaatcttcctaatacgacttttcctatgaaagctaacctagtgcagcgtgaaccagagattattctttggtgggaagaaaacgctgtttatgaaaaaatgcttgaagcttcaggtgcaaagggcatttttatacttcatgatggtccaccctatgctaatggacatattcatcttggtacagcactcaataaaattcttaaagatattgttattaagtctcgtaacatgcaagggtatcgctcctgttatgtccctgggtgggattgtcatggattacctattgagctgaaggtagagcaggagttgggtaaaaagaaacaagaaatgcctctatcattaataagaaatcgttgtagagaatatgctgagaaatttttagatatccaacgcgaagagtttaaaaggcttggagtatttggctcatgggatcatccatatcaaacaatggatccaatatatgagtctgttattactcttgaacttgctaggtttgtagaaaaaggtagtgtgattaggagtaaaaagcctatttattggtgttattcttgtgaaacagctttggcagaggctgaagttgaatatgctgatcacacatcatcagctatttttgtacgtttccctatacatgataaaagattacacacaatattcccacaagcagatcttacaacaacttctattgttatttggactacaacgccatggactcttccaagtaacatggctatagcactcaatgctgattttgattatgcattactccagtataaaaatgaatatattatcatagcttctgaacttgtagatatatgtttaaagcagtttaattgggaagatgcaaaagttattaaggttgttcaaggaaaagatttggagggaatgaaagctagacatccattatatgatcaagagtctatgattgtcttaggtgatcatgttactcttgaggctggaacaggctgtgtacatacagcaccaggtcatggtcctgaagattatgaagttgccttaagatataacttggatgtctattctcctttagacgatcagggaagatatttagataccgtaaaattttttgcagggttaagggttgatcaggctaatcctgttgttattcaaaaacttgaagaatttcatcgtattattcaaaaaaatactatccagcatagttatccacactgttggcgctgtaagagtccagttatttttagggctacgacacaatggtttataagtatggaaaaaaataatcttcgagaacaatccttaaaagccattaaaaagaatatagagtggattccctcttggggtgaagatcgtatttataatatgattgcttcaagacctgactggtgtatttctcgccagcgtatttggggagtccctattgtagcacttatatgtgaaagttgtggagaagtttggaatgatccttcatggatgaagaagatagcagaattttttgcaatacatcctagaggatgtgattattggtatgaagcaaagcttgaagatattgtccctgtaggacttaagtgcccacattgtgaaggcgaacagtggaagcgtgagtcagatatattagatgtatggtttgattctggttcaagttttgctgcagtattagaagagcgtcctaatttaggctttcctgcagatttatatcttgagggctcagatcaacatcgaggttggtttcattcttcactacttatttctattggtacacgtggagttccaccatatcatgctgtacttacacatggatatgtcgtagatggtgatggtcgaaagatgtctaaatctatgggaaatgtaacatctcctcaagaaattattagtaaatttggtgttgaaatattaagattatgggtttcttctgttgactatagggaagatgtgaggatttctaatgaaattttacaacgccttgtagatgcctatcgtcgtattcgtaatacttgtcgctacttacttggaaatataaatgatttaactttagatgagttagtccctgtaaaagaaatggagtcgttagatcaatatattttagatgtagtagctacagcttatacagagattcaaaaatcttacatctcttatgattttcataccgtatttcataagttgcataatttatgtacaacagacctgtctgccttttatttagatatattgaaagatcgtctgtatacttctggagtaagaagtcataagcgtaagtctgctcaaacagctctattttatattttacatatgttgttaagaagtatggcaccaattttgagttttactgcagaagaggtttataaatatattccagacacactgaaagatgataatgttatttctgtatttatgttaccattttttgaaacttcttcatttttattggatgatagagtacgtagttactgggaaacactattattaattcgggcagaagttaatcaagctattgaaccaatgcgtaagaaaggagaaataggacattcattagatacacatataacactttatgttgctccagagctacatacgttactgttggagttgaacacagatttatgtagtttatttattgtttcacagttagatattatgccattatcggaggcatcagttgatgctgcagttagtaaaatagatggtcttgctgtagccgttaacagagcacaaggtaataaatgtcagcgatgctggatgtataaagaacttggttctaatcaccaatatccaacactatgcccacgttgtacagaagttgtagaaaatatgaaaatataa

SEQ ID NO: 9952 - DNA, 495 bp, Lawsonia intracellularis
atgcgatattgtataattagtttagttgcacttattatttttttagctgatcagcttacaaaattttggataacccatatcattcctttgtatagttcgattaatgttattcctgatttttttgatttagtgaacatccgtaatagaggtgctgcatttggttttctaaatcgatctgatattgaatggcagttttggttatttttaggtgcaacgttttgggccatagtaatcatcttttttttagcacgttctgcacattctaatgaaagatttttattttggggacttggctgtatcttaggtggtgctttaggaaatctttttgatcgactcaggatacgagctgtaatagattttttggatttttatattggtgactggcattggcctgcttttaatgtcgcagatatagcgatttgttgtggtggttttttagtccttatttctatgtggcataatgagaaaattaagagaaatactataaaagaataa

SEQ ID NO: 9953 - DNA, 918 bp, Lawsonia intracellularis
ttgttagaaaaagaacgatattatcatacaacaattttgtgtttaggatgggggactatgagagaaaaggtagctatggtacttatattgggaagtttattatgtatttcaggctgttttggtcaaaatacagatacattgcgacatcagcttgatcaacaacaggaagaaattcgccaactaaaagctcaattgtcaggggtacaaccagctcaggctgatacatgggctcaagtccaaagtttacgtcaagaactagctagcataacagggcaaattgatgacttcaatcatgctacaggcgcagttggaggtattgcaggtttagcaagtaaagtagaaaaaaatgaagctgcaattcgaaagattgagaagcagtttgatctaaaattgttagatgatcagcctgctccatcttcacctattagcaatacggcgagtcctcctgtaacccctcctcaaatgaattctagtacaggtttaaataacgagtctggggcacaaactaactctcaaccaaagcaatcaactccaaataaaatagatacagctactgtcctttatgatactggggtaaaactttttaatgaacgtaagtataaagaggcattacagtcttttactgattttactaatacatatggtacacataagcttatttctaatgcttggttttggcgtggtgaggctaattatcaactaggtagttatcctgctgctgcacttgattatgagcaagtcatttctaaatatccaaaaagcggcaaaattgtttcttgttattttaagcaagcattgtgtttttataaaacagggaaaaaagatgcagcaaagtttagattagaggaggttattaaaaagttcccaacttctcctgaggcaaaaagagctaagcaaatactaaaatctgatttctga

SEQ ID NO: 9954 - DNA, 783 bp, Lawsonia intracellularis
atgccagatccaaaaagtatattgcaagatgatacaatccaaaaagttgtgactgatgttacagataaaattcttaaggagttatatgaaattcttgcctctgagttagcaccaaaaatttcctctacgcttatacaaccatttttagaaagcaaattttatcagcgtattagtaatgatatgcaagatgggttaaaacgtatttataaggaaatttctactataagtgatagtcctgtaaatacagtctctgtagataaagtgaaaacagaatccctttttcatgaggcatcagaacaactttcagaagtccttaagcagacagaaaaggctgctatagctattatggaggttgttgagcaagatatagtgttacaggaagaagctacaacattgcttaccaaacttaactcttcccacattaatattgatccagattttattcgtcttaaagagattattcatctatttggagaacatcttagtagtgttatgctttctttaagctttcaagatctcacaggccagaggattaaaagagctgtttcagcattgaaagaaatagaaaagacagttgtagaactttatttatcagcaggattattaatgcaagctcgtgacaaaaatccaaataagagtatagacgaaattgaagctgatacacggcaacaagttttggcattaaaggacatacaaattataggttctgagctaaaaggaccaacttctggtgtagcacaaaaagatattgatgaacttatggcaaaattaggtatggactag

SEQ ID NO: 9955 - DNA, 1116 bp, Lawsonia intracellularis
atggcaacagtgtggattaatgctggagaagtttctggtgacttacaggcttcagttttattaaatgcaatgaaagaatatcagcctgacataaaagcatatgggatgggtggagaatatcttaaagctgcaggacaaaaaaatttgtttagtattgatgagttatcagttttaggtattgcagagatttttacaactataccacgtgccatacagatattgagaaagataaaatatgagcttaaaatacttcgtccagatgttgttattcttgtagatgctccagagtttaattttcgtatagctaaaattgctcatgagcttggcttgttagtttgctattttattccaccaaaagtatgggcatggaggacaagtcgaatccactttttgaaaaaatatgtagattgtattattagtatattaccttttgagcctaaattttatcgccaatttgggatagaaatagaatatgtaggtaatcctcttactgatcttgttaattggcctagaatagagcatatacaaccagtagaaggtcgtataggtattatgcctggaagtagaaagaaagaggttgagcgattacttcccgagtttagctatgcagctgaagagctatatactaaatatcctcaattatctttttattgtattaaagctccaaatatttctacaagctatttaaaatcactatggttttcttctatcccgttatgtatagaaacatcagtagatcgatattcagctatgcgctcatgtgaatatattattgctgcatcagggacagcaacattagaaactgcattagtaggtgttcctacagtagttacatataaagtttcttctttatcagcactagttgctcgtttagctttaaaagtaaagtgggtgagtttaccaaacttgattttaggtaaagaagtatttcctgaacttttgcaagaaaatgcaaaaggttctaaaatatcttttattttagaacattggatgaaacaacaaaatataacaaaagaacttcaaaaagatcttcatgagataagaaagcagtgtggagagattggtagtgtgagccaggcagcacgaatcatagttcaaaaatttttgtctcactaa

SEQ ID NO: 9956 - DNA, 471 bp, Lawsonia intracellularis
atgagtaggataaagagactacttcatctacttgagttaatttattggaaaagagaaatttatagtcctgaaatacgaaaaatatttgtttggcaaacaaatattatctgtgtatcatttattattggtataggtacatttttttattctaagtggatgatatggttttctattgttgcgctaatttctttatggaatttttatatgttggtaaagcaggtaatgaaagttgtaaataaaccattgatagcttcattacatatttcttttttaataaatacaacattacggatcttgattacatgtctattagggtatatagccttagtaaaccttcgtgctcctgctttagcagtattgttaggtttttgttctattataatatgtatactaggtataaatataaaggcgctattttcaaaaaaacagttgaatgtttttcacatagactgtgaagaaaatagtaactag

SEQ ID NO: 9957 - DNA, 702 bp, Lawsonia intracellularis
atggctgaacaacttcctgaaccagttcttttatctgaattgcttcatatggataaagttactattgctggtcagctagttgaatttagacatgtattttatacttggattgcaatgttgatcctttttattgtaggattgattgtccggcgtaaattgacacttgttccagggagattgcagaatttttttgaagttcttattagtagctttgaaaattttactgtaatcaatataggcgaggagggacgtaaattttttcctgttcttataggtatatttttacttattgcagttgaaaatttattggggcttatacctttgtgtgatgctcctacagctaatattaatacaaatattggtatggctatatttgtatttctttattacaattatgaagggattaaaaagtgggggttccattatatccatcattttatgggaccgagtatagtcctagctccttttatgataattttagagtgtatttctcatctagcacggccattatcacttacactacgtctttttggtaatattaaaggtgaagagatagtcttacttctattttttcttatggccccattagtaggcacaataccagtatattttttatttttacttgctaaattgttacaagcatttattttttatattcttactttgatctatttaaaaggcgcattagagtctgctcattga

SEQ ID NO: 9958 - DNA, 348 bp, Lawsonia intracellularis
atgttcaaaggtgttatagggatattagtaacctttattgcattaggtattacaagtgttgcatgtgcagcagatcctgttattgttggacatgtggtgaaactcgacccttctagtttaggtctagcaatctttggttgtgcaataggaatggctttagctgcacttggctgtggtataggacaaggtcttggtttaaagggtgcatgtgaaggtattgcacgtaatcctgaagcatcagggaagatacaagttgctcttattttaggtcttgcatttatagagtctttagctatttatgctcttgttataaatttgattattttatttgcaaacccttttgtataa

SEQ ID NO: 9959 - DNA, 636 bp, Lawsonia intracellularis
atgtttcctcttaaaagtgaaagaattcctttagccacaattcgaaggcttgctttatatgttcaggttcttgaagatatagaacgtaataatacagaagttatttcttctaaaccattagcagaagcgtgtggtgtaaatgcctcacagcttcgtaaagatttagcttactttggtgaatttggtgttagaggtgttgggtatgatgtaacaagtcttattaaagctattaaagtatcccttggcgttaaccgtgaatggaaagtagctcttattggcataggaaatcttggaagagcattattgaattatgaagaatttaagcatcgtggctttcatattattggagcatatgattgtgatcctttcaagattggagagcatgtttatggtcttgaagttacttgtacaaccaagttaaaagagaatgtaagaaaacaaaaaattgaattaggtattattacaacgcctccagagcgtgctcaaaaagcagcagattctcttgttgatgcaggtgtgcgtggtattcttaattttgtttctgcaagaattcaggttcctgagcatgttattgtagaatatgttaatttttttcactatttgtattcgttagctttcaaaacttctattgcttag

SEQ ID NO: 9960 - DNA, 441 bp, Lawsonia intracellularis
atggctgcttttcgattctctctacagcaagtgttagattatcgagaacagttatctgaacaagctcgtgtagagttagcaaaagtaacagcagcagttatttctgaagaaagaaaagtaaaagagcttcaagaagctattcatactcaagagactaatttaagagctcttgatctaaataatataggggagcggtggttattagaaaattttattaaaggtcttcaagaagacttacgtattagtttagctcaacttcaaactttacagaatgcattaaaagaagcacagggaaaagtagctcaacttgctaaagaacataaggtattagaaaaacttaaatctaagcaggcagaacgtcatgcaaagagtgaacgtcaaaaagaacaacaaaactatgacgaaacagcctcaatcagattcaactctaagactttctag

SEQ ID NO: 9961 - DNA, 753 bp, Lawsonia intracellularis
ttgatccttgggacatttaaattattatttttaggttctatgtttattttttctgagcctcaagtagttatagttgcaaataaggaagaggaaataaaagaaaataagagccctgatacttctattaaaaattttgttacaaaaaaagtagaaagtccattagcatatgcccaaccaactacagcagtaaatgttactcctcctgctcctaaagtacgtcagaatacatctcctttttctcaagatattcagccatttggggacacagcaaataatttaggagaggcatatccagtaacaattccaaaagcagatcctaataatatttcaacaaggcctgatgaagctcttgtaacaccagcgccagcaccaaaattaaacccttttgttcctaaagactctgtccagcgtaaacaagaagagcttaatcgacgtgaacaagaacttttatctttacagcaacagatgcagtctcgtttggatgaattgcatgctcttgaaggaaaaattcagaagatgttagatgaggctaataatgttaaagatcaaaaactaacacatcttatagatgtatactctaatatgaagccaaaacaggcagctgatgttttagctacgcttgatccaaaaattgcagtcaaaatattgtctggtatgcgtggccgtcaagcaggagaagttttaacatatatggcaccagagccagcagcgaaactctctgaaatgttaagtcgaacccaacttcctaattga

SEQ ID NO: 9962 - DNA, 774 bp, Lawsonia intracellularis
atgccacgtttgaaatttacattagcttatgtaggtacagcatatcatggttggcaaacacaacgtcgaaaaagccttccagagttaccgactattcaatctacattagaaaaggttattgcatctattattggaaaaccagttcgtgtatgtggtgctggacgtacagatgctggtgttcatgctgaaggtcaagttgctcacgtagatattccagaatcaaaattgaagcttgattggcagctagtacttaatgcaagtctacctaaaaatatccgtgttgtacattctttatatgtagaagatacattccatgcacaacatgatgctgtacaaaagctttatgcatatcgtttgtggcttaatcatcgatatactccccctgttctatatccgtttgtatggtcttgtggtagattagatcttgaagcaatggataaagcaagcacatttcttttagggacacataattttgtaagtttacagaatagaggaactaagttgttatctactgtaagaactatatctgctctttacagagagccctcacagtttttttcattgaatgaaagtcatgaagtgacatggttttttaaagcagatggttttttaaagcaaatggtaagaaatataatgggacttcttgtactagttggtcgtaggaaaatacaacctgaaaagataccttatattttggaggcaaaagacagaagacatagtgcacctactgctcctgctcatgggttgaccttgaaaaaagttttttattcttaa

SEQ ID NO: 9963 - DNA, 423 bp, Lawsonia intracellularis
atgccccaggtcgctgcgcgtataagcgagcaacaagaacaatggcttaaggattatttccgtacaaagagtgcaggtgcagagtttgtcttgccatgggttgtggataccttttttcgtgctgttacaaatattaaaaatacattttcaaatgtagaattaaaagccattattgaagcacataaggattttaaattattacctgcccatactcgtctgtcttatcttatgttaagagtaaatgatgcatgcgatctttcttctgtacacaataggtatggtgttagtagatcaagtcttgaagctaaattaaagcgtcttgatgatactcaagctgcagcactaatggtttgggcttctgctttttgggtaagtcgtaattgttccgcagataacatggatgagtatattacttcttattag

SEQ ID NO: 9964 - DNA, 477 bp, Lawsonia intracellularis
atgggtaaatatcgttttataatgcatgaagagaattgtataaactgtaaagcttgtgaaaatgtttgtagaactacacatgatacagctccaggattatggttagggaaactgctttatacaacgccagaaggtaaaatggaagcacaagtaaagtttagagcttgtcctcagtgtaatcatgctaagtgtgtatctgcttgtccaacaggtgcgcttattatgagagacttagatgggattgtatatgttgatgtagataaatgcacaggatgtggattatgtctaatagcatgcccccatgatcttctttggaaagatcctaggacagggaaaattgtaaagtgtgatatgtgttatgaaagaatggatcaaggtctagagcctagctgtatagcaagttgtcctacaaatgcattggaacttattgaaagaaaaccaggagagcctttacataagatccatcataaaaaatga

SEQ ID NO: 9965 - DNA, 876 bp, Lawsonia intracellularis
gtgaataataaagtagctcttgtccttggtggaaatacaggtttacttggcaagtctcttgttaggtgccttcaacaaaaaaactgggatgtacatacacttggtagagaagatggagatattttacaaccagattttctgagtaattacattgataaatgttctcctaatgctatctttaataccattgcatggactcaagtagatcttgcagaaacacatagtaatgatgcattacttattaatagaacacttccctcattattaggtacaattttaaaaggaacatctactcatcttatacaatttagtacagactttgtttttgatgggacaaaaaatgtcccatacgtagaagaagacgtaccatatcctctctctgtatatggctctagtaagcttgctggtgaacaagctatacttcaacttaaattagaaaactattctattattagaacatcttggctatttgggccaggacgaaaaaattttatacaaacaatcttagaactagcaaaaactaaaaactttctacatgttgtacatgatcaaattggctctccaacctatacaccggatctagcagaagcctctatatctctagtagaaaacaaaggaaaaggaatattccatatcgctaatagtggacaagcatcttggtgtgagtttgcagcagaagctattcgacaagcaaacttatcttgtacaatacaaggtatttccactaatgagtgggggaaaaacattgcaaaacgccctgcctattctgtgttaaactgtgaacgttaccgtcaaataacaggtatttctatccgtccttggccccaagctttacgtgaatatatttttacatattttctacctatggaaacctaa

SEQ ID NO: 9966 - DNA, 1020 bp, Lawsonia intracellularis
atgcaattacttataacaggtggatgtggttttattggaacaaatttcatccaacttgccctgaaagagttaaaagatgtctatattgtaaacttagataatctcacttatgcagggaacccttataatctaaaagagatcgaaacaacaaaacctgatcaatacctctttattcatggtgatattggtaatgcaacacttgttcagtctcttctacagtcctattcctttgatgctattattaactttgcagcagaaagtcatgttgatcgctctattacaaatgctctaccttttattaccacaaacatcctaggaacccaaattcttctagatgctgcaagagcaatgaatgttccaaaatttatacaaatttccacagacgaagtatatggctctcttggaattaatggaaaattttcagaaaaaacaccattatcccctaatagtccttactctgcatctaaagcaagtgctgatatgcttgttcatgcagcatataaaacatatggaataaataccattatcactcgttgttcaaataactatggtccctatcaattcccagaaaaacttattccacttatgattcatcgagcacttatggatgaatctctacctatttatggagatggactacaagtcagagactggattcatgtagaagatcattgccgagggatattacttgttctggagaaaggaagaccaggaaatatatataactttggtggctctgcagaacaaaccaatcttgctgtagtaaaagaaattttacatcttcttaataaaccaaactctcttattcatcatgttaaagatcgccctggtcatgatcgaagatatgctatggatttctcaaaagcagcaaaagaacttggatatatgccacaaataacatttaataaagggcttgctgcaacagtaaactggtatctctctcatagagattgggtacaaaatattctttcaggagactataaagaatttatgaatagatggtataaggatcgcttgtga

SEQ ID NO: 9967 - DNA, 792 bp, Lawsonia intracellularis
atgaaatatggtattcttttaaccacgtttggatcttttaatttgtactgcaaagtatctttttcaaattttgagtctcaagttcaagaatgttttcctactattcctattcgttgggcatttacttcaaatgcgttaaagaaacagaacatatttagggatgaaaagataggtcttttagatgaagtattatctaagatggcttttgagcagtttacacatatcgcagttcaacccttacaagttattgctggtatggaatattcaggaatagtatcaaaaattaaaatactaggtgaacgtcttggtttttcttccattttagtaggagagcccctaataacaagttctattcattcaattgaaagagttaaagaagctattttttctgttattccttataagaggaagcaaactgaacctgttatttttatggggcatgggaataaatctatgtttaaggataaatatagaaccttatccattgctgtgaggaataatgatccattagtatttataggaacaatggatggtagttataggttagagcatattttatcagctttggagaatgcattgcagactgtttggttaatgcctttttttactattattggaaaacatgtattagaagatatggttggaaagtcaccaaattcatggcagtcacgtttagaagcagctggtttttcatgcatacctattttaaaaggcttgcttgataataaggcattctcagatatatggatagaacatttaaaaatagtaataactaatctatataatacttga

SEQ ID NO: 9968 - DNA, 969 bp, Lawsonia intracellularis
atgtatcattttaataaacaacttgtattatactatattgtagcactatgcttgtatttattagtaaatatttcaatagctaatgcacgtattattgtagtaatttatggtggagatacatgtataacagcccagcaggcttgcagtatagctattgctgaagctttattaattgaatcagaagagtatctttctcataaattttctgagcctagacgagaagctataaaaaaatattttagtatggtttctcctggtttagtattaaatactactgagttagaaccaacctcattggaggatggaagaataaaaggcgtatttgatgttcctatacgtaaaacagcattatatcgtttattacgtgagctaggcctctcttatactacatcgtttatacaaccatatgtactaagtatgtttaatgttcctgatgaaatagctttgcttgataaactatttttattagaacaggtaactggagttgttcagagtgaaaaagttgataatacttctcataaaatagagctacagcttagttttgaggatggaatatgggtggcaaagcttttgggggcagcgcaacctattcaggcttctggttactcaatagacaatatttggagagagatctggggagcttttttttctcaacgtcaaaaagaaacttcttcatatttacaaagctatttattaagggtttcaggatggaaacatgctgtagaagtagaggcattgggaaagactttatctcattgggaatctattacaaaaaatgttttgttacatgaagttagtattagtaagggagtaatagcagctcagtggacgttaactatattaaatatggatgggtttgaaaaacagataaaacaatatagcttagcacgaaagctacactatgaaataaagccgtttgaggctatcataaaggataatagtattgatatacaatgtattggtaactaa

SEQ ID NO: 9969 - DNA, 240 bp, Lawsonia intracellularis
ttggggttagctgttagtaaaaagattgggaatgcagttgtaagaaatcgtattaagcggttgcttcgagaatgttttcgtttacatcaagaatatataccaaaatcagtagatatagttgttgttcctaaataccatcttagattagtacctattacattatctatggttatccaagatattatctttatttcaaataagatggaaaagtttttatctactaatggtattgaggtatag

SEQ ID NO: 9970 - DNA, 1599 bp, Lawsonia intracellularis
atggaagataagcgtatagttttagctataatactttctcttgttgtctttcttggctggcactcttttgctgagtatatgggttggatttcaccaaaggtacagcacgttgcaaatgaacgacattcttctgtagatcaaactgctacttcaaatatagctttggattctgttcagtcagtattttctccacctacaggtaaagatgtatatattgagacaccactgtatatagcaaaaatacactctagtggtggtattttaagttcatttattttgaagaaatataaggtgaacttggataatacttctcctttagtaaatcttgtaagtcctgaagcatctcaagcaatgccattaggtattactttaaatggccaaccctcatggagtaatggtaattggtcttttttaggtggtgacttatatctcaagccaggagaaacaaaagagcttacttttgttggaattgttaatggagttaaaataatacggatatttacatttaatgcagatagctatttaattcacgaaaagttacaactagcttcagaaaaacagaatagttgtcctacaaaagttggcttacttgtagctgcaacaccctttggaacaggtcaatatgatcctacacgtatggcttggagtattaaggattcatttaaagaggaaacaagcatagataccttaaaagaaaagggtattcaggagtcaggtgagtttaactggggtggagtaatgagtaattactttatgaatgtagttgctttatctgatccactatatcttactattaaaggacggatccaaaatgatgtttggcgtgtagcacttgaacgttcaaatgttttaatccctgctgaaggaactacctccattacagttaactggtggtttggtcctaaagatcgtgaacttttatctcgtgctccagataagcttgaaaatgctatagattttgggatgttttcaattattgctaagcctcttttaacagcacttacatttttttatgaatatacagggaattggggagtagctattattgtccttacattatgtattaaaatagttttttggccattatcacaaaagagttacaactctatggagcaaatgaaaaaacttcaaccaatgatgcagaagttacgtgaaaaatatgctaatgatcgtgatacattgaatcgtgaaattatgcagctctataagacatataaagtaaatcctgctggaggttgtttgcctattttgctgcaaatacctgtatttattggtttataccaagcattgttaaactctatagagcttcgtcatgcaacttttatttattacttgccttttacccatcttgtttggctagcagatctttcagctgctgatcctttttatataacaccattattgatgggtgctagcatgtttttacagcagaagttgactcctgcatcaggtgatcctactcaacagaaaataatgatggttatgccaattatttttacagttatgtttcttaatttcccagctggacttgttatttattggctatttaataatcttctttccattggtcaacagtggtggatgcttcgtaaggcataa

SEQ ID NO: 9971 - DNA, 1014 bp, Lawsonia intracellularis
atggaagagttcagggagtttgaagaaagaacacttgatgaggcaatacgtgctgcatgcaaattttttgatgcaacaagagaacgtcttgaaatagaacttatccaagatgcaaagaatggtatatttggtcttgtaggtgcaagaaaagcacttattcgagcaagacttgctcaaatgcagtcttcggtagacacattaaagcagaaaaaaatatcatcattatcattgagtaagaaaacaaaaaaacaaaatagaaaaattaaccatcatcaaatagaccaagttgggaatgtgggagaaatttctacacagcaattaaaatcatcttataatcaatcattaaataatacagttgtcagagaagaatttccacaggttgataataaaatagagagagaaaaggataatgagtttagtcagcttttagatttatctatagaaaataaaggtaggttgggtccggaagttgcaacactagatgtcaatgaagaattatttaatgataattatgatggtaccacaaagaattttagtgaattagatcaagataaactaattactgaagcaactaatgttgtaacaaagcttatcatccctatacttggaaatgttcctatagaagttactattcttaataatagattagatgttcatgttgattgtggtgaatattcaggacttatgattggtcgtggtggtcaaacattagcttcattacagtatttatcttctcgtattttaagtagaataatgtcaagttctatacgaatacagtttaatattggtgattatcgtgagcagcaacatgaaagacttcgtcatttagcgttatctttagctgagcgagtgagaaattctggtcgttcatgctctacccgtcctatgagttcttatcacagaagaattatccatctaacattgcaaaactatccagatattcaaacacgcagttctggagatgggatattaaaaaggataattattcaacgtcgtcgtcaagaaagacgttaa

SEQ ID NO: 9972 - DNA, 1380 bp, Lawsonia intracellularis
atgtgtgatactattgctgcaattgctactccttcaggaactggtggaataggaattattcgtataagtggtccaaagtcaaaagaacgtcttacagaattatttcattcagtttcgccaaaatttacagactttaaaccttggatgttacacagagggtatttagtagcccctaccaatgaatttttagatgatattttggcagtttatatgccagcaccatatacttttacaggggaagatgtggtagaacttcattgtcatgggggacattttttattattaactatacttgaaacagttctttgtaagaatattcgtcttgcaaaaccaggtgagttttctcagcgtgcgtttttaaatggacgaatggacttaacacaggcagaggcagtagcagaactaatagcagcatcttctcgtaacgaagtattattagcttctaatagacttaaagggctacttggtcagaaaattatagatattcgtagacgaattgaagaacttagagtatggatatgcttagccgtagacttcccagaagaagagtcaggtattttccctttagaaaaatttattaatggactgttagaaattcatgaaataattcaaaagttgatacatgcagcagaacgttctcgttgttggaaagaaggtgttactgttgcacttgctggtgctgttaatgcagggaaatcaagtttattaaatgcattgcttggaaaagagagggcaattgttacagagcaccctggaacaacacgtgattttttagaggaatgtattatagttaatagcctttcgattcgtcttatagatactgcagggttgcgtgttacttctgatccaatagaagaacaaggaatacagaaaggtcgtgaaaaaattgatgaagcagacgttatattatttattattgatgggacggttggtgttacagaagagtcaaaattgttaattaataattttggagtagaacgtacaatccttgtttggaataaggtagatttgaaagtacctccttcaaattggactgaattatatacctcgagccaggtaagtggaatatgtgtatcagcaaagacaggtagtggtatagaagaattattagtactattatataattttgtgctatctcaacataatgcccaagaaccaacatttgatactattgtccctaacatgcgtcaagtagaagtattttctttagtacttgaagagattagaagtctttatgaagacattcgttcaggcatcccatatgatctttgtgcagtgatgcttgaaaatatatcttcaatgcttaattcaattataggttttgatacaccagaagaagtccttaatcgaatttttgcatcattttgtattggtaaatga

SEQ ID NO: 9973 - DNA, 597 bp, Lawsonia intracellularis
atgaatgaagaatcagtatacaatggtaagtctgtttcaaaggaagatattaatattttgcctattattacttataagggcaatataaaagttgtgcagacagaaaacgaacttagagatgcattggatcttttaaaagatgaaactgttcttgggtttgacactgaagcaagaccatcctttaaaaaaggaaaatcttatcctactgctttagtacaactagctagttcacaacacgttatacttataagactaagtaaggtccctttaggagaattattagtaaatattctctcttgtgcaaaaattattaaggcaggcgttgccattcatgaagatatacgcttattacaaaagttacatccttttgaagcagaaggtattattgatattgcagaaatggctcgtcgattgcaacttaaagctcaagggcttcgtacattagctgcaaatattttaggctgtcgtgttagtaaggctgtacagtgttctaactgggaaaaaaaagaattgtctcctcaacaagttttgtatgctgcaacagatgcatgggttggacgagaattatattttaagctccttgaaatgggtgcataa

SEQ ID NO: 9974 - DNA, 2940 bp, Lawsonia intracellularis
atgcaaggtcctccatttcttattataccttgggaaagagactttttagaatgtttatcatctattattataaaggaaacagatggacatttagataaagctgctgtgatttttatgcatgatcgtccaagacgttatttaacagcatattttcaacaacatcccgaactttccaagccttgcatcctcccttatattttgacgattcaagaattgttatcttgtctttatttggagcaacatacttctttatgttatgaagcaggtcttcttgatcaggtagacttacttttttcctgtgtagaacaactatcagcattgaatgtctccttattcaatttattatccaaaggtggagaagttgggtttttcccttggggtcttcagttggcttcagtctttgaagaatgttttactcaaggtcttaagccaagagatttactttatactgaaggtgaagtggcgccttttggtactgcattactagcatcattaggtcaaatttttttgttatataaacaaaaattagaacaagaagggatgacaacccctgcattaaaagcatatgtgctagcagagcagattcgccaaagtacttttgacttaccatcctttcttaaacaaaaaagtatatttcttgcaggatttagtacattaactggtactgagaacataatttttcgatatttatgggaaaaaggtgcaaaaatttgtttacatgtagactcttctcttgctgatacaggtaaaggacactgggcatgtagctcacaagctaaatggatacaatcttggaatgcttctacagagttagtttttcaaactaaaccagtaaaaaaaacatggcatttttttgctggttatgatttgcactctcagttagaaaaattacaggatgatttttcattacacgaagatatacaaacttctacagccatagttttaacaaatagtaaatctcttcttccaatattacatcatttaccacataaaaattgtaatatttctcttggatatcccctaaataaatcgttattatttcgtttgttagaaaacatttttaaaattcgtgagttgcaacaagaagacggtacaatctattggaaatctttattacatcttattcgacatccatatcttcgttttcttaaaatagatggttttgaattgtatagtttattacataagctagaacaatggatagttaatggtcagaaatatattgatttaaacatgttttttagggaggttgagtatgaacaacctcacaaaaagtatgatttttctgaaagtgaatgtttgttacttaagcaacttattaaggttacagtagaaaattgtataactattgatacccttgcaaaatttgcagattttttaagtatattgtgtgatttccttttgcagtttgggtatgagagttggcaacgtttccctctagatgctgaatgtttatttaggttagtccataaggttattcctgcattaaaggataatcgtatggcacatactgtattatcatgggatttactccaatcaatggttgtagctttgattcatgatgaaagagttccatttgaagcggatcctataactggcttacaagttcttggaatgctagaaaccagattattacatttttctaaggtatttcttatagatgtaacagacgatcagcttccaggaaatcctataagaagttctttattacctgatagcttaagaaaaatattaggactacctaatgcacatgatagagatgtattgacagcatatactttttatagattgttagctggtgctaaagaggtatacctttactggcaagaaggaatagaggtgtcaaactcctttgaaggcaaaaagcaaaaaagtagatttgttgaagaaattctttgggaagaagaacaaagcattggttcacaaataactccaggagactatatattaaatatagctaaaccagaagtttctcctccactcaggaggcgtagacatattattaagactcctgcaattcaacgacaattaaatagtatattgagtcatcctgtttcagctacacagttagatacttatttaatgtgtccattacgtttctattttgaaagagttgctatggttcgtccagtggaggtagtaaatgaagatgatgatccagcatctgttggccagttgttacataaagtattaaaagtattttttatggattatgtaggtaaagaatgtataaaggaagatttgtcaaatgaaagattacgaatgttatttaaagaagaattactatcgtctgggcttataaactctttacctcctgaaagttctatgatgcttagtcttagtggacctgaaaaattggtccgttttttatctaggcaaccagataaaacaaaaattatatatcttgagaaatactttcaagcaactctacaaataaatggtaatactcgtgttcttgaaggaattttagatagagttgataaaaggggaaatgaaggagttattatttttgactataaaactggtcgtattaaaaataactctgataagttgtggcaggatgagagtatttggtcaaaccttgaatcttttgatttaacttcttgtatagaacatccagaaaaagctgatgagcttctttttactctttcagaaaaaatttcaactatacagttgctttactatatatatctttatagagatgctacaggtgaagaaattcaagatgctgcatttatttctctaggggaggatggtgctgaatattggttaatgagggacttggcagcaaacataaaagaagatattattctgaataagattcctaagcttttaaaatttttattataccatatggagtataggttagaaatacgaccacatgaaggccgtcattgtaattggtgctcttggaataatctatgtaaggtgaacggataa

SEQ ID NO: 9975 - DNA, 1131 bp, Lawsonia intracellularis
atgtcatttccaagtttaaaaataggtgagttatgcgccagagtccctattatacagggaggaatgggggttggaatatccctttctaaattagcatctgctgttgctaaagagggaggtattggagttgttgctagtgctatgattggtatgagagagcctgacgttgccaaaaatcctatagaagcaaacttaagagccttaagacgtgaaatacaaaaagctaaggaggcaacaaaaggtatcattggtgttaatattatggttgcactaacaacttttgttgagatggtccgtacttctattgaggaaaaggctgatgtaattttttctggagcagggctacctttggagctcccaaagattttacttgaactctgtgaacaaaaaaaagaagaatttaaaacaaagctagtacctattatagcatctggaagagcagcaacacttatagcaaaaaggtggttatctcgttatggttatttcccagatgcgtttgttgtagaaggcccaaaggctggtggacacttaggttttcatgaaaaaaatctatttgatcctaactatgctttagaacaacttgtcccaggagttgttgaagcagtgaaaccttttgaggatcaaagaggtcaagcaataccagtaattgctgcaggtggtgtttttacaggtgaagatattgctcgctacttagagcttggagcttctggcgtacaaatggggacacgttttgttgcaactcatgagtgcgatgcagatgataggtttaaacaagcttatgttcaagctaaagaagaagatgtgactatcattaagagtcctgtaggaatgccaggtagagctttatttaacacatttattgactctatgcgtaaaggtaaaaagagacctttcaagtgtatttttaaatgtgtaaaaacttgtgagcatgaaactactccttattgtattgctacagcccttattagtgcaatgcgtggtaatcttgagcgtggctttgcatttgctggtgctaatgtcccacgaatagataagattatttcagtaaaagagcttataacaacattacaacaagagtttgatgcatttattcaaagtattgtcccaaaatctcaacctactgtagaataa

SEQ ID NO: 9976 - DNA, 984 bp, Lawsonia intracellularis
gtgcatatccttgctgcagatattggtggtacatatagccgttttgctctctttaaagataaccctctatgcctaatacataaagagtatatttctagttatacaacttcgtttactactattctacaacaaataatgtctaattctttatttgcatctgtaccattagatatgtgtgtattagctattgctggtccaatagataatcaagaaatagtaaaaccttcaaatcttccatattctattataaaaaaagatttattatctttctgtaaaaatattctttttatcaatgactttgaagcacaagcctggtcttgtcttacagaaagtatgtcagatgctgttttattacatccagaaccaaaacataactcctttcacaataataacaatgtattttcatttaataataagtctgggaggttaggagtcattggtgcaggtacaggactaggaatggctgttcttgaacttgatatgtatggaaaaacaaaagttatagcatcagaaggtggacattcagcttttccttttataacaaaccatgagcttgagtttggaaatttcctttgtcaaaagaaaaaacttaattatgcccgattagatgatgttctttcaggatcaggtcttacctggcttcatctttttttaactaaagaacagtttaagcctgaagaaattaccttaaaacctgagtttattgatagtgaaacccatacatacttttcatgcttttatgctcgaatatgtcgctcattggcgttgtttagtctgacccaacaagggattgtaatcactggtggattagcaaaaaaatgtcaaatattagtcaatcatccttcctttaaaaaagaatttgtaaacattggaggagaacataaaaaaatactctctcgaatgccaatttggctcaactgtaatgatgcaagcggactatggggagcagcacaagcaggtgttatatattcttcaaaaaattaa

SEQ ID NO: 9977 - DNA, 780 bp, Lawsonia intracellularis
atgattgaaggaatttcatcttcttctataagtttctcaggatgctcaggatgttctgtacatagtgacagtcaaaaaagcaaaaaagagaatacgaatactccaattcaaaataatctttcaaaagagaaagatactgatgcaacaggacttagacttacccctgagcaaaaaaaagaagttgaagaattaaaaaaacgtgatcaagaagtacgtactcatgaacaagcccatatgactgctggtggagatttaaccagtccagcaagttatacaactacaaaaggaccagataataaaagctatgcaacaggaggtgaagtacaaataaatgtgtctcctgaagaaggaaatcctgaaaaaactattgaaaaagcacgtaaaatccgtagtgctgctttagcaccagcaaatccatcaagtcaggatatgcaagttgcttctcaggcaaaccaaatggaggcacaagcaaaaatagaaaaaaattctatagaaaatgcagaaaatggtaagaataaactttctgaaaaaaatactattacaacaaaaaaacaagaaaaaaaatctattaataaaataggaaatttctcagtaaatgaatctctaattggattcttagcgtcgccttttatgttttcatctgcaaagaatactacaatagatggtaatatgataggagcacatttacctccttcacaaaaagctgtcgcttctctctattcttacaatgataaattagcacaagaaaccttaccctcctctttatctctaatgatataa

SEQ ID NO: 9978 - DNA, 1743 bp, Lawsonia intracellularis
atgttaataaaaacaactatgaaagaatatcagcctaaactttcttggagaactatagggatattttttttacttatcttattagctacttttattataggaaagtcaggtaaacagtctcagaatattgttctgcagctttttttagataaaggctctactttgattaattctatagctcatttaacaaaagatgatacaataggatataataagggatttcaaatacaattggtaattgataagttagtaaggcaaaaagatgtttattttattgtagttacaactcaagaaaaaatattttttgcacattcttcagatagtaactttcctttaaaccgctctgaaattaacacattagtggatatggcttcagcaactgttataccaggtgatggtataatgtggaattttttacagttaaacaataataatgcttttgttgtatatagtaggtccccagggatagttagtgactctccagttaatgtaacacaaggtaattttaaagatggctccttcatttttattggatttaatcctgaactttttttagaggtacaagatgctgataaggaacaatctttactatctatttgtactattttatttttttgtcttcttttactattaagttttatattttttagaaactttggatatattcaaaaaacatataatgtaattaatgcattgacagaatatgttgtattaacgtctaaagatggtcttatgttacttgactcagctggagctgttttgcaaatgaatccagctgcagctcagttttttcatataagtaaccctattatagggtcttgggtttatctcagtaataaaaaacacgatgagcttttcccacccattttttatgatgtgattaaacaggttattgaacaagggaaattagaagaaacagagctcttcttatctttagcaggagaagaacattatataatagttcaaggtaattctttggatacatttaagaagggtcaaccagaatatcttttatcttttagagatattacaaaaatacgactattagaaaaagatctttatcaaaaagatacgttagcatcaattggaagccttgcaagtggagtagcccatgagataaggagtcctttaagttctataaaaggatatgtgaactatctaggtgatcgattaccctatgatagttctgatcaagaactcattaaaattattatgcaagaaatcgatcgtcttaatcgagttatttctgacttaataggactgtctgtccctacagatgtttatccagagtatattgatttacaaaaagttattgaagatacgttacgtttagttaaacttgatgctaaaagacattctgtagagcttctattttatagaaatgaagagcttccttttgttcctttagatccagatcgtattcgtcaagtccttcttaatctttgtcttaatgctcttgatgctatgccagatggtggttcattaaaaataatttttgacgttaacaaaaatacacagcagttttttcttgaagtgattgatacaggcatgggtataaatgaagaagtgttaccacgaatatttgatccatattttactacaaaattgaagggcacaggtttaggactttcaacagtccgtaagatagttgaggctcataaaggaacaatactagtttcttcagaattagggaaaggaactatttttcgtttagtttttcctcttaaacttaatgagttatga

SEQ ID NO: 9979 - DNA, 1416 bp, Lawsonia intracellularis
atgatgaaacctattattcttattgtagatgatgatgatgtacatcgtagtatgttgtctgcattactaaaggggtgggggtatgaaacagatgaagcaagtgatggagatattgcaattacaaaagcaaaagagcatgcatatgatacaattttatctgatttaaaaatggcaagagttgatggtataaaaatgttagaatgtattttaaattataacccatccatacctattattataatgactgcatggtcttcagtagagacggctgtgcaagcgcttcgaatgggtgcatatgattatcttacaaaaccattagactttgatgcactgaaaaaaacattacaaaaggcattaacacatctacaggtacatcctatagtacgggataatgaatcatttcacaaagttaatacaaaaattgaacaatctaatttaggtattttgggccgtagtccatgtatgcttgaattaatacaaatggttagcacagtagcaccatccgaagctactattttaattgttggtgaatcgggaacaggtaaagagcttgttgctcgagctataagacaagcaagccatcgtagtgacgcaccttttgtcacagtcaattgtgcagcattaagtccagcacttcttgagtcagagctttttggtcatgaaaagggggcattcacaggtgctgatcgacgaagagaaggtcgttttaaacaagcagatggaggaacactttttcttgatgaaattggcgagttacctttattgcttcaagcaaaattattacgcgccatacagcaaggcgagatacagcgtgtaggaagtgatacacctataacagtaaatgtaagagttattgcagcaactaatagagatttaccagaagaagttatagcaggacgatttcgtgaagatttatattatcgtttaaatgtaatagggatagaagttccaccactaagaaatcgtattgaggatattccactacttgctacattttttctagaaaaatttgcgctgtcaaaccgtaaggtaataaaaggatttacgcctcagagtatggatgtactcctaaggtataattggccaggtaatgtaagagagcttgagaatgcaatagagagagctgttattttaactacaggagactatatatcagaacgagaattacctatggttatgacttctccttcacaacctaatgtactttctagtcaatcagataaagaaatagtccaatataaagatactgttaaacatttaagtcaagagcaaaccttaacacttgaagagcttgaaaaaagagctattataaatatgcttcatgaaacatctgagaataaaagtgaagcagcacgtagacttggcatcacaagagcgacattacacaataaacttaaacgatatggaatagaataa

SEQ ID NO: 9980 - DNA, 417 bp, Lawsonia intracellularis
atgtcagaggttctgtatgagttttatacaggtttaacaatgacacagggtaatgattcagctttaagtagtaaatcaccattgaaggctttttcaaatcagactattgattgggacttatctcctgaaaaggcagtaaccttacatctagagtatggcaacaataattggcatgtcatacatacagggggttgttctggtcatgattcttctgtttattttatagttgatacatatagtgatcctatacaagtacgccttattcgaaggaattttgaaatggcagaacaccttattagtataccattaccggatacgttagttaaactttttcaaaaagagtatggaaatattcgtggtgtatttgaacctctccctgagattaaggaatggctacgtacagagcttggccaatag

SEQ ID NO: 9981 - DNA, 984 bp, Lawsonia intracellularis
atgcagcaacaatacttagttaaacaaacagaataccttcttcaagtaactgatctctcagtacagtttaatctggatacccctataacaattctccaacatatccaattttgtcttaataaagggaaaacgttatgcctagttggagagtctgggtgtgggaagactatgacagcattagccttgctaaaacttcttcctgaatatggacgtattatatctggacaaattttatttaacaacaaagaacttactcagctttcagaagcagaaataagggaaaaaagaggtaaagatattggaatgatttttcaagaaccaatgacatctctcaaccctgtcatccgtgtaggagatcaaatagcagaaccacttattcaacatcttcacttctcaaagaaagacgctcttcataaagctatagagctacttaaaattgttggtatttcatctccggaaaaacgtattttggactatccacatcaattatcaggaggcatacgacagcgtataatgattgctatggctcttagttgttcacccagtctacttattgctgatgaaccaactacagccttagatgtaacgattcaaagacaacttcttgtgctacttagacagcttattgaaaaacatcaaatgagtatgctacttataactcataatttaggagtagtagctgaaatggcagacgaagtatgtgttatgtatgcaggagaagttatagaaaacgcatctgtatatgatttattcaaaaagcctgcacacccatatacacaagctttaatgaatgctattcccttattaaaaaagggcaaattacgtctagaatctatacctgggacggttccagctttaggaaaactccccataggttgcaactttagacctcgttgcccactagcacatgaacgttgtataataaaacctccctctacatatattggcaataatcataatgtttcttgttggctctataactaa

SEQ ID NO: 9982 - DNA, 339 bp, Lawsonia intracellularis
atgtctgcagttgttgatagtatgacaccatttccttgttcagaacatgatgagcttccagttataaatgaagcaacagcatgctgtgtctttgataaggtagagagttatatttcattgcgtgatttaaaagtaggacaacatgctcgtgttgtacgtgtgcaagcagatggagagctaggaagacgtatccgtgatatgggtcttgtcccagggacagaggtaactattgttgggagggcacctcttaaagatccagttgcattaaggttactaggttttactcttagtcttagaaatagtgaagcagactatgtgatggtatcacctatttcataa

SEQ ID NO: 9983 - DNA, 2202 bp, Lawsonia intracellularis
atggttattttacaaaaacaaacatttgctttagccggtaatcccaattcaggtaagtcaacgctttttaatactattacaggttctcatcagcatgtgggaaactatccaggtattacagttgaacagaaagaaggctttttacatacagatactgatgaaattttgcgtataattgatcttcctggaacatactctttaacagcatacacagaagaagaaaaagtagctcggatggtccttctcaatgaacatccagatgttgtgattaatgttttaaatgctaatgcattagaaaggaatttatatttaactgtacaacttcttgaaatgggtatgcctcttgtccttgccctcaatatgatggacgaagttgagtcacatggtttaagtattaacatcaagaagctttcttctaagatgggtttacctgttgtcccaacagttgcccgaacaggaaaaggttgtaaaagattaatactagaagcatgtcacttagcagatgcacgaagaggtgtggaaaaaaaacctttactaatttcttatggtccagatcttgatcctgtaattaagtttatggaagaaaaaattcaagaggcagaatttacaatcaagaatactcctgcacgctggattgcactaaaatttttggagatggatgaggaattaatagaaaaaactcgtcagttaaatcttaatttatcaaaacaacttgaagaaaaagttgcagaagtaactgctcatttacatgcaacttttgatacatgtcctgaggctgtaatagctgattataggtatggatatatttctgctgttctgagagaaggagttcttacacagcaggatcctgtgcgttatagaattaaattgtcagataagctagacactgttcttacacataagttttttggtccagtattcatgttttttatactttatgctatttatcatttcacatttacattaggggcaatccctatgggttgggtagcatctcttttttcatttcttagaacacaggcaggacttttactgccttcaggacttttaaaatctttagtcatttctggtattattgatggtgtgggaggagttatgagctttatcccactaattttattaatttttttacagattgctgtacttgaagattctggatatatggctcggatggcatatatgttagaccgagtatttcgtttttttgggcttcacggatgttcagttgttccgtttatcattggggggggtattgcaggaggatgtgcagttcctggtgtactcgcagctaggacattacgtagtcctcgtgaaaaactagctacattactagttatcccatttatgagttgtggagcaaaattaccagtatttattctctttgctggtgtatttttcccaggtcatgaagcaagtattatgtttgggttaactcttgccggttgggggatagcactattaacagctaaactttttcgttcaacaattattagaggtccttcaactccttttgttatggagttgccgccttatagattacctcttttaaaaggactgtttattcatacgtatgaacgtacttggagttatctgaagaaagcaggaacaactattcttcttatatcaattttgttttgggcagcaatgacatatccagaactttcaaaagataggttagcaatatattcaaaaaaggaggaagtgattcaaacagaaattaagcttacccaagctaaaggtggtgatatatctagccttcaagactcactccaagatgtaaaaaagcaggttggagaagaatcgttacgtaattctctagcaggaagagttggtttgtttcttgaacctataacagaaattgcaggatttaattggcagatggatattgctttgctaggtggctttgtagctaaagaaattattattgctacattaggtacagcatactcattaggagatgtagatcctcaagatgcaaaaccgcttgcagaacaactacatcaagataaaagttggacattggcttcggctttagccttacttgtttttgtattattatatgcaccatgtcttgtgacgcttgtaactattcgtcaagaaacaggttcatggggatggcctatatttagtatgatttttaatacactattagcatttatattagcagtcattgttagatacgtatccttgctatttttatga

SEQ ID NO: 9984 - DNA, 1215 bp, Lawsonia intracellularis
atgaatcctcttgaatctattgatagttgtataacttgctctatatgtactatcaattgtcctgtaatagcagctacaaaaaaatttaaaggtccaaaactcacaggaccatcagctgaacgatttagactcaaacaacaaaaagagatagaaggactatcttattgttctaattgtaaatgttgtgatataagctgcccttcaaatgtaaaaatctcttctctaaatatgttagctcgtgccgaatattacagaacaagacgtcctccctttagagactggcttcttgcgcatgctccgtttttagcaaaacttataaagtggataccttatcaattacaacttattggaatgaaaagtcctattactcgttggttacttgataaaattggaattgatcgacgtgcctctatcccttttttcgcacctacatatttcccaaaattatatagcaaatataaaaaaaaacagaagggtcattatacaaaaaaagttgtatttttccctggctgttatattaattactatgaaccacaaactggtatggactttgttgctataatggaaaaagcaaactacgaagttatattaccaaaagttagatgttgtaatctaccacttatttctaatggctattatagtgaagggaaaaaagtagctcaccataatagtaagatactccaacagtatgcagaacaaaacataccaattgtcacaatgtgtcctagttgtgcccttactcttaaacaagaatatgcagaacttttcccagagatgatagatcaagttacttcattttctaggaatattgaagatgcatgtgagtttattataaaacttatagaatctaaagagttacaaattaatgtaacactccattcgactaagcttctttatcatacagcttgccatctaaaagctcaaggaattggtaaaccaggctttgaacttcttcaaaggttaccaggagctaatattgaagatgcagaagctggctgctgtggaatttctggcagttatggatttaaaaaagataaatatgatattgctacatctatcggtaacaatttatttgatataattaaaaaaagtggtgcattatttacactttcagagtgtggaacatgtagactacaaatgtaccatcatacaggagtagaagctcttcatccactaaccttattacatagaattctcaaacaaactccacaataa

SEQ ID NO: 9985 - DNA, 1254 bp, Lawsonia intracellularis
atgaatagaaaagtcgatcttattgtagtaggtggtggactttctggtatgactgctgctgcttttgctgcacggaaaggcaaaaaatgtattcttatcacaaaaggaaatggaactatcacaataggtagtggaacaattgatgttcttggataccttcctaatggtaagccagtcagtaatccttttgaagcagttacattcctacctaaaagacatccatatcaactaataggagaattgactgtaagaaatgcattaaaaaattttagtgagttagtgggagaagaaaatgttatatataaaacaaggagtcaaaaaaatacttatgtagtcacagctgctggcacaataaagccaacatggatggttacagaatctatggatatgtcaatcatacctgatataaaaaatatttgtatactgggaatagaaggaatgaaagacttttaccctgagttgatcatcaaagggttatcctctaaaaaatattttgctaacaaaacatttacacaagcaaaacttcattttccagaatcagagagaaatatatctactttcaatgttgcacaatatttagaaacagaaaatggattaaaatggcttgttcaaggaataaagcaacaaggaaatcagtcagaccttataattcttcctcctattcttggaacaactttcttaccacatttacttcataaacttgaacaaaaaagtaactgtcttattcgagaatgtgatgttttacctcctaccattacaggttatcgactaaacatactattgcgttatatacttaaaaaatatcatgtaacaattattgataatgctgctgttacaagtgcagaagtaaaggataaccactgtatttctgtaataacaactcaaaatagcaacattcgtaaatatgaagcaactcactttattattgctacaggagggataataagtaatggtattcttacaaagcataatcgtgcttgggaacctatctttaacattgatcttccagctaatccctcatcaccagactgggcaaataaagaactttatcctaaaataaaaaaatcacatttatttagtatgattggaccaactgttgattccttccttcgtccaactgactctgatggaaatcctatttgtgataatgtcttttttattggaaatacacttaatggatatgactctgcctatgaaaagtctgggaatggtgtagcaatatctacagcatactttgcttctctaaatgtataa

SEQ ID NO: 9986 - DNA, 1629 bp, Lawsonia intracellularis
atgaaggctttatcattttacaaaaatcaacactgggatgtaattgttattgggggaggagctacaggcgtaggtacacttcgagatctctcaatgcgtggacttaaaactctattacttgaacaacaagatcttgcttatggaaccacttcacgtttccatgggttactccatagtggagcacgatatgtaatgaaagatcaaggtgttgctactgactgtgcaaaagaaaatataatattatctaaaatatgtaagccttgtatagaaaatatcggtggtctttttatcagaactaatgaagatgatcctgaatttgaaaaaaactgggttacagcttgtaacaattgtaaaatcaaaaccacacctatttccattactgatgcactaaaagaagcacctactctctcaaaacatattctgtctgcttataaagttcctgatgcaagtatagatggatttaagttagtatggcataatgtaatctcagcccaaaaatatggaggagaatttcgtacttatactaaagttacttcaattacaaacagtaatggtgttgttacaggtgttactatagaagacttttggacaaaagaaataacacatcttacttgtaactttgttatcaatgctgcagggagctggtgtggtgatgtcgctgcaaaagcaggaattgaacttcacttaactccaaataaaggtgcacttattgtctttaatcatcgactttctaaaaaaattatcaataggcttcatccaccttctgatggtgatatttttgtacctcatgaatctacaacaattcttggaacaacatctaaaaacaccaatagaccagatgatataatccctgagcagtctgatatcctagaattattaaatataggcagtgtattattccctaaaattcatcaatacagaatattacgatcttttgcagggacacggccattatatagtatgtataaatcacctaaagaactctatgcctcaagaagttttcgtataatcgatcataaaaatgaagggctatctggcatggcaagcatatgtggtggtaaagttacaacatatcgcttaatggctgaacaaatctctaatgtagtatgcaactacttcaacaataatgttccatgtaatacagcaaaagaaccacttataacagaagtagatcctacattacataaaaaaataaaatattttcctatacaaggttttgaaccagcactctcccgcttaggtaactctataaatgaagtctctactgctataaaaaataatctactaaaaaaagatctaatatgtgaatgtgaaatggttacttttgctgaggttgaatacattgctagccagccctcatcttatctactaggagatatctctcgcagaacacgaatggggatgggaacatgtcaaggaactttttgtgctctacgtgctataggaaactttctacaatttaacttactctctagcaaagaaccaatcactgatttactacaaactttccaacaaaaaaaatgggttggcatttatccatctttatggggagagtccttacgtgaagttgaactatttagacaaatctatagtgctactctaaatattgagcaggaaaatcatgaatag

SEQ ID NO: 9987 - DNA, 597 bp, Lawsonia intracellularis
atgagagaatcctttattgttctagcttgttttttactaggtattattattggtcatattgagttagtcccaaaagagcttatatatgaaggcttagccacctgtattgtctactttatgctttttactgttggcatgactataggaattaactctcaagcctggcaagttatccgatcattaaaaggaaaaatacttttagttccattaggaattcttataggaacattacttggagccgtaatttcatggcttattcttcaaaatatattccttagagacgtaatagctgtcgcatctggccttggctactatagtctctctagtatgcttgtaactcaatttactacacctgaccttggtgcattaacccttcttgtaaatatagcaagagaaattatagcaatgacctttgctcctctatttgtacgtttggttggcggacttggtcctctttctgtagcagcagcatcaagtgaactatgtatacctataattgctcgtacctctggagaactgaacactattttagctatattttcaggtgctgttcttacaatatgtgtaccaattatcattacactactttataaataa

SEQ ID NO: 9988 - DNA, 309 bp, Lawsonia intracellularis
atggttgcagaaattgtctgtatttctcttggggctcctattggttttttaatacgaaatcatcctcgattaataaaaacagtagattacagtctaatttggtcagtaaggatcttactttttttattaggactttctttaggatcaaatactactattattcaacaacttgatacattagggattcaagcaataattattacttttttttgtattgctggaagcctcattgcagcaaaattattatctcgatttgtccatataattccagaaaatattcaggaacacttaaaggaacacttaaaatga

SEQ ID NO: 9989 - DNA, 654 bp, Lawsonia intracellularis
atggaacaagttatggcattagaacaaacatggactcttcatcgacctgaggattttaaagttcgttggaaagaatttgttttagaatactttaaagtaggtgaatataaaaatcctccctattggcttaatttttggccttcaaattattttttgatagagtggttatttcatcataaggaagatattgcaggtgaactatgtatagatcttggttgtggtttgggtttttcagcggtaattggtcaatggttaggggcaaaggttataggggtagagtatgtatttgaagcactgacatatgcaaagtataatgcagcttctaataatatatcacagccatattggataaatatggattgggataaacctgcgatagttaaaaattctattccatatatttggtgtagtgatattatttatgatacaaatgatgctgagcccattatttgtttttttgataacatgcttaaagaagacggcataatttggatttcagaacctaaacgacctgcatatgatgtagttcttaataaactagaaaaaagaggatggaattgtaaatgtatgtttgaaagcgaaattcctcattgtcgtcctttgcctaaatttaaacgaatttatactcgtatgtgggaaatttctcgtggttag

SEQ ID NO: 9990 - DNA, 420 bp, Lawsonia intracellularis
atgggagaaactgttcgttttggtgtttcgttagacgaagatttacttaataaatttgataagctttgtgatcggcaaggttaccctagtcgttcagaagcattacgagatatgattcgacaggcattagcaaaggatatactacaatctaaggatagtaatgcagcaggtgtcctttcgttagtatatgatcatcatacacgtgagctatctcgaaagttgatagagagacagcatgaaatgtacgattctattattgctacattacatattcatttagatcgttataattgtttggaggtattaataatcaaaggtaatggaggtaaaattcaacaacttgcagatatgctttgctctattagaggggttaagttaggggccttttcttttcttccagttgaagaagatgttttttaa

SEQ ID NO: 9991 - DNA, 777 bp, Lawsonia intracellularis
atgaaagatattcaaagtactcctgcacagattgcatttcctattgatcgtgttggggtaaaaggtcttaagtttcctattcagattcaaacgcgtgatattggaatgcaacatactgttgctatagtggatatgggagttgatctatcagtatcatcacgtgggactcatatgagtcgttttgttgaagtattacaggattggaatgaaccactatgttgtgagtcattagagaggcttgtcaaacaaacacaaaaaaaattacagtcacagcatgcttatattgcattttttttcccttactttttgcataaaagagctccaagtacaaatatgttaagtttattttcttatgactgtaaactttcagcaaaatctattaactataatatagaatttatacttgagttaactgttcctgttatgacagtttgtccttgctctaaagctattagccacgagggtgcgcatagtcaacgttcagagatatatattcaattaagattagaacagtttagatttattgaagactttattgtattagcagagtcatcagcttcttcgcctttatattctttactgaaaagagcagatgaaaaatatgttactgaagatgcatttgctcaccctaagtttgttgaggatgtcgtcagaaatatatcaagcaagttaattacagtaacagatgttcttggttttcgtgtcgaagttgaaagctttgagtctatccatgcacataatgcttttgcttatattgaacatgagtttatttgttag

SEQ ID NO: 9992 - DNA, 1050 bp, Lawsonia intracellularis
atggagattgtaagcaacggaattattggagagagtaccactttaaaagaggtctttcatgtcctgcataaagttgcacctactgatagcactgtacttgtaactggagagtctggaacaggtaaagagcttcttgttcgtgcactacatgctcaaagtttacgggtaacaaaaccatttgttcctattaattgtggcgcaattcctaaagagttattagaatcagagctttttggccatgagaagggggcatttacacatgctgttcgttcaagagcaggaagatttgaagttgcagatggaggaactgtttttcttgatgaaataggagaaatggatcttagtttgcaagtaaaaattcttcgtgttttacaggaaaaagagatcgaacgtgttggaggtacaggaccacgtaaagtagacgtacgaattgttgctgcaacaaataggaatcttgaacaagaagtagagcaaggacggtttcgtgaggatttatattatcgtctaaatgtgataccacttcacctaccaccactaagggaaagaggacgtgatattttattactcacagaaagttttcttactcgtttttgtgctagaaaacaacgtcctattttaaaaattgatccagaagtatctaaagtttttttagcttatcattggcctggtaatgttcgagagcttgaaaatgttatagaacgattaagtatcttagtagatggaaacattgttcgacttcatgatcttcccagaaagatcattgattcagttggtacattagaagatttaactaatatagaacttccaaaaagtgttgagtccattcctacctctatttctccacaagaatttatttggcctaggctagaagatatgcgtactagaggagtgggattaaaagagtttttagaacaaattgaagatcgactattgggagaagccttattattatctgatggagtaaaaaatcaagcagcagaaattttgggtataaagcggacaacacttattgaaaagttgaaaaaacgtcgacttgatggagaagtgtga

SEQ ID NO: 9993 - DNA, 3231 bp, Lawsonia intracellularis
gtgaagttttttatttactcatggttgttccaattttttttgattactggaggaatgatcttatttactgtggaatatgtagaggcagtttcatggaaatggtctatgctcccagggagagaaagaataataatttcatatgatacacctaatcaaggtaaaaaagcttctcgtattagtacaacccaattagaaattcctctttcaacacctgcaaaagatctttcacgtattggagcttctccttccccagaaagtttagtatcagatttatcgttagatggctcaaagctccatataaatttaagagatgcagcatttggctatattacaacctctacaaatcctaatcagttaattattgatgttttttcagatcctctaggaaatcgttggcgtaaccttggtgtaccagctcctgcatctgctccttctagagcatcatcagcattacctgaagttcctaaaaatatttctaaacagataaaagtatccaataatggacaacggttgaataaagatcaggaaaagacgtcattaagtcaagagcaaaaacaagtagcaaaagcacctgctgaatcgataacttcggagggtaaagctgaaaagaagcaatctattaaagctgatacttctaaggataacgtaaaaaaatctcaggacgtaaaagggactttaccagtagatacaaaagataagcagcaagtaagtaaaaaggaaaatcaggaggctataagtaaagaagaaaaaattgaaactgtcccaacagttcctcctccttctgttgatgaacttactatgcttacagctaaagtagaaaaatcacaattagcatcagatgagtatagttggtcaaaaaaggcaaaaagtccagctcaggaagataatacagaggagaaattagaaaaaagccagaataataacaatcaaaaagttaatatactagaaaattcttcttctagcacagagggtactgtacaatcaaagcttactgaaacacctattgttgaagcaccaatagaagagactgtaaatagcattcattcaaaattaaatttcaaaggaccagatgcttggcctaaagaaaaagctttaagtacattggataagttagaagaggtactaaataaaaataagcttatgcagcagcctgaaactcgcgatagtcttcaacctttatcaaaaactaatgaagagaaaccagtttcagagccagtggttgtatatgttgatgaaaaaggtaaccctgttgggaaaccacctgatacaaccgctattattgaagaagcaaaaaaaaatatgagagcaggacaagtgcaaaaagctaaagatttactagctactttaaaaggccatgcactagtccaagaacagcatgaagaggtattatatctatttagtgaacttaatgaaaaaatttataaagataggtggattgaagggtatgaacctatcataaccagtactaataaagctatgaattttaatctaagatctccaagagtagctgaagcccttatgcgtcttggaatggttaatcttagaataggaaatcaagatgaagctgctggttattttggagcattacgaagaaaatttcctcagagtgaatttataccagaagcctatttagcattaggaaaagatcaattttcaaagggagagtatgcagatgctgtaaaaactttccaacttattttagataattatccagaaagtaaagcagttcaagatgcatcacgctttatggctgaagctctttttaaacaaggacattatagccgagctcttattcttgtagattttgtagatagacgatggcctcgattatatcttgaagatccaaattatttaaaaatggttggagatctttattctagagaaaatcgtttagatgatgctcttaaagcttattggacatactataatttagttccagaagcaaaagatagccatgatacattgtttaaaattggtaccagttattttaaaaagggattaatgcagggtggtaaagacgtttttgaagagttattaaagaagtttcctaaatctgactcagcgccaaaggccttacttgctctgggcgaagagcaagtaattaaagaaaatccaacaatacaagaattagttactatttttgaaaatcctagttctactatccctgaaatttactataagaagattcttgatgaatatcctaatagcccagaagcacaacaagcagcaatccgtttagctgcatggaaactttggcatagagacattcctacagctatgacaatggctcaacagtttttggataaatatcctgaatctccctatgctccaagagcagaggaaattattgcacgaggttttgaccagtcttttgcattagcactacaagaagagaattatgaacggattctttccttatgggaaaaatatccttatttgcagatagcgtataaagatatgactgacgagttacgtgtagctttagccagggcatatttaaatagaggtgatgaagagaagggtatggatctacttaatcagtttttagagtcaccacaagatccaaattatggtgattatgtttataacctttatcttgctcattatttaagaaaagaagactggactaacattttgaaacttggtgaaaaagtttctagttggaagtttcctgtatctgcacgtgctcaattagattatgcactagctattgcttcagaaaatcttgggttagggaataaagccttacctctttgggagaggctatatcaacgtgaagatattcctttataccaaaaagcttatgcaaattattttatggcaagggatgctgagcgacgtagagatttgaatgcagcatataagttaaacctaaatacattaaaactatttgttacattacaggaagagcgctcagataaagcagatcctgaacgtgtacgtgaatctcttgcagcacttatggatgttactgaagttgccaaccgttttgttgaatctttagaatgggcagatcaatatgcagcatttgttccagaaacttctcctgattatgcaggactattatttcgtaaagcacgactttatagaaagatgggagatttgagtaagtggaaacaattattagatgaaattgttcgtcgtgagccagaaagtgtatttgggcgaatggctgcatcagagctacgaacatatgaagtttcaagagatctttctcgttttacacaataa

SEQ ID NO: 9994 - DNA, 1044 bp, Lawsonia intracellularis
atggtaagcagtagacagtctaaagcaactgtcccagaaaatattgctgaagagtattatcaaatatctcatgaaattctttctagttttcctaaatatcgtccaccagtagatctcttccagtttcgtgaagatatcctaaaactctatccatacagtcgtaaaggatgtcgtctaacaaatgaacaaatagaagaaattcaaatactttgtaatgaaggacgactttttgtttctcgtacagatcaccctatttactctgaacatattgtaaaacaggttgatcttgtcttactagactcaaatcttaaggaagcagaggcagctgatatctttataagagcattagatatgcgactattagactttattgggcagccagtattacctgtttttgaaaaactctataacgatttaatggtatttactgaattcctttggcaagataaacacagaattaaactctttatgcgtcggctttatacagaacatactctttctcaccactctcttaatacattatttataggtctgtggcttctacagactacacatgaagataaactcatacgaagagaatgggatcgatcagcattgggacttattttacatgacataggaatgagtaaaataccttcttttattcttgaaaaagctacaccccttaaaagtgaagaaaaagaaaaaattttactacatacacttgctggtgtaaaaattctccaaaagttgaatcttggatttaatgaaataactcaagcagttatggaacatcaagaacgtcttgatggatcaggatatccaaacaaacttaaagaaacacatttaagtaaatttggtaaactttgtgctgtggcagactcttttgcagcaatgataagtaatcgaccatatgcacaagcaataccacctaaagcagctgcacaactacttgccaatgataaagaacgttatgatagtacatttactgtacctttattaaatgcatatctcacaggagcactagaaagcaaacttagacaagagcattctaataacgcataa

SEQ ID NO: 9995 - DNA, 1416 bp, Lawsonia intracellularis
atgaaaactaaaataattgctactattggtcctgcttctaattcaaaggaaactctctctcaacttattcaagctggagtgagtatttttcgccttaacttctcacacggagatagttctgcctttatagaacttatttcaacaattagagagttagaacatattcatcaaataccaattacaattatgcaagacttatcaggacctaaaatacgtataggtgcactccctggtgatgttgcattaaacgtatctaaaggtgatgtgttatgtcttggtccagaagataaaagaacaaatgattatccctatattccctttgatcataaagcaatcctaagcgacctagttgttaatgatatactcatacttgcggatggaacacttcaatttcaagttaaagaacaaaattccaatggaacattccttcttattgcacaagaagatggtattattacttcacgaaaaggtttagctcttccaggaaagtcaataaaagttccagcaattacagaaaaagaccaaaaagatctttctgatggtcttaagcttggagtagatgctgttgccatttcatttgttcaatctgctgaagatattattgaagcaaaacgtattattaaagccaatggatatgatatacctgtaatagcaaaacttgaacgtcgtaatgctattgaacatcttgaagaaattcttaaagaagtcgatattatcatggttgctcgaggggatttaggtattgaatgtcctttaccagaactcccagcaattcaaaaacgtattatccgtgcttgcaataaagcatcaaaacctgttattgtagctacccaaatgcttctttccatggtatcaaaccctacaccaacaagggcagaaataaccgatgttgcaaatgctgttcttgatggtgctgattgtgttatgctttctgaagaaacagctatgggtaatcatccagtagaaacagtaggctttatgagagatattacgacaaaagcagaagagcttatgatagaaacacgtcatctaaaagaacctgaagcagaaaaaagtgcagaagaatttttagcatatgccgcatgtcttcttgctgaaaaatcgttagcaaaagctattgttacacatacaatgacaggaacagcagctagacatgtatctacatgtagaccatctcagcctatttatgcccttacaccatcaagaacttcacttaaaggacttaatttttcttggggtgtactcccccaatatctatcggcatcttctgagggagatctccttaggactgaaaattttatcatgcaaaaccctacctttgccataggagaagatattattattacagctggacaatctgctccacatacagttcaaccaagaggtacaaactttataaaaattttcaggaaataa

SEQ ID NO: 9996 - DNA, 450 bp, Lawsonia intracellularis
atgcagtttcgaggtcagtcatatagaaatattgattctaaggggagggttattcttcctccaggatatcgtgaaactctagaagagtattctagtgagggttcttttgtactgactacttatgataattgtattgtaggttaccctgagcctcaatggaaagaaatagaagaaaagttttctaagttaagaaacagttcaaaaaaactacgtgattttcgtcgactttttcttggtggagcagaaaagcaatcacttgatcttcaaggtcgtgtaagaatttctcgagcacatatagaatatgcaaagttggatcatgaaattgttgtattaggccagggtgagcattttgaaatatgggatcaaaacagatttaaagcagttcttgagcaagattttgatgatgtggctgatgaacttgtagaaagtggaattgattttcctttataa

SEQ ID NO: 9997 - DNA, 939 bp, Lawsonia intracellularis
atgcatcagccagttatgcttgaagaaacaatagcaatgcttaagcctcatgcaaaaggaagatatttagatggaacagttggtttaggggggcattcatttgctattttacagtctgcaggagatggcgctgaactttgtggattagatcaagacaaaaaagcactcgccattgcagaaatgacgttaaagccttttaagaaaagggtgcatttagttcatactaagtatagttcttttcctctaatattaaaggctcttggttggaaattattagatggagctctcattgatataggtgtttcttctttgcaattagacaatgcagaaagagggtttagttttttatatgatggtccattggatatgagaatggatcaagatgctaataataactcactgtttgagatagttaataaaagtcgacaagaatacttaaaagatattatttctcgatatggtgaagaaccacaagcaaatagaattgctaaagccattgtacaaaaacgaaggactaagcctattacaaccacaaaggagttagccgatcttatagaacaagcttacccagcagcatggcgtgctaagtctcgtcatcatccagcaacaaaaacgtttcaagcttttcgtatagtggtaaatagtgagcttaatgagttagaaaaatttttaaatatgattatgggttggatagcaccaggtggaagagttgctgtgatttctttccactcattagaagatagaattgtaaaacagtatatgaagtcatggacaagaagttgtatctgtccaccatatgtcccggtttgcaaatgctttcataaacctgaagccatacttattacaaagaagcctattcgtccttcagaaaaagaaatatcagaaaatattcgttctagaagtgcaaagttacgtgtagcagaaaaagtgttgctttga

SEQ ID NO: 9998 - DNA, 2082 bp, Lawsonia intracellularis
atgagttatttaggattatcacatcgacaaaataaatatcataagtttacttggactacttctaggaaaaaagtaagaggaaaatatttttcttttaggatagataagtggaatgcttttaggtttcaaattgtagctattcttttttgtattgtttggtgtggattatggtgtcgatcagcttacatccaactatggaaaggtacttttttttcagaaaaggccagacgtcaacatattgccttagaaacagtatctactccaagaggaaatattgtagataggaatggaagaattctagcaaaaagcatacaatgttattctgtttatgcagatcctttttccataaaagacatagaaagtactgcaataaagctttcaaactgtcttcacttatcagaagaaaccataagaaaattactccaaaagcaaaatcggtttgtatggatttctcgccatattgatgatgctacagctatagctattaatcaaatgaagattcctggagttatgttattaaaagaatatgaaagagtttatccatataaacatgttgctggccagctccttggctttgttggagttgatggaaatggccttgaaggtcttgagcattcatttaatgattatctcagtagtttttcaacaaagcagcttgtgatgagagatgcttcaggaagaaggttttatatcaataatggagaagaattacacaatagtactagagagttacagcttacaatagatttacaaatacagtctattgctgaagatgctatagcacaggctgtcagcgaggttggggcaaaatggggtggggttcttattgtagatgttaaatcaagcgagatattagcttggtcacaatatcctttttttaatcctaatgcatatcgtcaatataaacctagtgagtatagaaatcggttagctttagatgcatttgaacctgggtcaacatttaaaccttttttgattgctgcagctcttcaagaaggtattgttacaaaagatacattatttaattgtgaaggtggagtttggaaaattaaaaatgttgtcattcgtgatgatggtacaccacaaaaagaactttctgtaacaaaaattttaagtcactctagtaatattggttgtggaaagatttctttagagcttggttcacaaaagttttactattatcttactaaattagggtttggacagcctactggacttaacattattgaaaataaaggtattttacgtcgtcctcgtgagtggagtgaagccgatctcatttctactgcttttggacagagtttatctactaacgcacttcagcttacacagggttttttaacaattgcaactcatggtatatacaaaccaataagtctttttaagactcctttgaaaaaagtttctgagcagcgtattttttctgaagatataagtagcgaagtacttacaatgatgcggcaagtagtagagtcagggacaggaaagcgagctgctatatctggagtttctatagccggaaaaacaggtacagctcaaaaggttgataaaacaggcaagtatggtcaagaacgtatagcctcttttgttggccttttccctgctgaagaccctcattatttgattatggttgttatagatgaaccaataacaaaaaaatatggtggagttattgcagctccagtgtttcgtaagatagctactaaagttatggcttatgtaggttctcctgaaagtcttcaatatcaagttgtaacaaaagaggaagaaaaaattagttctaataaggtttcttcattagttagaactaacaaaaaagaaaaaagctgttctaatacattagaagttcgtcaaaaaatagatagaaaagatccaattgagtacgctacatcattaaaaattcctgatgttgtaggaaaatctattcgtaaagctattgaactttttgctgggcaaggtcttgttccagaagttaaaggtaatggtattgttgtaataaaacaagagccagaagccggaactcatttaatcaaacaacatttattagataagaagtgtatcctttgggtttcggagaaataa

SEQ ID NO: 9999 - DNA, 1449 bp, Lawsonia intracellularis
atgaatagatatcctcttaaagcccttgagtccgaactagagaaaaaacatatgctaatctgtatagactcacgtaaagttgagaaagggtgtgtttttgttgcacttccaggtagcagtgttgatggtgggctttttattccagatgctgtttctagaggcgcagcatatattgtttgtcgccataatgaggtagagtattgtggtagtgcaatacctattgttgtggatgatcctagatatactttagggaggttagctaggattttttataatacaggaaatctatccatgccaataattggagttactggaacaaatggtaaaacaacaattacttatcttttagagtatctttttagggcaaaaggaaacaggacaggtgtcattgggacaattgcttatcgctggcctggattttctaaagaagcaccacttactacccctcaatgcttagacttacatgcaatgcttgcacagatgcaggtagataagacagaaattgtgtttatggaagtttcttctcatgctttagatcaaaggcgaatagcaggtattagttttaaaggggttatttttacaaacttaactcaagatcatttagattatcataaagacatgaaagagtattttcatgctaaagcaagacttttttttgaatacccatctaaaaataaaataatggtagcatcaatggataatcaatgggggaggaaattagcaaaacttgtcccagagataatagggtttggttttaaaaacaaaccaacacaagtttcaaattatttatttgggaaaatactttcttcttctagagccggcttacatctgcagatgagttttaaagataaggtttgggaactttgtacacctttagttggagtacataatgctgaaaacttgttggctgtacaagcaataagtctccaattgggtttagctcctgaggatttctgttgttttgaaaagtttacaggtgttcctggccgtcttgaaagaatagttaataaaaaacaattagatatttttgtagattatgcccatactccagatgcacttataaatgtactttctgccttacgtgatgttggttttaagcgaattataacagtttttggttgtggtggtaatagagataaagcaaaacgtccattaatggggaaagctgttgcaaaactatctgatgtagcagtgttaacatcagataatccacggaatgaagacccagagttaattatggcagatgttttaccaggcctcaaaaaagctaaacaaattattacagaaccagatagagagaaagcaattcgtcaagctatagaattagtttcacctggagatgcattacttgttgcaggaaaaggccatgaatgtacacaacaaataggatttatgaaatatccctttagtgatcaaagtgtgatacggaaaattttaggatgcgattaa

SEQ ID NO: 10000 - DNA, 1395 bp, Lawsonia intracellularis
atgcgattaagcttagatactatccttagcgttacaggaggtacacttgtagccccgactactggatataactcctatatagatggggtaagtatagatagtagagctattactactaattcactatttatatgtatttctggaaacattactgatggccataactttgttttaaaagctgtagaggaaggcgcatctgcaatacttgctagtcataatccttttgaaggagaagtgcctgtaccagtaatattggttccagacacattgaacggacttaaagtattagcacaagctgctcggaagatgacaaaagccaaagttattggaattactgggacagcaggtaaaacaacagttaaagagttagttgctcaacttcttacatcaaaaggaaaagttgctaaaaactatttaaattttaatactcaaattggaatgtctttttctattttagcagctcaaggagatgaagacttttgggttatggaggttggtataagcaatcctcaggacatggaagaattaggaactatattaacacctgatattgctcttataataaatgtagggcctggtcatcttagtgggttgaacaaacaaggtgttgcttatcataaggcacaacttcttcgatatatgaaagatgaaggattaggaattgtaagtttggactatcctgatcttgttaaagaggtaaaggaacttcgttcaggtagtttatttttttcagtactagacaatcaatgtcgctattatagtaagtatacaggtattgtcgaaaatggatatggtacttatcgattatggcttgatgatgatatagtagatgtaacctctccctttttaggtaattttggtatggaaagtgtccttgcatccgcaaccatagctcataagttaggtgtatcaagtgattctattaaacagcaattgttccaagcaatattacctcagaatagattttcttgtttcactcatggtaactggctgtgtatcgatgatagttataatgcaaatcctttgtctatgaatgcagtaatagagtcaacatataaactttcagacgaaaaaaagcctcttgtatatgtccttggtgaaatgcttgagcttggagattcctctgaagcagagcatgaaaagattggtaagaaactggcacaaacaggagctagtataattttttggaaaggtggcatgatagacaatgttcttataggtctaaaaggaggtggctttaaaggtatcttagaaaaaatatctacagaacaagagttccaatcactatttttgaagcataggttagatgaagggatcattgtgtttaaaggttctcgttctaataaaatggaagtatttgtagacgtatttatgaaactagtaggaacaaaataa

SEQ ID NO: 10001 - DNA, 1077 bp, Lawsonia intracellularis
atgttgtataatatactgttccctttaagttcagactatactatattaaatgtttttaagtatattacatttcgttctgtttggtctttaattacagctttaattttaagcatattacttggaccttattttattcgttggttacaacgtataaactttaaacaacaaattcacgaagatgtaaagatccataagtcaaagacaggaactcccactatgggaggagttcttatatgtttcagttcgctatgtagtactattctttggagtgatttaacaaatatttatgtttggttaacgctattagtttttataggtttttcttttattggctttcttgatgattatataaagattttacatcatcaaaataaaggtttttcagcaaaagtaaaattgttagcccaagttgttgtagcaggtattgctatgttatttttagtgtcagaacctgcttattctacaaagttagcatttccattttttaaatctttacatccagattttggttatttttatgttccatttgcaatattagttatggttggagcctctaatgcagtaaatcttacagatggattagatggccttgccattgctcctgtgattgtgtctatctttgttctttctgtatatatttatgtaacaggtaacgtaaagttttctcaatacttacaagttgactatattgctggtgttggtgaagttgcagttttttgtggcgcacttattggagcaggacttggttttttatggtttaatgcatatccagcacaaatatttatgggagatgttggttcacttggacttgggggagttttagggtttttagcagtactttgcaaacaagaacttctattacttattgttggagctctttttgtattggaaacactttcagttattgttcaggttggatactttaagtggacaggtggaaaaagaatttttcgaatggccccattacatcatcattttgaattaaagggtattccagagtcgaaaattattattcgtttttggattatatctattacttttgggttaatagctctttctgcacttaagcttaggtaa

SEQ ID NO: 10002 - DNA, 1323 bp, Lawsonia intracellularis
atgctttctatagctaacaattgttgtatatctttagctcaaaatgaatggccattatataaagtagctgttgttggaactgggcgttcaggaatggcagctgcaagattattacattctcttggtgcttctatacgtatagtagataaaactagagaaaacgtatctaaaacctttatggattggattaaacaaacaaattgtgaggttatgtttggagaacattgtccaaaacagtttgaagatatagatatcgttattcctagcccaggagtccctcttaatttacttaagccacattttttgaatactattcaagtgttatctgagacagaactagcatggtatcagttgtctaatgaaaaagtcattgccataacagggaccaatgggaaaacaactatagcaagtttatgtgcagcaatgttggtagaacaaggtataagtgtttttgttggtggtaatattggaactccactatcagaatatgttttgtgtaaaaagaaagtaagtgttgttgttttagaactttcaagttttcaacttcagacatgttcactatttcgtcctgatatagctatatgttctaatatttctataaatcatttggattaccatagaaatatggatgaatatatttctgcaaagttgaatatatgtaaaaatcaatgtgaaagcgatcttgctattcttaagccagggatggaagcactagtagattcatataatttgaaagctcgagtagttttttatagagatttaggaaatttttctacaagtcgattattaggagtccataatcttgagaatgcagaagcagcttggctagcttgtaaagaactaggtgttacagaggagatagcaaaaaaggttgtaacaacttttgaaccattagagcataggcttgaacaggtaaggcttttaaatggtgttttgtatgtaaatgattctaaaggaacaacagttgaagcacttcgtgcagcgcttgaatcttttaagcaaccaatactccttttagctggaggtaggtttaaggggggagatctaacatcattacgtccaattataaaaaaacaagttcgtatagttgggctgtttggtaatagtcgagaatattttgaagatgcttggggagatattatcccaataacctgggataacacattagaacaagctgtaaaacgtctttcaaacttagcacataatggtgaagttatattactagctcctgctacttcaagttttgatcagtacatgaactatattgaaagaggtaatgactttaagcgaattgttcatgaggtgttgaatgagcattgttag

SEQ ID NO: 10003 - DNA, 1149 bp, Lawsonia intracellularis
atgagcattgttagacaacatagaagattatcaggatctaatcgacataaagatgatatcagtgatatagcatcatatgattggttgttactgactgttgttttgattcttttatgtatagggctgattatggtgttatcagcaagtgggatggtagcagagcgtcttacaggagataagtattacttttttaaaagacaatgtttatttaccattattagcggaattttattatgggttatggcagttataccacgctcattgatttacaaactccaatatccatttttgtttgtaattattggtttattatttttgacgattactccattaggagcaaaagtaaatggagcaaggcgatggatttctttagggttattttctattcagcctcttgaatttacgaaaatagcattagcactgtatcttgcatattttatgagtacaaaacaagaacttgtaaaaacatttagtaaaggcgtcatcccaccgtttgctgtaacacttattttggctattatgttacttgtacaaccagactttggtggtgcaatgattctaattatgattttattttttatgtgtcttgttggtggaacaaggtttatttatctttttttatcgatagctatgtcgtgtacaatagctgctgctttggtatggcattcaccatatagagcacgacgtcttgcagcatttcttaacccttttcaagatgcgcaaaatacaggatatcaactgatacagtctttatatgcattaggttctggaggattctggggagcaggtataggtgggagtaatcaaaagatgttttacctccctgaggcacataatgattttattatgtcagtaataggtgaagagcttggttttctaggtattaccattgtaatggcattattatttttgttttttgtacgtagttacttaatagtagtgaaacaaagagaactaagggatcgtctctctgcttttgctgtaacattagttattgcattaggatgtatattaaatcttgctgtgataatgggtatggctcctcctaagggagttgctatgccatttttaagttacggaggaagcagcttattagcaacaatgtgctgtgttggtcttttattaaatttttctcgaattggtcgttag

SEQ ID NO: 10004 - DNA, 1092 bp, Lawsonia intracellularis
atgaaataccggatagcaattactactggaggtacaggtgggcatgtatatcctgcacttgctgtagcagagcagtttcatgataaagcagatctattttttataggatctcaatatgggccagaagcagagatggtaaaaacatttaatattcctttttatgggcttcctgtcagaggtgtgcttggaagaaagtggaaagctttctctgcattatacagtatgataaaagctatagtcaaagctagaaagattcttcagaaatgtatgcctgatattgtcgttggttttggttcatatgcatcatttgctccattagttgctgctaaattgaaacgtattcctactgctattcatgaacaaaatgttaggccaggattagctaaccgaatgttagctcgattagcggacagagtatttttatctgtgccagatacgttacatatttttactaaaaaaagtaaggttaggtatacaggaaatcctattcgtcaatctattgttgatttacattataaatttgaagatacaaaaaactcctctactagacatttacttgtattaggtggaagcttaggtgcaatagctattaattctattgtcgttgatggattaagtcgattgttttcaaataggattgttattcgtcatcaaacaggggtgcatgattgggaaagagtgaaagaaggatatgcattatatggtagaacaaattctcaggttactccttttattgatgatatggctgaagcatatcagtggtcagatcttgttttatgtcgagcaggggcaacaaccattgctgagttggctgcagtagggaagccatctatattgattccttttccttatgctactcatgatcatcaaacgtataatgctcaatttcttgtaagagtaggtgcggcagtccttattccagaaaaaaatgtagtagaggttgatgtgattgaaaaaattatagcattatttaacgatagagtaacgttagttaatatggctttagctgcacataaacatggacgtatagatgcagctacatgtgtagcaaatgaaattattgatcttttatcagctaatgcaatgaaatga

SEQ ID NO: 10005 - DNA, 1362 bp, Lawsonia intracellularis
atgaatagtaaaataaaaagtatttatatggttggaattggtggttctggtatgagtggaatagcagagattttattaaatcttggctatgaagtacatggctcagatattatggaatcccatattatccacaggctacgcaaactaggagctattatttctattgggcaccaggcagaaaatttaggagatatcagcgttgttgtaaaatctagtgctgttacagaagataatcctgaaatacagttagcacgccaacatggtattcctgttattccacgagctgaaatgttgacagagcttatgcggttacgtaagggagtggctattgcaggtacacatggtaaaacaacaacaacttctcttactgcaacagtttttgatacagcaggttttgatcctacagttgttattggtggtgtacttaatgcttatggtgctaatgcaagattaggacaaggacaatatcttattgctgaggccgatgaatcagatggttcttttcttttattgttacctattattaatgtagtaacaaatatagatcttgatcatttggattattacagaagttttgaagaaattgaacatgcttttgtaacttttatgaataatgttcctttttatggcatgaatgttgtttgtggagatgatcctggtgttcaacgtgtattacctagagtgaatcgtcaggttataacctatggttttgagtcatctaatcatatttgggctgaaattattgaatgtggaataataaataggtttaaagtcatagcccatggagagtgtcttggggaagttatacttacccaaccggggaaacataatattcttaatgcattagctgcaataggtgtagcattagaagtaggtatttcacccaaatgttgtattgagggacttgctaactttaaaggggtaggaagacgttttgaatataaaggggaaaagaatggaattactgttattgatgattatggacatcatcctatagaggtcgcagctacattagaaacagctcgaaaagtttttcctgatcgacgtattgttgttgcttttcaaccacatcgtttttctaggacccaagctttatttggtgagttttgccaagttctttctactgtagataagttattattaacagaaatttatccagctttagagaagcctattcctggaataaatagtcaaaatttagcacaaggtattcaacaaatttctaaaatagatgttacatattatccagatatagacgctgttttccatgcattacctcacgtgttgtgtgcaggagatgtgctgattactttgggagcaggaacaataacgacgattggtccaaagtttttaacttgttag

SEQ ID NO: 10006 - DNA, 891 bp, Lawsonia intracellularis
atgctacaaattactacatcacctgatttatcaacactcactacattgaggcttggtgggaatgctatagcattaattgatgtctttgaaaaaaaagcgttagagcagttaccccatcagatttataagataggaggtaaacctcatattcttggtggtggtagtaatattcttgctagtgatgggagtctgccatttgttcttatccgtagcaaaattcttcatgatccaatagttacatatatagatgaacaaggagttgtttttgtaaaagtttgtgcagcaatggggttagcacgttttttagcttggtgctgtaaagaaggtttatctggaatggagaacttagcaggaattcctggaactattggaggcgctgttgctggtaatgcaggttcttatgggctttctattggagaatgtatttatgagttagagattttttctttcaataatggtatgaaaatattgaaaaatgatgaaatacaatatgcatatagaaagttttctattgatgaagaaccaggggaatttattattataactgccactgttaagttaaagtataagcaaaaacagcagattattgaggtaattagagaaaatgttgcaaaaaaaacatctgttcaacctgtacaagcaagaagtgcagggtgtatttttaaaaatcctaatgatggattatcagcaggaaaattactagagcaagtaggatttaaaggaaaagggaaagatggaattggtttttcatctattcatgcaaattttttaattaatgaagggagtaaaaacagtaaaatagcatttgaacttgttcaagatgctaagcaagaagttcaaaaatcttttaacatcatacttcaaacagaagtaaaggtatggtcatgttaa

SEQ ID NO: 10007 - DNA, 828 bp, Lawsonia intracellularis
atgttaaaagataagagaagatacaaagctaacaattataatagtaggatagcttcttatccctccctacatattagtaatgagaatattagatttggatctattgttacatggagttgctggtgttttattggaattatcgctttaatattattttattttagtggattacatctttatcgcttgataacaacaagtaattttttctgtatagaacgaattaatatatatggagcttcttttttccataggagtgacatacttaagtatacaaatcttcaaactggtataaatagtttttctgtcaacattgggaagatagaaaaaatattaagtagtaacccatgggtagaaaaagtatctgtaaaaagaaggttacccggaatttttgatatttttattaaagaatatgaacctagcttttggatccttaaagatgatattatttattatgcagatagtgttggaagaataataacgccattagatacagataactttaaatctttgccaacacttgaggttatggaaggtggggaaaaatttttgccaatacttaaagatttaattgtttttttggaatcttcaaattcaataatagatgtaggtacaatttcatcagtacgtttaagttcagctagtggcattgaaatactccttgaaaattatgatattgtgttaagttttgaacctcaggcatggaaagagaatttacaaaagttgtgtttagttttgtcggacttagcttgtagaggggaattaaaacaaaccagatctgtaacagcagtagcaacaggtgtttgggtttctcaagaaaaaaatttttaa

SEQ ID NO: 10008 - DNA, 1233 bp, Lawsonia intracellularis
atgcctcagtccgaattaattgttggtcttgatataggtacaacaaagatttgtgctgtcgttggtgaactgtctggggacgggagtgtcgatgttattggtataggtacaagcccttctaatggtcttcgtaaaggtgtagtcgttaatatagaacagacagtccagtccattaaaaaggctcttgaagaagctgagttgatggctggttgtgaaattcgctcagtatatgctggaattgctggaagccacattaaaggttttaacagtcatggtgttattgcagttaaaggtggagaagtatctcaaagagatattgatcgtgctcttgatgcagcaaaagctgtagcaatccctttagatcgagaagtaattcataccttaccacaagaatatattattgatgatcagagaggtattatagacccattaggtatggctggtgtgcgtcttgaagtaaaagttcatattgttactggtgctgtaacttctgctcaaaatattgtacgctcttgtcataaaagtggtttagatgtttctgatattgttcttgagccattagcatcttctaagtctgttttaacagaagaagagcgagaaataggcgtagcacttattgatcttggtggtggtacaagtgacattgccatttttgcaaatgattcaacaaaatatacaggggtgcttccacttggtggccaaaatcttacaaatgatatagcgtttggattaagaacaccagtagctgctgcagaaaaaattaaaataaaatatggatgtgttcttgctgatattattcaatctgatgaatatatcgaagtccctagtgtaggcgggcgtgagccccgaagattatcacgtcaagtattagctgaaatttgtgagcctagaatggaagagattcttacacttattgatcaagagatagtgcgttctggctttaaaaatatgataggagcaggcgtagttcttacaggtggaacagcccttattcaaggctgtcaagagttaggagaacaaatttttaacttgccaactcgtataggatatccaagaaatgttggtgggctgaaagatatggtaaatagccctaaatttgctactgctatgggattacttcattttggtgcagaaaaagaagggatggagcaaagatttcgtattcgtactgagcacacaatatttaactcaatattatcacgtatgcgaaagtggtttgctgaaatttcgtaa

SEQ ID NO: 10009 - DNA, 1383 bp, Lawsonia intracellularis
atggaaatgctttttgatacaatggttcctcaagctaaaataaaagttattggtgttgggggtggcggaggtaatgctgtacagaatatgatagaatcctctttaaggggtgttacttttatttgtgcaaatacagatgctcaagcacttgctcgttcaaaagcagatatcaaacttcaaataggagagaagcttactaaaggccttggtgctggtgctgagcctgcagtaggacgagatgcagcacttgaaagtattggcgtcattaaggaagctattggtgagtccgatatggtttttgtaacagcaggaatgggaggtggaactggtacaggtgcagctcctattgtggctcaagctgctaaagaaatgggagcacttactgttggtgttgttactaaaccttttgtttttgaggggcacaaacgttcccgttcagcagactatggtataagccagttacgtgagtatgttgatagtcttattacaatccctaatgatcgtctgcttacaattgctcctaaaaatgctaagcttacagatatgcttaaatgtgctgatgatgttttatatagtgcagtacgtgggatatcagatttgatcacagtcccaggtataattaatgtagactttgctgatgttcgtacaataatgagtgtctctggtcttgctatgatgggaacaggttttgcttcaggagaaggaagagctatagaggcagcccgtcgagctattacaagtcctcttctagaagatgtctctattacaggtgctaaagcaattctcattaatattactgccacaactgaacttggaattgatgaatatagcgatgcagctaattacatccatgaggcagcacagggatctggagatactaatatcattataggtacagcttttgatgaagaggctggtgatgaaattcgtattacagttatagcaacaggaattgaatctcaggttggtgtgaaaatgcaaggttcaacatcttcaaaggcagctatgccatcttttagaaagtctagccatattacaaacacaacatcatttaaacctgaagcaataaaacataatttggcatctgaaaaaccacggtatagaactccaaggttattaacaaatcctatagagatggactataaaactcaaggagatcatagtgaaatttttacagaagatacaggggtaaattatagtattccaacgtatctcagagcattacttggaaaacagggagcccagtcttcaaaagaggaatatgatagaactcaccatggtgacaacaataagaaggatactcataacccagggcatgagaattttgtttttgatggtaatgagcaagatattccgatttttattcagaaacaagctaattaa

SEQ ID NO: 10010 - DNA, 480 bp, Lawsonia intracellularis
atgtatcttgagatagagcgaaaatttttagtgataggtgatgactggaagtgcaataattctgcagtattatttaaacagggttatatacagacctctccatgtgttgtgcgtgtacgtatagaaggggtaaaaagctatttaactattaaaaaacagatagaagggattagccgatgcgaatttgaatatcctatccctatggatgacgcactctatttacttaacaatctttgtaaaaagccattcatttctaagcatagatatactgttttttatgaaggtattcaatgggttatagatgaatttttagatgaaaataaaggacttattattgctgaagtagagcttaaaataaaggatcaatctattatactaccttcatgggttggacaagaagtaagtaatgatccccgatattataatagtaatttagtacaatttccattctctcagtggagcttatcagaaaagagttaa

SEQ ID NO: 10011 - DNA, 783 bp, Lawsonia intracellularis
atgaagtttaagtttctatattcaattataaatacaataaggtatgaaaagcgatgtaccttatgtcatataccatttgtgcaaactaatcattctattaaaatacaacaaccaaaaataaataacagtttaaataaaaagaaaaaactttgtttacagtgcagatatctattacaaccacgcacaaaaggttattgcccatcatgtggagaacttaataaagataaacagtcacctattactccttgtaataattgtcttaaaaatccaccaagctgggaacatttctattttttaaatgcctatgaaggcgagtataaaaaacttcttatccaatctaaatttaaagggaatccaagtatcactcaactattagggatactacttgctgaatgttgcttaaaacttcctactccagatgctattattcctatgccattacatccttctcgattacacaaaagaggttttaatcaatgccaagagttagctaggcctgtttcttatgctttaaaaaggccacttaggcatgacctcttaagtcgtgttatacctacatcccatcaaacagggttatcacagacacaacgtcttcttaacattaaaaacgcattccaagcagatccaggtgtaaaaggattacgtattctacttattgatgatataatgactacaggaacaactctacaacaagctacaaaagctttattaaaacagcatactcaagctattgatgtttgtataattgcaagaacaccttctttatcccttaaaaaagtttaa

SEQ ID NO: 10012 - DNA, 597 bp, Lawsonia intracellularis
atgtctaatattatcctacttacatgtagtcctagagcaaatggaaatacagactcaataggagcagctctttttaaagaattaaatgatgtcctacttcctatagaaatcatcccattacgttctttatctattagaccttgcatctcttgtggattctgtataacacatccagatcaatgttttcttgaagcaaatgatgaagtaggttggctatttgataaaatccgtgctgcaagtacacttattattgcttcaccaatttttttctatggcccacctgcacaactcaaaagctttattgataggtctcaaaagtattggaataactcaaattataccttatatgaaccaattcctaataatccttttttaaaaccagcttttgttactcttattgcagcaagaaataaaggcgagcgtgtatttgaggcaactttattaatcttaaaatgctttttccaatgtataggtttttctctttgtgatacactgcttctacgtgatcttgatggacctcatgatttttcacactctaatgaagctcaagctcaagtgtcttcatttgccaaaataattcaatctaaattaagttaa

SEQ ID NO: 10013 - DNA, 903 bp, Lawsonia intracellularis
atgataaatcactttataacaatagctgatcttggacagtcaaaagcatgggaacttcttctacgtgcaaaagaaatgaaagatcacaaaactaatccatatcaatgtatgcaggggaaagtagctgccctcctttttgaaaaagcatctacaaggactcgtgtttcttttgaagttgctgtacgccaacttggaggtactactatttttctaacacctaatgaaacccaaattggacgagaagaacctttaaaagatactatccgtgtactttctaggtatgtagactgtataattataagaacctttgaacaaaaaagactttatgagctaatacaactaggctctattcctattattaatgcacttactgatcatggtcatccatgccaagtaatggcagatcttcttactatatacgagcaaacttcagatattgcaaatatcaatataacatgggttggtgatggtaataatgtactcaactcatggatagaagcatctatgtactttccctttaaacttacaatagctacacctaaaggatatgaaccaaacaaagaacttattgattttgctcaaaaaaataatgcaaaaatatcaattacaaataatccactgctagctgtaaaagatgctcattatatttacacagatgtatggacatctatggggcaagaaaaagaatgtaaaaaacgtatagaagactttaaagatttctgtgtagataacacactaatgaaccaagcaacgccaagcgtaaaatttcttcactgtcttccagcacatagaggagaagaagtttctgatcaagtcatagaaagcgaaaagtctcttgtgtgggatcaagcagaaaataggcttcatatgcaaaaagcactattagaatggatctttcaataa

SEQ ID NO: 10014 - DNA, 1890 bp, Lawsonia intracellularis
atgttagacttcattcgatcaaatgcccaatcttggggggtcaaaatagcttttggattaattattattgtctttatattttggggtattggcactctctcaggaggaccagaagtagaagtcgtttctgtaaatggccagtctattacaatacaagaacttcaaaaacgttgtgaagaaatagaacaaaatatacgacaaaattttcctactatctctgctgcagaaatcaatacatttcgaattaaacaattagccacacaacagttaatccttgaaactttagtattgcaagaagcaaatcgtataggtcttattattacaccaatagaattaagaaaaactattgaatcctttcctgcctttcataatactgaaggtaaatttgatcctgctatttatttacaatttcttaaagaacgaaatgacacccctggacactttgaatcacaaatacgtacaaatctccttataaataaaatccaacaagaaattacggcaggagcttatatttctcctactgaagcttatgacgtatatatgtatgaaagtgctacacgtactatccaatacctactttttcccacagaggactaccttaacaaggtaaatatatcagcagatgaagtagctaaattttataatgaatcatcagaacaatttaaaacacctacagaacttaatttagaatatcttcttattaccccaagatctttagctaataatcaaacaattgatgacacaactgtctctgaatactatcaaaaacataaagaagactttaaatcccctgaacaaattcatgctcaacatattgtagtctttgcaccagaaaatagtgaacctgaagttctaaaaaaagcccaagaaaaaattaaccaagcagccaatgcaataaaaaaaggcgaggacttttcaagtgtagccaaaaaattctctcaagataatgttgctcaaaatggaggagatctaggatggtttacatatgaacaagctgtacctgcttttgctgacgttgcattttcattaacacctggagaaatatcacaacctattcaaacacctgtaggttatcatattattaaattaatcgataaaaagcctgaagaaataaaaagttttgatgaagtttcaaaaacgattcaacaacgtttagcagaagataaagcatcaatagaacttcaagatgtccttgaaaatgttcaacttgctcttatagaaaataaaagtcttacagaagcaggaaaaccctataatctttcccccatatctacaggtttattccctataaaagatatagcaagccaacttgaactggctaaacctgatgagctctctaagttaactcatgttagccctgggactatattagaaaatccgcttattactaaaacaggatatgttatcattaaagtaaaagatataaaacctgaatcaataaaatcaatcgaagtggtagaaaatcaaattagtagtctattaaaaaaacaaaaagctaacgagttagccatgaaagcagcagaagaacagcttactatattaaaaaattcatctatcccaccagcagtagctaaaaatttaaaaactagcccagcaataatacgttcagcaaccattgaaaacttgaagaacccacaactagttcccgatacctttaaagcaacaccaggcagctggcttacaacaccttatacagttgaacagggtgtcctgattgcttatgtctcaaaagaagttgtgtatccatcaaaagaacaatgggataacataaaagaagcgtttatgtcagcaattgtaaagtcaaaacgtgaacagatgtttaaaggtttcttaactatgcttgagaaacaagcaaaaataactatcaaagaagaaaaaattataaattag

SEQ ID NO: 10015 - DNA, 1479 bp, Lawsonia intracellularis
atgatgaaacaacatattctttttcttgcaccatcacatatcattactcgcatcttcccagaattgcgagattctggaatagaagtgagccttgctgaaaatataaacagtgcttctgctgcaataaaaaaatcacgtccagatatcataatttcacgacctacacttcctgggtataaagtagaggagctttttaatattgctaaagaagatccaaaatttccacctattgtggttaccacagacaagggaactacagaagaagctgaacgccttatgactttaggtgctcaagactattggctagaaccactttccacagaaaaaattaaaactgttctccaaaaatcatataaactaaccccactaccttcaaagtcaactcttgatggtcataagccagaagatctttctagtgcacctactattattggaagcaatcctgctatacgacgtgtccttgcactagcaaagcaagtagctccttctaaggcatcagtattaatatctggagagtcaggaacaggtaaagaaatgtttgcacgtacacttcatgcttggagtaaccgaagtaaagggccattcattgcagttaactgtgctgcattaccagaacatcttttagaaagcgaactctttggtcatgaaaaaggttctttcactggagccattgcacgaaaacttggcaagtttgaactggcttctggaggaacaattttactagatgaaatttcagaaatggatcttgctcttcaatcaaaacttctacgtgtattacaagagggtgagattgatcgtgttggtggtacagaaacaattaaagttgatgttcgtgttcttgctaccaccaatagagatatggagaaatgggtagatgaaggcaaatttcgtcaagatctcttttttagacttaatgtgattccactacgtcttccatcactagccgagcgtggagatgatattcttgaacttgctaatttctttattaatatgtatacaaaagaatatcatcttaaaccaacaaaattatcccaagaagctactacctggctaaaaaatcataattggccaggaaatgttcgtgaattacaaaaccttatggaacgagctgttcttcttgctggaggaggattaatcacccctaatcattttctccttgaaactgaagaatggcctctttttgatgaagttccgctagagcaacaaacagagtctataatacctgaagttattactatatctaatactacacaagcgctccaaacacatccacaatcaaaatctaccactgctactaccacttcttctgtattccctaatgccgttattccacttcatgaaatggaaagactaatgattataaaaggcctagaagcaacatctggaaatagaactcaagcagctgaactacttgggatctctatacgtactttaagaaataagctgaatgaatacaaagaacaaggttttactatttag

SEQ ID NO: 10016 - DNA, 1614 bp, Lawsonia intracellularis
atgaagtgtaatcagtgtgaacaaacagcagctaatgattcctgcactaatattggtgtttgtggtaaaacagataatgtgagtcatcttcaagatgtattaatttatgcattgagacggttagcacatgcagcactttctgcaagagctaagggaattattgttcctgaaatagatttttttactgttcaggcattattcattactcttacaaatgtaaattttgatcctaatgttattgagaggtttatcgaacaagctataataaatcgaaaaacatttgctcaattaagaggttgtaaaattgataatagtacacgtcctatagaagaagtaaaatctatgatgagtatgcctacaggaattgatgattttcataaagacaaaaataactgttcggctatgcaaatgctcctttatggacttaaaggaacttctgcttatgcataccatgctgcagtccttggtaaagacgatccaaatctatatgagtttatttatgaagggttagcagcaggtttcccggatcgagaggggaatattgataaggagcgaacacttagtgattggatggatttggttctgcgttgtggaaagagtaacttacgtgctatggaacttttagaatctgggaatgttgaatcttttggtgtacctacatctacaaaagtttctcttggtcaaaaaaaaggaaaagctattttggtttctggtcatgatctgaaagatctttatgatcttttatgtcagacagaaggaactggtattaacatttatacacatggagaaatgcttccagcacatggctatccaaaattacatgcatttacacatcttgtaggccattatggtactgcctggcaaaatcagcataaagaaatatctttattcccagggcctgttctatttacaacaaattgtattcagaatcccaaagaatatattgaaaatgtttttacttcaggtgtcacaggctggccaggtgtgcagcattgtaaagatggtgattactctaagcttattgagcgtgcaaaggaacttccaggtttttctgaagatgttccaggaaaagagctcttaacaggatttggtaagcaatctctacttgatgctgcacctgttatccttgattcaattaagtctggagtccttcaacatatctttttagttggtggttgtgatggtgcaaaacctggacgtaattattactcagaatttgttgaaaaagcgccagataatacagtagtattaactcttggttgtggaaaatttcgtttttttgacaaagatcttggaatgataggttctcttcctagactaatagatatgggacaatgtaatgatgcttatgctgcacttcaggttgttacagctcttgcagaaattcttgactgtggagtgaatgacttacctgtttctcttgtgttatcttggtatgagcagaaagcagttagtattttattaacattattagccgcaggagttaaaggtattcgattaggacctagtcttccatcttttgtttcagaagatattttacaattgctggttaaggaatggggaattgctcctattacaacaccagataaagatattgctttattaatgcagtaa

SEQ ID NO: 10017 - DNA, 960 bp, Lawsonia intracellularis
atggcacaaacaaatattttacttgaaactggaacaaatgagcttgaaatagttgagttctacattgatgagccggactatagaggctattatggcataaatgtagctaaggttgttgaaattattagagaacagcctgtcacagctatgccagaaatgcgtcatccatcagtaatgggtgcatttttatatcgtaatggccgagtcgttcctcttattgatctatctgtatacttaggtggtgcaccaattaaaaatacagattcacgggtcattattacagaatttaatatggttatgaacagtttcattgtgagtggtgtaaaccgtatccatcgattaagttggcttgatattgagccacctgggaaatttatccaaacaatgagtcagagttctatcacaggcgtagttaagatggatgatagagtagtttttattttagatcttgaagcaattgttgcagaattacatccatctttagctattcgtatggatgaaacttctgatcatgatgtacctgaacatccatataaaattcttcatgcagatgattctgctagtattcgtaagttaatttactctcttttaggaaaagaaggacgctttgaagtaacacaagctgtagatggtcaaggtgcttgggatttattaatgaaatatcgtgatgaagctatagcagaagatagacctattactgattttatagaaggtgttatcacagatattgaaatgccaaatttagatggtttaaccttgtgtaaacaaataaaagaagatagcgtattaaaagtgattcctgtggctgtattttcttccttaatcaataatagcttaattgcaaagtgtaaaaaagtaggagctgacgcacaatttgctaaaccagatcttcaatctttaagtgatagtatgtatagtcttattaaatctaaagagttagagctttctcgtaaaatatga

SEQ ID NO: 10018 - DNA, 810 bp, Lawsonia intracellularis
gtgttaggagttattgcgggtagtggacagttcccatttatggttgtgaagggagctcaagagaaaggctataaagttattgtttgtggttttcatggacatacagatagcaagttagaagatattgcagatcattttgaaatgatgccattaggccaatttaataggttgatccgtttttttcgtagatcaggtgttattgaattatgtatggctggagcaataaataaacctcgagcactacaagttagaccagattttagagcttttcgtttatacttttcgctttgcaggaaaggagatgatgccttatttcgaacaattataaaggagtttgaaaaagaaggttttttgatggtttctccttcaacttttgtcccttttttacattgtcctcctggggttttatctaataaacaacctgataaagatatattagctgaaataagttatggctggcctattgcaactagtttaggaagatttgatataggtcaactaatagttgtaaaacagcaaatggttatagctatagaatgcttagaaggcactaacgcaactctacaaagaggtgctgaacttggagggaaaaactgtgtggctattaaaatagctaagcctattcaagatgagagagtagatttaccagcaattggtcttgaaactattcatttattagtaaaatatcagtttaaatgcattgctgtttcagcagaaaaaacattattttttgatatgcctgaagccttaacattagctaataaacataaattatgtgttatgtctttatctgacacagatattaggtag

SEQ ID NO: 10019 - DNA, 1017 bp, Lawsonia intracellularis
atgagtaaaacacggatagctattaatggatttggccgtataggaagacaaacatttaaagcaatttatactatgtataaagaacaactagaagttgttgctgttaatgatctttatgatacaaatactaactttcatcttcttgaatatgatactaactatggaagagctaacttaaatgcaaatattaatggtaatacagttattattggtgactggactattcaatgtcttgcagaaaaagatccaacaaaccttccttgggcaagtcttggtgttgatattgttatagaatcaacaggaattttcaaaactgcagaccaagctagagtacaccttaataatggagccaaaaaagttattattacagctccaacaaaaggtgaagatattatgattgttatgggtgtaaaccaagatatgtatgatccaactaaggataatattatctctaatgcctcatgcacaacaaattgtctagcaccaatagcccttgttcttgaaaaacattttggtattgaatctggaacaatgacaactgttcattcttatacaaacgaccaacgtattcttgatctaccacataaagatttacgtcgtgctcgtgctgcagcttgcaatattatccctacatctacaggtgcagcacaagctgtagctaaagttattccagaattaaaaggaaaatttacaggctggtcattacgtgtgcctacaccaacagtatccattgtcgatttcactgctatattaaagaaaaattcagacactgaaacaatccgcaaggcattagaagaagcatctaatacctacctcaaaggtattatggcctataatagaactccacttgtatccatggattttaaaggagattctcactcttctattgtagaagaagaatatacaatagttcaaacagataatcttgctaaagttatttcttggtatgataatgagtggggctattcttgtagagttgctgatttatctaactttttacgtacaaaaggtttataa

SEQ ID NO: 10020 - DNA, 837 bp, Lawsonia intracellularis
atgctctgtcaagattctcttgttggtgtccgagttggctgtattggttgtggaaccatgggtagtgctattctatctagccttgtaccaatggcacaccctgataatggtcttatcctttctggttacaataggacacctgaaaaattagcacctcttgaggaaaaaggagttcaatctattgacactatacctaaccttatccaacaaaatgatatcatcatattaggaacaaaaccttctgctgtagttcctattttaaaagaatgtttaccgttcttaagaccaggtcatattattatttcacttgcagcaggtatcacacaaataatgcttacagaagcagttgaatccttctgtcctgttattagagtaatgccaaatacgcctgcgcttgttggatcaggaatctttgctctttgcttagaagatccaaaactttctaatgagcaatcacaaagtgtcattgatctattttctcttattggattaccaataattttgccagaaaagcaatttagtgcttttacagctcttattggatgtggccctgcatatgttttccactttatggatgcattagttgaagcagctgtaacactaggattcccccgtcaacagtctatttatatggtaagtgaacttcttaatggttcagccaaattagcaactcaacctggaaaccatcctgctttattgcgtgaacaagtttgttctcctgggggtattactattgcagctataaaccatatggatagaactgctataagaggaaatatcatagatgctattctcacagcctataaaaaagaaaaacaactggaattcattgaataa

SEQ ID NO: 10021 - DNA, 417 bp, Lawsonia intracellularis
atgcaacacacatttgctctaattaagcctgacgctgttcaaagaaatctcattggtgctattattaacatgattgaaaaaaatgacttttatatttcagctatgaaaatgttacaaatgaatcgtcaacaagctgaaggattttatagtgtacaccgtgaacgcccattttttaatgaacttgttgattacatgatctctggccctattgttagtcttatattaacaggagaaaatgctgttactcgctatagagaactaatgggagcaacaaatcctcaaaatgcacaggaaggaactattcgaaaatcttttgcaattagtttaatggaaaatgctgtccatggttctgattctgatgaaaatgcaataatagagattaattatttttttaatgcctttgaaaggatacggtaa

SEQ ID NO: 10022 - DNA, 1338 bp, Lawsonia intracellularis
atgtcttcaagacttagcaaatatttttctaagcatagtatatatttactacagccctaccctcatatggcacgtaccattttagggtctggtcttatatccttacttactgcagttattttatccactgggtatatttcttatcaacttatttctaccacattacatttttttcaaccagataagatcacatcacttgaaagtcctaaaaaaactctttcaacattaaaaatcccaaaaggacaatcctatagggagtctttcctacacactgacttaccttatcaagaaaaagccacaacttcacttaccaataggatacgacaaacagattttgctcttatgcaaacatttatccgactagatatccataaggatagagtttaccctttattaacaaaatactatcataataaaaatgaaacataccgatttcaacaaataaaaatctttttgccacatagtgtagaatattttgttactaatttacaagaaaatttagaagcttgggcagacgaaataaaacttagagcatgctcagaacacatctataaactttctataaatgaaattaccactcatgaacttatttttattcccactggtgaaaagtttatacaatgccctatagatgaaaaacctagaataactattgtaatagatgacattggtgaaagcatagaagctgctaatcagcttattaagcttgactttcctattacactttcaattttgccacatactcactatgctaaatctatcgccatgcttacgcatagtacaggaaatgaggttcttatacatcaaccaatggaatctatacagtcaccgtatgtctcagcagggcctggagaaatacatacaaaaatgtctgctgaagaaatttcaaacatactttgtaaaaatattgaaaaaattccatatgcttcaggactcaataaccatatgggatcgtgtttcacatgtaatgagaaaggaaatcatactgtatgtaaaattcttgcatcaaaaggtctctttgtcttagatagtaaaacacatccttcatcctcattttataatatagctaagggaaaaggattaccagcttactatcgaacgcattttattgaccatggacatcatactgaatcatctatattaaaccaattaaaaaaagctgagaaatatgctattgaaaaaggacaagctattgttattgggcatccttatccagaaactatatctgccttaaaaaaatggatttcattgagggatacctctatccatattgtaccactaagatatcaacctatctatatagaaacagtcaaatcagactacttttctaaaaaataa

SEQ ID NO: 10023 - DNA, 1329 bp, Lawsonia intracellularis
atgcgtgtgtggttacgggtagctgcccttattttaacaggtagtatcctttttattggtggaagttgtgttattgctgctgtatctgactcagataaatttgatgcacttaaacgcttcagccaagttttagacattgttgaacgctattatgttaaagaagttccacgcaaagaacttgttgatggtgctctaaaaggtatgcttcaaagccttgacccacactctactttacttacagaagaagaatttaaagagatgcaagaagctacctctggagaattttgtggtattggtattgaaatcacacaagagaataatcaccttacagtagtagctcctattgatgatactcctgcagacaaagcaggaatcaaagctggagattatattttagctgtaaatggacgtccaacttcagaaatgtccttacaagaggctgcatctcttatacgtgggcctaaaaaaacagaagtagaactgactattctccataaggatgctaaagagccaacaactataaaaataaaaagagagactattccactcattagtattaaatcaagagaacttgaacctggttactattgggttcgaattagtcgattcagtgaaagaaccacctcagaattaaatgaagtacttaaagccgcctctaaaaaagggcctatccaaggtattgttcttgacctaagaagtaatcctggaggtcttcttgaacaagcaattagtgtcacagatgtcttccttaaagaaggaacaattgtttctattagagggagaatggaagaaagcagtaaagaatttaaagcaaccaataatacaagtgatatcactgctccaatcgttgtattggtaaatgcaggctctgcttctgcatcagaaattgttgcaggagctcttggagatcataaacgtgctttaatcgttggcgaacgcacatttggtaaaggttctgtccagaatattgtccctcttgcagatgaaactggtcttaagttaacagtagcactctattacacgccttcaggaagatctatccaagctgaaggtattcaaccagatattgaacttccttttgatccaaatccagtagctacacaaacacaaaaccctcttcatatgatgagagagcaagatttacgtaaacatttggaaaaaaatacttctaatacaaaagaagagaagaacactaaaaataatcaaaaatctgaacaaaacaaaaaagaacctttaccagaagttaaagaatttttaaataaagataatcaacttcgaatggggttacaactagtgaaaactttaccaaaatttcgccaaattcaataa

SEQ ID NO: 10024 - DNA, 681 bp, Lawsonia intracellularis
atgaaccctgaaataaactatcaagctatcttaatagaaatatacgaaaaattattaaataaattacaagctagtggttggtggccagctgaaactactcttgaagttattattggagctattttaacacaaaatactgtatggaccaatgtagaaaaggctctctgcaacctccgaaatgcaggtgtcctccatgatggaaataaaatacttacacttacagatagtgaactttctaatcttattaaaccagcaggattttttaatataaaaacaaagcgactaaaagctatcctacaattttttgcatcatcttgttctttttcttttgaaaaacttaaagatatctcccttcaacatttaagaaaaaaactccttttagtccatggtgttgggccagaaacagcagattctattttactttatgcattaaacaagcccagttttgttgtagattcctacacaaaacgtatattaagtagacataagctaattcaaccaacagctagttatgaagatatccgctcattatttttagaaaaccttccatgtcatcttcaactttttaatgaatatcatgctctcattgtccgaacatgcaagcattggtgtcataaaaaaactcccctttgctcccagtgccctctgtttgaattaaacgatatttgcttaaattgttag

SEQ ID NO: 10025 - DNA, 2355 bp, Lawsonia intracellularis
atgttgcatagcaacctaatactgttggagctaactgtgtctaaacaacagacattgaactttattgtcaaaggcatgagttgtacctcatgttcttcaaggcttgagcgtacattaggtaatattcctgaaatacaatctgttactgtaagccttaataattcaatggcaacagttattccaatccctgaagctaatataaaaaagcttattcaagaagtcatttctgaaacagaaaaaactggttttattgctaactacttagcagaagatcttgctgaacaaaaaacatggattcttcaacaagaatccatctctcattacttagaggaactcaaacaacgccttattatagaattcttttttactatactagttctcttcatttcaatgggaccaatgtggggagttcctgtccctgtatttgttaatcctaaaacatatcctctaaataatgctattgcacaacttttattaactattcctgtaatttggtcaggtagatatttttaccttataggattctcaaggctctggaaaatgagtcctaatatggatacacttgttgctcttagtactagcgctgctataatctatagtatatggtccacaatagaaataagctttggaaactattatactgaacctagtctctattatgaaacagcagttgtccttattacactcatttctttaggaaaatattttgaaatgctctcacgcttcaggatgtcagatgcaataagccgattaatgaacttagttccagaaacagcattacgcctttcttctctatctgatcaagaagaatcttttgaggaagtgcctcttagcaatataaaagtaggagatattgttcaagtgcgtcctggctcaaaagttcctgtagatgggaaaatattaaaaggctcttcaagcattaatacttcaatgcttacaggtgaatctatgcctgtttttgtaactgtaggagacaaagttattggtggtactataaacctttcaggcatgtttcttatgcatgcagaaaaagttggacttaatacagcgttagcacacattatacgcctagttcgtgaagcacaaggttctaaagcaccaatatctcgtataacagaccaaataagtcttatctttgtaccagtagttatagctatagctttagtaagtggacttacatggttgttacttggcgatacatctattgcagattctatccgtattgttatgactgtacttgtaatatcttgcccttgtgctttaggattagcaactcctatgtcaattatgattgccacaggaagaggggcacaattaggacttcttattaaatctggtgcagcacttgaatatgcagcagatcttgatactattgtttttgataaaacaggaacacttacagaaggaaaaccacaccttattcatacagttcccctaaaaacaatgccagataatgaacttcttcgtataacagcctcattagaagctgtatcagaacatcctttagcagatgctattgtgagagctgcacataaacatggccttgtactttaccctgttataaactttatgtcctatcctggtcgaggagtacgtggagaacttcaagtgaagacagaatctataactgttttagttggtaacaaaacattccttgaagaacatcatatttctttagacaataaagtaggaataacaacccttgaagaatttgcaggacaaagctttatatctttacttgtagctataaatggacagttttcagggataattgcagtaactgatcctattcgagaagaaagtaatagtgtaacagaacaattacagcatatgggaatccgtacaattatgcttacaggtgatagtaaacaaacagctcaaatagttgctaatcatttacacctgaatgaagttattgctgatgtaatgccagaagggaaagcttatgctatccaagaacttaaaaataaaggatttcgtgttggaatggttggtgatggtattaatgatgcaccagctcttgctaaggctgatgtaggaatagccataggaagtggaatagatatagcaattgaaacaagtgatattgttcttcttaattctttatcaacaaatcatccactatctggcttagtttcggcactcttattgagccgtgctactcttaggaatattcgacaaaatcttttttgggcatttggttataatataatatgtataccaatcgctgcaggtatattaaaactctttggtgggcctttactttcacctatgctagctggtcttgcaatggcactttcatctatatctgtcgtccttaatgcattacgactgaaaaaatttacaccatcttaa

SEQ ID NO: 10026 - DNA, 462 bp, Lawsonia intracellularis
atgcatattcttctttatcaacctgagatacctccaaataccggtaatattgccaggttatgtgcagcaacacatacacctctccatcttatagaacctttagggtttaagctagaagatagatatttaaagagggcaggtcttgattattggaaacatgtaatattaaaagtttggcctcaactagatgattatttactttcagatggattaggacgacggcttgttataacaagcgcacgtggaggggtagctgtacatcaatttatgttttctgcagatgatactcttgtttttggtcgtgaaacagcaggattacctaaagatttaatggatcaatatgaacataaagtgcgtattcctatatatagtacagtcagaagtctaaatctttctacagcagcaggtattattttatatcaagcactatctataactggtatgcttactaagataagttga

SEQ ID NO: 10027 - DNA, 1368 bp, Lawsonia intracellularis
gtgaaaataaaaaataaataccaacaaattcaagaaatatggcaattgacatggcctcaagcctctatgttactatgccaattttttattagtattacagatgtttgggcagctggtcagttaggttcagaagtgcaagcttcaataggtattattgctcaagctcaaatgttattattatctcttgtcatggcagcatctagtggtgctgtggcatctataagtcagtctcttggggctaaaaaatacatcagagcacagcgttatataggacttgttgtttttagttgtcttattcttggagtttgtctcacaattcttggagttatatttcaagtaccattcttagaatttgtgcaaacccctgaatctattttctctatggcacttatattttttgagttttatctgttagcattgcctggccagtatatgttaactattggttctgctgtttttcgtgctgtaaaatctgtatatattcctttatatgttgctatcattataggtatactcaattttattggagatatggcttttggtcttggatggtgggggtggccttcatatggtgctataggcattgcatggactacatttatttctgtttcttttgggggtgtggttatcctctttcttttattctataatcattggctcactcgatacagttttcccccttggtgttggattaagaaggggtccatgtatttactacaagttgctggaccctctcttgctactgcagctatttggcaaacagggtaccttgttctatttatcattgcaggaactctgccttctgaaggtgttgctacattagcaggacttacagctggtatacgtatagaagctattttgtttttacctggaatagcttttagtatgacatctgctattcttgtaggatatgctttaggacttgggaataagcaagaagcaaagcatgtactccttatggttgtttttgtagcttgtttatctatgtcttttttaggagccatgttatggccttggagagatacacttgcagcttttttatcttctgatccattagtacgtcaggaaatagttagttaccttagttataatatactatgtgtgccgtttacaatagcaagtatagttcttgcaggagggcttaatggtgcaggtgcatcaatataccctatgattatttttggttgttctatatggggtatacggttacctttagcatggtttttaagtcattttttgtgggaaacgtcttcaggcgtttacatggcccttcttgtttcacaagttgtacagtcaatgttacttttatggattgtactacgttataattgggcacgtttttcaatgtataatagtatgtcaaaatag

SEQ ID NO: 10028 - DNA, 900 bp, Lawsonia intracellularis
atgagtgaagcagcgttttctccagtacatccttcaaaatttgataattataccttattatgggagatgactccccaacactcttctgactacacactaacaaatatctggggttggaaagatttttatggattggagtggatgtttgagtctggtttatgctggattcgtcagacacgtcatgttgatggagcagattatattttttgggctcctataggagattggaattctattgactgggttaatcttcccctttttaaaagaggattacatatgcaacgtgtgcctgaaatgttatgttctttattgcaagaaatattacccagaaagataaatatagaagaaacaccagggcagtgggaatatatttattcaacaaaagatcttactactctttcagggagaagatttgatagtaaaagaaatcacttaaatagtttttttagagaatacaaagaggactataggccaataggagattctaacatattagaacttattgagtttcaaaaagaatggtataaatggagagaatgtaagaaatctccttcattagctgctgaaggggaggtactttgtgatatttttaaaaattggggattatttccaagtttaagaggtggagcactctatagtaacaataaggtaattgcattttctataggtgaaactttggatgaaaatactgttgttgtccactttgaaaaagctaagcctggaattcgaggtgcttatcaggctattaataactgttttgtacgttatgaatgtaacgattttgattttattaatcgtgagcaagacttaggagaagaggggttaaaaaaagcaaaacaaagttactatccaataggatttttaaagaaaaattatgtaacagtttttcctgagtcttaa

SEQ ID NO: 10029 - DNA, 738 bp, Lawsonia intracellularis
atggcgatgatagaaataaaagatattcacaaatggtatggtgaatttcaagttcttaagggtatttcagaacgtatagaaaaaggtgaagtattagttatttgtggtccatcaggttctggaaagagttcacttattcgttgtattaataggttagagtctattcaggaaggtgatatcctttttgaaggaaaaagtatttttgatcctgatgtagatataaatgaactaagaacagaagtaggtatggtttttcagcaatttaatttatatccacatctttctgttgtggataatgtgacattagcgcctataaaagttcgaggggtgagtaaggcagatgcacatgttttagcaatggagttgcttgcacgtgttggtattgattctcaagcattgaaatttcctggagaactttcaggaggacaacagcagcgtgtggctattgctagagctctagctatgcaaccaaaagtaatgctttttgatgaacctacttcagctttagatccggaaatgattaatgaagtattgtcatgtatgaaagatcttgcacgtgaaggtatgactatggtttgtgttacccatgaaatgggttttgctcgagaagtttctgataaagttatttttatggatcatggtgtaattcttgaagaaggtccaccagaagagttttttggtaatccacagcatgagcgtacaaagagcttcttaaaagagattttatcacatcattaa

SEQ ID NO: 10030 - DNA, 870 bp, Lawsonia intracellularis
ttgagtaataatatttttatgtctaaactattatgtattgaaattattgctgatgatacacagttagatgtaattattagtattttatttcaatatattccatatggatgggaagaagagagtctttcaacaggtgaaacaatattacgaattcattgtgataattctgaagtaaagcatacagtgtgtaataaacttcaaagtgttttccctaatattaaaatccatgttaaagaggtaccaattcaagattggtctatagcatggagagattttttcactccagtaatagctgatcaatttcttattcttcctccatggcttttagatacaacaccaaaaagtgatcaacagataattgttatagagcctaaatgtgcatttggtacaggacatcatgcaacaacagtattatgccttgaatctattagtcattgtgctaaaaaaggctatcttcagccaggaatgcggttttttgatcttggaacaggaacaggtattttaggtattgcttgttctttactagggttaacaggtataggtgcggatattgatcctatagctatttctaatgcatcagaaaacatagcattaaataaggtagaatctcaaatggtcattacagaagcaggagtagaagcaggtttaggagaatcttttaatcttattgttgctaatattcttgcagaacctttaaagtgtcttgcattagatcttatagagcttcttgctccttctgggaatctaattctttctggactacttgattaccaggctgatgatgtagaagctgcatactcaaaattaggaaaagcacaaagagttatttcaggtgaatgggtagcacttatatggaatagacaaggttag

SEQ ID NO: 10031 - DNA, 339 bp, Lawsonia intracellularis
gtgaatactctcattctttccctacatctaatagtttgtattcttcttgtgattattgttttacttcaatctggaaaagaaggcatgggagtcatttttggtggcggtaatacgtctgtttttggaagttcaggagctggaggacttcttacaaaactaacagcatttcttgctattatatttattattacatccctaagctacaatattatcactaatactaattcagctaatcaatcaacaattcttgatgtacaaattgaaaattcatccaacacaacacaagctcacccacaatcaaaccaagagtcttcagttgataatcaccaaaaagagtag

SEQ ID NO: 10032 - DNA, 759 bp, Lawsonia intracellularis
atgaaaatacttatagcagcaaactggaaaatgaataaaaaccggctagaagcaaaggatatgattgaaaaacttatgtctatgccagaagggattcctccccaaagagatattgttcttttccctccctttcttgctattgatacaataaaagaaaaattaaaaaattctactattgtcattggagcacaaaatttctatcctgccccttcaggtgcttttacaggagaaatttctttagaaatgcttaaagatgtaggctgctcatgggttcttattggtcattctgaacgtcgtcatattataggtgaactacctacacttattgaacaaaaaacaaaacttgctttatcatatggattttctatcattctatgtattggagaaactgcacaagaacgagaagctggacttgttaacagtgtgttagagcaacaattgagaacaagccttacagatattccttcaaaagctatttcacaacttgtcattgcatatgaaccagtttgggcaattggtacaggaaaagttgcttctcaacaagatattataactgcccatactctaataagaaaaattttacataatatgataggtaatacaagccaaaacatcagaattctatatggtggaagtgtcaactccgaaaatgcttcttctattctagaacttgacaatgtaaatggtcttctggtagggggtgcttctttacaagcagaatcttttatgaaaattatacatgctggattttctgaatag

SEQ ID NO: 10033 - DNA, 471 bp, Lawsonia intracellularis
atggacccaatctacacacagaaatgtatacctcttacctattctgatttacctgaaattcttgctctagaaaaacaatatacttcacatacatggaatatacctcaatttgtaaatgttctcaaacaaaaaggatataaaacttttggtgtacaaacatactgtaaaaaacttataggctatatttttatttactataaccaggattacttagaagtcattaatattgtagtagcaaagcaaatgcaacgaaaaggatatggaaaacttttgcttaatacagcattgcgactagctgctaaaaaaggtatcctcaaaataatattagaagtaagggcaacaaacgattccgctattgctttttataagagttttggttttattcaaacaggaatacggcagaaatattattctgatacaaatgaagatgcccttatatattcaaaaaaagttacatcagatattttgtaa

SEQ ID NO: 10034 - DNA, 540 bp, Lawsonia intracellularis
atgaataatattttttatccaatagatgcttttaataacgataaagcaccagttgtagaatttatagacgctgactgcaagactttgattattgcacctataacacatgcaccaaggcttaagttgggatataaagttgtttgggtacagctttttgactctaaccgtcgtatatatttaagtcgtagagcatcacatcttgtaacttatcctaacttgtgggatttctcagctagtgggtatatcctagcaggagagtcatgcgaggatgctgctcttagagaacttctcttatgttttggaatagataaagcttcattatctaatcctagatcctattttttccctttgcaagagaattttattctttccacactatatacagtttctgttatgactacttctattcatttttgttatgactatatacaagatgggatgttcttggatgaagatgagttaacaggatttagctcagaattatcagaatttttgacaccatcattattatgggcaattcataataaaataattttttga

SEQ ID NO: 10035 - DNA, 1002 bp, Lawsonia intracellularis
atgaaacgtaagtacattgctatggatttaggtacagcaaatactcttgtgtttattcagtcacaagggattgtccttaatgaaccatcaacagttgctatcgatactctttctggaaaagtccttgctgttggaaaagaagctcatgcatatattggtaaagttccacacaatatagaagtcattcggcctcttaaagatggttgtattgctgattttgatatggctcaaacacttatagctaatctactacaaaaaattataggaaaatggttagttagaaaaccacatatgattatttgtgttcctattaatataacaggagtagaaagaagagcagttattgatacagctaaacgagctggagctcatgaagttcgacttattgaagaaccaatagcagctgctattggtgctagtctaccagtccttgaaccaattggtagtatgattgttgatattggtggaggaacaacagatattgctgttattagtatgggtgaaaaagcttgtgctcaatctgtaagagttgcaggtgatgcattaaataaagctgtccagcgttatcttcaagagcatatgcaaatatttgttggagaaatcatggcagaaaaaatcaaaatgactttaggttcactagaaacaccaccagagcctctcactatggaaatttctggaaaacatatcacaaatagtggaccaacaaacttaaaacttgatcatacacatgtccaaaaagctattactcctgttattgatattatacttaaatcaattcttgatgttttagaacaaacaccacctgagctttccgcagatattatgcaacaaggaatattacttacaggaggaggttctcttattcaaggtcttaacacttgtataacaaaccttacaggactgcctgttaatgtggacagaactcccttaacaactgtaataaatggagcaggagcaacacttgatgatatcgctagatataaacaactactcttagaataa

SEQ ID NO: 10036 - DNA, 1035 bp, Lawsonia intracellularis
atgactgataatcataatggtgataatattcttgacttaatacgtagtgtctttcaggtacataacgttgccctttttttacccactgaggatggcaactttactcttgtctcagcttcaacagagtgtgaaccctatacagaagaatttattatacctcctgggaaaggtcttgtaggatgggtgttacgccatcagcaaccgttaatccttaataattttgatcaacgacaagggtatctaggatattactcaaataacgatgaaaaacttatcacttcttttatgggctgccaccttcctggaggaggagcgctttgtattgatagtataacaaaccacgtttttactgaagtagatcagcaacttttacatcgatttgcaaaacttgtagtcagacaaataaatactatgggtaatgctaataataatcagagactaaggcgttactatgacggtttagagcaactatttaaacttcatgaacaaacaaattggaaagaatttctttcgctatttcttgctatagtaacagagactacagactctgactattctgtttttgtttctagcgtagagggatcttcaacatactttgttgaaggagaaagttcaccactagtacttccacacaaaaaacctttacctgaattttcattagttaatggaggtcttctaggatgggtattccgtaacgaagtgcctatatatgctgagggaactgatggttcatctactcctctttttggaaaggtatcttatatacctgaatttcagtctatcatatgtctgcctgttagtataaataaaattacatgtggtgttttatgtttagcaagctgtacagccagacctcttcctcaggatatgagaatttttacaacaatggctacaatatctcttgctcaataccttaatatagttgcattgaaatatcgtcttaatcgccttcttccagatgcaacaatccatagaagtggcgctattttctatgatcctgatacagcacccataacgcatattaaagaagaataa

SEQ ID NO: 10037 - DNA, 1074 bp, Lawsonia intracellularis
ttgacacgtgttattgtagttgatgactctgcattttttagaagctctattactaaaatgctaactcaagattcagaaattgaagttattggagttgcaaaagatggtatagaaggtcttgagaagataaaaaaccttaaacctgatgttgttactatggatattgaaatgccaaaacttgatggtatttcaactttaaaaattattatggatgaaatgccattacctgtaattatggtcagttccttaacaaaagaaggagctgaagcaacattaaaagctcttgagtttggagctgttgattttatcccaaagtatccaggtaatagcttggcaagtatggacttagcagcactatcatcagatctgtgtacaaaggtcaaagctgttgcagcacgagcaaaacgctttccattaaagcggataaggaaagataaagtacctattatctctcctgtaaaaaaagatttttttacatcacctaatcattcagaaaggtctaggagagatattattgccattggtgtttcaacaggaggacctccagctgtacaaaaggttctttcagagcttccagaaacatttccagcttgtattcttattgctcaacatatgccagcagcttttacaaaaccttttgcagaacgacttaacagtatgtgtaaaatttctgtaaaagaagccgagcatggtaatcctataaaaaatggcatagcttatgtatgtccgggtggaagacatttacgcttagacttgaaaggtgctttacctcagatttctgtggtttctgaaccatcaacagctctttataagccatctgctaatgttcttatggagtcagttggtaaaagcatgggtggaagatctgttggagttattatgacaggtatgggaagtgatggggttgaagggatgagagtacttaaatctaaaggaggatttgttattgctcagagtgaagcttcatgtgttgtttatggtatgccaaaagcaatagtagatggtggtcttgcggatgaagttgttgatcttgataacattgcggaaagggtagcttcggctctttataaataa

SEQ ID NO: 10038 - DNA, 1953 bp, Lawsonia intracellularis
atgataaatcataatgtggaacagataacacaagaaattttgacacgacttgagagtgataagtcagatgaaattcgttctgcagcttttgaagcagctgaactaaaggcttctgacagtattcctttgttaataaaacatctccagagtccaaattttggagtacaggaagctgcagaatatgcaataagaaagattaggggagtagagacagtacaatctttaataccactattacggttagaagatgttgcaattcgtaatagcgctatagatattttacaagaaattggcgctgatgatctcaatactttatataaattacttcatgatcaagatgttgatatacgtatatttgtagctgatattttaggatctgtaggatcgttttcagctgtaagtatgcttatagaagtgctcgagaatgatacagatgtaaatgtacgttatcaagcatgtataagccttggtaagttaggatatagtgaagctaagggtgcattaagtaatgctcttgaaaaagacgaagattgggttcaatttgctgcagttgaagcacttacaaaactaaaggctaacgcttgtgtcgacattttgttagctgcactccccaaaagttctgactttgttgctagtacaataattaatgcattaggtataattgggaatatgttatcagtgcctgttctacttcaacaacttgataagagtacagggccgcttcgaaatgctactgttaaggctataatacaaattattggtgctccgtctcttggtcttttaggagagaaagatttagataagctatatacataccttcttgttgcccttgaagatgaagatgaagagattgttcttgttgcgttcacaggtctttctttctttcaaggtaaggaagcaacaacacgtaaggtttttgagcgtattcaaaaaatggactctcttcatgatgctgatcttttatcagcagccattaaatgtctcatagatgttggttataatagtgctttgaaagaaggaattttttctaaaaatgaagaagttgttaaagttgctattgaagtatgtggtagtataggtgaccaagattgtgtaggactttttattgaatctttttggattttaccattagaactacagaggtttgttataaattatcttgttaatattgcagatacatctaatcttagtttttttactgaagtattatcacgacatacagatatttctattattaaagctgcacttctcttcttgggaaaacaattatcgcctgctttatcttctgatatactaagctatctttatcatccagatgttgaggttagaaaaacagcacttgaggcctgtctggctttgaatgatgaacagataaataaacaagttattgagttattttttaatgaagatccttcacttagaatgttagcaatatatgcaatgggtaaaataagtccagaaacatatgtaaactctttattattagctttaaaggatagttcaggcgaagtaagaagagctgctattgaatcattaggagagctttctaaaataactcctgaactctttgaatctatctcctctattgtatatgatgaatgcaaggaagtacgattagctttaattaatttggcaaaaaagataggaacacaacaatcattatcttttattatcaatatgttggaagatagtgatagttgggtggtgatcagggcaatagaggcattaattgattataaaacagaagaagtagcagtattagctatcattaatagattagaaaatgctgatgttcttgtgacaatgaagattattgaagcacttgggattataggtggaaagcttgctttccaagctttgttaaaccttattaatcatgagaaccctgatatccaacaagcagtttctgatgcattaagttatattcaggaagagcaaggagaagatttttaa

SEQ ID NO: 10039 - DNA, 876 bp, Lawsonia intracellularis
atggcacttccaattgaaacaacatcacttcgttctagccctggaattacagacagcgagttcaaacaattacgtgattttatacatcagaaaagcggtatttttattgccgataacaggaaatatcttatagaaaatagacttgtaggacgtattagagctttaaatcttaaaagttatggagagtattatagttatttaaaatttgatcctaataggcaaacagagcttacatatctatttaatgcagttacaacaaatgaaacaagtttttttcgcaaccctcctcaacttgaagtatttcagaaggtggttttgacaagggttatagaagaagcaaaaaagagtggacgtaaaaagttgcgtatttggtcggcaggatgttcttcaggtgaagaaccctataccattgctattattatccatgaactattatgtactgaaattagtcattgggatattaaaattacagctaatgatttatctgagtcagtattatctatagcaaaagaagggttatattcagagtatagtttaagaacaacaccaaagcatattatagataaatatttcactagggaaggacaaggatatcgtataaagtctaatattaaatcacttgtttcttttggaactattaatttaaaagataaggttcaagtaagccgagttgagcgttcacaaatagtcttttgcagaaatgttatcatttattttgatgatgaaatgaaaaagcaggttatatctgctttttatgataatcttctgccaggaggggagcttattattggacattcagaatcactacatagtattacaaaagcatttaagctagaacatcatacaggaacaatcatttatcgtaaacaagattag

SEQ ID NO: 10040 - DNA, 771 bp, Lawsonia intracellularis
atgaaaataattgctattgctaatcagaaaggaggagtaggaaaaacaacaacagcactctcgcttgttgcagctcttacaagaaaaaagaaaaaagtactttttattgatcttgatcctcatgtttgtgcatctgtacatttacgatattatccaaaagggcaagtcaataccttatatcaaatacttattgcaaatagggaagagcttcctcttatatggtcaaaggttattttaaagagagacagtcaagcatgggatgttgtttctggagatactagactatctgaaatggagagtatattgcacccttttaaaagaaaaggttttattttgaaatatgcgttatcattattatcagataaatatgattttattattatagactgtcctccacagtcaggagtgttacttataaatgcattagtagctgcagacttattacttattcctattcagactgattttttagcgttacatggattaaaattactttgtgatactgtgaaaataataaataggagactacaacagccaataccgtatcgtgcagttgcaacaatgtatgataagcgtacgaaagcttgtagacatatattagaagtattacaattaaagatgaaaaatattatgttttctactgtagttcctatagatacaaagttaaaagaagcaagtacagcaggaaaggttatttttgaatatgatgctttttctagaggagctttggcttatgagtcattggcagaagaagtagtatcattatggtaa

SEQ ID NO: 10041 - DNA, 471 bp, Lawsonia intracellularis
gtggttacagataagtatatccaaagcataccagaaattcagctagtaggttttcagcttggtagtcagttatattctatacctacagttgtagtacaggaggttgttagaaaagtcccgatctttaaacttcctgcttcttcaaaggttgtttctggggttattaagttacgtggatatattacacctattgtacaggtatctagtttacttaatataactaaaaattttttaggtgaaggttctatgtttacacttatttgtaattacaaagcctttcagtttggtattccaatagataatattcatcatatgtatcgagttattcatgaagatattcagtggagtgtagactcattattaggtgtggcaggagaatacattattggtttatttaagttatatgagaagcttatacctatattatctattgagcgtattattacagatgtattccaaaggaaggtgtag

SEQ ID NO: 10042 - DNA, 369 bp, Lawsonia intracellularis
atgagtaaacatatccttgtagtggatgactctaagactgtacgtaatcttatgtcatttgttttcaaaagcaaagggtatcaggttacaacagctgaagatggtttagatggacttgaaaaactttattctgtcgataaagtagatcttatagtttctgatataaatatgcctcggatggatggatttacttttataaaaagtgtccgtgagcaagatttatatagaaatataccaattattattctttcgacagagaaagaagatgaggatataaaaaaaggtatgaagtttggtgctaacttatatatggtaaaaccagctcagcctgatacacttgtccgtaatataaaaatgttattaggttaa

SEQ ID NO: 10043 - DNA, 645 bp, Lawsonia intracellularis
gtgcacattttatacaaaaggtatgttgttatgagccaagattttatggatcccgaactatttgctgacttcataattgaagcaaaagagcatcttgaaacaatagagcctaatttgcttgaattagaaaagtctccaaataacttagcattacttaatgaaatttttcgtccaatgcattcccttaagggagcttcaggttttcttggtttaaataaaatcaatcatcttgcacataaagctgaaaacatccttgatgagcttagaaaaggtgaaatggttattacatcagaaattatggatgtaatcctttcagccactgatgccttaagccaaatgatctataatttagaaaagacttcgtctgaaggggatgtagaaacagaatcaattatgaatcttattgatgccataatgagtggagaactaaatgttacagcgacaatagttcaaccaactcaagatacagagagtaatactagtgaaagtaagacccaattaactacagtgctagaggctgttgatcagccagctactccagttcctttggagatgatagatgttagtcctgttaatcaagttgaaacaaaagttgaagctattccttcacatgaaaaaaaaaatagagaacttatcttcccatga

SEQ ID NO: 10044 - DNA, 2214 bp, Lawsonia intracellularis
ttgaagggtaatagtggtattattggttttcatgaattgaatagcctcactcatgaagcagaaacattgttgaatcgagttagacatggagaaatggtagctactcatgagttaatcgatttgttacttttggttgtagatgtaatagatagtttagtagagcgtatagagagttctacaggtattgtacagccatttgatatctcagagatccttgtttgtttgcaatctgctgttgcaggcaaagatataacattgcctaaagcccttattggttcattaaatacagtggattcattagagcaaaatagtattgagcatggagtggagactattgaaaatcaagtttcccagacaagcactgagtcttcatcagcttttaattcttcagataaagaaaatgaaatagcttttgcagtaacggttaaacagcagcaatcaactatacatgctgcacttgaagcacttgctcaagatagcagtcagagagagtacattgatgctttatatcgttctttaatatctattcaaaatgctgcaggagttatgggttatgacgaattaaaagtatatgctgaaaggacagcagggcttgttgctcaaggaagagattctggtattgatttttctctgatgctagacatcttaactcaagaagtagctattgttgacgacatgattgcagttattttagctggggacggtattacccaattatcttcttcaccaattgagcaaaaagaagttttatcaagtcaggatggtaatactactgatactgtttccagtactcctgttgtttcagcagaacaccttacgtctttaaaaagctctagtctatcaacacaagaaagtcctggtcaaatagagtcacatgttccatctaaacctggccctgtattaaagactataagtaatgtaccaaaaaatataaaacctccttcagtaaaatcttcacaagcaaagcctgctaacgcaaatgatgctacatcagaacaaaaatcttcatcaactattcgtgtagatcatgaaaagttagatcatttaatgaatttaattggtgaacttattattaatagaaatcgttatacaatgttagcaaggcgtcttgaagaacagggaactaatgcagatgttgttgaagtagcacaagatctttcagaaactacatatgcaatggcacgtatttctgatgaactgcaagacactattatgaaggtaaggatggttcctgttgcatcagttttttctcgtttcccacgcttagtacgtgatctttcaaggaaaagtggtaaagaagtagatttagttttagaaggtgaagaaacagagttagataaaagtgtggtagaggttataggagatcctcttgttcacttgattcgtaatgctgtagatcatggtattgaaccagaaagtgaaaggattgctcagggtaagtctactaaaggaaaagtgacattacgtgcttatcataagggtaattctgttgcaattgagattgaagatgatggaaaaggtcttgatcccgataaacttcgagaggttgctattaaaaaaggtattcttagtgctgaagaagcaaagttactagatgatcgtgaggctatggaacttatctttgcaccaggtttttcatcagcagagaagattacagatatctctggccgtggcgttggtatggatgttgttcgtacaaatattaaaaatttgaaaggtagtatctctattttttctgaaataggtaaaggaacacgttttacactttctttgcctttgacattagcaattatagatgcattgatggtaaacgtagccggagaagtatttgctattccacttgatgctgtttcagaaacgacaaaacttgaagcatctaaacttaatgatattaatggccgtaaagcagtgactcttcgtggagaagtacttggccttattgagttaagtgagttactaaacttacctcaagaagagcatactgacgtactttctgttgttattatccacagtaatgaacgtcgccttggacttgtagtaaataaacttttagaaagacaagaaattgtcataaaaccattaggttcataccttggagatatcccatgcatttctggagcaacaattatgggggatggtggggtgattttaattttagatcctcatgagatttatttattaagcacttcagcagcaaagtcggtatcacagtaa

SEQ ID NO: 10045 - DNA, 321 bp, Lawsonia intracellularis
gtggggacgacgtcaagtcatcatggcccttacgcctggggctacacacgtactacaatggtgcacacaaagggcagcaagaccgcaaggtggagccaatcccaaaaaatgcatctcagtccggattggagtctgcaactcgactccatgaagtcggaatcgctagtaatccgagatcagcatgctcgggtgaatgcgttcccgggccttgtacacaccgcccgtcacaccacgaaagttggttttacccaaagccggcgagctaacgagcaatcgaggcagtcgtctacggtagggctaatgattggggtgaagtcgtaa

SEQ ID NO: 10046 - DNA, 378 bp, Lawsonia intracellularis
atgtggtcacatcttaaagatgctcccacagcttgtaggcaactggtttcagattctatttcactccccttacaggggttcttttcacctttccctcacggtacttgttcactatcggtcgctgaggagtacttagccttggaggatgggccccccagattcccacaaggttacacgtgcctcgcagtactcaggtaccgactatgtctttttcaggttcagatacgaggctatcactctctatggcggaactttccagttctcttctcctgcttactccagaatcacgtatgtcggccctacaaccccaaccagtcgaaactgtttggtttaggctcttcccggttcgctcgccactactacgggagtctcttttga

SEQ ID NO: 10047 - DNA, 495 bp, Lawsonia intracellularis
atgtttttagtaaacagtcgccaccaccaattcactgcggcttccaggagctccaatagttttattttcacccccaaaagcgccccttcttccgaagttacagggccattttgccgagttccttggccagagttctctcgagcgccttggatttctcatcctacccacctgagttggtttgcggtacggtttgatacatatatgcttagaagcttttcttggcagtataggctcaacagcttcagaacttacgttcacgggttcgcatctcgaatacatctggtggatttgcctgccagacagttctacatgcttgcaccaggacttccaacacctggcctgcctaccttcctgcgtccctccatcacgctatgtatcaagtacaggaatattaacctgtttcccatcagctacggctttcgcccttaccttagggaccgactaaccctgggaagattacctttacccaggaaacctcgggttttcggcgaatag

SEQ ID NO: 10048 - DNA, 300 bp, Lawsonia intracellularis
ttgcctccgcctatactggcgtataggtttcactggctcccacctatcctacacatacaagcccaaaatccaatgtcaagctatagtaaaggtgcacagggtcttcctgtctttctgcggatacacggcattttcaccgcgacttcaatttcaccgagtctctggccgagacagtgtggagatcgttacgccattcgtgcaggtcggaacttacccgacaaggaatttcgctaccttaggaccgttatagttacggccgccgtttactggggcttcaatttggtgctttgcttgcgctaa

SEQ ID NO: 10049 - DNA, 282 bp, Lawsonia intracellularis
atgaactcttggatgcgatcagcctgttatccccggcgtaccttttatccaatgagcgatggcccttccattcgggaccaccggatcactaacgccaactttcgttcctgctcgacatgtctgtcttgcagtcaagctcccttatgtgtttgcactcaacgcctggtttccgatcaggctgagggaacctttgcatgcctccgttacattttaggaggcgaccgccccagtcaaactacccaccagacactgtctcctgccaggctaactggtcagggttag

SEQ ID NO: 10050 - DNA, 2004 bp, Lawsonia intracellularis
caaacaactagtctctctatcatgcaaaaaggtgacgtcatgggtatcacacttcgaacgaaacttttcttattagtcattgtttctatttctatggcggccattcctattattttttcagcttatgaagattttcgctcgtctaatattgagctagaaagaaaaacttttagaagtataacatcttttgttaaagatggacttgaagctcgctactttgatattcttacatatcaagcaacaaatactctacaaagtaaaaatcaacttcgtaggatagctatgatgttggactcaaatctaaatatattagaaaaatttccatcaaaagagcaatctacttttctccaagagtggatcaaacaattacaacagcttaatattcatattgaagtttataatgctaataaaaagcctctagtaaatgatcctttatttaccacattaaaaacaaaatataaccttaaagatgctaaaaatcgttcatttgaatcattacttaattatgaacaattaccaattaatggagaatttacagtatttgaaaataaaaattcctcaaaatctgatcctatccttgtctttttattaccatcaccagaagatcaacacattattctaacagctataaatatttctgatatttctaaaaatgctcttgatgctgaagaacaacttgctaaaacaattagagaaaaaatagaaggatttgatctacataaggatggctttatagctgtatttgatagtgatggaacacttattgcgcataaaggtaataatataggtaaaaaaatagattttatatctgaaaaaacacttgaagaagctcgtaataaaagtatgtcagaagaagttatttcattatcgaaagatgaaaaactacttctccatgtagcctactttaaatctttaaattggtatattgttgcagcagctccacaatcagaaattgaagccccaacacgtgcccttatccatcaacttgtaggtattgctcttgctgctattttaaatagtttacttgtcacactaattttaacagctaggctaataactccactacaaaccttaacagaaaaagccttatctcttgcagaaattgatttttcttcaccagaagctgaagagcttgcaacagctgatttaccaatagaacgctctgatgaagtaggtcagttgtcacgagccttctctatgatgggaaaaacacttactcaaaatatccgtgaactaatggaaacaaccactataaaagaacgtatgttaggtgaaattagtgctgctagagatatccaaatgggtattttacctacgactgatacagcatcacttgttcctcactatgacatttctgcttttcttgatcctgcaaaagcagttggtggtgacttttatgattttttcacttcaccagaaggaaagcaagttgttgttattggtgatgtttcaggaaaaggtattccagctgcactatttatgtctatgacagtaactcttattcgctatgctataggaaaaggcttatctcctgctgaagtagcaaaagaaataaatgaagtccttagaaaaaataatccaagctatatgtttgttactctttttattggaatatttgatccagaaagtggtatattagaatttgtaaattgtggacattgtctaccatatatcattaattcaactacagataaacctataactactttagataatagccaccaaagcccaattgttggagttctagaacatgctgaatatgtaaataatcaaactcaacttcacaaaaatgatatatgcttcctatatacagatggagttactgaagcaatggccccaaatcttgagctttatggtactgaacgttttgaaaaaacgcttgatatgaacaggaagaagtcattaaagggattaatagcagcagtaaatcaaacaataatagaacatagaggagaagctgaacaatctgacgatataacgatgttagcatttatgtataagtag

SEQ ID NO: 10051 - DNA, 1281 bp, Lawsonia intracellularis
atggctgaaactgtctttaatgagtttatattttatgaaacccttatagatctttgtgaatctattgcctgggaaaaacctgttgacgaaaataaactttttactcttaccaaacatggagctgccccaacacaagttatgaggcttgcagaagcttttggtctaatgttagtcaaagttgaagcaaaaaacttacaacaagctaaacttattaatgatcttcaactacaaaataaagagcttgaatcaacaaaaaaaatacttgctgaacaaaacacacatttaagtagaactatacaagaaaattaccaatcacaaaaaattattggacaatgtgatgaaatgcataaagtccttgaacttgcaaaagcaattgcaagatatcctattaatacattgatattaggaccaactggatcaggtaaagaagtcattgcaaaaatgattcattacagttctcctagaagtgcaggaccctttattgctgtaaactgtacagccataccagacacactatttgaaagtgaaatgtttggaatagaaaaaggtgtggcaacaggagtaaattaccgaaaaggtctaatagaagaagctgataaaggaacattattccttgatgaattagctgatatgagtttagcaaatcaagcaaaactattacgagtacttgaagagaaagaagttgtacgagtaggaagctctaaacctattcctattgatataaaaattattgcagctactaatgtcaatttagaacaatcagtcaaagaaggaaaatttcgtgaggatctttactaccgaatcaatgtagtagaaattaaactaccaccattagctagtagaggtgatgatatcctcttattagcacaaaattttctcaactaccattgttctcaattgcatcgtccagcattaactctttctcatgatgtgcaaaaaaaatttttagcttacagttggcctggaaacgtacgtgaacttaataatgagatggaacgtgttgctgctcttacaatcggagatacagttgagtcatctgatctctcgcaacgaatcattaaagaatgggaagaaaatacccaagatatacaagagaacctaacaacaccatcagaaacatcacaaagacaagattctcttaatttacaacaaatggaatataatctgattattcgtgtactcaaacaaactaatggtaataaaagtaaggcagcagaattacttgggattacaagagaaggtttacgtaaaaaacttctccgtttgaaaatttttgattaa

SEQ ID NO: 10052 - DNA, 369 bp, Lawsonia intracellularis
atgaaaagggtttccctacttgatgctagtattggtattggaacaattcttggacctcaagaaacaccagaacctacaataccccaatcacgctcacttgcatctactagtttaaccactacaagtttagaggccacttatgctccctctaatattcaaactgtattagaagaggcgatttgcccagatgcgggagatggaggacttcttattccatctgttttctcttctaatctccaaaaatgtaaagaaaatcttagtcaatctaatcaaatagaaatacaaaactttttacaacatgacttagagccacttatagataatgaagcattacttaaaatgtatgtttcactaatgattgaaggataa

SEQ ID NO: 10053 - DNA, 1197 bp, Lawsonia intracellularis
gagatagttatggctaatgttagtggaatccctgcaccacgattactttccacaacaaatcaaatgaccaatgcagctgctggtaatactaatagagctaccggtagtatgaacggtcgtaatctcacacaaataaaaacacctcagtccatgattgataatgcttcagaagaattaacaacttctcttgaatctaaaagcagtgacgactttgcaattaaagatcgtaaaagacaagggaaaggatctgattctctattaaaaatggttcaagaatatacagagctgacgaatgatgatacccgtaatgctaaaagagctatgttatcccaggtattacgtgcaagtcaaagttcacaagatgtactcgaaaaaacattagaacaattttctaataaaacagatgcttgggcttctcttgcagaaattgcacaagaatatggtgcagaatctccacagccaacaggattaaaatctgtattagatgctatggagacattagaaaatgagtttggtgatgaaattaaagcaggactaaaaggagctctaaattcaaaagaatttactgatataggcagtgcagcacagttaagagatctttatacaacaacagtaactataacagctgcacctgatgcagtgttagcaagacttcttgaagaatatgagagtgatgatgatctggatagagccattgatttccttctatctacacttggtggagagcttgaatcagctgatccaagtatggataaagtacatcttcaaagtgtaatgggtgatattgaaaaaacacaacaacttcatagctctcataaacaatgtactacagcccttagcaggtggaaagagaaacataaaggtgggggggaaaatagtacactaactcctttagaaatgatgcgtgaactaattgcactaaaaaatgaaaattttatttctccttcctctatagataaaattgttgatcaagctgatccccaagatattgaaaaagaagtcctttttttacaagagatgttagctgctgtaagaaaatttcccattatggtatttgataatgtcgaaaatcgtgtaagagttatgggtgctgtacaagatgctgttgacgatgctgtaagaagagaagatgaattcctctttcaaaaagaacatcctgatgtaccactacaaccagatgaaaataatatacaataa

SEQ ID NO: 10054 - DNA, 687 bp, Lawsonia intracellularis
ttgatttttaacattgtttttactggtggaggaaatataatgtctgattcaacaaatttatcttcttttggattccaagggaatagtatgaatgactttacaaactcagaggaaatgtcacaaccttctgaggtacaaggtaattctaaagaagttaggagtaactctgaaagaggaatacctcgaattacagtagatcctacaaagaatccaaccccaatgtttcgttatgctatgttagaattagttactgctaggaatatacgtgaatcagcaacatctctaatgaatagtatagcagatacacagcgtgaacaaaaagctgcaagtagttaccttgatcagtttcgaaagcatcaaagtgatgttagccaaggtcatggtagtggtagtcaggggaagtgggagcggatacaacagtggcaagttgattggttaaaatcccataatataaaatatccatctaaggttgatacaggtgacacatggcttaatgctgatgagtgggatctgatatgtaaaggaacccaagcttacatagataatataggctcaagtacacagcaaaaaatggttcaagctcaagatgcgctaggacagtataatgctcaagttcaaggagcaacatcaagtattactaacgatattgagttgagtagatctgtgaatactacacaacctttctaa

SEQ ID NO: 10055 - DNA, 591 bp, Lawsonia intracellularis
ttgaggaggtgttctatgagtataactggtgtatctggggcaactggggcaactggtgcagctgatgtaactggaacagcagcacctaaatttgcagtagatcctacaaagaatccaaccccaatgtttcgttatgctatgttagaattagttactgctaggaatatacgtgaatcagcaacatctctaatgaatagtatagcagatacacagcgtgaacaaaaagctgcaagtagttaccttgatcagtttcgaaagcatcaaagtgatgttagccaaggtcatggtagtggtagtcaggggaagtgggagcggatacaacagtggcaaattgattggttaaaatcccataatataaaatatccatctaaggttgatacaggtgacacatggcttaatgctgatgagtgggatctgatatgtaaaggaacccaagcttacatagataatataggctcaagtacacagcaaaaaatggttcaagctcaagatgcactaggacagtataactctcaagttcaaggagccacatcaagtattactaatgatattgaattaagtaggtctgtaaacactacacaacctttctaa

SEQ ID NO: 10056 - DNA, 507 bp, Lawsonia intracellularis
atgagtggtgttgctcctgttggcgtttttccgttacctaatcctgataattataaagataaccctgtggcaatgtatgcatttgttttgctactttatgctgatagttaccgtcaggcttctatgaataaaatggacgaactagaagtacttcaaggtgaacagaaagaagctaatgatatgataggatcatttaatcaaaaacttagtgaagtagagaaagctggtggtggcggtgtcacacgtccaatgacagcagcagaaaaagcatggtgtgataaaaatggtattaacgtccctgggtatccaaatcttaatgcagagaactggactgctgtaattaaagatacccagaaggttgttgatacaaaaagtacagatattcaatctactatgaatattattaaagaggctacaggtcaatatagctcattcatgcaaggtacaagcactaatgtaactgcttctaatcaaatgttaaactctatagcaaaaaatatagcttag

SEQ ID NO: 10057 - DNA, 540 bp, Lawsonia intracellularis
atggttatgaaacaagagcgtcaagaaacacaggctgctacatctgaggctccagttatgggaactgataatgatatggaacgtgtagaagctattatggatgccttgtcaacaggttcatcgattggtgacatcattgggataacccaagaacagatggatgtgttatataccattgcatatggagcatatcaggcaaaaaactatcaagatgcagaaacgctcttccaagccttgtgcttatatcaacatatggatgaaagatactggatgggacttgcaggaagccgtcaaggacttgaaaactataagggagcaatagaagcctatgaaatggcaggccttgcagggtcgctaggagatcccacaccatttctctatgcgggcatatgttatatgaaattcggtgataaagagtccgcaagagttgcttttttaagcactgaagcactctgccaggagggtaatcgtaagcatgatttagtgaaagagagagcaaaagctatgttggaaattctctctggaggagtaaagcaatga

SEQ ID NO: 10058 - DNA, 1191 bp, Lawsonia intracellularis
atgacaaattttggagatataagcggaagctccgcaagaatgagtagcttgatgactggtacatccggtgaagaaggacttgaagaacttgaaggtggtgttcctaaagagcaaggtggtccaggtaaaggagatgcttcagaggctgctaaaggtcaagcagcagcagatagtattaattcagctggtggtactgaaaagcctggagaagttggtgataaggaagatgtaggggaaggtggcgaaatacctgaaggtggtgaaatacctgagggtggtgaagaagttccagaggaacccccatatgtccctcctccattggttgaaccagctaaaatcagtacagtaacagatctcagtacgttaatgggatcactacagctgacagagcaaaaaaagaatgctgaaaaaacagtaaatgaaattaaagcacagaataaagagcaacaagtaaagttccaagagcaaattaaaaagattgaggataatattgctgaatctaagaaaagtggtatacttaagtttttccaaaagttgtttgcagttattggtgctgtactaggagctattggaggtgcgctagctattgctgcaggtgctgcttcaggtaacccattattggttgctgcaggtattatggctattgtagcttcaattgatgcagcaatgtcgtcgctatcggatggtaaagtgtccatctcagcagggattagtaaggctcttgaggctatgggagtaccagcagaaacagcacaatggattgcatttggtatacagttagcaatgattgcagtgactatagctattggttttgcctctggtggtggtggagcaatggctggagtgtcaaaaatagcagatatgttttcaaagtctcaagatgtagctaagttggcacagatgattgaaaaagcttctaaaatagtacaaatcgctggttcagttaatcagtctgctataggcggtacaggtattggtacagctgtagtgcaaagcaatataaaagctaatgaatctgaacaaaaagaaattgaagctgctattgcaaaagttaaagctaagatagagacgttacaagacttctttaaaaaccaaatggaacaattcaatgctataatgaaaataataacagatattattcaagatagcgtcaatacaaaaatagctgttcaacgtggtgcacgtgagtaa

SEQ ID NO: 10059 - DNA, 798 bp, Lawsonia intracellularis
attttggagaagactatcatgatttcattaaataattcatcaattcaaataccacaacaaaatatagaagaaagtacctcacaagaagtaacttcctcctctggtggacaacctgctaaagttgatggtgtatcaatccaagcccctaaggctcctgttacttctgcagctagtaacttagaaggagtacagcaaagagaagctcaagaaaatgttacaaaaatgggcttacctgagctatcagctcctaaaggtggtggttatgttcagtcaacagcagctatgtttgcagaagttacagttgatgctatgaatcagcaacgtaaagctgcgcaagacgtacaaaatagtgctcttgaaggaatggttaataagatgctggaagcagctaaagatataaaagaacaatctaaattaatgatggggttaggtatagcaagttctgttatgaccactgcaatgggatttgggggtactataggtggtgtaaaaagtatgacagctaaccctggagtaggaacaacacctcaagcacaagttacttcaaacaagcttactttaggtaaggagattgctgaaggtataagaggtggtatggatactggtaaagagagtcaagtgaaatctatagatgctgatataagaacaactcaagcagaagaaaagaaactagaagcacaaatggaactagtaaagcaatttgctgaaaattcaaagaaccttgctcagcaagctctgcagattatgtcagaagttactagggatgctaatgcaacaacacagcgtattctggcgtaa

SEQ ID NO: 10060 - DNA, 1752 bp, Lawsonia intracellularis
ttgaaagtactcttttatatacttctatggagcattctttttatacacttagttagtgtaagcaaggctgaaacacttttttcttatttatatacacattattcagaacaagaaagtttaggtagtcttttgacagactttgcattcactcagggatatagtgctattatttcacctgctgttcgtggtaatgtcagtggtttttttaaggatgagaatccataccagtttcttgaaggtatgaggagtgcctttggtgtcatgtggtatatgttaggaaaaaccatgtacttttatacacaggcagaactgcaaagagtgtttataagtccacaagttatgactgttgaacgcttatatcatatattattaaactcttctgttatttcaccacagttacctattcaactaaatggagatatgattatcctttccggtcctccacattacattgaacaagtattacaggctgtatctatttttgaggtttctcaattatctaatattaccatgcgtgttttcccacttaaatatgcatctgcagatgatattgttattcaaagtatggataaaactgttacagttcctggtattgctagtattttacgtgcaatgcttaatggtcaacaagagacagcaacaacaatagttgaacagcctgcaactgtgaataagttaaacggagaaggacttgcttcaaagggtaaggaaaaaacagaaaaaggtaatgaggtaaaacaacaagcagctggcgttaatattatggctgatcctcgtatgaatgctgttgttattaacgatgcggcatatagaatgccttactatgaggaagttattcatgatttggataaaccattagagcttgttgaaattcatgctgccatcgtagacattgattccgaatttaagagagaccttggttttacactacaacaaggaagttctaagaagagtatgacaatgggtggtgacttttctactactcaacaatcactaccacttgagattactaaaggaactgtcgaaggcggaggtctaacatattctaccatttattcaaaaggggtagagttctttttagcacgggtacaagctcttgaaacagaaggtgaagcaagagttttagggaaaccttcagtacttactgtagataatattcaagcaacattggaaaacacaagtacatactatattcaagttcaaggttatcagactgttgatttattcaaagttgaatctggtacggttctacgtgtgacaccccatattatatataataatgatggtacaaaatctattaaacttgttgtagctatcgaagataatcaaaatgataattcaacagatcctactgtaggttctaatgttgtactaccacctattaaacagacaagaattaatactcaaggtgttgttaatactggccaaagtttacttataggtggatattactatgaacaacaaggtgttaatgataagggtatacctattctcaaggacatccctattataggatatttatttaaaacaaatacaaaaacatcaaaaaagatggaacggctaatacttattaccccaagaattataatgcctaatacagttacgcctatacctgcacatgttgatgatccttcatttcatcgtagtgcagtacaggacacatatgatgatataaaacccaaaagttctacaggaggagggtgctctagaaaaagaagggctccagttattgaagagcagaggctaggctaa

SEQ ID NO: 10061 - DNA, 1422 bp, Lawsonia intracellularis
atgagcaaagtagatggtattggtatatatgtgttttctgggccacatgttggtgcagaaattattttaccagagggaagctatactattgggacaagtgactcttgtgatataattttgacagatatttctttagctcccagacacgctcagcttgatgttcatattggagaaagtgaaaatacaacacatttgactgttatccctttagaagggggtgtttggtctaataatcaagctgtgccagagtcaggttttcaacctaaacctggagacttttggtacttagggaatacatcctttgggtggaacttcccaggtaaaaattggcaaaataaagcagcacaacaatatgctgaaacacttagccaagcagaaaatgataataataaccttggattagaaggtggaacaacacaaactcaggaacagaaagatgatttagttaagaaagtatttggagatacacatcctcaagatgttattagtaaaattgataagttttctatgggaaaactcattggtgtatgtctccttatcctttttttaggagctattgcaatttcttatcaaagggattctgtggatgaaaaaacacaagttgcatttttacagaaagtgctagaagataatggatttagtggtgtatcagttatcccaggtgctcaacaaattattattcgtggagttgtacaaagtgatgttcaacgacaattaatttatacattggcacaaagtgtgcattctcctgtatatattgatgttggtgttcgtgatgacttagttaacgctgtaaaagctgcttttgcttctagaggtattcatatttctgtcaaagaattttcagatccaggtataattagtatctctggatatatgaaagatggttttgttgaagagtggtcaatttctgctatgagggatgacattcctataccattcaagctggaaaagcatattgtttatgctaaagaggttgctgaagttttagacaaaatatttgcagaaaataaaattggttctttaaaagtgacgtatcttgcaggagaaatagaaatagtagggagttttgatgaggaacgtactaaaaagctcgataaggcattagcagaaataaaaaaagagcttgatgtgccaatcatgtttaaaattcaacaaatcaagcctgctcctattacgtctgcacaaaagggtcaaccagttaaagatgaaagtgatgaggagtcatcagtgttaggaggatctgttataaagggggtaacattattaccaataccatttattacattaagtacaggagagcgaatttttaagggtggggtattacctagtggttatacccttgattcagtttctttagacaagttgatcttttctaaagataatcaatataaagaatatccattgagaggtgcaaattga

SEQ ID NO: 10062 - DNA, 480 bp, Lawsonia intracellularis
ttggagggctatatggctgttgaaacaggtgttgttgctcaaagtaaactccaaaaaattcttagtgaagagagtgggttatattcacaggacccaagtggagcattgtctcagcctgcacctgaggatgttcagaattttcagaaaattctcgaagatgataatcaaccgcaattaaatgtaataagccctagttatcatacacaggctatagagccttcagtacaaacggaaaatatagtacctgtggaggaggtgcatgaagtagaacagatagatttacctacggatgtgcaggatagagaaatagctataaataattcttcacagatggtagctgatcttaatacaggggtcattacaccagtggagcttcttaggttacaaaaagttgtaggagtagttcaaacacaagcagttacaactacacaagtttctcaacaagttgaacaaaatataagtacttttcttaaagagtag

SEQ ID NO: 10063 - DNA, 837 bp, Lawsonia intracellularis
gtgtatctctatatggaaaatgtagctgattctaatataagaaagctaaaagtaatagaatggttgttttttcaaaaaaagactattgttcttttgcttgctataatattactttatggttgtaaagttgaggtgtatcaagggcttaatgagatgcaggctaatgctatgttagcaaccttacttaaacacggaattgttgctgaaaaacaaaatacagggaaagctggttatactataagagtagataaaagtcgtcttgcagaatctttagagttacttcgtgaaagcggttttcctaaagaacagtataaaagccttggctctatattctctggagaagggatgattgcttcagcatctgaagatcaagcaaggttaagttatgctctttctcaagagttagcaggtactttttctagaattagtggtgtattaagtgcacgggtacatgtagcattggcaagtggcgatcaagagttagaacaacgtacacctgcatctgcggctatttttttacttcatacacctagctctcctgttgttaatcttgttcctaaaattcgtgaactcacatcaatgtctgttccagaattatctccagataaagtatctgttgttcttgttcctgtcagagaatctattacaattcctacagttgcttctctttcttctattggcggtatgtttttttctaatgggcatgcaacatatgtgttacttattttagctggtattactgtattaatgatggtggctttattatatcttaatattattttttggaagcatgtatggacagcatatagtgaaagtaaaagtaatacagataattag

SEQ ID NO: 10064 - DNA, 681 bp, Lawsonia intracellularis
ttagttataaggaagcactgtgttatggtaacgcaaaaaagatatacagattttccttcaatattgtttattaaaagtaatatgtttttcccagcacatggagtacatattttacatgaaaaggatgtaaaagcattattaacagcaaatgattttcttgaagaaacagataaatatttaaaaaatgctactcaagagacagaaaaattttataaagaacaatatgcattaggatataatagtgggaaagaagaaggtagttttgaacatgcattaaaaatttttggaactattttttcttctataaagtttgttgaaaatatagaaacaacactagttcgtgtagtaactgaagcagttaataaaattgttggtgaagttgatacattgaaccatattaatgattggattcaaaaagacttattacaattacaaagaaaatatcagctcactttatatatatctcacaatgatgaaaaatctgttacaatttatattaatacattatgtgccaacaagccacaattaaaaaattttttacacatagtgttagatgattccattaaacctggaaactgtagggtagaaagtgagctaggtaatgttgaagcaagcataaaaacacaaatgaaagctttggagcagtcattaggtgtttcaactgaactggaggtggaataa

SEQ ID NO: 10065 - DNA, 882 bp, Lawsonia intracellularis
gtgtttcaactgaactggaggtggaataataatatgagcaatacaaaaatatcaacatactcctttggtgataagccaggatcaactattactggtggatttggtgctcaaaaaccaactagttctgatataaatttttttgaacaatctattattaagcatgatgattaccctaataactatgaagtaaaagaagataattctcaagaggaggttgaagaaaaaccaactactcagccacctaaagagcaagtgacagataaaacagaaggtaaagatgaagcctttatagaaaaagatgatgctataggtaaagataaagacaaaattccaggaaagggagaacctatagagaaagaagatggagtggataaaaaagaaccaataaaagatgacaaagttgtagcagtaaaaaatcatgaaaaagatgacgattcatcatctataaaagatgatggattagataagcagattactccaatgatgttattatcaatggtttcaggaaaagatgatgaccttaaggtagcacatgttcaacaaataaactctccaactattgatttaacagaattagtacaaagaattatggttgcagctccttcaagtagtaataatggtgaggtaagaataacattagctcaaggatttgcaggaacagacgtaatattaagaagagataaagaagggatgctattagtaaattttttggcatcaggtacagcagcatataatcaaattgcaaatgcacaagatttattgaaacgtaggcttgaagttgttgaaggtaagtcagttaatatagaaatatcagacaaacagcaggaaacagaaaaagtaactgcagtagagggtagtggaacatcaacaacaaatcaataa

SEQ ID NO: 10066 - DNA, 1107 bp, Lawsonia intracellularis
atggtacaaactacacaaaaattatttgagcctgcgaatcttttacctctaagtgcgcaggtctataatacagcttctatgtgtataagaccttggcagtttatgctccaagatcaattatgtactttagatttactttttcttcatgatccatttagctctgtatacacaatagtcattcattgtggagaggggagatgggttattgagtttggaaaagtgcctcctctttcattatatccatcttttaaagataaacctgaagtattatgtgttcctgaagaggtaaaacttgcagtttttgaattactgatttcaccttttttacatcaattcgaaaatatgatgggaactcctgttgagctagtttcaagtacactttctcctcccagtagagataatttttcagtagcttgttctatccctttagtgttacatgtagagggaaacgaaaatgagattccttttttggtaaaaatagaaaaagaaaatgacgcaatattgcttttatcacaattacaggagtttcctttagcttatagtgatgttgggccattatctatttctgttggtattgaagttggatatacccagttaagtacacaacagttacagcaaatagaaaaagatgatattttaattccagatcagtttttcatacaagagaagaagatccagcttcgattttcaagatttttagcaaattgtacaatccaaggagggatggcaacaattatggatgttaatgatgtaggatatccagaagaccaaggtaatggtggtgagcaatttgtagaaaatcatacagaggctcctaattcacatggtcaacaacgaacagcgagagctaattctggaaggcaatctggtcaacagtcttcaggtattgatgtatctggtctggatttaccagttgtatttgaacttgaacgtcaattcatgacagtgcaaaatataggattacttgccccagggtatacgtttgctctatcagttgatgtccaagctcctgttactttacgtgtaaatggtaaggctataggggtagggagacttgtagatctaaatggttctttgggggtacaagttgtacaagttatgctctaa

SEQ ID NO: 10067 - DNA, 339 bp, Lawsonia intracellularis
atgcgtgtgattagtgaagaaaataatggtgttatagttatttctcttgatgggagaatagatgcaacaacaacaacgttatttgaagatgcctgtaaaaaagcttttgaaactggagtgcctgctgttattgttaatatggaaaaagttgaatatatcagttctgctggattaagaggtgttttaacaatgctaaagctaggtaacggggcctctgtaaatttagttttttgttctttaggagagatggtcagcgaagtttttagaatttctggatttaactctgtattaacaatatatcctaccataaaagaagcattagctgcactctcagtatag

SEQ ID NO: 10068 - DNA, 444 bp, Lawsonia intracellularis
atggcaacacttactatcccttcagggattgagcagcttccacatgttaatgcatttctccggaaaagtattcctatggcttttaaaaagcgcattcatttgatagaacttgcagttgaagaaattttagtaaatatttttcgatatgcctatcataatgaaaatggaaatgctgaagtgtcttgtcagtttgttaaacataatgggactccttattttgttattactattaaggattggggagagccatttgatcctttccaggttccattacctgatctcagtttagatattaataatcgaccaataggcggacttggtgttcatcttgttcgaactgctgttgacttatataaatataagcgggagagtgatataaatgtagtggagctcttttttcagtttttagcagaaggaatgggtaataacaatatctctatttaa

SEQ ID NO: 10069 - DNA, 699 bp, Lawsonia intracellularis
atgttaaggattgtcccgctaaaatatacattatttgctataattaccctatttttttgtttttttgacacaacaaatatattagctaatgaaatattaaaaaatatacaatatacaaataagatagctgagcaaacaatgttagctatgcagtatagagtaaaacaagctcgtacacctcagaaatatcatcctagtgagccaatatatgaaaatcttttagatcagatggatgtatatagtctttctcccagcgcaaaaaaaattgtattacatagaatgattccaacatatgttaaggagaaggtttttcggggggaaataaaacttccttcagattggaaagaaatcatccaagtagccagtacaaaacataacttagatcctgctcttattgcagctgtaatacaggtagagtcaggcttttctggagaagctctttctcctaagggggcaaaaggattgatgcaactaatgccagatactggtttagaacttggggctacagatctttttgatccaatgacaaatgtagatgccggtagtcgatacttacgacagcaactggatcgatttggctctgttgagctagctcttgcagcttataatgctggtccaggtgctgttataaaatatggtggtattccaccatataaagaaacacaggagtttgtaaaaaaagttttatctgctttttaa

SEQ ID NO: 10070 - DNA, 486 bp, Lawsonia intracellularis
atggaaactaactcaagctatcggggttcggatgatagtagccttattcaacttgtaactttcaaaatagcaggtgaagagtttggagtagatatattaaaagttcaagaaattatccgaatgatgcctattacaaaagtaccaaatgctccactatttgtggagggagttattaatttacgaggaaaggttattcctgtaattgatatgcgtaaacgttttggtatgccttctagtgctcatgatagtcagacaagaataaaagttatggatttacaaggtcaagttgttgggtttgtagtagatgctgtatctgaagtcttacgtattaaagaatctacagtagaaccaccaccacctgttgttgctggagtaggttctgagtatatgcgtggggttggtaaactccaagatagattgttaatacttttagatttggataaattacttactgaaagtgagctagaaactttgtcagcattatag

SEQ ID NO: 10071 - DNA, 1689 bp, Lawsonia intracellularis
atgttcaaaaaaatatatgttttttatatcacacttcttcttatatttttaacatatgttacaccttatgatgtatggagctttgatcttactattcttcatacaaatgatatacattctcaccttggaggaattaaaaaagaatcaggtaatccttgcttcacatctactacaccagattgcgtaggtggaatggcacgtttagcacaatctattttagacattcgtcaatcaacaccaaatactattcttcttgatgcaggagatcaatttgtaggaacagcttttcattctgactttataaatacaccagatcaactcccatttgtaaagtttttaaatagacttggatatgtagctatgtcaccaggaaatcatgagtttgatcatggatgttatgaattttttagtgctataagacaacttaactttcctgttgtagttgcaaacctcacctttacagatcctgaaatgcaatcatcaattactccatggaccattgtagaacgtgaaggaaaacgtattggtatcataggacttattacagaagcaacagccactggatcaagagcatgctctcaagccatttttactaatgctgaacaagcattacgtaatgcaattcaagaaataaaaaaacaaaatgtatttacaattattgtgttaagccatcttggaataaatgtagatatggaacttgctagtaaagtcgatgatgtctctgtttttgtaggaggtcatacacatactttgctttctaacacctaccctaatgcttatgggccttatcctatagtaaaacattcaccttctggacatcctgtacttattgtaacagcaaaagaaaaactagaatatcttggaaggattaatataacatttgatgaacaaggtatccctcaaaaatggaatggagatgttatacgtcttgataagccaattagtaatgatcctgctatagtatccatagcagaactgcttgatagctatggtatacctattaaagaaaagcttgaagtaaaagttggagaaatagctcatcctagaaatccaaattttgatacatcccaaccttcaaatgaacaactagacgaaaaacctttcttttactgtagaaaacaagagggattaacagctaatattattcttgatgcaatattagaagcaggccgctcaaatggagcacaaatagcaattgtaaccactggattaataagaggaaatttacctatagggcttgtacaaaaacttgatgttgttacagctatacctattgaagataaactttatgtaggagatgttacaggaaaaataattcaggaagctatagaaaatggagtctcaaaagtacattgctttgcctttgcaggaacttttcttcaagttgcaggactcagattcactttaaatgctgaaaaacctgtaggtgaacgcattcaatctattgaatatttaaataatgggaaatatgagccactggaccctaataaaacatatcgtgttataattaatggatatcctactgagggacatgatggatttataatgttaaaagacataaaatggacagatatccaaaaaagtccagtagaagctgttataagctatctaaaagaacattctcctctcaatgtaaaaaaagatggacgtattgttaatgtaacacctattattgtccctaatgaataa

SEQ ID NO: 10072 - DNA, 984 bp, Lawsonia intracellularis
ttgtataagtcacaaaaaagctcattagactatgctgttacaaatattaataaagcacttgaagaagacaatcttgttttattaagtaattatgttgattttgattcactttcaaaaaattttgttcatagtatacttcagtattggtcaagttttcgtatagatgaatcacgtcagaaagagcttgaagataatgtacagcaaatcattctattagctctaaggcataatgataaaaatcaaggcaataatattacttctgatagtagtattacttctattcagacgatagatcaaaaaatgccttttagctttttacctaaagattttttgaaacaacttaaagaaaaaaagtttactatttatagacaagatgaagatattgctattcttaaaacatctatagttcataacgaagctgaatatcatactgagcttagtttacttgtacaacgagttgctggtaaatggcacattacaaaaattattaatgctgatgagttagtaaaattacatatggctgcattagataaaaaagaagatcagttgacacatgaagtagctgtccgtaatgactatattcgtaatgaaatgaataaatattatcatgtatcagagtgtaatgcttttgttataaaaaaagaaaacagtaatgatgaggatgtccctttaactatttctgttggtggaattaatatgggaagtgaggtattacgttcagctggaatgcggtgttttctttatgatatacataaaaatattctagctgtcttacctcttacaatggctaagaatgtgtcacctggtgatttttttgaacaggagtggtatatggaaattccagagaatgtattgggtcattcttttttattaatgaaagataatacaataagttgtgcaatagaagtaacaacagttattcttgcagatggaacatttctttatctcaccccaacaccagagaaagaaaggcttcatccataa

SEQ ID NO: 10073 - DNA, 2466 bp, Lawsonia intracellularis
atgttattccttctccgttttattcttgctcttttattcataccactaggaataactataagctatgcaaaagataccctttctgaccactcatcttctttgtcattaccaagtaaagcccaagtagttaatgaagtatggatgttgttattacaatctagagttggtgagttagaagcaattagctatgagctttcttcattgtttaaagagttaccaaatttttctcaacaactttcaaataatatacaagagatagaaaaaaaatatcaacaatatagtgcaatggccaaagttagtcgaggactacctatagagctgtctttagtagaagagagattaaaaaggcttgataatcaattatcagtagttatgagtccattgctagatactctcaatattttaaaggtacgtttaaatgaagtttctttattagaagaagatgcaggtgtaaaaacagaaaatttgggatcaagtaaggatttagatatttttgttaaaaatcttgcagaagtggaaaataaattaggaagattagagaaaagagttaatgaaattttgaagcctgcctatatgttgaggaataatattttagcagttcaaaggcagttgttagagattattccgtcattatggaaaagttattatcttgctcctacaggaaagatttatgaacctgcaagttggttaaatatttatgaaagtttaatgagttttaaagagacgttacttgtacgtatagccgcagagttgcctgaaagcaagcaagattggggaagttctttactaagattttttgttattttaattccattagttctcttattagtggttttctatagtttttctcggcattggtcagatgagttaaaaaacgtatgggggcatataagtaaacatagtttaatacttcttgcgttaggacttgcatttcatttttctgcctgggtaccagcaggagaaaattattttttattatctatgattggcactattataatgagtattggacaagtagggcttgcatggagcttgtatacattagataaatctaacaagccaaagttttctcctttttggaaattacttattcccttctttggtggaattcttttattattatttaatttttcaggtataattcttacattgctatgggttggtatattacttgttagtttttattatgatcaaaaaaaatgtaagctagaagatagtttttctcttgtgaataacttattacaactacatatagtgattttatggattacattgataatgacaatgcttggatggacaagaatatcaattcttctttgtatgagttatgctgcacttgcaatatgtattcaacaagctgttggatttgttagattagcaaacattatttcaaagtatataccacaagaaggctttcatggactttttagtggaatgctattggcagttgctttgccagcgattcttattctagcaatatctataacaggattatggattttagcatatcctggtggagcatatttaataacacatataacaaaacttgactttagtataggtaaggtatcttttagcttagtccaaatcttatttttagtaagtgcattttatataacacgttcttttgtttctgttggtcgtatgtttattgcaaaccttcctaaacataatatgggtatggatagaacacttattggccctattcaaacaggatttacctatactctttgggcagtatttttcttttctacactatatatgctgggtgtaagtcttactagcctagctgttgttgctggtggtcttagtgtaggtattggttttggtttgcagaatattacaaacaattttattagtggactacttataatttttggacaaaccttaagagaaggggatattattgaggtaggtaataatcttactggtattgttagaaagattactattcggactacattagtagagacatttgataatgcaactatttttgttcctaatgcagaattactttctggacggctcacaaattggacacgtaatggtcgtacagtaagaaaagatatcaatattggtgttgcctatgattctgatataggtttagtcatgggtttacttaaagaaatagctgataatcattcacaagttctccgctatccagaacctatggtagttttcagtgattttgcagcaagttcattgaattttattttacgtttttgggttggagatctttctcaagcacctgatattataacagatttacgtgtaattatagcaaaaagatttactgaaaaaaatattgatattgctttcccacaactagatattcatatacgtaatgatagtgtattagcattacgtagaatttctcctatggcatctagtgaattacaacctactaaaagtatagaggaccttccaggtgttactaataataagcctatcatagctaacagttag

SEQ ID NO: 10074 - DNA, 1164 bp, Lawsonia intracellularis
ttgtatttgtattctattcgacttttatctattcaacctattgctattttgcgagctatgctcacttctggttggtttgttgatgcatttttatatttttttgaaggtaaaggtaaagtaacacgttccttcttatgtgtttgtatgttagttgttggaggaatgttttttatatttatatcaggtgctttccctgattatagaggtattgaaattcgtaaaccgttatctctaagttctttaccaataccacctcaaaaagatacacgtcccctttcaggaagtttttggaacatccgtggagcatttgtacgtcaggagattccttcagatataaatagtccaatactattttcatctcagaatatgtttcaattctttgaagatagtgtaggtttgcgtactgctaaaggggttacaccacttgttattaaagagatggacgaaactatagcagaacttttttctacaaatacaatgttaattacatcgctaggagagccattaaactttgaaggtgttccattgcgttggaatataggtagaaatttatgtgagatgacaccacaatccattgcacgtcgtaatcaatttttgaatagttggatgaaattaacaactttttcaaagtcattagtccaacaagcagggcaatacaaagagattgttgaaaaatattctaagaagtataatctttctgctgaacttatctatgcgattatttgtgtggaaagtagttttaatcctgcacaaataagtaaccgttcagcacatggacttatgcagattgtgcctgaaatggcaggtgttgaagtcaaacgttggtttggttattctggtttaccaacagcagaagaattattacatccagaaactaatataaagtatgggacatcatatttgtatttacttatgacaagacatttaaggcctattacaaattgtttatctagagaatattgtgctattgctgcttataatataggtgtaggggctatgttgaaaacatttgctgttacacctgaagaagcttttgctattattaatacatatacagcagctgaggtacaagaacatcttatgcaaaagcttcctgcaaaacagacaagagtttttttagagagagttcttacttttaaggaaagctttactgttcttctttaa

SEQ ID NO: 10075 - DNA, 513 bp, Lawsonia intracellularis
atgccaaaattgttcatactactcttttatacactaattttttttagtggatgttgtgtaactagtaaagttggtgttatagatcctataaggttattccaagaaagtgaacctgggaaaataggaatgaaccatttgaagacaatagaagatgctatgcaatcacagattgatcttgcacaaggaatcttggagaaattccctaaaaatgaaaatgttcgtgtccgattccaaaatatttttatggaatatcagcaaaaacttaacacagaacaacaaaaagttgttgaagttatgaactcattgattcaaaaaactcttgatgagtatagagtaaaaaatggatataatgtgattataactaaagacagtttattatcatatgattcttcttcggatataaccaatgatattattaccatacttaattccacaccattaacatttgagcctgttgtacttgatagatttgatcctgaaactatagttccaccattatctaataataactaa

SEQ ID NO: 10076 - DNA, 780 bp, Lawsonia intracellularis
atgagtctctctcttaatcaaactctttgtatccaatgtggtcaatgtgtaaaagtctgccctgtaagtatccttgtaagacgttctaaaaacatcattataaaaaacaacagattatctcactgtctccattgtggacactgtgttgcaatctgtcctcggtcagcattaactcttgacttaatatgtccagatctacttcaaaaagccacaaaaccttcattatctgatcagcaaaggacaatgctttttaaaagccgtcgatcaatccgtttttataaagaacaatcaatttcatttgatatattaaatgaatcactagatgaagctcgctatgctccaacagctataaatagtcaacaggtagaatggattttagttgaaggtaaagaaaaactacatgaactaagttctagagtagctgactgggcacgtactatacctggaaaatatagtaaaattgctgctgcatttgatgctggatatgatcctattttacgccatgcaccaacagttatccttgcacatgcacaaaaagattcaaaatggggagctcaggattgtacagcagctataacataccttgagcttgcactacatagtcataatttaggatcatgttgggcaggatttgttgttgcagcagcaaatcaagatatagatttaggactatctcttcctgaagatagaaaaatttatgcaggccttatggttggctacccttctgtacactttacttggattcccactcgaaagccattacgtttaactgtagtatag

SEQ ID NO: 10077 - DNA, 2874 bp, Lawsonia intracellularis
atgaacaaatgtattcatattgaaggtgctagacaacataaccttaaaaatatcactattgatatcccaagagaaaaacttgttgttatttgtggaccttcaggctcaggaaaatctaccttagcgtttgatattgtgtatgctgaaggacagcgtcgttacatagaatctctttctacttatgctcgacaatttttacctcaaatggataaacctgacattgataaaatagaaggtctttcaccagctatttcacttgaacaacaaacaacaggacgaaatcctcgatcaacagtaggaacaactactgaaatttatgactttcttcgagtattttatgctcgtctaggtaaaatgtattgtacaggttgtagcaaacctattgaagctcgttcagtagatgaaattattgcggatattttagcattacctgaaggaacaaaaatcattcttctttcgcctcttgttgaacttcaaaaaggaacacacatagaaaagttaaaaaaacttaaagctgatggttttgttcgtgtacgtattgatggtatattatatactattgatgaagctccctctcttgataaaaataaaaaacatactattgaattggtagttgatcgacttattattaaaaatgatataagaggacgactcgctgactcagtagaactagccctacgttatggtggaggacatgttattattcatgaaataagtatatctgatgaaaaaaaaggaatagatactatccatgctacagaatctgtatgcacatcatgtcgaattagctttcctacactcactcctcaatttttttcttttaacagccctcaaggtgcatgtcctcgctgttctggtttagggaccatagagtactttgagccattacttattgcgcctaatagaggcctttctcttaatacaaaagccattttaccttgggctaatccgaaaatttttcatcgctatgaatcatctcttaaagagcttggaagaaaatatggatttaatctttcaacaccactctcagaattcaacgctgaagctcttgatattttattttatggagaacaaataaatgatactccctctcaactatccaaaagtaaaaaaacagtacaaaagacaatagacaatcaacgctggtctggaattattcccatccttgaacaaagtttacaatatggcgatatgtggagggatattctctctcgctacctacaaaacatggactgccctgtttgtcatggtgcacgtttacgtacagaagctcttgctgtacaaattcaaggagtatcaattcaagagctttgtactatacctgtgtcaaaaacacttaactggctacaacaggttatcttttcaggtagacatgcaattattgctgaaccactccttaaagagcttattcataggctcaaatttatgataaacgtaggtcttgactacctctcattagggagaacaatgacaacactatcaggaggtgaagcacaacgaatacgacttgcatcacaacttggatcaggacttgttggagttacatatgtccttgatgaaccatctattggattacatcctcgagacaatgagagactagtctctacattacgaagccttcaaaaaagaggaaatactgttttggttgttgaacacgatgaagcaactattcgtgaatctgacatgattatagaacttggccctggctcaggacttcatggtggagaaaaagtcttccaaggttcatttcgtcaacttatcaatgaatctaatacattaacggccaaatatatgcgaggagatttaactatacctatacctgataaacgtagacagccaaaaaattatcttacactacagggtattaccactcataacttaaaaaatataacatgttcctttccattaggaacactaacctgtgtaacaggtgtctcaggttctggtaaaagctctttagttgttgatacactctataaacaccttgcccttgcccatggtatccgtgtagatcaacctggaataatccatggtattcaaggtattgaaaaggtggaaagaactatttccattgaccaaactccaataggtaaaacacctcgctccaacccagctacctatactaaaatttttgatgagatacgtaatatttttgctatgacacctgatgcaaaaaaaagagggtatcaaccaggtagatttagttttaatgttcctggaggtcgttgtgaaacatgtaaaggagacggtcaacttcgtgtagaaatgcattttctacctgatatttatgtcacatgtgacatttgtaatgggaaaagatataatcatgaaacattagaagttcgatatcgtggacttaatatttctgaagtcctcggacttgcagtccatgaagcacgtaaattctttactaattatcctatattagaacgtaaacttgctattcttgaagaagtaggtttagactatcttcagctaggacaaccagcaacaactctttcaggaggtgaagcacaacgaatcaaaatttctcgagaacttggtaagcgttccttaccagggacattatatatactagatgaacctacaacaggtttacatatgcatgaagtaggcaaattaattactgttcttcagcaacttgtagataaaaaagcaacagtcgtagttattgagcataataaagatgttatccttgcatcagattatgttattgatttaggccctggaggaggagaaaatggtggacatattgttgcttccgggacgcctgaggaaattatgcaagatccacaatcaattaccggaaaatttctattagaagaagtaaacgttcaacgtagctaccatacaattaatggaattactttatga

SEQ ID NO: 10078 - DNA, 711 bp, Lawsonia intracellularis
atgcatcttctcaaattatataatgatccccgaccacttcttcttttaactatagtttgtggaattacagtttggtggctttcccctctttatctttgtataatttctttttgtctacttaactgtctttataatccattcttcaatcaatccatatataaaaaatctacattatattaccatgctatcttttttgtttgtagttggtgcatgataaaatttattatagatagtctaactatgccaataagttgttatgaactactgactaatacagttatattgggattacgactttgtgtccttatcttactaggattatgtcttatttcaaaaacaacaccacgacatatagcactagctgcaggatggtatctccgtcctttttttaagcaacatacatgggaaataacacttgctctttcattaatgcttcatactattccacgattatttcatacagtctcacaaattcaagcaactactaggcataggctttctcttctttctaggctacaacatatacaagttataatgagcacaactacacgtattcttattatgtccatatctaaacagtcgactgttattatagcaaaacatttggcctctccagaaccatgggaattaaatcatcccccaaaaacttactctatgtttattgcaatagctattagctgctgccttatttacctctctattttaagttaa

SEQ ID NO: 10079 - DNA, 741 bp, Lawsonia intracellularis
atgatccagcttaactctgtgtcctttcaatggccacaagaacacactccagcagtacaagatattacattctccctttcatcaggtagccttttatgtatttgtggcagtaatggctcaggtaaatccactctccttcaactcttagcaggtgtccaacatatttgtgaaggaacttatataatggatgaaatctgttgtcctggaagtgaatcttcactattaaaaaaaacagcattactgttacaagacgttgaaatacaacttcttggctcaacagtgaaagaaaatctacttcttccttggtctaatcctaaggatgaatataagcagaaagcttatgagttagcttcattgtttgcacttgaaaaatattggaattcaagtgtacatcatctttctcatggacaaaaacaaaagcttaatattgcttctgcacttatgcttaaaccagatcttcttcttttagatgaaccatattctggacttgattatcctgctaccctccagttaagtaaaatactacaacaacttggtcaaaaaggtcttactagaatcataagcgtccatgatcttgaacaaattatagatattacaactaacatattgatattatctgaaggaaaacaagtcttttttggctcaccaaaagaaacattacatatgatttctgaacatcctgagtggaatattcgtctaccatctttttggatacaaaatgcatcttctcaaattatataa

SEQ ID NO: 10080 - DNA, 558 bp, Lawsonia intracellularis
atgagttctacatttacccgtattaatactattgtatggattgctttttttgctgcactcattgctgtaagtgcctttattagttttcctctaggtccaataccttttactctccaatcactatctatttcactcacaggactatgtattggtggaaaacgggcagcactatgtgttattctttatatttttgcaggctgcattggtcttcctgtgtttgctggaggtaaagctggaccaggagtccttttaagtcctacaggaggatatctcataggatttataggtcttgcctatttaactggctttggtagtggccataacaaaaattgtccacctaaaaaagctataactatcctttttatgagccttggactagcggtaacctatttttgtggtgccacaggcttaatgtgggtactaagtttttccccaacaaaagcaattcttactggtgtattaccatttttacctggagatatattaaagcttgttattgcttttgctatttggaaatatttgcttaaaaaaggattacttcctaatgatccagcttaa

SEQ ID NO: 10081 - DNA, 2655 bp, Lawsonia intracellularis
atgctcacagttaatgatattcgccaaaaatttttaggatattttaaaaactataatcatcaggaaattccatcttcttctcttattccacgtgatgacccatcgcttctttttacaaatgcagggatggtacaattcaaaaaagtctttactggtcaagaaacaagaaattacctacgtgcgacaacagctcaaaaatgtttaagagttgggggaaaacataatgatctagaaaatgttggacgtacagctcgccatcatactttttttgaaatgcttggtaacttttcttttggagactattttaaaaaagaagctattcaatttgcctgggcatttataacagaagaactcaatctttcaaaagaatttctttatattactatctataaagatgacgatgatgcatatgacatctgggtaaacacgattggtgtagagcctagtcgtatttatagaatgggagaaaaggataatttttggtctatgggtgatacaggaccttgtggaccttgttctgaaattcactttgaccaaggtgaaacattttgttgtggtgataactgtggaattggttcttgtgactgtgatcgatttcttgaaatttggaatcttgttttcatgcaatatgaacaactcccatccggagagagagtaatactacccaaaccttcgattgatacaggaatggggcttgaaagaattgtagccatttgccaacaaaaatcttctaattatgatacagaccttttccaacctattattcaatatatggcatctattgctggcgttcactataaaaaacatgaagaaacagatatagctttacgtgttattgctgatcacagtagagctatagcttttatgattgctgatggaattttaccttcaaatgaaggaagaggttatgtattaagaagactcatccgacgagcttttcgttttggaaaacaaataggcatgaatcaacctttcctatataaaacagtaaataaagttgttgagctcatgggagatatctatactgaactgtatagtcgatctgagtttatgtcacgtgtagtttttgatgaggaagaacgtttttctattacattagataaaggtcttatattacttgaagctgaacttaatgctcttaaagaaaaaaatactaaagaacttcctggagatattgcatttaaactttatgatacctatggtttcccacttgatattattaacgatattgcatcaaaaaaacattttgctgtcgatgaagctaactttcaacacttaatgcaagaacaaaaagaacgagctagaagccaatggaaaggatctggagaaaaacgtattgaagcttgctttcaaacacttcttgaagatggtatgcaatcagaattcattggatatgaaaatctttcaggaacaggaagaattgttgcgttacttgatatagatggtcttcctattgaagaactccctacaaaaagttctggctatgttataacagatatgacccctttttatgggacatcaggaggacaaactggtgatataggtatactcagtacaataacaggtaaaacacaagttgttgatacattaaaaccagcaacaaatcttattgtacatgttgttactgtcacatctggaactatcttacttgatcaagaagcactattagtagtttcagaatctgaacgtctagatactgcaagaaaccatacatgcactcatatactgcaatcagttttacaaaaaatacttggtgaccatgttagacaagctggctctcttgttagtccaacacgcctacgttttgactttacacatatagcccccctcactgaagaagaaattcatgctatagaactacaagtaaacactattattatggctaacttacctcttagagttgagtttatggatcaacaatcagctcttgaaaaaggtgcaatggctctatttgaagaaaaatatggaaacattgtacgtgttgttactattggttcagaaaaccagacagcctccattgaactttgtggtggtactcatctaacatccacaggacaagcaggctgttttattattgtatctgagacaggtatagctgcaggagttcgtcgtattgaagcaattacaggtagaaatacccttgcttatattaaagaataccaaaaagagctttccacaactgcggctattcttaaaacaaaaccagaaaaagttgttgaaaaagttacatcaattctctctgaaaataaaaacttacaaaaaactgtagacacattagagtctagctctctatctaatcaaggaaaacatcttttagataacctcactagaataaataacatagatgtactaactgcaaatttaaaaaatttcagtcttaaagctttacgagatataatggatgatattcgttcaaaactttcttctggaatagtctgtcttgcatcaacagagggaacaaaagtacacttattgctctatgtctcaaaagatcttcaccataacttcactgcctcagaacttataaaaaaaattgtagtacctatccatggcgcaggaggaggacggcctgatcaagcacaagcaggaggaacaaatccatctggtctctctgaaacctttgaacttttaaaaaatatactagaagaccaatag

SEQ ID NO: 10082 - DNA, 1068 bp, Lawsonia intracellularis
atggcaaaaaaatctatttctcctgaagattcccgccgagaagcccttaaaacagcactagatactatcgaacgaaaatttggccagggtgctgtaatgaagctctcagatgatgtacatgtaaaagtagctgtaattcctactggctctattgggctagacttagctcttggtattggaggtatccctcgtggtcgtgtcacagaaatttatggaccagagtcttccggtaagacaacattaacactacatattatagctgaatgtcaaaaattaggtggtacagctgctttcattgatgcagaacatgcattagatatagcctacgctaaacgccttggcgtaaaaacagacgaacttattatttcccaaccagatcatggggaacaagcacttgaaattgctgatatgttagtacgatcaggtgctgtagatcttgttgttgttgactctgttgctgctcttatacctcaaacagaacttgaaggttctatgggagaaactcaggttggtggacatgcacgacttatgtctcatgcactacgtaagcttactggtactatccataaatcacatactgcagttatttttattaatcaaattcgtatgaaaattggtgtagttggttatggaagtccagaaacaacaacaggaggtaatgcactaaagttctatagctctgtgagaatggatatacgaaagatacaaacccttaaagataaagaagaatcttatggttcacttacacgagtaaaagttgtcaaaaataaaatggctcctccattccgtgaagcaaaatttgatatcatttggggaacaggtatttctcgctccggagaactcattgatcttggtgtcgaagctggtatcattgataaaagcggatcatggtttgcatttggttctgaaaagcttggtcaaggtaaagaaaaagtcagagctctacttgatgaaaatactagtctaaaaagttctattgaaacagcgctcatggaacacttaggaatgaaccctgaaaaactcctttgtcctgtaagcgatgaacttgaagataactatgatatctaa

SEQ ID NO: 10083 - DNA, 1956 bp, Lawsonia intracellularis
gtgtcttctacttattatatctcaacacctatttactatgtaaatgcacgtcctcatcttggtcatgcatattcaacaattgttgctgatgtattacaacgtttttattctatcttaggagaaaaaactttctttcttacaggtacagatgaacatggagaaaaaattattcaagcagcagaagctgcaggatattcaacacaagagtttgtagactctataagtagacaatttcaaaatctctggcctcaactcaatatcacatatgatgcatttatcagaactacagatttacaacataaagaagcagttcaaaaatttcttcaacatatctatgatgctggtgacatctattttggagagtttggagggtattattgtttaggatgtgaacgtttttatacagaaaaagaactagaagatggtttttgtcctcaacacaaaacaaaaccagagtttattgaagaacagaactactttttcaaaatgtctaaatatctctcatggcttatagagtatcttcaacaacatccaaatcttattcgaccagagagatataaaaatgaagttctctctctactagaaagtggagcattagaagatttatgtatatcacgtccaaaaactcgacttccatggggtattgaattgccctttgatacaaactatgtatgctatgtttggtttgatgcccttataagctatatttctgcattaaactggccaactggtgaatactataaaacattttggcctggagaacatcttattgctaaagacatattaaaacctcatgctgtcttttggcccactatgcttaagtccgctggtcttccaatgtataagcatttaaatgtacatggatactggttgaatcgtgatactaagatgtcaaagtctttaaataatgctatagatcctattactcttattcagcaatatggccttgatgcttttcgttacttccttatacgagagatgaattttggctctgatgctaacttctctgaagaatcgcttaaacatcgtattaattctgatcttgcgaatgatcttgggaatttatttaaccgtgttctttcaatgtcaactaaatattttaaaagcttattacctgaagctaaagagtacacagaacctgatatgcaattacgtcaacttactgagaatgcacaatataactatatacaactcatgaaaaatatgcgtctttctcaagcagttgaagctttatgggaacttattcgtgcactaaacaaatatatagacactcaagcaccatggaaattatttaaagaaggacaaactgatcgtctgaaaacggtcattcgacttacattagagtgtatgagaaaagtagccattagcttatggccaatcatgccagaaataaccattactatgttaaaacagttaggaatctcaacatctaaatcaaaaaaatatgggaatatacctaccacatgtataaataatgatattcatgcttgggagcagttaacaacaggaactatgcttgcaccaacatcaaatttattccctagaatagagctaaaagaagaaataagtgataaggaaaataaaatgtctttccaatccaacgggtcacaaccatcaatatatgaacaagaagaaatatcttttaatgacttgcaaaaagttgaaatacgtataggcactatagtagaggcatcaaaacatccaaatgcagataatcttctatgtttttctatcgatataggagaaaacaagcctcgacaaattctttcaggtattgctcaacaatatactccagagtcaatgcttggcaaacaagtatgtgttgtcacaaaccttgctcctaaaaaaattagaggaattgaatctcaaggtatgattctctttgcaaaaacacctagtggactttctttagtaaccgtagagtcccctgtacctactggaagtattgtttcataa

SEQ ID NO: 10084 - DNA, 951 bp, Lawsonia intracellularis
atgaaacgtatacttaatacaagttttagaccacatgggaaaaaagatatctttttttgtgaagatcctttcattatgaaaggagacaaagttgttgtagaactagagcaggggataagccttacacaagttgtagatatattacaaagtcttcctaactccattgatcctttaactgttccatccatcattcgtaaagcaacacagaaagatttagaacaagttaataaaaataaagagttttcaaaaaatgcttttgcattttgtaaatcatgcattcatgaacatcaactcccaatgaaacttgttgatgtagaaattaccttggatcagagcaaatacatcttttattttactgcacctaaccgcattgatttccgtgaccttataaaagatcttataagagaatatcatgctaaaatagaacttcgccaaattggtgaacgtcatgaaacacaacttactggtgctattggcaattgcggcagagtctgttgttgccgacgatttttaaaagacttttcacctgtctctataaaaatggcaaaagaacaaaacgtatttctaaatccctcaaaaatctcaggaagctgtggtaaacttctttgttgccttagctatgaacaagaaaattatcaaatatttaacaaacaaagtccaaaaattggtaaacgttaccaaacagatcaaggtagtttaaaagtcatccgaacaaatctgttcaaaaatactattactgtacttaacatgtctaatgaagaaattgaatacacacttgaagaatgggataaacttcatcccacacatactactcctcaaacaattaaacaaaatatacctcaccaaaataaaacttcacatccctcttctgattttctaacacttttatcagatcatgataccaataaaatagacgataactctcttgatactattcttacagaaagttag

SEQ ID NO: 10085 - DNA, 618 bp, Lawsonia intracellularis
atgtctatagccaaattcttttctaatcagactgctttactttggaagttcatgagttatttccaaccaccagttgtaagaatacttcatattgttattacattacttatagttattaaccttattcttggatatggctttttatgttctacaaaaaatccagatacatatataatatgtagtagtctcctctgggtccatatttctattggtatccttcttacactattaacattactcttcatacctgcatgtcttttccatagaggtataaggcacttttatccttatctatggggtgatactaaacaacttataaaagatttaaaagtaagcttatcttttaaacttatacccccaacaagtggtggtttagctgctgttgttcaaggacttggattaggagctttacttcttacagaattagcaggaataatttggtttattggatggcaaacagatggactttatgcacacttttttaaagaagtacataaagtcagtgctacccttttagccctctaccttttaggacatggaactatggctactattcactttattgtatggcaacgaagagtagcccgaaaaaaaatgagacaaaaaaagtctgactaa

SEQ ID NO: 10086 - DNA, 600 bp, Lawsonia intracellularis
atgattgcatatcttgaaggatatattgcagagtttggagaaacaagctgtgttgttgctacctctagtggtattgggtatgaagtttttttaactacacctacacgttcaacattacctaataaaggagaacaagtacgtttttatatttgtcatattgtacgggaagatatacaagaactgtttggctttgaaacatgggatgagcgacaaacgtttattgttttaacatctatatctaaagtcggtgcacgtacagcacttaacatgctttcaacttttcgaccaaatgatctaagacaatgtgttatagaagaagatatttttgctcttactcgtgtatctggaattggaaagaagacagcacaacatatttttcttgaacttaaatataaacttcaaattgatggaaatagtactacatcttcttccccttctattggtcaaagtcttttttatgatatattaacaggtcttcaaggactaggatatactaaagaagaaagttctgtagttataaagtccgttttgcaacatgaaccagatttagatgttggtagtgctcttagaagatgtctgaaacagctggtaaaggggtaa

SEQ ID NO: 10087 - DNA, 1026 bp, Lawsonia intracellularis
atgtctgaaacagctggtaaaggggtaacaatgcctgaaataatgcagtcttcttaccctgatgagacactttatagagaaaaagatgatagtattcgcccttctcgactcgatgattttattggtcaagaagagttacgtgaaaatcttaaagtgtttttaaatgctgctcgtgatcgtggtcaggctatggatcatacattattttatggaaatccagggcttggaaaaacaaccctagctcaaattattgcagcagaactaggggtaaaccttatttgtacttctggtcctgtccttgagcgtagtggagatcttgcagcaatactaacaaatctttcaaagcatgatatactatttgttgatgaaattcatagaatgcccattacagtggaagaaattttatatcctgcacttgaagattataaactggatttagttattggacaaggaccagctgctcgtacagtaaaaattgaattggaaccttttacccttgtaggagctacaacacgtattggtcttatatcttctcctttgcgtgatcgttttggaattattagccgacttgaattttatacacctgaagagttatcacaaattattttgcgtacaagtcgtattcttaatgttcctattactaaaaaaggcgctatagaaattggtcgacgctctagaggtacgccgagaatagctaaccgtttattaagacgtgttagagattttgcagctgtttttggctcagcaactgtagatgaagagcttgtaaatcatgcattacagaaacttgatgtggatgaaaaaggtttagatcagatggatcgaaaacttcttactgtccttattgagctttttgctggaggtcctgtaggaataaaaacattagcagttgcatgttctgaagaggttcgtacaattgaagatatttatgaaccttatcttattcagtgtggttttatgaagcgtaccccccgtggtcgtatggctacggtgaaggcttataagcatttaaatttaacggattaa

SEQ ID NO: 10088 - DNA, 723 bp, Lawsonia intracellularis
atgcctggagttacccctagggttgaattattatcctatacaccagaaccgttgtcagttatttatgcatcatttagacagtgttatcatgctggatttgttggagatatgtggaagaaacttcttgatggagaaataccaaaagagaaacaagctagttttatccattcattaattgaatcaggccatacaagtcctattgaacatgtaagttttacgtttgctattagtggtgtttcaagagcacttacacatcaactgatccgtcatagactggcttcctactctcagcagagtcaacggtatgtggatggatcaaagtttgaatatattgttcctccttctatagctaaggatcctaaagcacttgaaaaatttacagaacttatggagagaataggagaggactatagagagctgaaggctttgcttgaatctggtaaaagaacagcttcttctattgaagatgctcggtttgttttaccacaagcagctgcaacaaatattgttatgacaatgaattgtcgtgcattattaaacttttttgagcatagatgttgttttcgagctcaatgggaaattagaaatgtagcatacatgatgctcaaacattgccgaatgattatacctgctatttttgatcctgcaggagcaaagtgtgaaagacttcaatattgccctgaaggagaaaaatatacatgtggactatatccagtgcgttaa

SEQ ID NO: 10089 - protein, 359 aa, Lawsonia intracellularis
LAIRKRNLKSKNAISYQVYWNNPYTGLREAKTFPTLFEASAFESLIKHRLKYEKTFFKPKENTTLEPVTLYDAVLCYLQKKKFTPQYTKIISCSLQSILTSYGDVKLSELKTDFFVHLKNYLETKTKKNGECFSRSYIHIQLSRLRTILNWAYEQGMLVMLPKMKLGDPYYTRTIPPTFDEITRLIAVSPPHLVRIIILGAAFGLRVGPSELFSLTWDKIDLKSGVVRISTSKKNPRFPWREVPIKDELKPFFSTWFEEDTKNGLSYVITYKGKPIRSIHSSWSKALKNAGITRRIRPYDLRHSFASELISSGVDVGTVAQLLNHSSPNMLFKYYQYVETKQKKRAIELLPSVSCDITM

SEQ ID NO: 10090 - protein, 118 aa, Lawsonia intracellularis
MLALTPMGLKICRGNPLYPDHVVYLGAITAEIQPNEKISVTIARFESQYNITPKFLIAPDKGIFIAPNITPGELSMIEAIAQMTVRVPDNTTLRQLEQKDIHILAHWDVETKRKSLDN

SEQ ID NO: 10091 - protein, 116 aa, Lawsonia intracellularis
MIDAIIHSILPDGHTHLAKKLHGLSWIMVPYIKPGLSLSHYLSEQVSSTKTNIFLLQNHGIILTGDSHQHIISLLNEITKRLHLPVKPLIQPNIFHLIKINDSNWTIPVNTLYYIC

SEQ ID NO: 10092 - protein, 109 aa, Lawsonia intracellularis
LRKRRYRKHGLLYYVCDVVVFIFIDKGRIQAINVGNTIKVNNMRSVKYELTKKGASMEMDINLQIGSKKRQKNSPICLHVPILYLEFFGVKKDIKRYLCMVKVFLLPQE

SEQ ID NO: 10093 - protein, 653 aa, Lawsonia intracellularis
MKINRIFSLCIHFPSYCLIFFSFFTIYYHIFLFCRATFIQFCYLGFPLSIFSTLIYFCYYKFNNIFIQIKQHTDTTNNFIQDENKYISIMISIACIIMFIYFFSKSYLLTWILCVIFLLVSLFYKKQQEKNIPVSTLKIKIVWKDLFAIFLLSFLYALLTICIKRTDADDALFVAIAVHLINLPHEQLFQTDPLFHDIPFKIWPYQFESFNVLSAVLSTLTNLQPAKVSHYILATISSILYPLAWSRFFLHFGITPRVIFFPFLLLSFLLAESHASFGNFTFVRFFQGKAIFVSIIVPLIYSSIWDFINDKKKKDILNVFLLSVAAFGCTSSAIFIVPQIIGFSLICAYSFISIRNMCYLISPIMCYYGFWIITFFITIISPIKNSYVIPVVTEDTVQFVFGTIQKFILLFFILTSWLYIKNQKKKYYFLLLTLLYFLIPLNPYCMQILKIGVTPYICWRELWTIPIWGIACIGLYGLTLLSATYIVSIFKQGNKNFIQCILLCFFTISMLSLSNLRSSNFERMGFDRLWYPHIYEKVLSTIDKNLTSGQTIIAPYDLSCWLTTFKKRYHVLTNRYLVALDEYIKLYDPNIAAFLNLENPTKEEQIFFINWVKDVSPNAIVIKNSQRLYNNLTLLGYERILIDPTGDLFLKIK

SEQ ID NO: 10094 - protein, 219 aa, Lawsonia intracellularis
MITCSLSWPYLQNIYPNLPQYIKNTLPIEEVTKYDTQANYFYQIRTYIDPLGKEVYKDIIRTILKNDWMSICYRYPMGILHYSLSPLYLYYNFKGTKEQGFSDIPLSWFYRIQDWTYTRMEMYAKNTTLYYWQIAWCIFILSLLILSFLLLKRKNIFLQKESAIFFAITPLSTAIIFSCNNPIFIHLRYTVTWYTSFFILLMCLVIPNIYSKNNSEIEK

SEQ ID NO: 10095 - protein, 135 aa, Lawsonia intracellularis
MVKIIRKKSFKIYIQIFFSILFILQLVISIKWISNNWGLIPSYGDSEDYILRSNPLVIHNIRPFTLPLLICFSQEIGGKTYFPPILFSIQTTLTFISIWFISGALLPNVSKKSRGIITILVGTNPLIMHFNHSIV

SEQ ID NO: 10096 - protein, 326 aa, Lawsonia intracellularis
MIITRTPLRISFAGGGSDLPAYYLKHGGAVVSTSINKYVYLSIYPYFHQNGYLLKYTRNEHVSTIKEIQHPILHQVFKDFNVKGVDFNSCADIPSGTGLGSSSAFTVGLALLCNTYTEGRYISREGLAAYACDVEINKLGDPIGKQDQYACAVGGLNFIQFHPDESVTVEKLCLCREGKERLQKNLLLFYTGTTRAAMEILAEQKDNTVNKVQISKILSQMVNLAFELRKALLNNNINMMGEILHENWELKRQLASGVTNEKIDNWYKKALDAGAIGGKLLGAGGGGFLLFYVQEENHNRVRRALSELREIEFTFEQVGTTIVYQQ

SEQ ID NO: 10097 - protein, 428 aa, Lawsonia intracellularis
MDCVIIAGGNATRLGVPTIPKSMIPINGVPLLERQIFFAKQYGIKKFFILSGRLSCHIQEYFGDGSRFDVDITHIKEPFPLGTSGSVKLAQPFLQSRFLVFYGDIVMNFNLHKLIKFDETHPSLYGTIVVHPNDHPHDSDIIKVDLNNTIIGFFPKPHPKNFFYQNIVNAGVYILDPLIFNHIPSDSYSDFGKDIFPYIVQQESGNLFSAYKTAEYIKDMGTKERLKQVSYDVICGKVTKLHQDNARPAIFLDRDGVVCTNMNNSIDKTQFMLLPGVTKSIRKINQSGKLAIIITNQPGIAKGFFSEEALEALHAYMETLLGNEGAYLDAIFYCPHYPEKGFVGERQELKTVCNCRKPQPGLFFSAMKQFNINMEQSWMIGDNIVDMIAGKAAKCNTAFIGAVSTSIPSYQYNLQADSLSEAIDIILK

SEQ ID NO: 10098 - protein, 339 aa, Lawsonia intracellularis
MEISVIIPVYKSQDIARCLDSFLSQTYKNFEIICVGDNVKDECHNVIKEYVNRYPEQIQFVLQKGRGQGGARNLGISLSKGNYIMFCDADDYVEQNILQIMLSSLIKFDADFICCGFDRISVSGHIFSKEMMKFSQTIFQVTPQNINTLAYIFPAPWGKIFKRSIIGDSRFPENPISAYEDCIFFLSLAPKIKRYVILPQILYHYVTHEHSAVTNASIKKTITFRNDLINLKKDFEQAGILPIYEPLLTLAAFIHVGIADVHRIAETTIPLKQFISEVKQFLDTSFSGWRNISYRQGKKITIRSLGVYCLKWLYIFNSFNMFISIYNGLIKRLRIDIKW

SEQ ID NO: 10099 - protein, 150 aa, Lawsonia intracellularis
MKNIDIQSDDTKKYEYIIHTKNYKKNILLTKYNQIIEYIDSNFTVTSNMSFLEIGFNDGLLFKSLQKKYPKAKFIGVEVRQSCVDNMVKQGFDCRLITNELFPIDEKFDVIYGASVLHHISKPFDFIKHLFNALNYNKITRGGGGDTYFC

SEQ ID NO: 10100 - protein, 236 aa, Lawsonia intracellularis
MKNIEIQSQEDATYECLLKNRQYKANIFADKVRQVSTYIDSGITSSENKTFLEIGFNDGLLFKSLQKKYPKAKFIGVEVRQSCVDNMVKQGFDCRLITDEFFSIDEKFDVIYGTSVLHHISRPFDFITYLYNDLLKPSNGGEGDKIITFVNEAHRYDLVSILHTTLVRTWKYEKQLFKISKNKIKNALQALTNEYVIDSNPPVCITGFKSLDNIYRKMKLHHISFLGNLSFMIKKV

SEQ ID NO: 10101 - protein, 252 aa, Lawsonia intracellularis
MNMTITDYNKNFYETKWTEGAIHYLTHSFMFRYHTDRIVSILQKYCNHIYIYEIADYGCGIGIHTVTLANFFPNAYVHGFDLAENGIEVANKVHNKKNLTFRVGDITKDNFGMFDLISAFEVLEHVDDWQSLLTSLVAKTNKYLLLSFPTGKMRSYEKLIGHVRNFKKKEVESFLETLGVKPITTLYAGFPLISPLYRDICKWFPVAYNNAQKNVMSTRMKILHQVAYFFVRYFTTKKYFGDHFYGLFQKEI

SEQ ID NO: 10102 - protein, 276 aa, Lawsonia intracellularis
LLYLFINNYLNFIKYVILDSGNRKVKEMIDNKMIYAERWKPETLQYMKKSFIHRYQSFLINYILTHYKNALNIYIYRIADCGCGLGLHTVTLAKCFPNAQVYGFDFSEQGIAIANKYNKRSNLSFHTKDVTNEDFGTFDLISAFEVLEHIEDWKLLLEKFVNNSRKYLLFSFPVGRMRKYEKMGGHLRNFKRKEVESFLETLGVKPLLVLYAGFPFFSPIYREACGWLSNTYEKAYYNIMSRKVELLHHVMYFLASCCSTKKYFGDQFIGLFEKAN

SEQ ID NO: 10103 - protein, 376 aa, Lawsonia intracellularis
MKPYSNLIFEVTPRCNAICYYCPTGRANLFHEPSNQTPLTPEFLHKTLTYMLNEGIINKNTIVDLFNKGEPFLHPNLSDIFDVMNSLGLHYTLSSNGSVRASFNDTTLLKNLDRIIFSMPGFSDECYKAAHGFSFEKTKQNIVRLLTELRRCGFVGEALLVFHIYIYNFEQLKDAEAFANEHGMILHDYLAYVVDYRVFKDFLSGKIDLNTKERISKDLFLHDEKQLNKILNSSPSNYWCEHERVLMLDENANVVVCCVVNQFVEHALLGSIFDYSLKDLIELKKKPKACIECKQYKMDYFYSVINKYRASDINRLYGEKILSYWPYSKSLSRKIERLIVRAYLFAISKWGYFGYYANNLIDLKRVYRSLVQKNRK

SEQ ID NO: 10104 - protein, 257 aa, Lawsonia intracellularis
MLKEDCPNNNQKIYNSFYSQHSWDKRDSLAARYILYLLKKLLCNFDVSQIKSIVDVGCGDGSKTYNLIKIFPNAKIKGVDFSKEGINYASRLYGRGGGEDPEQVTFEYCDINSSYYLTTPYDLLVSFYVLEHIQVWESVIDYWVQSNIKYIIIFVPIGKMYKNDLREHFRHFKKYEIKEYMLASGYKLLNAFYWGFPFYYPITKIAIELQRGTIHNTMAKKPSFFLKRVYDIMYFFYTKCCSKKIGGDFIGFFEKIS

SEQ ID NO: 10105 - protein, 487 aa, Lawsonia intracellularis
VKIFFLNPPFKGRFSRTSRSPAITKGGTLYYPFWLAYAVGVAEQNGHDVRFIDAPADNLELQDIFTLLEDFIPDIAVLDTSTASIYSDVKVGDEIKRRFPHCFVILVGTHPSALPEDTLNLSKSIDAVTIGEYDFTIRDIAHALEQKLSLHNVPGLVFRHNEEYIKTAEREKIEDLDSLPFVTSVYKKYLNYKNYFFAAAKYPMVMIITGRGCPFKCFFCLYPQVFHSRRYRPRSPENIVAEFKYIKENFPDLKEIGIEDDCFTVNTARVRKICQLLIEEKLNMTWYCNVRGDVDYETLFLMKKAGCRLVTVGFESGVQSALDQMHKNEKIKNYYQFAKDAQKAGIMVHGCIMAGTPGDSLEVQKENYRFALKINCDSMQFYPLYVYPGTEAYTWAKENGYLKTEDFSQWLTEDGSHNCVIDTDIFTGQELVDLCNQNLRKYHLRPAYILMKLKQAIHDPEEGLRSIKSGIIFIKKILSLKRKRDKC

SEQ ID NO: 10106 - protein, 117 aa, Lawsonia intracellularis
MMNINIKLYLLLNGIIAATGTLLMRYGGKNLDFTQGICYIVTSGYLWILGMILSWIAGVFFALLLTKYGITESFSLYVPLVYLMIIGGGLFFLHETLSITRGVGVLFVFIGLIFLLK

SEQ ID NO: 10107 - protein, 193 aa, Lawsonia intracellularis
MQISWNNYVQRISKLLTSVEVSISGGNSLSLEDGFIHWVQKTEELRNTNRTVFFIGNGASASMASHFSADLTKNAQINTKVFTDLSLLTAIGNDLGFEYVFSVPFARDVCSGDMLVVISCSGESPNVVNTIRLAQSMQEKQIFCVSLTGKHFSNTVRQLGDLNFYVPTNAYGECESCHAIILHHWMDSIQVKS

SEQ ID NO: 10108 - protein, 124 aa, Lawsonia intracellularis
MPLLHITIVFLLGIIFFFTLFSLIKNGMLRERYALLWFCITISIFCIPFLYNIAEWLWIHISFPSPTVTLIMFTLFLFMLICLQLSVSVSHGWRHKKLLMQEVTFLKLRIQELEDSLKRKDEHV

SEQ ID NO: 10109 - protein, 110 aa, Lawsonia intracellularis
MSFILFICMFFVFLCSIAIRKNYTSLLSYFMMILSLLGMFFVVEPEVTTVVAKAVGIGRGTDLLLYFFVIINFLLLLLIHAKFSRYDVIITELVRRQSSILINNKYSKNI

SEQ ID NO: 10110 - protein, 168 aa, Lawsonia intracellularis
MNLGQGAALQTGFNFALKEGADIVITFDADGQHRIEDALKMVEVIAADQADIVCGSRFLGTKSFNMPLSKKIWLRLATIFVRMTTGVKVTDAHNGLRALSKKALKVISIKQNRMSHASEIINNIKKHRLRYKEIPVTILYTEYAISKGQKLKNSFNIVKELFIWSLNK

SEQ ID NO: 10111 - protein, 339 aa, Lawsonia intracellularis
MKKILVTGGLGYLGSHMVIELIYNGYTVVCVDNLHNSSEDIVYFIESIVKEKIEFVKANVEDTSMMEVLFSKYTFDAVIHFAGYKSIAESLKIPLEYYQNNYNSTLTILRLCLKYNSTFIFSSSATVYGIPQYLPLTEEHPLAAINPYGKTKLHIEQIIFDVANAYPMFNAFILRYFNPVGGGGKGFILGEHSKNAPTNVMPIICQVAAGIQKEIYIFGDDYETIDGTGVRDYIHVTDLIAGHMAALKKAEENKTGCHIYNLGTGKGISVLELIHTFEKVNNISVPYCVVARRSGDVASCYADPTKAFRELNWKAQKGLEDMVYDSWLWQKNLLSKYIV

SEQ ID NO: 10112 - protein, 252 aa, Lawsonia intracellularis
MEAIDIQSLSNNIYLYEIIRETLVIIPAYKEEKHIGCIVRKLRKLGFDVLVVNDASPDATAKKAEEAKAIVLSHPFNMGVAVALQTGYKYALLNGYKYIINLDGDGQHNPDDSILLLHTLVTNNADIVIGSRFLNVGDYTMQPFRLIGKNFFSFLIKILTGQKITDPTSGYRALSHHALSLWASEKFADEYPDADMLILSYRNSCKIIEVGVAMYQNTTDQSIHSGVIRPIYYIIRMCIGVVMAFIGGTKIS

SEQ ID NO: 10113 - protein, 110 aa, Lawsonia intracellularis
MSNNAFDVLLTSEAEDDLFEIFLYIMHTDSLEQAKIARIKLEKKIVSLSSMPERGKYTPELLQLGISTIRELNVHPWRIFYRIKDDHVEVAAIFDGRRNLEDILLNRLVM

SEQ ID NO: 10114 - protein, 92 aa, Lawsonia intracellularis
MKLSQDIKPISYIKANSAKVLEQVNISGPMIITQNGEASAVLMGIKDYEQLKNNIVLLKVLLLRFKSADEGNLKPVKEVFKDLDKRIADYVE

SEQ ID NO: 10115 - protein, 349 aa, Lawsonia intracellularis
MNANIELTPEEEKELACINPQLLEELKSGSPIGKAWIASIRRGMELGEEAQKQATAIRKEVTSSAPEQNSLMTWCGYPTDLTRCSPFFPMNPKELGNREFLRDFIITSANWGEITYTGPKLSTYEEDTLMALLAILNGVSHHRKPTEVEGKKTYTYKGPALPLLKLLGYTKPSKKDYNRLIRGLKLLTVAGVELTLAGGKTKAGKRREPKKRYMTSMLSAVFWDDDKKELAVTVNPFFYEAYYAKTITMIDVLKRVGLKGSIAKALYRFVQSHKKDLVFTGHFLTLADALNMDREQPLWKTRQMLKLALAELIKHQLLTKKSRFVEQDIILIEREQTTFPEKQKYIIEE

SEQ ID NO: 10116 - protein, 466 aa, Lawsonia intracellularis
MFTYNCKIFSSPTKFFILNFFFWGVIFLFLIPPFQAPDEQVHFPRVFELSCGKILLSKGEKVGGSNLPTSIQAFTSIRGDIPFHKEHKFDYKTLYHHLTTPINERETTFITFSTQLYSPFQYLPQVLGVRVGKIFNISICILYYLGRLFSLCIIGVLLYLSIKYMPFNKWALVMLCLSPMSLFLAVSHSSDPMIFACSFLLIAIVLRSMYDTSFRLSVSITGLLLLCIATLATSKFGSYFPILLIVLLMPTIVFSDKRVGYIFKLMLFAIGIALALFWNLKTKFIFDELSDSNAIFTNNIHMLCSYEYIQLVLRTFIILAHRLYLSFFTLGWLDTPLPNIMCYCWGVLLILLTVFSSSSISAYIPLLTRILFFFISLVISIGIVTSMYLGCGTTGENVINGIQGRYFFPISMLVLLTFSNLFLITEHKVFQKIKYTIFDRWYVVQLFLIVFLMTTVYVVFQRYYVS

SEQ ID NO: 10117 - protein, 252 aa, Lawsonia intracellularis
MAKIIAISNHKGGVGKTTSTVNIGAGISNGKKGKRVLLIDLDPQANLSQSLGVQHAEMTIYGSLKGSYPLTPIEITQKLFLIPSTLDLSGAEIELSSEAGREFLLQDLIEPLHDQYDFIFIDCPPSLGLLTINALTASDEVYIPLQTQYLALHGLTKLLEVIEKIQKRLNKNLKLGGVILTQFDARKTLDRDVANTIQEHFEDKVFKTKIRNTVVLAEAPSQGLDVFRYSPKSMGAEDYLLLCKEILTKSKK

SEQ ID NO: 10118 - protein, 95 aa, Lawsonia intracellularis
VKTLSNTTSVKLEDSVKTRIKNLAAIRKRTPHSIMVEAIEEYIDKAEKREAFRQEGINVYNDYLNNGLHLPVEEAIAWLNELANGNYVEPPKCHL

SEQ ID NO: 10119 - protein, 93 aa, Lawsonia intracellularis
MAKKFFKSIGLVIRNYRKTAKLTQARLGEKLGVKGNYIGEIERGEEHPSVEMLVKFSLHMKVRPGELLDTIVEQEVESGNEDFPWITLYNEID

SEQ ID NO: 10120 - protein, 345 aa, Lawsonia intracellularis
VNLDIELTPEEEEELATINPKLLEELKTGSPIGKAWLASIQRSRELNELALEQAKEIREEVAKAAPEQNSLMTWCGYPTDITRCSPFFPMGPKEISHRPYLENFIITSANWGEITYTGPKLSTYEEDALMALLAILNSVSEYRQTTEVEGSKTYTYKGPMLPLLKLLGHERPGKANYNHLLLALQRLMSAVVKLSISVGKTKSGKRKEPKKIDMTTMLAHVHWDEEKKELSATINPFFYESYYAGTVTMIDVLKRAGLKGSIAKALYRFVQSHRKNPVFTGHFLTLADALNMDRDQPSKKTRQLLKTAILELIKHSILSPESRFIDQDIVKLERVQVMVCDKLKV

SEQ ID NO: 10121 - protein, 939 aa, Lawsonia intracellularis
MYNIINKHQIIKILLFSLCVFFFTLTEKQKIYAADVFFEGRTETLINVNKPFDSFFGGSDSTIGTLETGPTNLTFTTVGAFRNSVFRIIGGGRSSFNNPNTVKGNVTLTVYNTDVERIIGAGISNRGLVTVTGSVNMKLENVSVTRGIYGGVYTQNGHVLGSINMHLKNVQTPLLIGSGVSNGPNRITVNGDINIDVEDSRIQYVNITGEVDAGIKGNATLTVKKSTVELINSGRGNILGNLKISIADSNIRGLSPVDFGSSVYGDTSINVINSQINDITLIPRAGGMLVGPVTLDITSSTIQNIQCGPVSQNNQLNTLNVTVNTSNITNLNLGSVEGHTISTTATVTDSNITNLNVGTFNGLGVTENASVIINSGNITNLNVGTNVIAAATTINSSATIHDGLIANLTLGSQGNGRTMIATANVNGGTIGLLTMGSENFIPGTRPITELAILNMSGGLIERIIVGNANSSTINFTPGKRSIVKTINGPELPYLVNIQKGAMTQWGTKNMPFLLDTRNLILSGTLITSNIQLADLSITNLFVANGGTLVPRKLIPGNQPVIQFLGGPQSLLVIHQPLKVNLSLSPKLIGSSMVPLAFVSQSFSSPDLFVKQTRSGLIWSDLEFDPTTSIWYVNNIQASQDFYSFSIARETTNWLRQQHIWTLQNRSSKLLDNEHYGLWINVQGGHESLDTSIGSKAKMPWIMATAGYDYLQQLPRLDMKALYGLAFGASKGKSKWSSVNSTKNDAELGMVSGYVGLIHNKTGLYSTLTLQLASSKLHTNSTGFYRNFKWTETTPTEALELGWKYTFNNGIKMNPRGQLIFEQTSKHHFDLGIQNDKAILDKSQLITSSLGITVEYKLPVTTPINLYAGIERIKGQSGNFAISSQSLQMKFKHDNDTSVVRATIGTNILLGEHFNIHCDIFGDKGNDKGIGGQAGFTYKF

SEQ ID NO: 10122 - protein, 334 aa, Lawsonia intracellularis
LGTVTIQTVWGECTFEHPILKKIIEHNTLQRLKYVDQSGPITYFGYMPYFNRYEHSIGVLALLQKANAPLNEQVAGLLHDVSHTVFSHIADHLLYKSNLEKSYQDTIHLKFLKTMHVQKVTEPYGIFLKDLDPDNPSYSALEQPLPNLCADRIQYLLHTGVIVEKISCNQAKMVIDNLKFQDGIWFFLNKKPAKIIGMLSLEFTQELYGAPWNFAFYEYFTEILKEALKIKLITLSEIKYGTDKNVLHLLESSNNKFINKGMKHLKDVHNIFKEYPFGQGELNIKPKFRGVDPLIKVGENFVRLSAIDPNFKEKFEEVKKWCNTGYGIRFVITK

SEQ ID NO: 10123 - protein, 723 aa, Lawsonia intracellularis
MIVNKLSIFIYNYTTKVRHYINCIYHTCVSYSQIFRSWLWYRRQLRIGLLFFLYLVSVYGLSFSKSPEENEEEAKGRQRVQAMELSFHNAAISQEVNETVSSMEAELEEESAYATELEILVDETVKTFFETTDIVTDDVVSVMLQGIDETASDLENSEVRARKNLEKLKQLTEHKKFLIGQNKLRLSNHCCRLQEVILENSDITHLEDAVKRNRQRLAHQEVMLKQLEEICSRTQEKQLFQEERNNSIMAEVASLEDLFYTQCSGEEDHDENTASTEGNYTQEGSFDDMPPLEGEEDEDITDQPQPLSLQENQGNQSSTIQEDQEGNSSQGGSVSGPHFMSSSGSNNSQGGASGGTSTLIPGYNVHSQMSSLQGLQCVLLSAVEQVAENLKVLILKAINVSKENKFNVASFNYRTSKKNTSSQKHFSANVPANKQGVDSRIVSSLDKFHVFAVMDSYLMNLESKVRSGQLGIITNIFSDLSIGLAYAHNNSSSKEHIGAMFGSVIGSAKAKMNTNALSAIFIWNTNKTGFSGCISSYYGWGQMKNARQYLHTEEIISSKGSPDIMLGGGLIQLGYNCFISKSVMITPYIEYLFITTGWKEYNEITGTLPSHISSTKEQLISKNIGIRSRINLMGNSQLQTWVTGAFGQRKLGTITAQPLKSTNSIYKAMVQKAKNKYVQGEGGLSYEIIVTNNCKIGLSGDVQFEKNRPLKNGNVRCFFHLTY

SEQ ID NO: 10124 - protein, 626 aa, Lawsonia intracellularis
MCGVCGIICLDGDKPSKEVLSHMLDAIRHRGPDKANVVVDGCIALGHCRLAILDLTDAAAQPMSTSDKLFTIVYNGEIYNFEEIRRELIKLGHTFISRSDTEVILHAYIQWGAQCVTKFNGMFVFVIYDVIRKQIFIARDRYGIKPLYYTIIQNNFLFSSEAKAFLRYPQFCTKLDYEALLEYFTFQNILTDKTLLHNVYIFPPGHYAILPLNTGQLTFSQYWDYCFDESKNIHSDKEYEEELTYLIQQAVQRQLQSDVELGTYLSGGMDSGSITALASKRFPYIKSFTCGFDLHSISGLELAFDERNAAEAMSYLFKTEHYEMVLKSGDMERVFPRLAWHIEEPRTGQSYPNFCIAHLVSKFVKVVLAGTGSDELFGGYPWRYYRALGEKGENSFEKYIDRYYLFWQRLIPNRYLLSMFKPIETHVRHVRTRDIFRNIFGDNNSPVTSHEESINRSLYFEAKTFLHGLLVVEDKLSMAHSLETRLPFLDNDLVDFAMRLPVRCKIHRLNETLRINENESAKASRYYKKTNDGKWLLRRAMERYVPTHIIEAVKQGFSAPDASWFRGESIDFVHRYLFSQNVRLYEYFDRKVVHELVTEHLEGNANRRLFIWSLLSFEEWLHQYLP

SEQ ID NO: 10125 - protein, 263 aa, Lawsonia intracellularis
MLTDCFGNPIQTQNAIAITFDTDWAPDWCIALCFELCLQFDITATFFVTNTSPILKKIASNDRFELGIHPNFLVNHNIKKDNTLFYQNILKSYLQIVPEAKSIRSHSLYRDSRLFVYIEEQVPSICNEVSTFLPGHIGLQPVPIRFSPHGRSLLHFSCIWEDDIAILEPQRWLTPLFNSALPGVYIFNFHPIHIALNSCSPEQYSNLRKFYNIPDVTPEDCNKFANKTLFGVKDYFERLIESVINSFPPFPSFRTINSISQNY

SEQ ID NO: 10126 - protein, 338 aa, Lawsonia intracellularis
MSLISLPEWFKKNTGCFLKNDILLSADRQKKYIMDDGVWKSTTNSNSNKQLQTSNIFSYKWNQEKTYTSPALLKKTQEWLKSRYDYIYIYLKAIQDHPIFLDAGCGAAFSTLELLGDCFHQLNYIGVDISDAITIARRRIQDAGYDGIFLQENLMDLPFKPESIDIIFSEGVLHHTDSTKEAITKLTPLLRNGGLFLFYVYAKKSPIREFSDDYLREQLHKLSPKQAWDALKPLTELGIQLGESNMELNLPNGIELLDVPAGKIKLQEFFYWYILKAFYAKELDFDAMQHINFDWYAPQNAHRQTPEQISQWCDELNLNILSMKTELSGITVVAKRQC

SEQ ID NO: 10127 - protein, 374 aa, Lawsonia intracellularis
MFRIPLMKPYIPNSSKKNVLDVLNSGVLTEGIYTQRLEKAFTQYIGTSYAIGVTSCTTGLELVLRALHIGPGDEVIVPDYTYPATAFAPMLLGATAVIVDISPNTMLIDYNAIKQAITAKTKAIIPVSLFGNPLNWDELLCIKKEYPNINIIEDAACSLGSQFRNIKTGAWGDAAVFSMHPRKNITTGEGGMITTNNKELAESIQSIKHFGMDISKKLKGETIFIQLGTNYKLSNIQSAIGEGQIQLIDSILKQRATQVQLYKELLKSLPIEIPETTSHSTHAWQSFCIITPQRDQLLDHMRKAGIEIQIGTYALHLQPVFQQHPLCKIKGEMNGSQKAFTHCCTLPLFHTMTVAEQKEVISILAENLSSSNLM

SEQ ID NO: 10128 - protein, 299 aa, Lawsonia intracellularis
LNLSSFPSRITLELTNYCNLSCKFCPRHHMEQEFGIMDVALAHELIKEMASYKPVTVVPFFRGESLMHPQWDIILQYLMEYNVGPIQLTTNATLLTHENTEKLLNVGLDFLSFSIDTIDPKCYQEIRGMDYNIILNNILYFLQRQEERQVPIVVQVSAVKTEKNASDIQNFIDFWLPKVDRVRIYEEHSKDGKIGSLKQPTKIARKACHKVFEDMVIYWNGDVALCNHDWTRRVTGQHIANVRNKGIAVCWNSPTYNSIRQAHENINLSGVMPCESCDHWVVSYLPENHIGQIFYKQPK

SEQ ID NO: 10129 - protein, 216 aa, Lawsonia intracellularis
MDKTIIILGARGNSIDILDTIKDINIRNSNLSCVGFLDDSSMLQSTKVHNLPILGKLKDAIKFQHTFFVNSIGSPKNYTQKQNIIRSSGLKDHQFLSIISPYAYVARSAIIGHGSTALVGSVIAAETTIGNHVLILQNTIINHNTIIEDFVSLAAGVSIAGDCYIKQGAYIGTNACIRGGITIGEYALIGMGAVVTKDVKPGATVVGNPAKILHKI

SEQ ID NO: 10130 - protein, 409 aa, Lawsonia intracellularis
MFPSRKIFIGLEDIASIIENYTLGFNSLGFDVFSVVNSQASICASPCDIVLKDHLPPLRRRMTMRQKQEYIQKRINLIRKVFEKAIKECDIFLFIWSSFSPDYSDLPILKALGKKIIFVFVGSDCRWRTAYNQDMLQHGLDILPPGFNDGEQQLKEITLRLIMAEKYADALFNTPSQAGLALRPYYNYLQYPLNAKKYESNNPQNKIPVILHAPSDRFKKGSDMIEAIFLQLQKDGLQFTPRVVQGVPHNKAIEIYKEVDILAGQLGTVTGGKQERELMACRKVVVSGLKPEDYPQLLSPDCPNVRSHSLRDMYMALKMLIPNVSLREKIASCGPSYVRTYHDPSTACAKYLDAINGTTSPDFIPRFLRDTFVPEKKYLPVYNTRIKLVQDCPWYKEYIEPGTRLGLVF

SEQ ID NO: 10131 - protein, 276 aa, Lawsonia intracellularis
VLGFSPHTLPGHEDNAIWNNTKLGQLAQRKYSTTAWETDFLEQLLPSLITSHNLCIDIPFIDVGCGDGRITYLLHRVGFNKLVGIDLDEINVRNAASQTPSSSLNNIVFMTGDALSLPFKHNTLQQIFISGLPSLSNVFLNIYPFLTDSSMGGGGILLCLTATALEAALIYALTRGDWKEFIHIIETQTRAASWENKNIRYPITIVENVINEAKQAGFSLEAKYGIPIFASLVFGALCQQQTLNEDDKELLYNILYTIPSINLHFMRQSLLIFRKQ

SEQ ID NO: 10132 - protein, 295 aa, Lawsonia intracellularis
MYSTLTWLKENTDTTFSYYTKSKEGAWISPYTLPGHEDNAIWNNTTLGKSVLNKYSTTSWETDFLEQLLPSLITSHKLCSDTPLIDLGCGNGRVTYLLHRVGFNKLVGIDLDEMNVNYAASQIPASSLDDIIFMMGNTLHLPFKQQSLSQIFISALPFLTTVFSSIKPLIKQNGKLLYLTSTSLEAALTYALVRNDWEEFVRIMETQTRAAAWENKSIRYTTPIAEAIIMYAEEAGFSLEAQYGIPIFASLIFGALCQQQTLNEDKKEFLYNKLHELASISNRFVRQHLLIFQKE

SEQ ID NO: 10133 - protein, 350 aa, Lawsonia intracellularis
VITHSKTSLSTDDITNVLATLLSGDISDNKERKNFEKAMAKYVGNAYSVATSSGTLALQLALRLMKIGGGDEILVPTFVCDDILSAVHQVGAKAIPVDIDTTTFNINPEDAVSRITKKTKAIILVHMFGLPNEMEKFQNFPVPIIEDCAHSLGATWNKKFVGTFGHISTFSFHGLKLLTCGEGGMLMTNSQKIIQHHKEILEPNFMTGGYKLDYHLSDILAKLGLSQLQSFPSVLKLRQEMAIRYTKTLTNLSQTFLPIIKTKNQISSCFRYVLRHKTLQFSTLEKMFINRGIIIRRPVKNLLHRLLGLKDNNYPIASEYFEHIFSIPFYPSLTKLEEKTVLHETKTILG

SEQ ID NO: 10134 - protein, 355 aa, Lawsonia intracellularis
MANILLTSVGNDGAQAIIKALRIPEGNNDIDTLIGIDSNPHAYGLYMTDYSYIVSQRSNATSLLEELHHIINIHHINLVLPLSTEDQSFYAHYASKIEQWGCKVQHSPEKSITIANNKHLLLPFLQEHGLEVPYFRIAHNCTELENLLYEFDAKHNPIVIKRAFSTGACGVKIVIPSTDTLERMFDRTNIYISIDELLFWMDKINDTMPILQISEFLPDTKYSVDVFLHNGKAIEACVRTEEKRIYGTSLYGVTIEDEELYEIGLQAASSLLLEGTVNIELGKDRNKRAKIIEINPRFPASIDHTVTAGCNMPLWVVQAALGKPFKVNKPYYNVPYFRHWTFLSNKNIPLKIGRK

SEQ ID NO: 10135 - protein, 423 aa, Lawsonia intracellularis
LQKNATFSHKSGVYIFPFTKKNNFLNPSEQHNIFLLCYLLKESIYDELIIDSKIYTEHIEIALFLIECCNLYNKKCRIVDKELPNIVSDTNDTKQVQKMLMLPSEIAILPLTGTCNVKCRFCEQAYTKIPYRKMDFDIFCQTINAIPDKMFIKVGLTPFQEPLSTKVFNRYLEYALKIRPEANISFNTNGTFLTKEVSQWLVDIGLKTIVISLNMPDPVSYQNFIGKNLFNKVVSNIETLCCIKKQQNSRYPKVIVQYLKLPPVLGQESVLQQRWGNIADTVWFRNVAAPTSDPQKLAAFKKINPQLPETSLLGEEALPCMSTMVTCAIDMFGYYLPCCTTLIERCNSGKRKFKFLEFGHVTNMDVQTAWSSKKLQQIRAWQLAGLIGSCNRCTSNQSNLVQLYSLKNGIIQNCYLRNIKKYK

SEQ ID NO: 10136 - protein, 212 aa, Lawsonia intracellularis
MRNFELLSKMKPSNMYVQLGLIACKEVLDDIYPLIDVASYYGFNAVRIGFYIPPVHKFDYTLPDDSWCDITKVIDLKKLLSYAKTKNIELQYISKNNSNASICFHPYIYIWLHLDSKGKRCITYCCYGEPNISIAEEELWDLDKIWHNERVTLIRNTINNRFELYKNKMCLGCRLVTRTLPQQERNDALQSLGLDTSTTYLYGVGFPPLHLE

SEQ ID NO: 10137 - protein, 388 aa, Lawsonia intracellularis
MFRKMPFIMAIMIIFIVLLSPIIPLYIKQLLYSISLSIKSIILFILPFIIFSLLFKASVILSRNATKVIGIIVVFVCCSNFLSTFISHYIGIWIYSSDLAKLQFHNIDNLTTLWLLHLPNIISNSDAMITGVILGIFASTFFPKKAEQLAVTIEIYIESFLNNFIFFVPLFVVGFVIKMQHDGILELLTKEYALIFSLIAISQFTYIIICYLLLNKFSFIRVFNNIKRVFPAVISGFSTMSSAASMPLLIMGLESNTKNKDVVRAVVPATINIHLIGDCFAIPILAYAILKGFGIEEPSLVTYIVFIFYFILAKFSVVAVPGGGIIVMLPLLESYLGFNSEMLSLITALYILFDPVITAANVLGNGAFAKLIDKMLSYMQKTKYQLSI

SEQ ID NO: 10138 - protein, 110 aa, Lawsonia intracellularis
MDEKTGTMWSKVKYGLGKVFIGLSVYLVVSVVTALFTNLILLNRMDERVQAIEYSYKQQDKNFASDLRSYESWLKAITQKVDVLQPRVIQVEARVEYTQHCLEELKKRLN

SEQ ID NO: 10139 - protein, 934 aa, Lawsonia intracellularis
MIHLFKDINKHFFTISLIYTYIYISIIIHNIKSIVNIAILSMFSILICYTNAFCINNTKESGGLIKHNVRAQIAEERKKAKAEGRLEEFEKNLKAKRAEEQKQRVAAWKAKKREEKKLSQTEEERKKSEAHRKGQLKRIERRQEVNKRIEIAIREGNEDEVRRTISQEEIQIKKERDLKYKEEKKAKILIKNPPLTEFEKLRRVAISETQTERHANDKILAKKEEELIKIESADIVKEKIKREKLQRIKQNRARWSSKNRETKRAELSEEERKKSEARSQGQKERQQQHKEIKKKLQKALKEGKLEEVKKEIELSKLERKKFLKNRQLIRNATKHAEKQMAMWLSLPEDEKNRRMKISQRCSEYHSSMKKIRKKSKSAEESGCMEQFLEAFSEELQLKEETVKRKKKIQKEQKKKKKKEKQSKKQNIDTGQEPEPPLMEDEYCFLLGDLQPSFLPSEEILLEPDQTFLLDLETIDPSSLDLQIFQEESTSTYREIAFSNSNSEGDNSNNIPSLKDNALQQSEEIQCTETAISECNNTIKELDLIEGDSISSQQPKGKQSSLTASIVINQTHSNELQILSYIDGYNKKSQLSSLKSLQNLFYSPKEQMLARLKTFVLQSSFMPSDVNYYEYDSEDSTNTMLQYPTMLSNIVKNSCSNLKQYNFFGYSKNNSKNLELKPYSYQIGIITNIKSGLSLSLAYNRDKDKISSFSHMIMESFCSPAQSTISSDCLSSLFIWDPSYSGFKGYIVSAYGWGQMKNIRYAIHNKKEICTKGETTVTIYGSLYRLGYTFPLGKSIMFTPYIENSFVQIAWESYNEHFGVLPCKISSYKEKMYERNIGVHISWTDNDCSLLQAWTVINNKRHISSKIEAIPLSSPKSFFYLSQIPKNKKEYTQKEIGISYKRKIIEEMAITFDSKFFYAKHNNGKEVECSIHYIF

SEQ ID NO: 10140 - protein, 383 aa, Lawsonia intracellularis
MPKITRHKTRYPGVYYIFQRRLDKHGVEKTFYILYRRCGEKKLIEEPVGRESSGMTAATANNIRGLRAIGKELSNVEKRKKEKEKQQNQKVTLQTIWDKYQLIYSEKKSLKQDISRVKYLSDLMHKSPDILTTNDIDTLRKKLTLTKSSKGGASLSPASIKHILVLLKRLINFGIQRNLCIKPQNLYIDMPKVDNQKTEILSKNQLKNLLLALDAEPNQSDVAFIRLALVTGMRKSALLALKWSDCDFENNIITLSGNYAKKGKTDYIPMNNSAKSILLSIPKGNSDFIFATRNGTKRTTYNQRLIKRIKEKAKLPKDFRPLHGLRHNFASRLASSGKVDLYTIQRLLTHETPAMTQRYAHLHNDALKKAAAIIDDEFTETLS

SEQ ID NO: 10141 - protein, 251 aa, Lawsonia intracellularis
VKEIIAIINQKGGVGKSTTALALGAGLINRGYSVLFIDLDAQGNLTHTLGIQSTNLTSVDLLAKRMSIKEVLQDTKKGTVIPASPTLAGADTVITDVGKEYRLKEALSDVLNDYDYAVIDTPPALGVLTINALTACSSIVIPAQADIYSLQGIHQLHQTISTVKQYCNSGLKVKGILLTRYNTRSILSRDLTEIIEQTAQKLDTKLFTSTIREAIAIKESQVHQQDIYTYAPKSNVALDYENFVEEFLRRN

SEQ ID NO: 10142 - protein, 361 aa, Lawsonia intracellularis
MKNYFSSDTQGKLIGQISSDVPLLHTLQEVEQTWSPLSIKRILVHFRSSRQYERVIDYINIQEDLLPNERVILFFLHAVYDDSFATMELYARYITDLINYVQKDFHHITSQDVDAFIRYRQLNGSKPATINTIIGALKSFFRHLVDAGILTLNPTAFLKKRRNDTKQNLPGHLSHSLSESELQRLFDGMIEQGASLRDQALMQVLFLTGIRAEEAVRLKWSHIVTWQSRWYLDVFGKGSKRRRVYLPIQALTVIQEYGKLLGIELGLASNSKPLFAHLRRPNEHISRHGLYVLVKKWCKRLLGRTDVSPHWFRHSCFTQLAHKGASLESIKALAGHESVETTMQYNEAAQLMQPAGILFEK

SEQ ID NO: 10143 - protein, 307 aa, Lawsonia intracellularis
MKILTHAQLEDEGFFFDSGFRGWISSHHTLLNTKGEPDHTDKHTLENLEILCSYMNQEVPNILTEIQGVRSIFPEVKKSCLEAKQHNFGVSVRYGDPQFMSAGGTLSSRVHFIYEVQQQVAKGIYDYINEIYLFGIGGRKIYGLLNYPTLFQPIAPLPTGENSSPLWSKKDVEQWYKDIDELYKTLQRQTFNHVTLETPTVLCISAQLDTYLGQKHTKKLLQQMVNETYPRLQFVTIDGLSISGIGESMLLIAKELHGKKTGEFVYSERLRTYPVIPGKEELTQKWSASTYGCVIHIPEAIAYMRGL

SEQ ID NO: 10144 - protein, 372 aa, Lawsonia intracellularis
MSPRKLHVLHITSRADFGGGPEHVYQILRHSPGQWNNFVACPLDRPYAERYKNLLGINGICFIPHRKFSVKTLWDLRQFIKKNAIDLIHSHGKGAGVYSRLLHVLTNIPCVHTYHGSNINSYSAVKSKLYRLYEQLMGNVTQRAIVVSPSEQEYVLQEKLIPTERLTYIPNGVVFPEKIDTEEKHERFQIISITRFDKYKNTEFVIPILHRLKEEQQIHQVQLVLIGDGPERKVLEERLKSEDLSQYVIFTGNVLSSAPYLQKANVYLSTSCWEGMPLGVLEAMSYGLPVVASDVKGNCDAVEHEETGFLYPYNNAYEASKALICLMNSPKMVKQFSQAARERVRKFYSIQQMIASLMLLYDDIAKQQYLSL

SEQ ID NO: 10145 - protein, 180 aa, Lawsonia intracellularis
MEVEKTSLEGVLLIKPKVWEDSRGYFLETWNKQRYIEIGLQLPFVQDNHSSSTLHTLRGLHFQQQYPQGKLVSVSLGEVFDVAVDLRINSPTFGSWFGVILSEKNHYQMWIPPGLAHGFCVLSERAHFHYKCTEYYYPQDESCICWNDPDIGIDWPVQHPNLSHKDKIAQSWADYVASIT

SEQ ID NO: 10146 - protein, 267 aa, Lawsonia intracellularis
MVNIFYYLWHQRRNVLRLVIGDFTQNYLSSYLGFIWAFLGPLVTLSVLAIVFQVGFRVPPIDVSGVPFVVWLACGMVPWLYIADGLTVGASSVTSYSFLVRKVGRFRLAILPIIRLAASGIIHCVLVLFLLILLFYYNISPSLYWLQFPVYLFFLYLLLLGVALFTSAISVFIPDILNLLSIIINLGFWGTPILWHASMLPSSWHWIFLVNPAYYIVQGYRDTFLEQQWIWERPLEEHIFFGLWLAILFLIGIYTFKRLRPHFADVL

SEQ ID NO: 10147 - protein, 295 aa, Lawsonia intracellularis
MTQYVSIITTSYNYAAYLADTIESVIAQTYPYWELIIVDDGSTDTSLEIIKQYTEKDSRIHLIQHPDGKNYGLPTTVYLGILHAQYDYIAFLESDDMWTPDSLQERLVVMNKTQADVVFNQCKPIGDVTSVSRDVHGYLSLIHETMSQLTPPFSLFTCYLTTTNLIPTFSCVLLKKAPLLQCTFTPPRPSWLDYWLWSQLSIGSTFAYSPKPLTLWRIHPSSYNTQNDQLFKKCWMPFYLSVCWNMTKQAFKQYPYQIHRYIIPFLYMVKTWSVHSPFISWLKPILQRFRKRYSM

SEQ ID NO: 10148 - protein, 789 aa, Lawsonia intracellularis
MKYIRLIKKFFIIYKKYGFQAAAIKTRQYFRKFLPSYAVSYFLPTIPYEPPYPIDPKVTTDIKLIAYYLPQFHQFPENDEWWGKGFTEWTNVCRSKPMFEGHIQPNYPHPDIGFYDLSNIEVLRKQVAMAKQHGIYGFCFHHYWFAGKRLMEKPVDMLLKHSELDIPFCLNWANENWTRRWDGEDQKVLIAQTHSPEDDIAFMKDLLRYFKDPRYIRINNRPVLQLYHASLLPDLKATVKRWEAVCKEHGEEKPYLMLVQSFRNIDPQDYDFDAAVQFPPHLPSWNFPIDIGLKGLHKRFKGRIRHYSMFAEAVVKDYTTKYTLYPCVFPGWDNTPRRLYFSSIFACSTPQAYRQWLTDACTFASTTHEKDNRFVFINAWNEWAEGAHLEPNKAYGYAYLNATSRVVENFAVPPSTAENNPHKVLVVGHDAFLAGAQRLLLETLQWIKRNTNIDCRLLLLGDGVLLDEYMQSVPVMLCSADTLQLSKLEDFCGGIPDCILGNTAVSAQVYNMLSSWNVPIVSFVHELEAALQRFAGEQNIASMLKYSSYFITASEPVRQNLISTHGVNPQDCITIPAFLEPRLYPLSQKKKKQLRESLNLPQNGCLFMGCGTRDWRKGFDLFIEVAITTLKNTSHELPIFCWVGKQEVPLLHSSPLYKQLKKDIHNNLIFIDEVENPGPYFQASDVFLLPSREDPFPLVALMAALCQNPIICFADAGGIPSFVSNNSGIVVPYGDSSAMSKACIQLIKNKQLCEQLGIPGRKKVLLHYTTEVAVPRIITVLQQAIKICR

SEQ ID NO: 10149 - protein, 243 aa, Lawsonia intracellularis
MSSNTSKKWPKVIPPLTPEQEAISLDFYHYWLELLASKYNMLEKFNHGYVVKAATPGFCHTLEIGAGIGEHLYYENLSEEQTKNYVAVDVRESFIEKIRNIHPQIKVLCGDCQDRLPFEDGHFDRIIAIHVLEHLPNLPAAIREIHRLCNKQSGSFSIVIPCEGSLAYSFARMISTKRIFKKRYNQSYDWFIKREHINTPSEIFEEIAPYFKKESTNYFPLFVPLAFCNLIIGATFSPIIHNN

SEQ ID NO: 10150 - protein, 1089 aa, Lawsonia intracellularis
MTAYYKKIVKLFPLPNNRNDLFCLYLTAVTLSLYIILRVFKVQSFELSSFVGRIYGLAISEGIDTCKRQSLYFILLLIFTLSFSGIVSVLSNIFSTFSKRFTHDVITFEKAALIGIASMMCVTEILFLMYPSYRLQFYTFVELTLSICGILLIRWFFVLTHQKKLSTLLTLKPSAFGFYFLSLSVYLTIQFLLLSHHKINTPVYIHWPLHTTPFFILGWLISILDKKHLFLKCGAPLLILPIAIIITGEAQYLMLLNDWQVCSKILFLYLLVPLLLLCYCIYQHTTIHKKLIRQNTLMKYWYFPICLTTLTAMLFWHFQWTSRDLLHPANSITPAHGLIAFGQIPFIDIWPTRGLWDYFFPTLFMLFGGQEQATSSFIWNVMPNKVIANLIIYAVFTRFVRPGYALLLVLLLYPFSLFTTYDSLYYAMGLLPALFLPWVIKNFTFKRIVTLWAITAFTFFWMPSIGKATILGTWIVLIIASLRRPQHIIRIVLPSFLLIFGTLSIIYAVLVSLHGGNVFDNIEWIRGFALCEFMNQGRIAFVDSITPLTIWYYVARPLLLIGICILFSWRILSHQHIKPKQWIILGISVSMLFLLTRSLGRHTLAAGYMPLYSFLILGLVPFLAPWKIRFYLPAWILFLGIILNIFQGERTTAIPNHLGLPTMNWKKPVPERLTYTDTFKPLINILYSELSGNETFLDFLNGHGLYAASGKRNPLYLSILSLYNSDKGQKSLVKQLDQLFKKGELPLVIMEGPASDSRIDYLPLNSQLYRVTEFTYQNYEPSVNIGGFELWAAKDSCLSTMLPVCDTVDYLHIPIVNVHDYITQNASITVRDNVLKIVGGPYDPFVYNLMSAAKIQPISVCLNKWCLFSIDITNSHMGTFQLFFNFDDKGYNENNSVTFRIPAFEKPMTFQAMLPIPHDAQTLTDLRLDCPDNTHMEVHSMKIAMLDRPNIPLTVSQIFETRQIPYLWAQYNKKHAITNQRLITLARNITLQKNITYDVPLPKYTSDSIAQYLDFSITSPVGGTITLYIKDTNDNVGQFSFNLKVSNKPVEYLVRISTLYAWIHKKTLSISVNTEVPITIHHVDVLMAD

SEQ ID NO: 10151 - protein, 234 aa, Lawsonia intracellularis
MLPVVILAGGLATRMHPHTKTLPKALLSIHGQPFIEHQLCLLAEKGIQDIVLCLGHLGEQVIEYVEKKNKYGLNIQWSMDGPHLLGTGGAIYNALPLLSEQFMVLYGDSYLDIDYKVIADAYQKSSQPALLTIYKNNNQFDTSNIQYENGCIIDYNKTHKTDKMQYIDYGLSCLHKKIFTDWKNTTFDLSDVYTFLVKNRAIVGYEVTQRFYEIGSPHGLAALETYLSQKTCFI

SEQ ID NO: 10152 - protein, 326 aa, Lawsonia intracellularis
MIIARSPLRISLGGGGTDLPSYYREHEGFLIAGAINKYVYVTIMYPFIEGISLKYSDIEHCSKAEEINHRIIREVLLMQELKTPQIEITTLADIPAGTGLGSSGSFTTALLKAIYMHRRKLLLPHDLAELACHIEIDRLGEPIGKQDQYIAAFGGLTCFTFHKDDTVSAYPLQIPIEAQFELEERLLLFFTGFSRSASNILADQHVRSQKGDKEMIDNLHYVKDLGYRSKACLEAGDINGFGTIMNEHWQHKKQRSGGMSNSQIDEWYLLGMNNGAIGGKLVGAGGGGFLLFVAEDKVRLCKAMSQAGLSRVRFQFDYEGTKVVLS

SEQ ID NO: 10153 - protein, 329 aa, Lawsonia intracellularis
MKIGIIGCGLIGHKRAQSIGDTHQLIACSDLYFERAEKLASMYPHCHAYVSWQEVIANPSIDIIIISTLHDSLSNLTVEALQAGKHVLVEKPAGRNLQELLSIQQAAKASGKLVRVGFNHRYHKAVLKAHELVQAGYTGELMFIRARYGHGGRIGYEKEWRADPHRSGGGELLDQGPHLIDLARWFLGDFTSISGSVQTCYWDMPVDDNAFMLLQTNTKKTAFLHVSCSEWKNLFSFEIYGRQAKIDISGLGGSYGVEKVTLYQMLPEMGPPETTTWEYPMLDKSWATELQEFYEDIQHNRTPAAGIPEAIAVHEVVEKLYKQSGYTFL

SEQ ID NO: 10154 - protein, 293 aa, Lawsonia intracellularis
MEGKLTEQSAIITGGNQGLGLAIAKAFVQEGANICICARNKQQLVVAVDELKTLRISDKQQIISLAIDVSIPAEVESLIQQAIKKFKQVHILVNNAGIYGPMGPIDTVDWEQWKKTIEINLYGSVLPCRMLLPHFRQHKYGKIIQISGGGATNPMPRIEAYAASKSAVVRTMESIAQECIADNITVNCVAPGLLNTRLLDEVLANGPERAGEQFYQQMLKAKETNKTTSFDFATELCIFLASKASNGITGRLISAVWDNYYAWPDHIEELQQSDLYTLRRITGRERSITWGDK

SEQ ID NO: 10155 - protein, 434 aa, Lawsonia intracellularis
MNIAIIGLWHLGCVYASGCAAVGHTVTAWDPDEKTLEQLSQGIPPILEEGLEEQIKQGISTGKLCFKSTYEEAVQNADVVWITFDTPVDADDNADCTFVTTHITKLLPVCKQDAVVLISSQLPVGSIKQLEQTANDLQRQDLHFACSPENLRLGQAVKLFANPDRVICGVRSPKVQTILSTLWEPITSRIEWMGVESAEMTKHAINTFLATSIAFANELAVLCEHTGADAKEVERGLKTDIRIGEKAYLGPGMAFSGGTLARDLQFLSSIYKNKKQEEVSSVLTGVQKSNNHHKLWVIHKLNELLGRVKDKHIALWGLTYKPGTDTLRRSIALEYATHLIQAGAKVSAHDPAVSVLPDIYIYNRHISLKPSPQEVIENTDALVVCTCWDFYKEQVTPGFFSSMKTPLVIDPTRFLHPILKKDTSIRYVAIGLSS

SEQ ID NO: 10156 - protein, 327 aa, Lawsonia intracellularis
MQQISLSKRQYSFLAKVTVWLISILCFIYAIYNVNIGQMWTAIKQYSMTSIVLLFLFSIIICIVNGLRKYFLFNKQLSLSQSIQSAFFGLGGNNIFPAKAGEFIHAFYIARVTGKPSTEVFPVIFMERFADINLLAILSLFMLSIFEPSKWTILLTCSAIAFIWLGILLLSYKSSWIFFMLRYIPWEYPRNIANHLCSALHSNLLLHWMIRLFITTILVWVISIGYYYFAFTIVAKLDLTIINTMCASFILCFGAIIPSSPGSLGVFEASAVFALGLFGVPHSEALAIGLVCHFFMFFVPVAGMVIIMSINKQVKQIVLTAEQELKT

SEQ ID NO: 10157 - protein, 239 aa, Lawsonia intracellularis
MPQAMDLQVKLFMDGANIDKMRDALENNPLIKGFTTNPTLMRKAGVTDYVSFAKKALTVVQGLPISFEVFSDDLESMEREARIIAGWGKNANVKIPITNTKGESCCPLIQKLSSEGIIVNITAVMNLKQVQAVADVLTPDVPAIVSVFAGRIADTGRNPIPYMEASLKILKDLPEAKLLWASPREVLNIYQAAEIGCHIITATPELIDKLSLANKDLEQYSLETVEMFYKDAHAANFSI

SEQ ID NO: 10158 - protein, 201 aa, Lawsonia intracellularis
VGIRQVKPAVFFDRDGVLTANVYYPQWDEWEAPMHVEDITILPGVIEALSLLKEANIPFFLISNQGAYAKGKTSLENLLAVKNTFNNYLLEHGITFMESFYSYTHPKGITPGFSGPSLERKPGTYFLHLAAATYSIDLSQSWIIGDRDTDILCGQHAGLKTILIADSSLDKKDKSLNPNHVVSVVKDAVTYILNQMEFSVL

SEQ ID NO: 10159 - protein, 199 aa, Lawsonia intracellularis
MKTYSSTYLQQTIDIASQLDPAHIEDIATKLRQIRDGGGRLFFIGVGGGAGHASHAVNDFRKICGFEAYAPTDNISELTARINDDGWSSSFASWLRGSRLRSGDALFVFSVGGGNKEKNISANIVAALELAKEVGASIFGIVGRDGGYTAMVADACVIIPIVGENEVTQHTEAFQAVVWHLLVGHPLLKAQEMKWESVK

SEQ ID NO: 10160 - protein, 1094 aa, Lawsonia intracellularis
MPSSYLSGLSKFFPFPEKRNDSFCVFITAIAIALLSTFLFYTSQSFELMAFPDRIHGGGIFNGHNAFKRPTLYFTLLGIFFIIFSCIVSLLSIIIQQFTDLYKRDVILFEKHTLISVSSILIISIPMVLINEPLYEIQYDLFKALTLGVFLIVTLRWLLCINERYTISEKLRLTPAAFGFFFLFSGIYLSSKALRYPLDGLLNTRMGYLHNILYFFLLGWIVSILDKKHRFLKSCTPLLLLPLTFIIASETQYILLTHGYEVSLQSILFYFTIVLCAITVFLFLTTKKHISISYNKVMKYWYFPLCIITLTVFMLWQPSLNIDDDLLHPANSFEPAQQLIQFGKIPFVDTWITRGLRDSLPCTLFMLLAGEQHTVDSFIWFQVFSYLTYLIILYCTFTKIVRPAYAFFLTFFFAQVLVEYSGWYNSLMLLPLIFLPWAMRNITFIRSACIWLLAATVFIWMPSAGKSTILGLWLVFFIKGLQDIKVIFRKVIPAFFTVFGMLGVIYISFLLLKDGNVLDRITEIHGVTCLEYGAHAYEAITKPSLTVVWYYIVTPLFFASICWLFIWRSLSLQSISSIHWMYLGMATSMLFLFTRSIGRHCLLENAYLMVFTFILIGLLPLIRPFKQRIYLPAWLFIPAIIILLTYNNFVFISPEALKIPLVSWNKETLERVTYTDNYKPVIQFLQQKLKEKETFIELLNGHGLYTYTHKKNPFYLPNISLYATDNAQKVLVKNLEQQFNEGKIPLAIVASPFWGGCIDGMPSTANHYRIAEFIYKHYVPYRNILGFEIWAAKGSRFEKEALPILQSPAEVMIPINAKGTYYGKNSNITVTDNILSINYGPYLPMVSPSVINMMTATNMDPIDISSYKVCTFELELTNVVPGWLQIFFSFDNQPYTERYSCKMLIPTYTEKTTVTLDHVLPNNVKKLTDIQLIFPDYTFINLSSFKLQLFKEYLIQPLCVSQTHNVKCGAHLWANYDPYHAAYNKSLVTLLNNVTLKPNETHYVSIPQYKTDQHAEYLSFRITSPSGGQIKGTIKDKNNHSGIFFFTLKKNTEPEDYLIRVSNQYAWKNKKDFSFTSHSQEDIHIEYINILEGD

SEQ ID NO: 10161 - protein, 489 aa, Lawsonia intracellularis
LVYIFFPTLVLLPLIRPFKQKIFFPTWLTIPIVTVILLSGDFVILLPEALKIPLVNWKTKNLQRVHYIAEYRPIVEFLQSQLKNNETFVDVTNGHGLYAYTNKENPLFLSLVNVYVTDKVQKILVQQLQEQFDKGKFPLAIVSSPFWGSNIDGLNTTMLYYHVAEFIYQHYVPYKNIHGFEVWAAKESRFSQETSQVEVEEQVTVDVPIVTQGQYFGHNANVTTNNNTIHIDYGPYLPMVKPSIINLMTATNMSPIEIAPYKTCKCELEITNVLQGTLQLSFSFDHQPYTSESSCYIFIPAYKEKTKVQLTKILPEGAKAITDIRITAPDHTYMDIYSFSMTLLNTYPCTLLIVTQIDQHNYGPYLWANYDPYHGLSNNTVLATFTKDIKIHPSETYHIVIPSYIKDDIAEYLHFRILSPNGGYLVGNVQDIDNHSGEFRFALKESTEPIDYLLRISSQYAWKNKQQFSLTSHSIYPIHIESICAIKGD

SEQ ID NO: 10162 - protein, 265 aa, Lawsonia intracellularis
MIFAGENYAVSSLIWFDILWSITYIILLYAIFTKVVRPIYACLLTLLFSQLTFNNMACYNSLILLPPLFLPWAMQQLTFYRIAWIWFLSASVFLWMPSAGKASILGLWLVFCIRGLQNIKILLYKVIPAFIAVFGILGVSYFLLVFLRGWNIFDRISEIEAFTFLEFGAHTLSTIAPKISIEALSYYVIMPLFFAGICYIFAWRKLSFKTIPLVHWMYLGIASSMLFLVTRTMGRHCLVQSMLNTCIGQYELLNNQRWFIFFFLH

SEQ ID NO: 10163 - protein, 202 aa, Lawsonia intracellularis
MVKHFLENYQSDTILFEKHALTALSLIEILSIFFILINKPCYEVQYHVFNGLFFGILFILMFRWLLSTIGYSSFVIRCKLTPVTFGFFFLLTAIHLFLKVYKYPLDTPIDIRIGYPHGIMITFILGWIISLFDKRHQLVKIGAPLLLLPLTILIASETQYIGLLRGYQWSLKTLLFLFTGSLLGFVIYIYTTALTEEKKINL

SEQ ID NO: 10164 - protein, 321 aa, Lawsonia intracellularis
MHYIITGVAGFIGSTLAEKLLSIGHQVTGIDNFSTGKHTFLNKAKQHERFTLIEGDLLDTKALSKAFATGEQVIHLSANADVRFGVEHPSKDLEQNAIATHNVLEAMRLHNIKRIAFASTGSVYGEASIIPTPEDAPFPIQTSLYAASKLSGEGFIEAYCESFDFIGHIFRFVSILGPRYTHGHVFDFCNQLRKDPSKLTVLGNGTQRKSYLHVDDCIDAMLLAIEKAPTDTKVHIYNLGVDSYCTVKDSIGWICSSLGVTPTVQFGEGDRGWIGDNPFIYLATEKIRSLGWTPKYTIEESVKTTVSWLMENTWVFDNKEK

SEQ ID NO: 10165 - protein, 244 aa, Lawsonia intracellularis
MEKLSIIMPAYEEAATIQEVIDGVLKLPLVNLKKELIIVESNSTDGTREVVLQYKEHPQVKVILEEQAKGKGHAVRKGLQVATGDYILIQDADTEYDLDDYPKLLQLLIDKKADFVLGSRHSQERRSWKIRRFAKRERFSQYYFNFGHLLFTFLFNITYQQKLKDPFTMYKVFRRSCIQGLTFTANRFDFDWEIVGKLCRKGYRPLEIPVHYHSRSLNEGKKVHIFKDPLLWIIACFKYRFCKL

SEQ ID NO: 10166 - protein, 179 aa, Lawsonia intracellularis
METVYQYDYQGFFVSETYAYQGLPHNCTKVKPKIQSNFIPQWNGSTWKQVEDHRQKKDGRDRIIEGTGTPYWLPGDTWKPEPCYMTEPGPLPKNAILTRPEPDPAILLKEAKEQVFLDIDTAYNETLMNVILAPTPESSGKSIEEIRTILSTQRAEFELQLQQATTVEEVKSIHIVYSL

SEQ ID NO: 10167 - protein, 281 aa, Lawsonia intracellularis
MFRIDTPDATPNNRFTEGDPTIPIEATTVSADWLNSVQEELIAVLEHAEIEPNKQSTIQLRDAIDKLIEQRLSIATSMKPGLVQPDGEPVQITDEGVISIIPTLSEFKDFFEKTPPKGWAVRDGSILPDADTAYPDLWNYLRKEKNTWKCKSQADWTALSTAAGGIGGVPFFVLDEAAKTIKLPDTRTDHIYGNVGDSIGKWENDAMRNITAWFYNNIIDFSNCGGIFYASGHGTVIQTFNPSGYANHQINLDASRAVPTAAQFRPRRIGLLPCVYVGGIH

SEQ ID NO: 10168 - protein, 540 aa, Lawsonia intracellularis
MNILYGCVSFLFITFLSLPFLLTVCGIQIRGMDNRENRVLVEKPALNKTSLQKWPSVLDPWFQDGLAFRSHCVGLYLTIWEEWLSAPVKSAATGKNGELFPILSTAPVLQYYLGLKPIDPHEYIHFQLAHAGMYIFLKSKGIPYFLVTIPDKPTLYPEYLPFWTRWCKGESVHKQKVKAIQEIGIPWIDLLPILHEKKYEHALYNKKFDPGHMNGYGMEICHQYLIEALGKYFPALLSTASKPAYRVYETKRYNTAFSSEWLSSIELLQIERFQSKEIPNLIKKEPQTWFEPQLIINNRPLSPLDIVFSGDSYFLCSCQYAPSHRIWPGDLPLLAYYSKQFLKMNIQYLTIPFLKQLFDTGYKPDVVIEALAERNIGTPSRARKDSLLRTFGDIYLKTPIYFLTPEYIKNITNKEDSNDITIYIYNNTIFLKASANPYIELPSLVTDANGRAAVVANIFSPIQTYFGVYYTPKDIGFVQESSINWVKVEPGENLVHLYISTHPYQEISIRFHLGFDHNEYRILPIPDEIKQMQKFVSDSI

SEQ ID NO: 10169 - protein, 407 aa, Lawsonia intracellularis
MQVIQSIFIFIFLLFSTMPFCLSLLDLSPKTVTLRENRVLTENPSLKDTPFQKWPKVLDPRFQDCLAFRSHYVALYLKIWEEWLSAPVGEYATGYENDVFYVTSLKNYLGVTPITPEKYAYFKLAHAGLYAFFKTKNIPYVFITIPDKTSLYPELLPFWAHWCKGESWYDQFTKAIKEIGIPWIDLFPIFKEKKATYKVYNKNYDTMHMNAYGVETCYQEIGKRLQFPELMPTSRNEFYTVSWDKIVISKFIKENVPVFQLLHTDRFQPIEIPGLVNFEANYWHKPRLNNNKPLSPLTVWLVTDSYFLLSGHQEREYPVFRGDIPLLAYHTKNLFTTHVQYFLSPFFQELLKKGPYPDILIETLVERNWTTMDRAKEDPFIRIAGDIYLHTPGYLLTPPLIDNYIYI

SEQ ID NO: 10170 - protein, 537 aa, Lawsonia intracellularis
MKILQSCFTLLFLLFLSIPFTLTICDCAPEPIDNQENRVLAWPPKLKQNSLRNWPKRLDPWFKDYLAFRTHFLCLYHWIWGRFLGSNLQDYAITFNGELFPTLNGATVLQNYLGLYPYTKEQITNFKLLHAGIYARFKSEGIPYIVVPVPDKTNVYPEYLPFWASWAKGLSYYDELIQAIQEIRIPYIDMLSILESRKSEHQLYNKRFDTAHWNGWALEIAYQAMGNFLTNIDTGFEPRPSGEIYEIYFGRPYPRLYTRERVPLMNVYSHNLHVEHLPELSKENPCWADPQLIVNDKAKLPYTLWFVSDSYFLFAFDNYQPWIGGISPLAHHTKKFLRMHFNTFTQPFIEKSFGTSYSPDIVIRTFVERLPRDLMQDIDPVLKIYGDIHLGTSGYILTPNNLHKVVAESNCCITKEIDQEEQGIIIIDSSSDIPLFTLAPVIAGKDGRVMFATYLKSPIKTTARLYYTPKSIGTLNKEDFVSIELEEGENIIYMSFDTEPGQEMVLYFEPGCHPGAYKVLPMPKGIQHVQHTYSRES

SEQ ID NO: 10171 - protein, 458 aa, Lawsonia intracellularis
MLWCNTFLLIASIIFYAWGEPKFVIWLIVSMIFNFHMALLIAPTNSRSMRIFGLSTGLILNLLLLGYFKYLTFFMESGFALLEIFFEPSINSSQLKTIALPLGISFYTFQAMSYLIDVYRNEVPVSRNIINFGCYLTMFPQLVAGPIVRYISIQKELEHRELSPQRISSGIGRFIIGLSKKLLIADTLGRVSEQAFAIPTDHLSPLAAWAGIICYTLQIYYDFSGYSDMAIGLGHIFGFTFPENFNYPYISKSIKEFWRRWHITLSTWFRDYLYIPLGGNRHGLGRTVINLLIVFTLCGLWHGSNWVFIVWGLYHGCFLVFERFFPKFPSIFPTFLQHVYAVLVVTLGWIFFKATSLTHAKEYFYALISGNPPGIQANHVWLQLFSTDVYLALIIGILGSIPIFPFLKNKWEHLLIKQKTSIAISLEGLRFFMLFLLFFLCIMPLFGSTYNPFIYFRF

SEQ ID NO: 10172 - protein, 93 aa, Lawsonia intracellularis
MDRELIKKVLGLIIKNFREEQGLSRYIVAKESGLDSSWLRRLEDGKSGIRTETLILIARGLKLPAATIITKIEQALENPDAWLANYRTTSDSI

SEQ ID NO: 10173 - protein, 326 aa, Lawsonia intracellularis
LQAWLQKTVLNLGSADDSMDVLYIGTILHYDSVLARTLTKSLWQKKVFKAILQWPDRMDLWDQWEVILSEQGEKEAWRFWEVHQEEMLQGSKVSWPSMRPLYLLMKRRAEDHAAFDSEYQNDPLCGDDAPFAQCIYYWSTPSDSWTFFGVCDPSLGKHGAGRDPSALLVGGFCQKSMTLHVIEASIRKRHPDRIIEDIIALHRQYKPVLWGVEAVQFQEFFAHVLVQRAEKSGLALPVKAITHNSDKLLRIESLQPHMVQKHILLHPSQQELIHQLRHFPKADHDDGPDALEMLWEIACSSVSIKDGFIPVSSSSYSEQTMYDSWR

SEQ ID NO: 10174 - protein, 276 aa, Lawsonia intracellularis
VKLSEKAFSNAIGSLANTLARQIETTCHEFEITTNATKKRIERVQYDFSFFRKTYFPHYVHRIQPTQNRQPISSVEQNKIFQNTISSDSSLESLGIIKQNVQVIDKQLSVVSVDNIPHRLDNICPISINSGSTTNHHRQLFMDHDSVLHRWLDETLPGILNNPKGQWLAIAAPRGEAKSTMVSLFFVIWAIITYKKHYILLIADTIEQSVSLLEAIKVELTSNPRLQQDFPESTGEGSVWNEGTIITCSNVKVQALSAGKRMRGLRHGAHRPDFYS

SEQ ID NO: 10175 - protein, 168 aa, Lawsonia intracellularis
MSAYAPETKEAIRNEYITSRKTLAEVASSFNVALSTAARWKGEAKKLSDDWDILREHFFLVGSGMENITRQMFIEYVLQHKKILEEIQEDMDISTSTKVHMLAKLSSSLSKTVEASRHALPKTDRLATALDVMRKLVQFTQHRYPQHALYLLEILEPFGNILITEYGQ

SEQ ID NO: 10176 - protein, 234 aa, Lawsonia intracellularis
VIIGLIGLFISGYERGKSITTNKYKAIVAKLESEYAKNDQARYQAIAEAEQQARIRLQQQTEHIRSLMKELGEVRKTLTKERNEFKGKINEVSKRADSYCLGLPSEWVSTYNQVLGLTSSSNNTRGKNAHTRGSASDTGTAGTTNARIQQNQLAYSSSLIQQHTSKQNNQSNVLEKESFIKQSSNNTLPASSSQTNESIVTPKDLLSHIQDYGLYCRRIETQLHAIGELLEAQQ

SEQ ID NO: 10177 - protein, 205 aa, Lawsonia intracellularis
MLKVCCIILLLLCGSKECLGEIPYAAQRHRNVLIRVAREVWGMDAPVALFAAQIHTESLWHENAVSPVGAQGLAQFMPETAAWLPTVAPETGEPLPFNPAWSLRALVTYDLWLWERVDAIYQCDQMAFMLSAYNGGLGWVQKDKRMAKDNGLDPNRYWDCVERINAGRRKSAFQENRKYPKVILHTYQKKYEDAGWGRGVECDYR

SEQ ID NO: 10178 - protein, 1607 aa, Lawsonia intracellularis
MKIKNKIIFISIVIISMSIMLLILSKYSITKLYSIDSYITKNEYTKLYYFLDKKFFYDAEYVKKQANDNKLLKKMYKGGDDRSILSKKYIALLETHESTFEQDINSQVNSVYMCPLKKNLNETPCSLPTAEIGNKKNDSEENHPTVEQIDDILQETEIEQTNDTLSKASPATNPKFATQKQQVVSILPSKHISLLKKIIKPSQHSSKNRPSSVAKAIIGIPGLPLYAVNLYGQRGDAPSGGDKKPSGTEGNNSSSDDEEKEEKNHSHYDSEINEQDKHTDKGEKSDLVGAVGGTSDNFTNLDGNKSDGSNGFEVLDLPSHNHSEPWQKLIVVDDESSHESHTENSTQKNESDNNAEPKPLKDLYELGEHYPPMFNQPKQDMSMGIIGPGDDLIRPLINFCEPQFQHYKYIHHHHHSHHQHRYHHQQQQHHHHPLHHHYKIGIPLLSPNKNKPGPLMNELPGRHLQTKNPSIDNGGNNNEQQKFDPYKRPSNNSIEDSKKENSHHSNSSKQSSLGLSWEKDFGQSSNRGKNKHLEEQNDGEHSNSSNVSIAPLMSHSSSTGQQNTSVENNQHSNGEQNPPSVGCEHRGPMSTSNHSSSCFVQLNKSGSDFNNESNQPSGPKKEIVQSINSSPESEHTPSNNSSNSSFEKYLHLCYSSVGNEASHSSGESSKNNGNTQEEHTLMPHNNSPPVSQSFYPKNDNESENEASSEYSSSEFSFEKERNFDHFSSENGNSLDGFEVVEHGPGNSAEVSPFKPTVQTGFKGTPSPTRTGLLLPPSSSDDSKSLEGSLKSGGDSNNDESSDWSSSNSFDLTSENKKIFLVQTGGHPHRPPKKNDTKQPHSEPSENPNGEDGGIQQNEPSYGENVLCFTKSSGSNHSHPSHRDHYNEHEQNPPDETEDHSAHHQSQSSLNDKSKSSSKSRSSSIGSNSGSSIILLNGSSSGDSLLEYPGPEDDEGDCLGRECKRKRNSDSNSESDYSCSFERLGNSSASWILRNHGGSHSSTKSNSSSSSSIIILEESSSEHYNNNRDSSYTDSNQGNNFNSYEEDTGHQSEDGGNKSSSSSSIQILSTSNDSIDWPNSRNNSESEYDGVNDGIAWPGSANNSGDEHNSDDGIDWPNPRNNSEPEHDDSDDGIAWPGSANNSEDEHNSDDEIDWPNPRNNSESEHDGSDDGIAWPGSANNSENGDDGSKSDSDSHPEGESNNNDTDGGNRSGNDELSDGYSNSSGSNGENSSLQYRRPVMLGAMPPARATPRRGNPSGANVRQVLSKTPKNLQATQAKRPPISSLDSYRNACKALTQAIHAIAQSSQQAMRSLALATTTGYPDTTKRFRIFGSASTKKPYPKKHQPYAVTVGVIANPFSAINLGVAYTYTQHTTKDFHISNTDALFEGSAAGKLQTNHISLITAWNPEGYGLTGFLEYAYGTGDATLIRKFAYDNLAFTAKGKTRTHTDGGTARIGYRFKVTETIAVTPYGELAAVRARWNNYSENKGKFPANISSTKELVREERLGIETRWQIVDNCQIYAWGAYISSKKKNGVGIEALLTIDDHTENMTVSKYSRKQSMGEIGAAIAIKPTEHFGISFNTSIRTKSNSKVGLDSQYIGTSIWYAF

SEQ ID NO: 10179 - protein, 380 aa, Lawsonia intracellularis
LVYKDQHMHLLFVTHDIDSGGAARSLSILVQQLVKRHKISIITFISPEPEKPTALLYQQLGVSLYLFPWGWLPVSFIGCEPNIEHHQELCSRQRKYLPEVKHIGETADVICFNSYAPTSLAPYFPGKRKVLIAREIIDTSDYHNYKKCTSMLKQYINFAIAIGPQESSQLQSMGIPHSIVYNSSSHIPYFEPFSSFPPTRFGMFAQFIPTKGLDILLLAYADQAVILKERNVHLHLFGINLNMPSKSTQAISDFIQSYKLTDFIHLEGWVNNVEQHMAAMHCMIRPDRTGSPWGRDIIEAMSIGRPTIASGEEDVFVKNGRTGYLFPPKNVKILGKILALLSEEPTVLEIMGKNAFEFAKDHFNPEINSTHIEHILLEEI

SEQ ID NO: 10180 - protein, 688 aa, Lawsonia intracellularis
MYIFYMYKNKVFLQNKVIHRWDTITNSFTVGILLCFFCMYTQQVACAEDPDLYAEPEDLMTEELLAQHALAAAAIVQGNQNENPEVEQEEFSLLEDLLVALPNLDSTLDDSLASGGHPTSSGEDVGEGASGGIFSQEEGATGGSHLLGLLWDDYEKGPSQEWPEHVQTTTNEVTSLLQKSLESLNNVHQSTVRNRTLSRMSVAAGNIWLTTVISSLQTELSDLMATSRPLRGIFIQKRLVEIQEQKVNQEKLLEELHEVLEEHPQAQRVIQAQEIFLQHLAKLLEKLEALLEIIEPSDSSVEQGRPPGSPPPPGGGAIGFSFPIQTRFLLSYNIQGEISSLQGMQCLLSDTSEQVSTILRMLVLRSKSFNAPAAYPKKRAKQIYKNKSYLSLQNNSKSSLSSTTYRSQLPLLKSFYVSTQWDSYTSNLEYTLRAANVGFLVTPTDMLNVGLTYQHNKHISKEYYGMQKGWSFGAAKAITSTDSLAAVVAWNTGAVGFTGYLSGCCGWGNMKNTRMVTHAGIKTYSKGSPKITLHGGLIRLGYNFQIVDGMLLTPYVESMFVSSGWSPYEEITGLFPAKISGNNEKVVEKVMGLSHSWAITDNMHVQTWVVRSIKKHRMKELRSQVGISRQYTLSIPKRHNQYIRSEVGLSYENKLLETFSIRLDSLWRFDQKNKCKEQQTGFFFQYSV

SEQ ID NO: 10181 - protein, 595 aa, Lawsonia intracellularis
MEQILKFFLYFYILFSKFIYEVRNIYIYDLQKIVLIQFFYCKKYTTIFYKTFIIVFICSCVYIFIIYKYTFATDSTYSNNTYESQDEILSEMSMQLELSALEYVEQQYIQQQEQELIQQQLLQQLMSLYGQLGDLENQAMSLKVQQQQLSEQYRTLLHIPIVEQSAETIEQALSITHQQEQLEEQVNSTQSQIEVLQEQILQTLYQLGMIAPPGGNAGQEEDGFNIQGPGGAGGIATFTHGYGYLDQFRSLQGLQYVLFDTSSHVSHALRDIVSKIQMSSNFSKVNTIYLPQDLRRHKKFHRNTKVVEKKEKLHYFLYPITFSCNLFTSLEEYNIYLDKQHSTQVGIVVNPIPNVTMGFSYNYKDLSNKYKIVETDTSINKVNTKSNITKFLATVAWNTDGQGFTGFFSSCYGWGHIKTIRSFNPSGTSFKGNSEATIYGALVRLGYNVRIVEDILLTPYVEGVMSIVERKPYEEQRGYLLSKINNNKEVQLERGIGITSFWKCTYNSALQTWLGFGLNTCKINKLTSRLSYGPFYLCSLSVPSVRKTSFWKEIGMSYDIQLSDRTHINISGNHRLEADKQPGNSSIRMHLQYNF

SEQ ID NO: 10182 - protein, 832 aa, Lawsonia intracellularis
MDLSHQYNIIHNIYEHTHNYLSLFPKKCKNYCIIILLCMCYILFNYEYSFSVKPTRQLSTNSDSSVEQQSEESSSSSEEEEGNPGSDSRNQFLLLWEQETSNVKEQVFPLQEESSSSKEFIDKAVQTGEDSSQSSSQSSESSTSSTSAALGTSEMFFLSESEEVQEVIITSSEEQMQQEVISNLKKKVKKLKEKLQQERKRHQQQMDKLKTCAVRQVQFLQSMVKMAQHQIQKVEIEKLEAQQVAALFQEALLGQEAQSQSSTSRSSVIISPPHGEENKSPCSPLSREDEGSDDSMPPLEGEEGDIWRDEYVSQEQRSQFFLQQQQQQSSSLSEVSQTGVVGSSRGLPTIQEEDEDGSSCSSIEGYLSSPTPSVLIAEEGSGSDLEESVKSPSEHPSGVDSDTLEEGEVIGEEVQGPLTTKRPAPSSSSDSSDDESLSPVVKRLKQSSSSPPKSPGSPSSRGDMSSMLIPGYNHESQYGSLKGLQCVLFGAVEQMSANLKTLVLKTSLYQAETKDKKTSSLIAKESKKACMSLCGKERSVKKVMSDSSNLLSFLNTCHFFGYTDSYLANQENKVSSGKVGLLMNPISNVSIGLTYNRHKNHGKEYHGAQLGTSFGSAKANMELDGFSAVVAWNSEEKGLTGYLSGCHNWGQMKNTRQVMQAGKEMRTKGSPDVQLSGVLGQLGYTFPLSKKVSCVPYIEATHIVVKWNQYREDSGSLPCVISGYTEKFQEKTIGLRTSMKITDKAILQTWVAGGTVQHTTSNITSMPLASPLLLYKTSVPGNKKKSFYSECGTLYEMNVTDFCKVDLHGSLRFKKDQKLDAGQMRLHFQYLF

SEQ ID NO: 10183 - protein, 691 aa, Lawsonia intracellularis
MSTTMSILKNCILYFLHTSNKIFLYRYIHKKYYIFFLAQLLSMLYTCSSIAKVNEKSVSSTRITHQEQQNIASEFIQAQQEYINIKNLLNMNFLYFDELQTSYLESLTTQNSMIDLYLNTISREGEDSFNYEEIQRMKVNQQRLTGQLTYILQSITSRMQELQANIVAIEEMQLIVGQQEGISEIIALNNDHLQRILNSQQFIYNSIFNEHLMLRFRIMLVEKIEQARQQGHPLPPFPNKEIRMGNSILQEVILKDPPKKRESSLRKRCLETDLSSSSDEEAKLSPQQLVQRQIGQSSDYDASSEASDEESQPYPQSSRSVYLFPRNIQSSKDRTSSLVAIYKKVLQLEPLLGVQYVFHDMLARFPIELKQLATTITNNLSDKLSNHIDEKFFNTLERTSTGRIKKDKGVTVIPNIPLSDKRMQSMLGMMKDCPFCISTRPQTRKRSYVSNTISNITLGLGYDHNKYNSKIHNGILSSIAAKVQIKGLLATLSWGKNKCGLTGCVMGAHYWGQMHTIQSMPFNITKKKSIPVRFSGVLAQLGYKIPLGSEHSLMPYIGSSYVVGTSNSYYKELSPFFYLSDKHKESVYDHVIGLCLYSKIKDFSSIQFWFEKNYRQQNLNILNISSLLQSKPLYKSYLQGYKKNDIYSETGISFEYTINDVLTIHARNCFTLHNMKNIFYIQTQCNFLYTF

SEQ ID NO: 10184 - protein, 662 aa, Lawsonia intracellularis
VYTYIHTINSKFFSIKKNYFRLITIIFILLFLCYYKNSYSEDIGKRDTYDEFNWCMKQLQSISTSLNNLIQYMYEAHIRVDTSDAILRMTESYIETFTIVQNDIFNMLINESSMVRRLLQTATNDIKNGIDVSKHIHSLNNLLSNTYKYEVKINQIKQNQQKYIHDRHNVITNLLALEESVTEKLQSTQQLILSMVMTIPQYVRIPYLLEAIQQRLSNAQHQIPQLEAALDDLKSKISSCAGGHIKNVELVQELQSNLEKALMLLLESENGLRSVILKGKDQGPKPPPPSGGASASMANFSLGEGSAAFVSGYDILGNVSSLQELQCIFGNAITQVSSILKMWSLRNTFCIHETKCNIPHFFHSDIFRKKEKKISDLSLPQLSLLSHLSAPYHMFSSVEGYYKNLEYKPHAIQAGVIVFPVTGLQLGVSYDFLENRMLKVRHNSFGSAKAKTTTNILSLAASWNAEQTGLMGQAIGCYGWGYMPNTRYVPFVGEKISVNSKPDIELNGGLFQLGYNIQISSPIRLTPYVEGMLVTLGWKNYKEHYGVVSSNISNYKEALWERSVGLRGYWNINPQSNIQAWISKIFGRSNTTKLKATSLLFSIPVYKMTLPVLEKRFIKNELGMSYSMKLSDKMCMSLNSIFNYTNNTLHTQNIQCSFQYVY

SEQ ID NO: 10185 - protein, 323 aa, Lawsonia intracellularis
MLSLKTMAISLKQNYAERELNTIVTSPKLRFCKTAIEQPVSSSQPSLDVFIPFQGFSSTDKYSSNGEDKLCSAQIGFVMCPTEKFTMGVGYDYVHEIPRKYKEDSTLVTKTRSTIHIFSSIFSWNTNGVGFTGHITGCCGWGDINNTRYFIHGRGKASSKGMPRINLSGGLLQIGYNFPISNVMTITPYIEGMLTTVAWNAYHESIGPVRCKVSDYRETSCEKSVGLRHSYTPSSKTQLQLWIAGVLGQYNIGKLHSDTLFSDYSYHTTVPLKRKNYEHAELGINYEVYVSDLCTIGLYSIIIFSHIQKPTDKTMRVSLQYMY

SEQ ID NO: 10186 - protein, 254 aa, Lawsonia intracellularis
MKYQKFLKMKNLLESSNQQAQEILSIQESLSARMDDDLKGLGETSRQCTETLRRLEEQTTEIQGIRSTILSARQMKPKDLDKILQSAYKTILKVYSQGKDRARIHRQILLQLQRVNFHQFQVRDSEHLAVDQLELIGSTLERVEEETLNFSIQPPQPYTNSVLQQQVTLINQKSVAVWNGIEKRKRLRSCLQALYTVVENKASQVEEKNKQLEEIVAECYLIVTGNSSHQTSRPPSPPPSSPGGGGLAHLKGLL

SEQ ID NO: 10187 - protein, 796 aa, Lawsonia intracellularis
MYKFIIFYIICIYETIAIYLLLGSFISYFNRVFLKKEVKILDTTKVKKYARIGTFIFLYVIISSQVSLSHNARIGYEDKNSDRKSKLILHNKLQVNEFDELRSDIVVTMTPLNIYTSTQENKITTIEANLLRLEVIQRTQPVLLVDVESSLRDIYLLLDEAEGCNREVERCLKIWETASEHTKVLHRQTRERLSNAVIECQPGLPTNNEGKVVSVPEEIVASIENKVLHTANQQRTARKMEVAISRHKNKNIFLGNKQKLLRYRIEVLKARVEGNPDPPIPILTPQVLELPLLPDPPPSPPPLPQQTFQFPDFGDPLPEPLSPLGDDPPQNVLNQEPQPGPSSEIVSTLQPSPSVEDLSSSGVTLECQEELSSSDEEILDDECLTSGDESSTSDGESQRSSPPTKRRKLTHTPPPSDRGSPPGSSSMLMPYYTYGQVSSLQGLQSTLMSLEDQLATQLRLSIIRSINVLGVCCKDDNQLQPHTFQSKKQTKIKGGIGRSHSTDNEIRPTSVNNSLFFSQQWHVIASMDSRISNLETTISSRQAGVFTTPIDGLCLSLLYSNNKKKTQNFYGVVLDSVDGSAKAQIETDNILATVTWNKEHQGFSGHLAGCYGWGKITNIRTIHFFDNESVSKGISSIHMSGGFIQLGYNVLLGKNYFLIPYVEYMRLAVAWDPYEEHTGLIPCKVSGHKVHVCEKSIGLRNQWKITDNSQLQFWGSHIFTNHNTGEIASKPLSLSDYRNKISIPGYKKQYIHREAGISYESNVMDTLSMELYSKLRVTKSIKDVTSYTSFTIRYVY

SEQ ID NO: 10188 - protein, 841 aa, Lawsonia intracellularis
MIYIYITICYSYTLTVLFLFQKKLLKTYYIFVAGVFIFLCTAKHDHAIAMDRLSGIPQRDQVETDSSSSEGEEEEQGATGIDMGFYNTLDSIEFAAEVTGRNHSEECNYRYENRRYRKKKEREEEIQEEKKRCEMIEKQCREVTHYQNVKQKVESFIAYPSLVAEQKCWMDTYKEEALDRLNNVSQERHEKERSIEEKQQQILRSQEINQRLIAEGQSESFFNIFEQSESRILRPVFRTRFQLRVRREELNAYFNRMMDFLYGSDAFLQEIIDEEEEAECLEREERVALDALEQLRVELEHNLVQQHQEMQRRIPDNILNHREELILQELTWSYTEVLSNAFIAYDTHCQTLSAQQSRPPFFPYLEEAMRQKRSKAEIVASVDMALLSLDDSREDSESSERGEIHDVSWFGGNALLDETLGEVEEIEHSESSKSDVSQKSTACTEGESEEASSTQQSEQSISLEQRYLLQGARPRQPSKGGASDSSLSFIPGFSFGGQISSLQSMQYILCDVSEKVSTELKSLVQHARQQQYDKDNECCLTNLISRKRYSSVPQYDTVQHTYNISSPYRVFGGVDSYSKNLEHKIRSSQAGVMFTPHNGYTVKLLYDRHKKDVQEHSGLQLGTAIGSVKSYIDTDGLSTIFSWYPCGSGFTGHLAGYYGWGQLKNTRFFTHADNQACSKGSTDIHLNGGMIQIGYIFLLSKKLAIIPYIESILSRVGWHSYKETIGVLPCTISSHKEVCLEKSIGLFCQWNISASTQLQCWGIRTSGTSNVDKVTSQPTRGPNTYTIVVPNYKKKYMRTELGLSYSSKLTDFFTIVLNSNAQFNSNKRHIQNATVHLRYTY

SEQ ID NO: 10189 - protein, 725 aa, Lawsonia intracellularis
MYDRKFKNVKYVLQEPIYQHKDEYPKVSKQLQEKEEELKVYDAELEKMYGASVKVLQKKLSEIQNVGGELDREMLCLLQKLGDRDVITQEKTELQSRLSIMKIDVSPNEFKIDLIDDASIRSPEIYRPFTLYTKKNAQDWVQEKSRERNIKEAAEIERNCRLVLEKRGYVEEGVKKETVAKVSLEECEFSDVDIDDSEDESESEEQPIISSRVTQIDNRYLTRIHHHPTPLRDDSLRPWNDSTPSSTTGQKEEETTATTSEAGSHSLPDNVLDQSGEGSSQATASDQEQEVTHQESPGEVGPQEDSQQQQQQQQVQQTPGNQAQTSQSGETQPQAEGGDSHDYSTEGARPKLRGKDTSRGGPGGKATFIPGYSLEGHISSLYGMQAILLDVSEQVAFTLKGLALKVQNNAMVKDDVLQLNDSSASIKKKKQIGMQALQQESAFQELMPYQVIGFTDTKDTNLECKLGSSQVGLLVTPKDGLSVGLAYNRYKDTGKEYQGISFSAGSGSAKSKAELDGLSMLVAWNPRGQGFTGHVVGYYGWGELKNERSFTHDGAQVTSKGTPGISLSGGLIQLGYTIPITKQVSFTPYVECMVSNVTWNGYKENSGPLPCEVSSNREKVFEKSIGLRSRWDVTERSCIQSWVAGVSSYRSTNKVHVKPLIAAYDSKYEASIPSHGRQSTKAELGMSYKSKVTRNVEIGLQGKAQLDKSNKRPQHQVNVHFQYMF

SEQ ID NO: 10190 - protein, 229 aa, Lawsonia intracellularis
MYKLVSTIYFNTQIQNIIHRYNKFLNFLKRLGQCHYKYTAIFFLLSWVMYFNPTAFAMNGQDKPNPSKKSIKKSQQESSPSSDEEKLQGATGSIKDRAFVRPKSWFDKIKDRDFANFLQSLDMGGELEEEKLKRREEEAIREAWLEREEYRREQVRAEVQEEERRLREGERRLREERRRNDQVRQLKLVRERWVNGHNNRNKAALSGEKMSPKQAFMEEKKRMKILINN

SEQ ID NO: 10191 - protein, 688 aa, Lawsonia intracellularis
MIVFLLFQNCIFSHQIYSLSSFYLFFCHIIKSKRCHVVFTFFVLFLHMLSSNVFSMNRDGSVSSNSSENIPLYVRFYGDPDLLRGRTSRPPDTVDAIQYGPMEDCSICYQSTFCGFFGGMAIGSIVGSSVGAVGGGVAGASAGCVLGAGVGSTIGAAYGCMMGASTARDSECSARAENNIAAVVTQQPKPLFKEVYDQSRMNGRSVTSSTSSLTEVSSLKSTCSSSSSSISSDTSSNSSFQKYLKLCFVSSSSSSSEEEIEEEEEEVWIPRGECLLSESECHGKSESHNPQGSDKGTAGNKQDSSGNSQSDQQKTKGSPSGGSGDVFLVPERETCFFIPGYSHEGQVNSLLGLQGVLLGSAEKVITTLRLLALQHTNKHTTGQSLEIDSRPRSQIASSDIISSYVQLQNPCSLRYFSIVADNYESNLECKSRSAQLGLTMNPTPYVHVGLMYHRQNKYFSFSKEVQLDSACGIAKAKTKVEGLAGIVTLNPDKAGFTGQFASYYGWGNTKNHRSIGYIGRELEAKGRSKIHLSGGLVQLGYNLPLANNWFLTPYIENIFSVVTWNGYKEVPSPFACSISKNKEQLWQNSIGMRAIGKIGNNSQLQMWTAYSTGYHKIAELTSMFLCAPMKKYQAVVPGIDRKSAQVEVGISHQAKITTTLISYLNVIAKIGKKKLDNSHLTLSLAYHY

SEQ ID NO: 10192 - protein, 678 aa, Lawsonia intracellularis
MLLKYRIIIKIYCIIIYYIKYIYLLENKYKKYSLIYKNTYQYYNIYYNKKYLTLVIYCLFLFIFLRDIHAMNRENEEFNLYHRTLGNTEQHSEEETPCTVVDIKGVSISADVYEDYIKKHSLVVIDEANKSINDYCPCCKTCCKNKQTYAVAAAQGGCCGAISIAVGYGVGKLIELCTPTVAPTEMIFTVPTPLATAMTSGHTLTTVASSIEGITQTTAITMGCCGLTCCLLGSIFGYLTNKVEEKNERIHTAQQRLEYMVLNRQFLSDEDEGYELVDFSHRQQVVTNQPQRINSPVNNNSEQGEGSSRRSSEGTVYEEIFFLPGYNRGGQISSLLSMQYILAGPSAQVSSTLKMLALKAHRIPSDAAASLQLGKKSQKLQGPNRVLKADLQFQNNPQGISICRMFAFTDKYECNLEKKIRSGRAGLVAELFPGMTAGLAYTRHNEGRKSFEGIQLGTGSGSVTSKTESEALSAVIALNSEGGGVTGHIASYHGWGKMKTSRSFIHAGSKISAKGKPNIYLNGGLIQVGYNISLSKTTILTPYIEGMMSMVNWDAYTERSGLLPCKISRSEEYVAERSVGLCHHWKPTSGFQIQSWIACISGERRTDGVSCRPLVMPIKKYESYISVQERKYVHIEFGASYSMSVTDTLQLGIDGMIHLDKVHKIKEKSMSLSLMYLH

SEQ ID NO: 10193 - protein, 684 aa, Lawsonia intracellularis
MNNIISLCNIIYIYVTISCIIVCYLLASKLHKKYICYDKQQKRAYYKKVLTGVFSSFLFFSVLAEPFAMNNGEGGEQIPLSEISLSGGQSLEGGATGGDGVTSVSPESIPDALYCMFLDEHGNQDIVTTNSSSIQSNCCRNICSIGMTRCLITNLIAGACGGLGVGLGGVIAEFTDPSMMLAATSGGGLACYFFSMLAAYYYGGIIVSKEKRENLEAIDRRMQSLIEESISRGRRRSILVGHQGQPVTTQPSVAAGPSAHLRGVIVTEQPVAVGASASVGASSTRGSILRSSQRGDQGTEGLQNRSRWGEQDTDPIYEDVWTYAVELIPGYSYEGQVGSLLGMQCVLTGVSIQVPQKLRRLALKAYEKIPQMYLSLQGNKVSSPSIANYGKLLKATKNFANQKQKHIPYYVFAFTDDYKANLERKVRSGQAGIIAELCNGVHFGLTYSRHNDEKKEYTGMQLGKGRGSVKAKSEIESIAAVVTFNADRPGITGHFASCYGWGTVKNKRFFTHAGRETSSSGSPAISIAGGLVQIGYNLYISKSCSVTPYVEGVLSIAKWKPYNEKRGDLPCKLSESSESIFEKSIGLRSDWRVSESSILQTWISGISGSQTSSNVSLQPLVAPMKRYEVSVPMRNKNYLRAECGATYVSKITDSLFTGATMLFSFVKRQKLHNQQINTYVQYVF

SEQ ID NO: 10194 - protein, 702 aa, Lawsonia intracellularis
VIYIYIKCIFYFFIRKSQQRNTGYNKQLRNNFYKKVFTGVFSFFFFFSVLGEPFAMNNGENDGRQHSLRRNSLGQPYDSECSGNGSGGEEPTSDPQSEALFAAFLNAHGGDTLADVSSSFSCPCFGPTKRCCKSVFEKWCCMFTCISSSIGSLVGGGVGCCIELVSKLGNIAPTAIPTTITTTGFSVSAAPIAYGLAGCIVCGPLGCICGYCTRQGNTLDRIENRMVRLRVLSAIRSNIREEQGPYVAFNVRSQSVTTQPRPVGSSDSTGSPVVTSQPPRGSMSSVGGSYTPVEQQRGEEGSSSEGSDEESGDEHIYETIGGGTGGGGGDEEPIYEEIGFYTTNLIPGYSYEGQVSSLLGMQCVLTGVSIQFPQKLRRLALKAYEKIPEMYLSTRGNKASSSSVPSYGQLLKVVKDPAKQKQSHIPYHVFAFTDDYKANLECKVRSSQTGVIAELCTGVHFGLIYSRHNDEKKEYTGMQLDVGRGSVKAKSEIESIAAVVTFNADRPGITGHFASCYGWGTVKNKRFFTHAGRETSSSGSPAISITGGLVQIGYNLYISKSCLVTPYVEGVLSVATCEPYNEKRGVLPCKLSESNESIFGKSIGLRSNWKLSEDTVLQMWISGISGTQTSSNISLQPLVAPMKRYEVSVPMRNENYLRTECGATYILKITDSLSTGATMLCSFTKEQKLYNQQLSACIQYVY

SEQ ID NO: 10195 - protein, 610 aa, Lawsonia intracellularis
MYYNSYYIFIFIFCSTYEVVAMHNSEKGLSNTPSLSISSFLKRNWEKAKVTCGGVLGSSVGITTLTTGFTLSAIGAVSRGLGTSSRVACLSLGLATAGSCVLGILSKKEELQKIKLERQKEKQRGDQAWVNLQNVKMIQLLDDIEKRKDEDPNRDREQIERIQLVAAELRNASFFIRESGFDLGIWDENDEDWYIQGGVYKMVPPPGKFWDPYEYPDVFEEESATSQEEYTGGKYTSEVVPQLKPVRIVSCPASIPGYSEASHMSSLIGIQQALFSTSEQISTMLKLLGLKAQENVCTPETQLEGSFYSKIQKFQGPVKHIQEETQIKTLGLSIFNIFANIDSYKTNLEHKVRSGQAGVLIDVISGLSCGLTYDCHKGDTREYKGILLEKGSGEVKTKTDTEALSAVIVANTNNAGFTGQLISSYGWGKVKNIRSFTHANREVNTKGLPNIRFAGELIQVGYNVLVSKHVVITSYVETVFSLVKWVPYKEVSGPLPCKLSENKEQVIEKSIGLRSHWQATSMSQIQIWIAGVSGYIETNSIKCEPIQKHASRYKVSVPKNESSYKRTELGISYTANLTNNLEFGINSVIRFENSKKFGGQQMILSLRYVY

SEQ ID NO: 10196 - protein, 619 aa, Lawsonia intracellularis
MNTILFNLYNFIYIKIVHSIKCMLRAYNSHPLLFLQIMFQVIQKIKGNYRKIAVNAIIPFCIFFCVTEAVGMNNNNEHSPSPVNERTPLLQSSHSVQRVGVNPRGEGCCARMKRRCGRCSEGMCSCAIIAAESAICGAASGVTSCIATKKLESELYWALKITCTQLPSPTYAGLVGCGAGCTLAAAVSATSIGCMKCYQTTCNHRTENTDGEQSSDSEDENETSSQIALRVITTQPSSIGISNPAVITRQPDSRDTASSYYSGFLSEFNPKSHIRSLLGMQSALLDISEQTASALRQVVLKTHEHMLMSEMMYQQEGYVYSKGQKFQYPSCVAKVTDSLFLKRYVHHFVTFDSYETNFEHRLGSGQAGIVVDMTSGVYLGLVYRRHNNHGEMYSGIPNNSWTEMIKVRTNTESLSTGLAFNIGRTGITGHLVSCYGWGKAKNIRSFMHGTMEVCSKGSPDIRIAGGLVQLGYNLSVSKQVRFTPYIETTCSVVQCGPYKESLSLFSCELTKNKEQVIEKSIGICSYWKPSDMLQVQLWIAAVSGYRDVKRLSCNIVNSRLKQEISVPLKQTRYKKTDVGLSYLINITPRFCLEMNGMMSFENIKKSKEKQLKLFFTYNY

SEQ ID NO: 10197 - protein, 597 aa, Lawsonia intracellularis
MIKEYFIYTYKIIYIYNMLKEGIERLMGNYRYIFKQQEFYNKCIIKNILRKSVAVTILPFFLLVTSVNAFAMPGFSRNNGFNPLTNSDSESSTPSISSSSMFRNMCRRGNPCPYLTVGCIIGGVLGTVAGVLFSNMFTFPHSSERVGAVVTGTIGGCFVGFCAGLGIYYCSKRSSCVHENPTPEDGIPFYITLGDNTREANLCECSGSCECPLLAPSQRPFGSHQTDSHRGSGNRTSSCFLPGYNRDGQTSSLLGMQCILASSSEHVLMNLKALTLKAHEYSQESMGNMEDNYFPLQKKWLSGPSRGFISTFKNYKPSFISYRVFASMDNYQSNLEFKVRSGSAGVVTELFPGISVGLAYNRHTDTRKEYGGIQLNTGSGIVQSRSKTEALSAVVALNPETKGFTGHIASYYGWGKMQNNRSVTHGYSETTSKGKPDMSLTGLVGQVGYNIPIAKSVTLTPYVEYMYTMVKWDAYQELSGILPCEISGNKEQIIEKSIGLRSHWEVTSGSQLQTWVAGISGSHKKSGLHSRPLATSMPSYKAAVPVNKKQYTRTEVGLSYVVNITDMLEIGCNGILRFKQAKKIDSQYLALQAQYRY

SEQ ID NO: 10198 - protein, 700 aa, Lawsonia intracellularis
LKKLMQQTICIQQVMKVFFLFLYILLVDSVEISLAMHKQVGLDLRFRSSFSSNQCCWLSIPNMYSILRNSVEKDLQIWEEERQCCKANMKWLRSQINFFHKEILILESQITYWREQQRYWNSSSGRAWRNSFLFWQDRAHHGDKYKRRFYKERCTFSEDCRKNTWIASGFCWHCEIDAKAEVKKLQKSIEQTQKKIVMLESCRQQLNNNALKGYLERKKTWKQRFCLWTAADQRALGMFQQQSDDEDDLTHVDSSSDEDSNSSSDEYESCDEEFFDAVEDLSTAGLQDESEAPARGIVLSTQGNKEGAKDSTTDGGQQSSEVKYSSLKLMGQSACKVKADFIPGYNLGGHISSLIGMQGILLDISDQVSIILKTLPLKAYEFSDDEIDNFSLNRKNALVFLTGRKRLHRLYPTFSKKEKVHFPLYRTFFTVEGYKTNLEYKTRLGQAGIIIDSCSDMCIGLSYYHQANEMKKYGEVRLGSGIGSSKAKTELEAISAMMVWNPNKKGITGHIVSFYGWGSIKNTRSFTHMDGELHVKGNPEAYLMGGLLQVGYTIFQSNTLSVTPYIELMASTVGWNAFKEFSGLLPCEVSRNTERKVEKRIGIRSHWKTTNTSQLQTWMSAVLGTQHTNSISSKPIIALTDKYKASVPGYKRNYTRFECGFVYSMKLSERLEMNLSGLTHIMNTKRYTEQNINLQWTYFY

SEQ ID NO: 10199 - protein, 1050 aa, Lawsonia intracellularis
MLTIFIYFILIFLFFCRRYTHMYMYETYCIKSLTWDMYGFYSWLVQYSIKVFSRNKVFIIFSSFLCVYLTAGEAFSISSIKRGYNSPSPPPPSLVDLSLGDSQDLGSDSSSSGSLLGSFQDLSSESSFDDGHNPSPPPPSLVDLSLGDSQDLGSDSSSSGSLLGSFQDLSSESSFDDGHNPSPPPPSLVDLSLGDSQDLGSDSSSSGSLLGSFQDLSSESSFDDGHNPSPPPPSLVDLSLGDSQDLGSDSSSSGSLLGSFQDLSSESSFDDGHNPSPPPPSLVDLSLGDSQDLGSDSSSSGSLLGSFQDLSSESSFDDGHNPSPPPPSLVDLSLGDSQDLGSDSSSSGSLLGSFQDLSSESSFDDGHNPSPPPPSLVDLSLGDSQDLGSDSSSSGSLLGSFQDLSSESSFDDGHNPSPPPPSLVDLSLGDSQDLGSDSSSSGSLLGSFQDLSSESSFDDGHNPSPPPPSLVDLSLGDSQDLGSDLSLGDSQYLGSDSPSSDLSLGDSQYLGSDSPYSSDSGEEDNSSFSYTHDGISRRPCILSEFDGVNSSTSSIDTVVVTQPKGFSENHACLDTVKAVCVGATAGGAIGCGIDWICSCLGISSNVGLYSACGTCGCSVGAGVGCVICCVGHYWKELYKKDRLCLASPNSVLGKCDSHTDSRSSEGSSSEKNHSTITQTQQCSNTEKNKLLGVDKTTAFLLPGYNYKGQVCSLFGIQHMLLDTSKRISTTVKMLGMKACSSNITANEHTRFGSHFRRLASKKSKHIFSGITNNIPYRITTSLDSYCSNMEYKAASGQMGVLFDLWPTLTAGFIYGRHNDRVQKTNGMQGDLKSSSVSTRKKLDSLSAVVAWNTKKNGFIGHIVTYYGWGTVTNIRSVPHADCMVKTKGTSEIQSIAGLIQLGYNLQLSSEIVCIPYVEYMFSSIRCAGYQEYTGILPSKFTRNNEQTQEKSIGLRSQYKVSQNSQLQGWISYVSGQYHFAEFKSTLLGIPNIRYSVSIPSYKKEYSGTEIGMIHESKLTSRCTIGAHMIIHLYHNSVYNMYTGAQIRYHY

SEQ ID NO: 10200 - protein, 575 aa, Lawsonia intracellularis
MLFKLFWITISNVKKIIQCFSFILYICFCVEDVFAMYNNEECGVSNAQSVLENPAVAHPNTSPEFFIITEDFEKTEEEENTGCCPTISSEMYSESCPNPFCHPLEFYGTMRSFFSEGCHAQCSSFETVLTSGCIVFQWVGNLISSLFSEEDSSTGECQREKSCYEEGNFVSTPVITPPNPLGQQGSSSRCSSGSKIFSSSSGPIKESVFISSGYNYQDQRNALASMRHVLLDVSTQLSMTLRDLVLKGYQERLNTGEAYALTYNRGARLTRKPVKQMKYFSTSGSSMRHFNVFQALKLYQANGSIDSQKYSIEDKISPEQVGCIVDITSNVSLGIVYGHQKGKVKEYKGNVSSALGILGTTLDVDSFSTMVMFDLDKVGIMGSLSTCYGWGKAKNIRRFSRGGKEVHTKGSSSISSVGGLIHIGYPIDIRHGVSMTPYIEYMVSMVQRGGYQEKLGLLPCSFTDDMKIIHEKRIGLCSNWKPTPLTCLQIWIAGTSGMQKTKGVYSTLSVIPNQYMYTVSFPVQKEQYLQAEFGLSYQTALTETAHFYVNGTSYIKKVQKNYGGQHVFFQLRYTF

SEQ ID NO: 10201 - protein, 619 aa, Lawsonia intracellularis
MKNYSLTMWNIYKIIYIYTVVISKLYFYFKSNYQYGKRLFLYFPIQLLSTVKRFLIVATLVCFCILFYSNESFSMNGSEEERQPLLSSTSTTSSSSTSSSSSGANGYYSYPSYSQPQSTYPEVSAAEAGTACGCGSGAIGYSMLAVMNPSMSSLCGPAGWVLSSVGGACVGAGVSLACYLCGYNRWMGWEDHSTSNSIRTGGEGSTTMYGSTGTHQHREPESPDEGPSVSFPPVTVHQPASPGSPVVSQPGGRGRSSSYLTAEASLLGQMSSLHSMQCLLSNGSEQVLTTLRMLLLKNYSDSSKSQDFSFFKKNYINKDKGKVVSVKRKRGSLSTTIDVPSFLPYRFFSSIKPQDIHKRKVCSGQIGVLLDFSPGLTCGFAYDSNKKESKEYKGIQLGSTIGSVKSKMETEGLSAIVALNPANAGVTGHLVSSYNWGKVKNTRKIIHKGQEIITKGSPKVNLLGGLVQLGYNFFLLNQVTLVPYVECMFSSVSWSSYKEQYSPGACKFGKNKEQILEKSIGLRSDIGVSMNSSMQLWVAGISGYSKTNSLISSSYLSSYYRHNLSTYAKKYQYIRTELGVSYDGTFSDNVSVSLSGLFRLNKWSKVDNQNIVAQVQYTY

SEQ ID NO: 10202 - protein, 180 aa, Lawsonia intracellularis
LTTIPLAYLSYIHNPSFSTNIATSLCSLQERQAQLLIFKQDITTIKKCLETVTVGNPLTIELPGFPEEKNEDEERQKRRIEKEQIREEINRREEESKEMEDKNKEYQENNIRIEQPMVEVDNVQKEHRQHEGEYLHIRRQNYLRLCNVDLEYLIHQVESKQRQKTLLYDIHDELQYSILQ

SEQ ID NO: 10203 - protein, 452 aa, Lawsonia intracellularis
VRLEMAKKEESPLALQKKSTKNSQQISASSLHLSQVELEALRSYNTILAVQYESCQEHHTELPPLLEAVIRNWKASGCPTLADIGRTPVEAPQSMLSVAEAQGRETTKAVATIVKKTPPEQGNLLVWCGYPTSISRVSPFFPMNNKEKGRRDIIVKNLKASIQDKSKIVESSCYLINELVSSGPWGEIIYTGPKLSIEEEDALMALLAIIEMGKLDRTPTRKTQRQNDDDMEQLVDDLPPAKLSPEQTATLIGNSKNTLPLSFTYRGPVLPILRLMGHKRPGANHYEKLITSLKSLALGSMQLFVREKGEDLQYDLSQIISNLRLRPKDREISVTVNPFFYQMYLANSLTWINITKRFQIRGSIAKAMYRFCQSHRDNPVFRGNIMTLALALNMDPHVPLKETRRQIREAIAELVEKKVLESTSLLSRTNLVLLNRTAEALPSKKRISSQHK

SEQ ID NO: 10204 - protein, 274 aa, Lawsonia intracellularis
MLAKVIAFANHKGGVGKTASAVNVAYCLTKRKRRVLVVDCDPQGNASLTLGTISPYEQPRTVANLFTGLSFSTAAVSSKYENLDIIPANLNVYATVGTLSNSIKRFFGFRQALDEAALKEYDYIILDCPPTIEGTLLTNALVITDYVIIPVGVEDTYALSGVSHLIKVAETLRADTESNLAIMGVLLTMFDGRNNAAKTIRSVAIGTFGEDMVFQTTIPRNTTLNKAVMSNRAVCDYDDSCSSCRSYRELTQEIEVRLKNPHALITDTHPLESE

SEQ ID NO: 10205 - protein, 498 aa, Lawsonia intracellularis
MAKNQLDDFAATLTAQLKDAAEQMRNMRTPPEHPQNEQIDSTTTKKNRSIPKKHKNTIQLVTDTKQLTKKVSNKKEQTQQTSQKQPAKPKDGQIAPTQKEPSINVSISISPEEQSTNSIDQTVLYSHQLSSIDTTDSSQLLQSKNNQQKYSNNLLADPESVDIPSTKLSTTVIDQSSDSHQQTLVDNNNLMAANDSPLSVLPSESLQYTQPSKSMLFETDILQENISHQDIPSPEDNHINTSFIGTPTTSTQPLIDNDSLKQTMTACDTKKQSQSIPWGHFSSDALSTVQINTATIGGARQIVLDALTQLKQEFSHVTINLKRLATVLGLSYGTVRNTISRLVREGVIYTTQIRTGDAHGVYIEFADGSSLLPSVTVTQPTYAQHIPSHQPSTSQQTSTIHTNPIWDVDSDMLSMLWPYAFAAGLKRIHLEHLRKAFQIQQFDDAHVACYLRYLNWKIEKEAQDENQATAILQQWIQTMQQQGKYPRPTDYDEPEGLE

SEQ ID NO: 10206 - protein, 1139 aa, Lawsonia intracellularis
MKNLISQYIMNLSDTFQQLIRNICIYKAQTFNTILHTVYDKKIHKIFRIPKHIKLTKTLLQQTIAILLLPFFCLFCGSSELLAMNNGNGKSPKPLCLKLGPDGGTHHSGGSSGGSSPITSQPQSSGFGSSSPSVSSGSSSVEVTRGLSSPQECCPPCDKNSLDACLKGACIGAGLGIGAGMIPFGAMTSCACPATGSVGAGTCLGGSVAGAALGTACSLCKTHGCQQDSPYVTCDKDMVKVTGLGISAGGLLGAGVGLVTSAATGAPCPDMAAACGIGAGIGAAIGGPLSSCLYATSAMCCQSSSRITSNISEHQSSRLAQHHLTSSTSHLPITTQPQSFSGQATDPHMTNEDIDRGTCPSPCCTMTDYTVRVCTYPDPCDHFAGWATFGSCLGTLFGSLGAYLLGADVSTTASFVSSGSLCTCGLLGMGYYCKKYGNQHLREDGHTTREINDTEECKTCCKSICEKMALGAAVGTGAGCIAGTCAGGIMSHWDLSKMIESAAAGAGSGCCTGSLCGFLWWFLGELERDGFLDCCLKKHGIKSKKEGQPITEQPQRQPQVSSEFSTEDKQCIKEVCCGATSSGLCNCCIGGASSAMAHGCGSSAAVTAITSGATGCATGAACALLTHCLKKHHPKKWAKIQQAMHSLVTCVAAPVTSQPQPREENDNDDERPGPSSGGHGLGFGPEDYPLLSANQQNNSDTDSDDDNDDKRQQNSGSSSQHDGGSNDGPSDDEQSKKSKGKGKGKGKGKGQKNGEQQQQPTALTRGPLGGMGGRHGYKCYDTFIPGYNRAGQISSLQSMQSILLGSSEQVLYSLRLLALKAYTNTSYEDDSLQLMTRFTSKRHILSGPHQKNTQNTLTSAFKSYAMFGFIDNYTANLERKCRGGRIGIITNLMPNVRLGLAYNRNKEVAKEHIGMRFGTASGSVKAQTTTDSLSAVISWNTDKFGFTGHLASCYGWGKVKTNRYFTHGDSEVGAKGKPDISLGGGLFQLGYNLPITKRFSFTPYIEYMISTVSWSSYSEKTGPLPCKISQNKEYVMEQSIGLRNQWKVTTNSQLQSWVSAISGKRTLEGIHSKPLIAQIDRYKASIPTYKKRYVRTELGLSYEANIIDTINIGINTSVRLEKTKRFEGQQINTYIQYTY

SEQ ID NO: 10207 - protein, 379 aa, Lawsonia intracellularis
MNRTLVSLMAEVPVDSIEDEQGLIHVFPLGSFTARDGPPGTLGVPATSWQLTLSGAQEVIRRWETRKTPLVIDYEHQTYETKGNGQPAPAAGWITRLLLRENGMFAGVEWTSRAKEYIRAGEYKYISPTFLFDATTGEVLELCSAALTNMPALDGMEPVKAKTHTTIQLPKKKYSHTGSNPLQEKGGALHLAMEFCEKGETDLFKENVSSLEASATAFLEEIKKTQGQQKRSKKNRSVSTKSNIQQEASSDRFSELMGLYHEAQKEVVSLKERIKEYECKEESLKLEQCIEKALSDGRLQHSCEAWARACAVSYPEVLRAFLEASTSMAALVSMQTRQGSHISQSGYGQSALLSTEEEHVRSQLGMSVETFIKHKKECQ

SEQ ID NO: 10208 - protein, 287 aa, Lawsonia intracellularis
LAATHVPSSSASNTYGWLGQFPKLKEWIGNRVFQDIAEHEYTVANKLYEATVSIPLTAIEDDELGVYKPLYLEMGYAAAVHPDELVFKLLAEGHTTKCSDGHNFFDTAHVIYENEDGSGAETTVSNSLSPTVSGVKNVVVVVDPVAPWFLLDVSRPLRPLLFQERSLPELQVITNPENEHVFTTDSIPFGVRYRCNAGYGFWQMAVRSTEPLNAESFERALMTIRSFTADGGRPLGLGRGGKEGLVLVVPSVHLSSARKVIVAERLDNGSSNIWYDSATIIDCPWLG

SEQ ID NO: 10209 - protein, 149 aa, Lawsonia intracellularis
MYVQYKDLQTQFGEAEMLALCGDEDGNIDMPRLTEVINQASSEADSYLGKRYIVPVEPVPPVLRFIVGDMVRYRLTSAEALETSLIVQRYQQAIAWLIKVSQGEIVLPLPTVNSEEQMVVIDAGTRLWKVTGARYKKAQETPLPARLTI

SEQ ID NO: 10210 - protein, 214 aa, Lawsonia intracellularis
MLSQIEDAMITCITKAQLPYLRFVGSYGGEFDGEVPHVVRSLPGIWLAFKGESAPVAVDVTHERYKVEARLLLLVAARGIRNEADSRHSTKIHVGTYQMLADMRSIFAFRDLGINSVECLVPGETTSLFNGKTKQQGLSVFAQEWIVPYGFYVREPGKRQLDEPYSGYLMPEGTMIGNTQVPYLPPLQRLKLCYYIGGEEEACDQALLEKGRTL

SEQ ID NO: 10211 - protein, 471 aa, Lawsonia intracellularis
MASPNIQFDAIPVNIRKPGKYFEFNTRLAVRTLPGNPQSLLIIAQQTGTEPCEPRRIFDADTAGLLFGFGSQIHSMVLAAMHANPYLDLTVLPLADPESGLAATAVVTPSGEAQSAGVVSITIAGKTVSMALAKDDTPSDCAVTLAQAVNLVEELPVVASVTESGVLTLTAKNKGTCGNGITVSVQSSVPGMKCTLTPMSGGQGEPDFQAALAKVFSGDYTIYCVGTTQSEHLKALSDHLASMGAPLEQRGAIGVYAFAGTLEDAITLAESTNSGRLTGAVLPGTPSLSYEVAASYAATIASEEDPARPLNGLTLKGIIPSPISQRLSRTQQEVALKSGVTPLEVGTGEVVSIVRAISTYTKNSEGSPDSALLDITTIRTLDYLRKAIRERMSLRFPREKLSTRTLPKVRSEVLDVLRKMEELEILEEVASNAEGVIVERDIEDPNRLNARIPADVVNGLHIFAGRIDLIL

SEQ ID NO: 10212 - protein, 129 aa, Lawsonia intracellularis
MALQQYVGAIILEVDGQEVECTAFSPTITTGRIPVRTMNRNGKIAGYASGVMEYELKVEVPVVSDNQIRWDGVTGAKLVIYPAKDVTNAAGQGRIAYTGCVVTSVGEAYKVEGEARRTISLFATDMIEE

SEQ ID NO: 10213 - protein, 107 aa, Lawsonia intracellularis
MEISGQLEIGYQDDQGCFHKTFTMRLATLEDIEKAIEAAGIGASTARIRRYEWARTLTQLGSFKDEAITPEMLATLASTEFGILEDAQETLRGKLKAVSNASKNTEC

SEQ ID NO: 10214 - protein, 289 aa, Lawsonia intracellularis
MKNTNALDTITLMDENQKEDAKLHPGSALDIERVVAKQYFPLPIEDYSDVPFERIENTQPSDFGDATIHNKYNKQVKEASFINTETYSRVSSLSSEPLRNVVPRFSFDFSTSMDGSGYIKESRLSPYKEYPQLAPTPLLYNEVSMVQATTENTTNSQHPLFTEQQCQLPQVTTSPQIALVMPHEELDYVPISKNSSMIGNNIDYTTLKSSFFSQEDRIVDKYTSDRDKENFIPFLSQTQNTNTLFEDIEQSSNTDALEQQIHLMTTIEIDGQVLGEFFERYISNQSLRT

SEQ ID NO: 10215 - protein, 421 aa, Lawsonia intracellularis
MGWNTDLLDAQFRGIPFYVQSITDKGSKSLVVHEYPYRSGGAVEDMGSSARTIPIRAIFWGENYLSNLQKLIEALEQPGPGELIHPVFGSVTVVIKTWQIDHTAQHPDYAEVVFEAIVSALDTNFFTHTTQRTQAEQSSLTAKNAATVLLEHSSQHVTRHIQTNFTSPRVQSQTMQLLMDILDFYDPSGDVPRSTTIFVLHPEAYLAELLAVQKAILEHIPVSSVMKGFPYWSDCFPKITPSCGMKTFEYNEKYPTGVGNCSVQWTSNGSPGVHPQVPSLAIPPNSTIEKYVVQDEIASGCDVSMSSQHIIAIGIILHVILSQTALAILTASQLFLDECTTPTLTPLQLDTIVGNIRARIQDCLVAVRKNVPTQDVHGFSEPLRTAAEAIQSLGTIALNIRPPLITYTVQHEESLHLFIST

SEQ ID NO: 10216 - protein, 343 aa, Lawsonia intracellularis
MNTVTTIRDVCPTLCVAGHMHRDWLRYSVDSGFFTPADGWSVSLGLPDGKLPSWLALWAEVELAFDGIVALTGRIDHIRHSVNTKGHSLELAGRDKAGILLDCSAPIFVTQQITLPELIATVVRPLGIDTIDVDTLSTLLFQKSTVEPGMTAWEAIQDAASANGLWPWFTPDGTLKIARPDYSKAPVACLNLRCSGVGNNVLELSVTYDISKQYSTVTALSQSQGNEISQAIPILKSVATDSDTPSRPLVLRKGHIDNTQFLTNIAENIIHEGKLCSVTVMAKVQGHFVEPGVLWEPGQRVTIFSEPHEIDETFFLTKRTFIGGRFGTFTLLKLQQDNVWLST

SEQ ID NO: 10217 - protein, 198 aa, Lawsonia intracellularis
MSFYDAVNKQINKALVAVRLPFRARLTKLQTKTPLQLVQGEGLSQEQLQSVELLQQFGFTSGVPIDSQLIVLPIGGKTVHSVIIATENTAFRVHVEHGETAIYNQWGAKVVLKKEKIVEIDCEQLQIKATKGITMQTESFSLSASEAKMKTNLHVEGDVSLSGKLESDGDQVAAGISLLQHTHGGVESGGSNTQPPSK

SEQ ID NO: 10218 - protein, 231 aa, Lawsonia intracellularis
MTKAEKVYTGLCGLFSILIVLSNLTYQKFVALPILPFHTFEISVGAILYPLTFLLTDLITEFYSKERANFCVKFAIIINIVVAGILMFMDSLTATEWSKLDNDTFHNVFGFYSVAFIGSILACYISQAFDIIFYLWIRKITKGKYLWLRSSGSTSISLLIDTSIVISVMSLFGILPPEQILPLIGNSYSWKLFFTVSMIPVFYGLVGIMRFTLTGKKIRIQTDPISTTTSI

SEQ ID NO: 10219 - protein, 128 aa, Lawsonia intracellularis
MINAISAITPVRPIDPYPQNILTNECIYLCELPRDPSTNTIPETIEEQTQQVMKNIEASLAASGLGFHHVTKVSITLVNPSNYKLVKRIYDHFFLGYNPECRFHAASMLREHSQIEVEVVAVKTNDPM

SEQ ID NO: 10220 - protein, 330 aa, Lawsonia intracellularis
MCIIYFVIPRHHQAKWSNQLKKAAKGECSIEEIAPELTSGVDVWLLQTWIILSHLSDTKGYTFKIVEHGMPDAISIFHYDHAKPCYGLFNCYPIVVQADRPKVPYSGIRIIQNPAIPQTQRVHYIPLWIQPGLIPRNPLRGTTIERISIPGSAQYLPPAIHSPAFIQRLKDINIKLHVMNAGNWMDYSNTDLILAWRPKVSKYVLNTKPPSKLFNAWHANTPALLGAEPAYQALRKHPDDYFEVQSTNDIIQYIQRMKQHPEEYTRILNHYKIQANTFTRQHIIDKWFSLFNIAQQAKQISTKATLKKLSSYAYRKTYNQLLKHIKIWDD

SEQ ID NO: 10221 - protein, 313 aa, Lawsonia intracellularis
MKKNACIYIAGHRGLVGSALVQTLQSAGYTNLITRTKEELDLRNQAAVESFFATERPEYVFFSAAKVGGIQANNIYPATFISDNLQIQTNVIQTAYTYGVKKFLFLGSSCIYPRDCPQPIKEEYLLTGPLEPTNEWYAIAKIAGIKLCQAYRKQYGFDAISIMPTNLYGPRDNFHLTESHVLPALLRRFHEAMVNNLPYVTIWGTGTPRREFLYVEDVASACLLLMEKYSELEPINVGYGEDCTIYSLSKTIADVVGFKGEIVTDPSKPDGTPQKWLDISKIKSLGWKPTISLYEGIKKTYNWYLQHIINNNI

SEQ ID NO: 10222 - protein, 452 aa, Lawsonia intracellularis
MAKTKERLQKATQDLTLRVPPHSLEAEQAVLAGLLLRKSIAPQMAIDLQAEDFYFPQHQILFFTAITLYSQNQPIDLVTLAQKLRDKNQLEAIGGASYLSELVQLGVSAANAEFYAKIVHEKAIQRSLIEAGSSIVTSGFDTTQELSTLLDKAEQSIMNVSARKNVGVFKPVHSLINDLLNTAMQPATHGVTGLPTGYKALDQITRGLQPSDLIIIAARPAMGKTALALNLAMRAAITQKATVGIFSLEMSDKQLIQRMASLWGKIPYDNLCSGRLSPEEGERLFQTTELLNNAPLYINETPALTMLELRSQARRLKIEHNLDLIVVDYLQLLRSPRKADSRELEISDISRSLKALAKELNIPVVALSQLNRRLEERADKRPLLSDLRESGAIEQDSDLVMFIYRDEVYNKKEDNPKKGIAELIIGKHRNGRTGTVELSFLPRYTAFEELSK

SEQ ID NO: 10223 - protein, 386 aa, Lawsonia intracellularis
MVGYFMKRALITGITGQDGAYLAEFLIRKGYEVHGIKRRSSLFNTDRIDHLYQDPQVENRKLILHYGDLTDATNLIRVIQEVQPDELYNLAAQSHVKVSFESPEYTANVDGLGALRLLEAIRILNLIDKTRYYQASTSELYGLAQEIPQTEKTPFYPRSPYACAKLYAYWITVNYREAYGMYACNGILFNHESPLRGETFVTRKITRGLARIALGLMSTLYLGNLDALRDWGHSRDYIQMQWLMLQQDKPEDYVIATGRQISVREFVNIAANELGITLSWKGSGVDEQAIIETIDATKLAQMLRRPVSEAPLKVGQVIIKIDPRQFRPTEVDSLIGDASKAQQKLGWKPMISFESMVTEMLQEDISLATRDAVCKIAGFKAFNHDE

SEQ ID NO: 10224 - protein, 108 aa, Lawsonia intracellularis
MNNNFSKNLGLIIRAIRTKHKDEIVLDRLAELSGLTKRYIQMIERGERNITVINLFPLANALDIPIIQLIEYLNYTLEHGSLPDFLLEVLPIKKVGRPKKNKIRNTMS

SEQ ID NO: 10225 - protein, 124 aa, Lawsonia intracellularis
MHCNVKFVNKVCSARRWFSICVILTVLLFLALVIFSPRQLPVIHYKFALCLLAGLAGYWLDRVLFPFANPSGYLCEDWKEHINGCQTGRADYPIVIEYQKSFCTAMLRQAAIVVGTMLAVSLGL

SEQ ID NO: 10226 - protein, 321 aa, Lawsonia intracellularis
MSPTSPIISIIIPTYNMEPWITDTIHSVLKQSFSNFECIIIDDGSTDNTVPTIQQIHDPRLHILQQTNQGVSAARNTGLSHAKGQYIAFLDGDDLWDSQFLQIMLNALQTSPGSKLSWCNTVMFMDVTYKKKPQPWGDIHKTGNIWWDFLQHTYFTMGAFLVETQLIKHIGVFDTTLLVGEDRDFILRILAYLYSKSSSFTQVIHIPIPLKYYRIHTRNSVKKYASQALQDEWYYMKKHIEHPTIPEHIKKKSYSNLAFKLAVIAAFGTKNISSALSWYGKAIKIHPWNLNLYLLPLKKCLLSLMPQLKVNIPGSLKNYLQ

SEQ ID NO: 10227 - protein, 353 aa, Lawsonia intracellularis
MTYSSSPEISIIVLTYNQHASYTIPCIESLLQTTPNNCEIILVDNGSTDGTVEWMQQLSYPHLTVIDNKKNLGYAAGNNVGLKKAKGEFIILLNNDTLLPPGWLEPLIEPLKHNKKLGLIGPVTNRIGSPQQIVLPGYLNNTNNRSSKKPIKPNDSWEEAAIAYMNHQKGTLTYTTMLCFFCVAISRQCIETVGLLDEQFQKGNFEDDDYCIRVKQHGFQIAYTDASFVWHYGEGTLSQLPSRELSSIWFKNQKYFKEKHGYLSLIADRANNCLNSIQKALEELNTETHFDHIIIERCLAHLPYLHDILTQLERLEKESRTIKGTLLRMAKHVDAAYFGSFFKSMLYNFQTKQ

SEQ ID NO: 10228 - protein, 116 aa, Lawsonia intracellularis
MDAELDVRTGDYTSHQINTLANAVYIRLMTPLGTWWQDITLGSRLHELEREKDVQRVRILAKQYAEEALAPLLKEKRAKHIVVSAEIPTAGQCTLYINVEDATGRPYTFSHTMRVS

SEQ ID NO: 10229 - protein, 238 aa, Lawsonia intracellularis
VLTSETASHGEQLQVMQVVACQAQKPGLIPSCQDVLAKLVAPPIGIDTNVLLTITGGSNVETDASLLARLLDYMRDPPGGGTALDYKRWAMEVPGVSKAYVYPLRRGIGTVDIVITGENGTPSTEVITMAQSHIDTMRPVTARSAVVFAATPFIVNMEIGLTLSGSETLQTILPVVKDALQHVYNDYEPGSGVVLSHLIAALTSVPGVSDAVIISPESNITANPVKIPILGEVRLRGL

SEQ ID NO: 10230 - protein, 188 aa, Lawsonia intracellularis
MSYTELLSKLLPIKSYNPLEKRLALSLHVEGRILDQAFADCTSVVGGLEPFKNQQWIANWERIYALPGKYFNKKMMYQERIQLLVLAFQERSGISRDWLKRIALLVGYPITISEYRPFRAGSQVGEKLTNTDWLYAFTVHASGNISKRFRSGCSKTGEQLSVWGNELLESVIEKYKPAHSVAFFAYTD

SEQ ID NO: 10231 - protein, 480 aa, Lawsonia intracellularis
MSSSISKYFPPAFKLIFFVELWERFGFYGIQAIFVLFMIQDLRMSDATAENLFSAFIGLAYTFMFIGGWIGDKIIGTQRTLLAGAITLLCGYLILFIGTNGTITMALSIIIAGNTLFKANPSTLIAKIFPYEHPKAESAFTLYYMSINLGSFISMLIVPYLYTAFGFHMAFGSSVIGLTLAILAFIIKRKWLVGLDSPPGFEPLSLGDIVVLLSIVIGISGISMVLLSHLYIAYTMLYCAAIIVLLMIFREIKLSNSQERKKLIVCLFLIVEAVGFYILYQQMPTSLNLFVIRCTDHMILDFPIEPAAFQSLNPVWIIAASPIMAYIFSHSAKYVSLPSKFAAGMFCCALAFLSLGVAASYTQSCEGIISGNWVVITYFFLSIGELLISGLGLAMIAKLAPQRSTGFMMGAWFISQALATIFGGFIAAQVGIHPEMNIPTSQLTNNYAALFLALGSASLFGTLCMAAIAPTLTKKLSLKK

SEQ ID NO: 10232 - protein, 8746 aa, Lawsonia intracellularis
MSIYITKYVINTFLSKWRAIVALFLCICIILNSVTVTISADKDSEKNINSSKENIAAPLGESGNTEDFQQAETSSNTQQPQVPTSPSGMPVTSGSQVVLDLFSPPPPPPPSSTIFSPSFLCAPLTLYGPPAMSYIPIPNMGVRRSYSSPDINCNFERKNEHEKSGSLSVPVLLEKCIYDKNSESKRCTNICLTIESIIRGHEETVKQKEKKKKSKKYDKRNIKEQQRRIEKRQQEEKVALLKQYEEKLQALQSQQASQRLEALNNGTDMYTLFSQQYNEEQDCHREKEKKLEELLMLHKQERDIFFIPVSDSTEKGTVEGRQEDYSDINKDRRHSTPSIPVTALNIFIEDSSKSTPGRLEHQDSYSNISNEPKSLSSDLDVYNNRDVVSSIPLSLINPDEEATVEVSASESLTETSIQVGPFPSKTSLLKYFNRVMNEEGFGSIQKYYRDDLYLPGCAVYQTAKKEHKRKHSGIRLPWLKRFNLSSKTKTDLQDESLQESSPPKSLREDGIYPPLLQHKRPSVYYTKEVGAGDDTPHSLKHVKYRKKRVGGILQSPEIPDFCKIEKIFRSLPSSEEEQESELCPSGPQGKIYLFTLGTQGSEPGYCIMRDPFESTSCYYPSGSDAKSESSEQGFYSSNLETENNTFLFNRVSPPEELQYGKKKSTLPLQKRTSCKKNKKWKSSYVVDDKQRAQSKMELQKHQYYITDCLLRLEKLHKHQYEVAKKTGDDLCSLEKKQAKDKERLQATLNEQYLDLLTKHQQLIARNTHPSEESLSEISEGNIEDAESSESDLERKHQAKKKRLNKKLKKLLVENYTIGRNHRQSVEETTTKIDKRHAQERCHWTTKKGPFSQCLMLQTEELWAFYNEKEKEREKIEAEKKENLKKYKQEKAAKQSYLGWLFGWKKAASESEKEKSSSEDFKTSSDSELEIKEVVSLSDKEHSEFDHSDNYEYDKSKPKCYISTKERNKRHKKSLQRDSRLTAGLSLGAPRQIMYQDKKDEKSDDDKKVSQGNESPQVTKESTVDGKKEVSAFEENLKSDEGLSVGDITFELSVLSGATGGDEDPLGKDKGSHEQEKEQKKDQKKWSDKKKKKWLTFKADQKKCPILTKEKYWSICCDNLLELHNRHEKEYKEAEKNASNIELLLEKQSQEQECLRSELEELWKQTREAQASSSSESSGSIVSSDIRSRGGYDIESDVDQETSNKRARDKQISKLQKKQQRERKTLLAMQRTKQEQLDEIQEERRRKAKRLGMSLVELNLMQQEQKEMLHNQQQQQVNRLVERQRQQMNELLASLHQPTMSESTMYTSCYSGIFGYLFGWGSQKVSSGKEENDVEQTPEKITEEKVKAVAGIGTLGSDAELEEGIFSDGADFSSTILQVMSDSELSNDIEQVTEQVEYKGVVSRGSECDEIGEPMDESHVPEKIMRLFERATFVDKDSSSGKEGDFSSEERKSSSYRNRYYGVEKRRKLRKIHLKEKAQLEKQLKEPEEKIRLQLEQRQQERRRKNLMFGYHISEDFLDKLEEDEYKTSFEPFNKLRAELEQKQAQERLSLQAALKKEFEESCQQDSEDISDPEVKQKKKEERDLLVALIEEAAGDIQDVEESEEEYIIEWKKNERARRAALLASARESGKPLCFQFTAQSSSANAASSMHGSHPETQEGQSSDKASATTVEPSNITCPGDTTSTALTKETSSVLLQSSSSSIVTSQDPEEIQHTDENKQDTSLFDGENRKKEQEKDSTPLGTGVSGGYHDASDHYGQGRAGEGGGGNNDPPVPSDSTQPSSSTSSTGVQTCQSSLIENAQDSSLQSSLLGYLLPSSITDKNISTKKSTLKTEGVDQSVSSSRCPEALTASVTSLFSSSYLKVLFSGWGVTNVEAAVTSDPNESKNKNSKDIDILGENSGNTSIEGNQDSLSDSDGSGQSPSGATGGGSGESLGEPDDDKDKKESSGHKKKKKKKHKRKKKEQGTSTETQTQEQQNKESQTSSSHQCEQITSEDSQEEKEPLVKKGGQDGKHDKDNNTVSDSEEGAWKHHTIIVKGDRKPEGNYAPPPWLTHPLSLLTGSPVLEGIPLSLEDELECGFAIDAMKLLDEGLEESASSSDIFLEGVIEGAIGSSKKAQHISNQYSILKQRQSEAVKALGRKHKQQLEELRESQLQKKNKTLRKNIKDYKKKKKELQQKFQEEMENADQETKEKLETICKEEVNKLYLTCKEDSEAQACSLYRKDGDQVEVLILQQKEEYEKLLQQQKEERKQYRGNKRALLQSISSTIGLQQAVVQQHEGTAAVPQDTFDSQSQGTTNSSWMFLRLDFSDNGEGTDNMFPFDPLPREVQGASFTDATSEDQDVDEIAQEADEDLDSNGNSSESGDLFDFSDGDYEDDKDDDLIPSWFPLHDVGISYGDAKGKGEEEVIGQPSSTTDIITGAIGGADVVSVIASSTASCGGGEEEVVVKSKEKEKKKKRKKRKKRTTEEYDAFVEKQRQYIEDCKRKYNAAYECLKAICKEEHNNATSLEEQQELAKQHERKFGALSHMGMAQHLFLQEKLGKKKKRWLKGEDVSSEEECSLWCNFVFEPRGDDSDTISSEDETNVAVEVIVDAGTNTETDTKGQPKEVRTGGENDPLEGESSGTVSSKSKELQEKHECEIQCFWEEYKEQLVTLHDNQEQRLQKWINDGKPEHDLKNTFGEEEAALHQTQGCFLKSLQEKHKREEEEERRQKGQEDSGTSLEQPTSKSKSKVLQEKHASEMQCFWVGYKEKLTILREKQKQHHQEWVESGKPEDELKDTFEKEEEALHQMQKCLLASIQEKHKREEEEERKQKEQKDKDSESSIIQGPLEEQNEETPASRDSITSSQGDTPHRENTSLVTFKELGVESGEEEINKEDKKDSSEEQTSESKSSNGLLQKVISFFQSVGSSFNKEEGAVGGIVTESCYVKSKELQEKHESEIECFWGEYGIQCRLLRDFQDAQRQSKGLRNTAEALENQLDKEREDFRKKKKKEWQNLQEKHKQEEEEERRRQEEGQPSKGGISGAKEKESDELGDETDGEKVFSLTFFGPPTQFDDNNAPPPFPYDPPQDSPQNGEDSSEINPNPEGSSQQESPSESSTEDTSSSSEDEDIVTLLSGNIKQARPIGQSTITTTTTLVTSVEGAEGLFPIEEETEQNLEDVQGSGATQGMVGLSTIEEEVEEAPGASEDLDSNQGATGEVSSPGSKEEVVYLSSSGERAIHKWLESSISMPVTMEEGSLSQGGGKTSTLYSLMVSSGILSFGGDGNGEKASSSNKQSKRSPEECKAFEEKQVQQRHNLLQSIEEKKKELLLTFEKQCPPGLPSYKKDKLVKEQKVTMEDFLCVSCYQYETLEQKQNEQRRRWEEGEDVAEEEDLILLWDTLDNEAEEGTKEEHAEVKVEGVEGEVFDGISEEDKPKKDDKEEQEQKATLGDSSGETIEESQQPQQEEEEKKENSPSGSNESPSPQQEEESVDETSSVVTSSPLLSINEVKQTEDKSAKKKRSEKELDDFNRKQAEQKDCFLGQVQQAKNELEEKYGEACCSASLDELLELEKKFIKQNQKLDSTSEAQFKKLERRQEDKRNRWEEGEDVSSDEEICFIWSSDESYEKSDRLHEKHTQELADFWRNYKKKLSTLKEIQQERRDQSSEDSKEKQAMEEMFLAEQEAMYKSQMNTFAELKQQQKKEEELEELGWTLENMQGAVGGVEPEDEDKIESPLDRKHQQERKSFWEKCRVDSKFIEQEQSERRDRWRKQGKPIASLEEIFIEEQQAVFETKMLFWESLQERQKKEREEKERREEQKRIAELEKQLSPFWKAFKDDQARMRENHDMRRKEWEESGKSLVVLEQLLAEEEEIFFQDKMQMLEELERKKYFEEKQSSRQKERQGRFSTKDDSDEDEDDIRYHTVFVQGEGEPPGNEAPPPLPFPPPVLGDSGEMQSGDTGGAGPPSEELSLGNILSSSDEDDNIIVSSTESSSSSSSSSDESDVSSFETSSDEGPDCVDGVYGAVGGEEPEKKKGNGYHKKKFKKVKKKLHNVALNQKLKKLKDKLQQLEKEYHKSIADCQNRYQDVKCNLLMAQAEELIGKSREEQDTLCKKNSEKIKKIEDGYRRQYEQLTESYYTKKQVVLNKLSAVMEKKALLKQKIQEYDSVDGKHRVSKGYKKKASKLKKESKKLEKELEALKEQQTKELQDFDQKSDACRQQILFFQKEEVNSIKDAGGDLCALQNKHTEEDCKVEELFTSQKELLIKEHESQRNEKEKRKKELEKQQQATREKDTPTCYEHGIDNIVKLLEEEIESLEKELEELEEKQEEEWKAFELQTEACRKQVLFLQKAKPKDSAREGGEEDRRAFESMVASQQELLLKEQERQRTEKLIRLTEAKEKRKQHKKKQQQKQEEKEREKQKKKQEQVKREKERELERQKQQLKKEHVQDRKCFVTTFNFCKEQLQRLHQENLKVVHEKGSDDTSLMQEYEKEKECFLTAQKSQYEKLLHQQRQEMKTLIQGSHGADVSSSQKEHEKSHAKTLEKLLQRQESCLKQLEDAQKQERQEAEKLGKDLSKLDEKHRKEKEDFFDHHKGILEQCLLQNLSETVCLLGRDESSSDEGSFDLEGFYSPDRCMGRVGEPIFTFVGSDFVRSQEASGIYPLEQQVEAFDEVDTGRKKEEDSYTDKEKKKKKKSKKERKLESELEKLKKEQAKAKSEFEVKVTSCREELFKSQRDEFVTAENKKQDLKALEKKHEDENVQFTSMCEEQFQILCKNQEEEKVRKEQELQKAKEDHKKKKEKKKEKKEKKKEKEISKLQQQHIKAREQFLQSYKNCKEKMEMLDQEELLIVEASGGDVEAKVKELQAQAEIFFKIQKDQYKLLFHRQEQEMKALEASFYGDEVDAPTGARSIEEFLVDRMLKPQLSEDSEEELKPLEDPSTFYNPSKYGEGSFIFFTQLSSEQTRDQYGSDDENGFRYHTVIVQGEGEPKGDEAPPPFPFYSFVSGDSGEMQSGDTGGAGPPSEELSLGNTSSSSDDDIITSSIESSSSSSSSGDEADVSSFETSLDEGSDCVDGVYGAVGGEEPEKKKGKAVDDVDGGRKKEEDSYTDKEKKKKKKSKKERKLESELEKLKKEQAKARSEFEVKVTFCKEELFKSQRDEFVTAENKKQDLKALEKKHEDENAQFTSMCEEQFQILCKNQEEEKVRKEQELQKAKEDHKKKKEKKKEKKEKKKEKEISKLQQQHIKAREQFLQSYKNCKEKMEMLDQEELLIVEASGGDVEAKVKELQAQAEIFFKIQKDQYKLLFHRQEQEMKALEASFYGDEVDAPSGARSIDEVLSSEDSEEEPKPLEDPSTFYNPFKYGEGSFIFFTQSSSEQTRDQYGSDDENGFRYHTVIVQGEGEPKGDEAPPPPVKLRVPPSLTADLEDVGDGNTEVDSRCFNQGVTSSGISSSRSSFTTEEGSQGSGSMSSLVRLQVSSSLITDLEDTENGNTKTGTQQWLGNTGNDNSCNESTQYTDNSSHHSSDDDGTDGHSNDNINGAEGGSGAAGGSGGAEGGSGGSDDDNNPPDDNSSNEEEEEESILLVSETDLTDTKAEDGDSEGEGGIKDQRKKRKHKKVSKRKQRQHERQLLEKKSLAHSQWNEKKKQQEKQRNRALLFSIQRKEDLSEQIRKEEREQQEFESNQHHERILLEAKHKRQNAEHSTDSDGEVHFPSKRPKKSHKKKSQQVGKQSSQVEQQVEKKDSKKQREEKDVPSCLLTDISYKRLLSSSQQEEKIHCVTSQQKEKEELQKKQEKEKEEYKKEAAKVQKCLAKLSSQQQPGASRQQKQEEEEILQQQTKEGNQYILKSKVKLNNKQLAEKDKLIRKHQEENLKLSKKHRKEKTEKEKKRKKKEEIKKKKHTITPEEKELQEYCSGRRRTLYSMQIDERDLLEEKHKRELGQILDMEEVEVLEEQHEEEVKELFEKQSKDRGLLEEQIKILLQQQSSHTTSGDEKKECVESSDEFDSIPSSSTYYDSTSSSYSTGDFYSSMPSGEPEVEIGIEIDENFGVGTSENSNNTQDETHRPIGGARKYQPKEYKDVSDTSKKQKKLTRSTPKLMLLSKKEKEALSHNVTQSYHNIYKKIRKKEIELEDVLRTEQEKDRRGEDADYQLILLLKDELQHLLSLFEQTLEEERQALAAVDAMDEQTELEQQSIEESENKKKEEPRRKSSLLERIFKRKQEGDEPSKKGKENHHENQKRLEEEPLVGLKKRPKRTSTTSRLSLTLTSIGESKIPQCEKSDESNLVGPVVSFFKKELRTRKSSMIHGVCFPQTGGVLQSLDVNSQKNLVSRDDSKKLESSGAPGGGDGSGDDSHFKKDKGSKRDGSSDSKKKKKKHSHKRFCRKRLAHERNKLRRKHQEEKELYKEQFTRGVQQVFALQDKERAEVAKKGGDLEALAERHMQDEEEHYVRNRREVADLHDKQNKERCRLYLISKGGGESANTTVTSDESSVSEILESGSEAAVYKEPVTQEVEELRRQQRKELAVLMFCCEDEKTALQTMHEKNKESLVGTILLETLEKVHKQEEDDLAAEHQKKKEELLKKHKQEQKDLENKHKRSSSKRGPKRKLHPKVKAVLLEHKQAKNRQKIIHQNRKTHLEKKQEEEKRMISQGQVPSVLLKKVSEYHGGQEGTSLVELVALYHEGEMSALLDEQKRQREEREKRQRQDLIRAKVGAFFTQRTPSVRKKEGLSLSQSSLHDSSPQKYTHPSHKTCGRLAAEQAIEKGFFENHKANCSFILGIEQKKELKQLEEECEKELKQLEEECDAAYAIFLQQLPFLCDEDRQTQEQHFVSQRQQIEKYREQQKEQLTCLQHKHQQEAKELEKLLEVQAKELEKRQKEERQKQRDVVSSYPERKAQQERLITQSKHLTALKEALSEEDSIFQKDLTSSTIVKQQLSKVEQQKELEALQEDFVLDLCFTESDYTSVSEESSEESSVPEGISRKPHGPSGGGFRHPRREISSSDSDTEGKSDDQSVRRIEQEIQTEQTGPQGTEESQTYAVQQKTSQFVEVKEEEIQVLEEKVQIVEERGDSDKEKVLTREEKKRKKEEVQRKHEKELNLWMSQYETTVQKIEQKYKEKKANRHILGCTLEELQEQEEKESKVAVGNFTVLLEKMREKQQKELQQFPSSDEDESDVDRRKKKKVIKTKAERNAQREQRKHHHTPHPYHPEESTSHLVLDTKQIVTLTPSSSDQETPVQSKETATNETPIPSLPSTVKGLTLEEVTVTVLPQPTQLSSLLSYFSSEPLQEQPCQVEEQQVSFESSQVQASTDEATIDPEVQLVLDEYSSKVACLQQEMDKKLQEIEEKGTDSSASSDTEWSWPKKDMPREIKTLKGSDSEGKDQQEVPKIPSAGAHSLSSMAESEDVGAVSHIEKKKRKRHKKHKRSQREKISRAKRALMAQYFAKVTLLGQECSEKVSEIQEQKKQKCEIEEKQRKEREEFFDQHQAARNALLAKQQQELIGVAPEEVGPLQDKHRQEQQAQSRQWGLNLHSLIKQQRKERGLSSSISSSSSDEDIIDEGSQSDDQEDSKSLSSPISPPPSPPVSGADSQCIGGASSSDTDATMKSDGHKSPEVPVSSDKKEETGGNQSSKVTTYLLSVFTGKGGTAAGAQSSSSEHTGSKRQQPSGSDQTSKSSRQGPSTPFEGQGTSGVEGASGGAGDPGDGEDKKSKKLDDSHGKDQKSSLKKHKDKKKHTTEEEEAKKRLQEKVEQKRKNRELLKQKCKEEEEAFLRNREKCKKQFLQEQEEEYEAARQSGKDLELLLVEQRERQVEFYNHHESQHAKMKKKHEALLKGKRKKKVKKYGTSLEEQQAKERAEARQKYQKGIEVMEKRQQEELDEASAQGKNLEDIKKKHRQEEEDFYREQMLGELGNLLQRQNQERQSVGLPPIEGSSSSGVTTYSDTEYSSLEMDLETKEEVYTSGNESTEQEVVTEQEVVVTEAEEVTEEKLLVKDESFSYQGSLTEYLSQAIPEEVNKPCIDDTSSSTSTTGRKSSFFEKFFSKVKGRKHSQEETESKSGTGSTASYGSKSSTTMQKDEVQQHSDRKLKHKQKKKRKKEKQLEEKHQQQQQDVYKDFKKRRLLMETRHQKELEEAISKGEDITKLQEKHHEEASVQHPLLFSQAMSVLREQQKVERENLIVSSGDSDTTSDTSDLEETGVSSKDHSPEKKGGKDGKPDPDGGSTSSSQYQGLVYYVTADSAPVFPYGSEASLPFSSDKGKNEGKQQTLQCGDSGYESDNQESGDGSGGSSTENQVCVSQESNSSLGGGPHSDDGYESSDENKNGKGSSGPQSVCCVNGVGATGAANGGGSSVASGVGSGNTGSSGSSSSSSGVSGNVGTPGNGGSSAGSPGGSSGSPGGSGGNVGGSGNSAPGGNGLVSVTSSMGNGSNPPDPNDPLTMSLLADDEDTLSDEAKEELLVPLDYNENAIMGSLDGLQQVLHTPAKSVQSAMSSLALQSRTGHMSPTKRFQAFASIEGEVSSQSGNQNAYTSQFGIVIHPVPNIRVGLAYNYSRDHTGDLYGIRSKKDIGFAKSKVSTHILSSMLVWNAEDSGFTAHIGISYGLGQVKNTRYISYLDDVIHTKGRSDTSILGGIAQLGYTLRLPKFLLTPYIELSTVNAWWKAYGEEYGLLASDISRGEERIWEKSMGLRTRWSITDDIQWRVWSKVISGQRKSKELTATLKAPFVPWETSTPDKKKTYSQLELGTAFDIQLSKQFGIGVNGSIRFSKKKEMRQQNAGMRFWYNF

SEQ ID NO: 10233 - protein, 493 aa, Lawsonia intracellularis
MVSYIRLLGSIFLVLAIFGCGAQFNKPSLLDETPIDYSSVLSDYIVELEKEPLQYILLKKEKFSQMEIYNYQFTSQHWSPDNFVSPAIWEHQVDIYIPHHPVSERALLIINNGINNGTFFTSPKAPTDFTPEVLEEIARSTKTVVIALSDIPNQYLTYRGDWRFLKEDESIAMSWSSFLQDPESRYTRPLYVPMVAAVSQAMTLAEKELQALKIKHFIVSGVSKRGWTTWLSAIADSRVDAITPFVIDALNTRKVLGHMYKTYGNNWPIAFYPYYRFDLDKQLDTVPFFNLMNIVDPYRYLGTPYKSRLAIPKYIVNASGDDFYVPDNSSFYYDDLPGEKALRFAPNSNHHGILNFTKQSLIPFVNRVQKGISTPVLDISTEMTERVQYVTVRFSEVPEKIVLWKAANPESRDFRYACRVRYMETPLHLSATGEVSVSLEIPSVGWQAAFIEATFKDGFVATTPVYILPKDIYPPIKIPPVHGLLCKFVHGRT

SEQ ID NO: 10234 - protein, 457 aa, Lawsonia intracellularis
MKKDLQKSTKHECTKAGCRNTMVTIEQLYNKDICVMVVGLGYVGLPLLMQLAHHFPAIGFDISKRRIHELLRKYDRTGEISSEVLDNTKASFSYNQTDIHQADIIIIAVPTPIDTYRNPDFTPLIKATQMVARHMRQGCVVVYESTVYPGATEEICIPLLEEVSGLSYLTDFTVGYSPERINPGDTIHTLENIVKVVSGSDKATTDLLTALYGTFIQAGIHKTSSLKVAEAAKVIENTQRDLNIALMNELAIIFDKLDIDTLEVLEAAGTKWNFLPFRPGLVGGHCIGVDPYYLTRKAEEVGYHPQVILAGRRINDEMGKYIAETCVKLLIKKNVLINKARVGILGLTFKEDVSDLRNTKVIDIVNELEEFGVTPLVHDPLVDAEDALKEYQIVIEEFSVFKQLDALILAVPHKIYLHLQPQELLSCFKNINSAVLMDIKGRLNPSDFTEDVLFWRL

SEQ ID NO: 10235 - protein, 185 aa, Lawsonia intracellularis
MITIHPTSIVDENVTIGNGTTIWHFSHILPFTIIGKSCNIGQNVSIGPHVQIGNGCKIQNNVSIYRGVTLEDYVFCGPSMVFTNVFNPRAFIPRMEQARPTLVKYGATLGANCTIICGITIGRFAFIGAGSVVTKDVPDHALTYGNPAKQQGWICQCGEKLPVNLHCITCGNAYFETTQGLLPHQ

SEQ ID NO: 10236 - protein, 389 aa, Lawsonia intracellularis
MEFIDLASQQKRIRTVIESRIQALLDHGKYIMGPEVKELEGQLAAFTGSKHCISCASGTDALLMALMAHEIDAGDAIFVPAFTFFATAEMPALLGATVVFVDIDPFTFTMCPNQLKKAILAVKHQDPSIYPLPVTALETELTPRAVIPVDLFGQAADYTRILNIAKQFNLYSIEDAAQSFGATYKDQSTCNLGCDCAVTSFFPAKPLGCYGDGGAIFTNNDKLAGILKSIRVHGKGQHKYENVRIGVNGRLDTLQAAILLAKLDVFPNELCTRQTVATWYTKELTGVKDITLPHIAPGNFSVFAQFSIRIGSDMRDIAAIYLAEKDIPTNIYYPKPLHIQPAFADQYYEAEDMPISTTCSHDILSLPFHPYMTQDDVKLVCNTLKEVLS

SEQ ID NO: 10237 - protein, 124 aa, Lawsonia intracellularis
MTYLAREMYMEHNQLLSLHSTSSKEKTICLGRQQNKSIYPINLCIAQEKRSSTIATYLSTISIHRQCITRLSPFNPLTIFVDTIFSQKKNYPITNYRFSIKCSLKANSSRHVKATSKGISNGIY

SEQ ID NO: 10238 - protein, 350 aa, Lawsonia intracellularis
MKQPIVGRKIKIAIIGCGRIAGNHIDAINHHKEDIELVAVCDSYAESRNNYSKKYNVPGYENLEQLFANTECDIVAICTPSGLHAHQTIVSANAGKHVMTEKPMATRWKDGLHMVQACDEAGVYLFVIKQNRLNPTLQLLKRAIDENRFGHINMVHINVFWQRPQDYYNSAKWRGTWEMDGGALMNQASHYVDLFEWLIGPIADVQAMIATLGRNIEVEDSAVLNVRWRNGALGSMAVSMLTYPKNLEGSITILGDTGSVRIGGVAVNEIQLWNFAEPKEYDDLVTSVSYQTNSVYGFGHPLYYQNIIDVLRGKAEPETDGREGLKSLEVLIAAYKSARDRITVSLPLEY

SEQ ID NO: 10239 - protein, 446 aa, Lawsonia intracellularis
MSLCFSFLLLSASLMVTSCLLIYIPPSKIMLMGISTYLMIISFILIGVIIQKCLRPINKLIQDINKSLSKTKIPSLNYYTCKNEMHILKQTTFELIKQFQNLKHELSITKETQKQHEIELSTIISSSKINEQKMAAKITHLETLPDKAVNVTKHAQEILCNLTAYLSKCTESVKMQIVKNTPSSISIEDLFTTINQNLECTVTKIQNSYKNSEQDIKNTTHAINSIEHVNINISSLQNIIILLHKRINDILLKLTLLDRVTNQTNLLAINLAVEAGKMGTPGKGFSIIANEVKKLSQQSMSTIKKIEQTLYNIQTQTEHITSVIKKINKYNTTHVNYALTSGKITLNFITTIQNTLKELSSLSDTIKEIAKTRVPLNTTNEEPDSTLKDCALSNTYTTLCELADVLKELDSTLHNTSKHNASKSEPITNHTVLPIPIATNNMHIAE

SEQ ID NO: 10240 - protein, 347 aa, Lawsonia intracellularis
MNKIDKNNTVPQTEVMATSKIIHPSSNKSQRHPLEKNIQHQQKISIEFRSSTGLPLEAPLEISSISLVYRGAILSECHLTENHNTDLLSSKKMHCFDNKLSVDILKYGMLFTNGTISFNVPYRHLNLNELSIIIHYRSQKPVKVDVLVIQNTQEYYFGELAVLKISSWEESHLAFNKNPIHISTSNTQPELLIDNISCINEHNENTLLIHTNEKFCFVIDYTLTNKNLFEQIKLFILLKENTTAHSHTILTQDLKFNPFSPIGKIITPVNFPILPGEYTVTLLLSKKGYYQSKKLPFEKGIPTTEGLYLTYLTYNNISIKVVEQSLEYSSHMAYSLENNEWSIFAYN

SEQ ID NO: 10241 - protein, 136 aa, Lawsonia intracellularis
MIALTTYFFILQLILFVVLSIIAVKSNIIVKGNLLIMLSATLLATIPLHYIGPRIARLYSNEVKIDTMLEFFIFTILFAGLIHLISFLFKKYIFKKFYKPTNDTLLSFIFANLYPVYAALFAIILFFWRKHDWFPK

SEQ ID NO: 10242 - protein, 293 aa, Lawsonia intracellularis
MVETRVRSSLYFILGSLCLGVIATIQVLVPENISPLLIGAMRITGGAVTLLLWGIFTHGLPTARYWPIIPTVCAALGLIAFQMTFFAGIDKAGISLGTSIPIGIVLLVSGLSAKLFYREKVSLQWIIYTILALIGLGCIIATSSRWHTNKEAIITASIAGIGYALFLVSSKVLVRFHRAESVMTVLFTISAIVLFPIFFIEPFSWPGKGSTVLLSLIQFAIITTVIAFSLIGMGLKNITLSVSSTLSVACTFMAVFLGIFFLEVHLSMQLIFGLILLLVCITMLVRRERRNPF

SEQ ID NO: 10243 - protein, 465 aa, Lawsonia intracellularis
MRSVNLLAFLCVSITFFGLLNSSFSYGSQEQLAQKELKQLQDKVVSILEEKCLSCHSYNAELPFYTKIPGIKQIIEKDFKDGLRASDLNQDFIEASKKGIIDEATVAKLEWVIENHTMPPAKFTAVHWGSRVSKEDEKIILEWVRKYRNTYYATGLASPERSNEPIQPIPDTIPYNKQKAALGEKLFNDRRLSHDNTIRCASCHVTSEGMADGKQFATGINKQKGHVNAPTVYNAIFNTRQFWDGRAANLQEQASQPPLNPIEMGSTSWDEILGKLANDKKLTEEFLAVYPDGWTEKNVTDAIAEYERLFITPNSPFDRWLKGDDTALTSDELRGYKLFKAYRCATCHVGKSMGGQSFEYMDLKKDYFADRGYVEGVDDNGRMAFTHDPRDLHRFKVPNLRNIEMTAPYLHDGTVTSLDEAVRIMGIYLVGMDIPKSDRDSIVLFLRTLTGQFNGQKVLGTPVPQ

SEQ ID NO: 10244 - protein, 698 aa, Lawsonia intracellularis
MKLGYKISAGFAIGMIMVVLMGIYVSQELGPSSKTMEVIDKETSQIIEIASNMLTRYQEAIYYMRGFYASRKQEDYDRCIKELNKAREYLSQAKKFASTSTSNQYLEKDINEIGKIFTDYDVAVKNLYSKSMDFNEESSKGTNVIHNVFQQYSQIVSIMNKQYANDDNALLYYSELGTLMMQLYLLRGDYSSALREQDIDNLKKSTQGIDELMNKLSIFKNRFRAEDMRNGLQTLIRSIGVYNQLLKNLVSMTEQSKVDLDYRRQLADALGEKLMKLTNDNLSKIQTEATYVNTRLQRANGLIFIITGILLLITIVVSFIVTRSITKPVTQTTLFAQNVAAGHLDQHLKITSTDEIGQLGIALNTMVDSLKAKILEATQQSEAAKRKEEEARVATAKAEEALKRAEQGRHEGMVTAAGRLEDIANVISSASTELSAQIEESGRGANEQAARVKETATSMEEMSTTVVEVAKNASETSDISSQTRQKAIDGADIVRKVIQSIETVHNQSRELKSDMAVLGDHAQSIDQIMGVISDIADQTNLLALNAAIEAARAGEAGRGFAVVADEVRKLAEKTMVSTTDVGNAIKAIQESATQSMSQVDSAVQNIEIATTLASQSGLALDEIVHMVDATADQVRAIATASEEQSASTEEINQSISEINHIATETARAMDEASQAVSDLAKQAQSLASLIHEMKNPIS

SEQ ID NO: 10245 - protein, 218 aa, Lawsonia intracellularis
MSRVSLIHGIDYNLPLSFLSNISFNIRKRIFKRLKSYIDFSSLEHVLDIGVTSYKDNAESNFFEKLFPYPEKIVALSKQNASWLEKEYSGLKFVYGDGCKLPFNDNTFDLVFSSAVIEHTGCTSQQQSFINECYRVAKKYVFLTTPNRWHPLEFHSLLPLIHWLPKPLHRKLLNLLGYKELSQEQHLNLLSTKELKNLCNQLQHIYIYKSCKILRLSF

SEQ ID NO: 10246 - protein, 478 aa, Lawsonia intracellularis
MSYMNTTWEKVCDSLQKRLSPGTFKVWIAPLVASEHDGQLFLYAPSLFVMNWIQERLFVDITEAVSEVSGGTMKVQIEVKSSVPDKPQVSLTDYNNKQHIPYNGFPNTKVSISRSHISSQTEQLPLPVSLVKAPFSSRSWRYSFDSFVVGPCNNLAHAAAQNMIKDTASVDTLFLSSGPGLGKTHLTQAVGQALCNISNRANPKVEYLTAEEFCSCFVQSLRTKNVDSFKGRFRDTDLFLLEDIHFLQGKEKMQDELLATIRSLQGRGSRVVLTSSFAPKELKNVDNRLVSRFCSGFLAGIEKPNAETRRRILIEKAKVHAVVLSEAVADFLAMKLVGDIRQLESSISNLVLKAKLLDCMISMDMAKDVIAQYTQDDPFMNIDSIIHAVSGSFGLQAEKLYSRSRKQDFVVARNTIFYLARKHTDMSLQEIGDRFHRRHSTVLKGIASIEREIQRKSPTGRQIANTLNLLERTNIHLN

SEQ ID NO: 10247 - protein, 359 aa, Lawsonia intracellularis
MFAKLENLEQKFIEIECSLAQPNIFNDQEQYRKLTKTHSDLKPIVTTFQQFKKLQQQLSENKELISDIDPDIQEMALEEIKKLELELTHLEYELKILLLPKDPLDEKNILLEIRAGTGGEEAALFAADLFRMYCRYAEKMHWKVEIMSQSDSDTGGFKEIIALIQGDNVYSRLKFESGTHRVQRVPTTESQGRIHTSAATVAVLPEAEDVDIEIRPEELRFDVFRSSGPGGQSVNTTDSAVRVTHIPTGIVVTCQDEKSQHKNKAKALKVLSSRLLQIKQEQQEIEQADARRALVGSGDRSERIRTYNFPQGRVTDHRINLTLYSLIKVMEGEIQEFIDALSTHAQTEALKMQATQIAS

SEQ ID NO: 10248 - protein, 104 aa, Lawsonia intracellularis
LFIVLSIFFTEAINSTSCINKTLFSCKKRMARGTNFNLHIFTFGRKGFYTKATSTSNSCFINLRMNIFFHRVHLSDFEQIYIYYFVMTSKLIFMCYIITIYFYK

SEQ ID NO: 10249 - protein, 251 aa, Lawsonia intracellularis; identical to SEQ ID NO: 8742

SEQ ID NO: 10250 - protein, 180 aa, Lawsonia intracellularis
MKIKLFFVTSIVTISLLTSITSVVLACSVTSEVHMIDDNGIKQSIGTVTFTDTDKGLQIKTDLKGLPAGEHGFHIHEGGSCGPAEHDGHLTAGLQAHGHYDPDKTGKHEGPLGNGHKGDLPRLVVKADGIAKETLLAPRLTVKEIKGRTVMIHAGGDNYSDKPLPLGGGGARIACGVIPN

SEQ ID NO: 10251 - protein, 89 aa, Lawsonia intracellularis
LYKKREVSGKYYLFILLKFFEKLFFSYLLIFIDKLKRTDLFYILTTFFERFILWLIEVFSIMYNYLMIHYTLFYFPYILDLHVIIHFIL

SEQ ID NO: 10252 - protein, 532 aa, Lawsonia intracellularis
MSDKGKTGGSMPEEDFTGWRAILWPVYNFELKKFLPMGLMMLCILFIYRLVRDIKDTLMVSQATGGGAETLGFLKLWGVTPSAILFMIIFVKLANKLSKANLFYTIVSFFLGFFVLFGLVIYPLTEYFHMSYETISHLQTTMPRLYWVWPIIGNWSYAIFYILSELWGSVVLSALFWQFANEITKISEAKRFYSLFGFVGNFGLLASGSIIIICANIAKNSAVDGTIDVFGESLKYQMLAVLFFGLLLLYLYRWMNKNVLTDPKLYTPGAGSKKKSKPKLGLIESTKCILTSRYLLMISALVIGYGISINLVEGVWKGQIKLLYPDPNDFNVLMGKLALTTGFVTIIIMLIGANILRRFSWRTAALITPIFLMATSVIFFGVIIYENKMGLDATLWGFGVLLLAVVVGLMQNAFSKGVKYSLFDATKQMAYIPLDPELKVKGQAAVEILAGRLGKSGGAAIQSIMLLIIGGNVTLASQVEFLGSAVLVVVAFWIISVFGLSKQFETLQSEQQAEEANSKENKEVKDGELCTN

SEQ ID NO: 10253 - protein, 79 aa, Lawsonia intracellularis
MENFLQSANEGYFIIAMMDKDYIFAIPFEKLTNIVPYLNHKIEDKHLRYHLALYNDNDTFVLNLPLKSKVMSLEEFKLS

SEQ ID NO: 10254 - protein, 244 aa, Lawsonia intracellularis
LIIQALYYKILQMNLEDDLDIMSKMVFIEVKKNAIGFDGIWKIDGSRDIIIEVKTTDYYNIRLDQVFSYKKQCITTNNVSQDAMVLFVVGRDDSNSLEAQIRGSRYAWDARLISIEALLSLVFIKEKTQDINTLEKIRALIEPIEYTRLDRLVDVVFLSIEDAEKSVENEIIQQEFNNSQSDTDLINEPCQQPAETTSNPIDTVLKKERITNRTPIELIEEKRQQAITILAKNKNTIFIKYRRT

SEQ ID NO: 10255 - protein, 101 aa, Lawsonia intracellularis
MALLNLYEGNSSNVLSMSIKQIVTMAGDGNLKDNNTTSLELRQFLSKIQTKYFSLYIKDCLESSFDNSGFVLQDITNELGRRLGYNVKNGLYRGKKKRYWF

SEQ ID NO: 10256 - protein, 319 aa, Lawsonia intracellularis
LLFSIRHIILHWNNHFTMSTAKQKINSDLPTQQQATEAFTLATAQTQHNVRILLNNIASNPPQALIIEGGTLDERFSIALWYAARLNCIYGTPCLTCPTCLQIGAKLFHDLFLLHGAEGSIKIDDIRKLRTVFGEPAHSNGKKVVILAEAQHLRTEAANALLKSLEEPHPQTCCLLLVPQREQLLPTLVSRSWTITLPWTSVMTSSSSELIEEWEEKLTTFLITGKNWFNFTTNKNVVEASLVQHIISLIRKTIVLSLKKQRKNQLVECLSILSPVDFLNLQDILSQSESALHIMVNPTLVLNRLVTHIYLAYHNALQL

SEQ ID NO: 10257 - protein, 1011 aa, Lawsonia intracellularis
MIPSIFFDRQDRELLRMINDTLDNIHSDIKQQPTIDINLHPHGILELTTTREFRVAHAVINLLTNIEKGKAKDRLYALQALHDEVLHSARTTFRYNTGRVLIQIMKDIVRSRHDESHQLKLVHDFRRTAEGNPNIVRKMLTKHHLLEMPEKWNQLTMDHHVHDSNTKGRKNATHLIMDAWVKGIRKLTVVYYNYVEPEIAREVLQAASIVGIIVRIGIEFQIPFHNRFIRVVWAPRGFSDPESFLTFLAEKPVYELMEKGKQVSQWMQQNVLTVLNIWNTKYRLELANELEIIIPEIQPQEFLAFVGQGQTSLLHLTECIHKQLLPLLYEKTSALKKEMLIATPEQVEQITHHIHKMNMITIESISERWITPDNNPEIANLFTPDHPTQLPELLKLSPYNLLKYVSSLRSGYRITLQLAKLTAEDVLELLWDCKGMITHLELFNLKEWQQGHLIHLAAINELQLAINDPNILRLKQLLVSMIRRLELLNTEASYKRYKKFIVILRNLPILQAPYKISPLRSRIGTDSTSNSNLRHGMGLAAPQTLPASSRRVLAKKQLFNPMILPVHVPLAFQKTWIVTTNTEGINYKILSFLRKLPGLRMLGRQKKEEWQALANIKIKPYGNIIAMGGIGSLPDNGIYLRKIDKKKQTNSWPNITYLNTKCANLLKIIIGFVPATLAFLYTQEWWVLAWFGSTIWFVITGIRNIAQAILGGGSFSKTSLLRWKNFISWSRICDSLMYTGLSVVLLELIIHDLILQKTFGFTLSNHYIIVFTVIAICNSLYIAGHNILRGFPKEAIIGNLFRSIFAVPLSILYNDILIESLLLFNIANPLAVLQPGAAIISKSASDTVAGVIEGFADKNNNYRLRSWDYKTKLEHFFNWYTKLELRFPDLDILFLLSKPYELFKITSKEAPELQRESIINALDFMYFWMYQPYAQQTFRSILNTMTREEKIILAKGQNVLLLVQEVSQLFIDGYMGKNFARALSFYLTSHETYINSIVTAIQHKTYNITLE

SEQ ID NO: 10258 - protein, 265 aa, Lawsonia intracellularis
MIKSLTPFSQSSYKTPQKSIPKFIQQFPNIGYLPILWIITKGGIKAYFKKYTSESWVQSSKEVFSVLEKVGCQFNIEGLEHIHNNNSPCIIIGNHMSTLETFVLPSIIQPYKPVTFIVKKSLISYPFFGKILSSRNPIIIKRQNPRVDFSKVLEEGSNHLNSGTSLIIFPQSTRSHTFLPEKFNSIGVKLARRTGVPVIPLALKTDAWGEGKLIKDFGPINPQKTIHFSFGAPIYVSGTGKNEHEKIILFIKEKINEWNKLDNLS

SEQ ID NO: 10259 - protein, 410 aa, Lawsonia intracellularis
MSLTPLSEKLRPNNLDTFIGQNHLLERLQYIISAPRLPSLLFFGPPGCGKSTLALLLAYKKSTNILRISAPETGIQQLRQKLTDIDILILDEIHRFSKAQQDFFLPLLESGKLTMLATTTENPSFSVTKQLLSRLNVLQLRQLGYNELKELVKKGTLFLNILLPDDVINFLATTAHGDARTLFNLIEYISILPEEKRVLEYIKINLPEILERHDKDGDSHYEYASALIKSIRGSNPDAALYYLACLLEGGEDPRFICRRLIISASEDIGLADPQALSLAVSCQQAVEFVGMPEGFIPLSETVVYLALARKSNSTYAAYSNAAREVRLHGAQPVPLHLRNPSTQLQKQWGYGREYKYPHNYPNAWVEQEYFPSTISNRSFYYPKEQGEEPKLNMWHNHIKKKYSIPEESPK

SEQ ID NO: 10260 - protein, 175 aa, Lawsonia intracellularis
MDRKIIFTINQFETAIVNLSQELIDNYITFDNILFIGIQRRGVILANRLQKVIVEKTKQSPLIGTLDINFYRDDWTTRQLHPIIGESFIPTILDDKTVILIDDVIYTGRTIRAALEALNNYGRPTHVKLLTLIDRGGRELPIQPDYIGYTTNITSQHTINVLVKEIDGEDAVLLE

SEQ ID NO: 10261 - protein, 260 aa, Lawsonia intracellularis
MIAKKNTSFGEIELPWSNYKTFYLAHEHWQEPYILNKKESHHLLHVLRIQIGTEIHVLDGRGREGLFSVKEVIKDRVSLSYINDWMHPEPTRKVVLAAGWTKAARRGWLFEKAAELEAWAIWFWKAERSQFPLSEAKKESWQGQIIAGAKQCNNPWFPSLQLFPNGIEELIYNVDTIGCDFRHVLVENTCGPAQPLTLDMLKQTGLTICVLGPEGGFTHKEILKLKEASFLSLTLGDRVLRWETAAILCLGLHWWKKVYS

SEQ ID NO: 10262 - protein, 241 aa, Lawsonia intracellularis
MSQNPHIETTQHDRSINSMFGRISRWYDPMNRILSGGLDIYWRHCLVEAMEPGKTGRILDLAAGTLDVAIALHNRYEQLHISAVDLCFSMLYQGMKKLHRANITRVWPITADAKLLPFPDSCIDGVTLAFGIRNIVPRTKAFSEIARVLLPGGRMAILEFGTGKQRIWMGLYNYYLTKILPFIGKLSSDPSAYLYLKQSIMDFPHPDELLDEIRAAGFHQAYYTPLSSGIVHLYIGEKANK

SEQ ID NO: 10263 - protein, 423 aa, Lawsonia intracellularis
MTSAKSKISLPVQMIIGFFLGIMAGIFLSEEITSNYLRPLGQLFITLIRMVVVPLVLATIVAGAAGIHDINKLGRVATKTLIYYFATTAIAITIGLIFANFFQPGVGFNLSIATTQSDMVEPPSVIQTIINIVPLNPIEALANGNMLQVIFFAVMFGFALSSLGEVGKPLLRSFELIGDTMVRMTNIVMMYAPIGVFGLISYTISTHGVDVLLPLSKFMLIAYLASIAHVLLCYVPLIKATGLPVMAVFKRLMEPTFIGFTTCSSAAVLPTNLQAVRSLGASKGISSFSIPLGNTINMDGTAIYMGVAAIFASEIYGIPLGFEKQLMVVLTGLLASIGTAGVPGAGLIMITLVFTQVGIPLEAVTLIAGIDRILDMIRTAVNTFGDAVGALVVSKLEGDLGTEPFDETCEVSALSTGTETYEN

SEQ ID NO: 10264 - protein, 169 aa, Lawsonia intracellularis
MYNQILTHPKIVTLTNLLPKLEYLKSNGKKIIFTNGCYDILHPGHLDLLTRAKTYGDILVLGLNTDNSVKRLGKDPDRPFNPFHIRAFVLAHLELIDFIIGFEEDTPLQLIEAIQPNVLVKGGDWCVEQIIGKEFVERNNGLVLSLPFLEGHSTSGLVQKIRNKKSNST

SEQ ID NO: 10265 - protein, 335 aa, Lawsonia intracellularis
LRRPSLMHQSMPLRTVSGMRPTGRLHLGHYFGAIKSWLSMQQEIEALFFVADWHALTSDYANTTHLKEYIYDLVIDWLASGIDPHQSIIFQQSKVPQHAELNLLLGMITPLSWLERNPTYKEQQQEITTKDLGNFGFLGYPVLMAADILLYRPQLVPVGQDQLPHLELTREIARRFNNLYGTIFAEPKAKLTPTAKCPGLDGRKMSKSYGNAIFLNDSFDEVTHKVKKMYTDPARLRKSDPGNPDVCNLFPYHQLLTTPYIQDEIREGCVTATLGCVECKKILLQSLKEFLNPFHERRATYENKNYIDDLLTDGNQRATIKAEDTMNLVREAIYK

SEQ ID NO: 10266 - protein, 224 aa, Lawsonia intracellularis
MFEFDITNAIKRIAVAFVPLVLGIILHEVAHGWVAQRRGDPTAAMLGRITLNPTHHIDPLGLMVFTITSLTSPFIFGWAKPVPINPRNFYDLRKDTMLVSFAGPAANFLLAFTFGLLLRIFLEFFPAYEWQQSSVWTYFFLMFSSGIIINFTLAWLNLLPIPPLDGSKILWAILPNELGYKYMLAERYGFVIFIALLLTGLLGYILYPLINLSLILCTLLFGLN

SEQ ID NO: 10267 - protein, 398 aa, Lawsonia intracellularis
MVSIDDQLQLIKRGYVELINEESLRKKLSNEKPLVVKAGFDPTAPDLHLGHTVLIHKLRHFQQLGHNVTFLIGDFTGLIGDPSGRSTTRPALTVEQVQANAETYKKQIFKILDPLKTNVVFNSKWLMSMSSVDFIRLASHYTLARMLERDDFSNRYKENTPIALHELLYPLMQGYDSVALKSDIELGGTDQKFNLLVGRTLMSHYNIEPQCILTMPLLEGLDGVRKMSKSYGNYVGIDEQPYVQFSKVMSISDELMWRYYELISTSSLSEVEKLKQNVKEGHLHPKKVKEQLAVDIVTQYHGKEKAYEALQEFTAVFVNGALPDDTPEFICNYGETSKPPAFLTDSKLCTSRSEAKRLIKQGSLTVNDKRYHDVELPLEPGDYIIKLGKKRFLRLQVQ

SEQ ID NO: 10268 - protein, 173 aa, Lawsonia intracellularis
MLLSSQHEVIQEYISGEILTLTIYSVNNLINQIDIDWLKNPFNPTTTIGKQVKNLLLSYEQGKLVQWDLLPLNWNSIPKNSFQKKVLLTLTTIKYGTTISYRDLAALAGNPRAARAVGNIMSKNPWPLVVPCHRVIGINNHLTGFKGKKGLSIKAWLLHREGHLISNNKSIIS

SEQ ID NO: 10269 - protein, 359 aa, Lawsonia intracellularis
MNIRKKTRKIYIGNIAIGGDAPIIVQSMTNTDTRDIEATLKQINQLHAVGCEIVRLAVPDANAAKALKAIHDASPLPLIADIHFDYRLALTALESGIEGLRINPGNIGERKKVVTVVDAAKAHKASIRIGVNSGSVEKHLIDKFGGPVPEAMVESALNHIKILEDEKFYEIKVSIKSSSVLDTIAAYRMLSKSCDYPLHLGVTEAGSLIRGTVKSSVGLGILLSEGIGDTLRISLTEDPVEEVPVAWEILRALGLRRRGPEIIACPSCGRAEIDLIRLTKDVEACLVNEKTPLKIAVMGCVVNGPGEAKEADIGIAGGRDKGIIFAKGKVIRSVHGQDKLLNVFMEEVNKVIAEYNTTQ

SEQ ID NO: 10270 - protein, 1194 aa, Lawsonia intracellularis
MSKKTLSTHHDSINSVETIRKQLVLTGSDIITIGEDAELLVGGKNYNTALLGQIKEIKTPQFRAISSLAFHQILDETKVCAALIRSKVEEHYTHINWNNPEVVQDHEFLPKFVRNIASIIQYELDGNTNKLPLIRLRTFIEHVVDGFASSQENIDQLRKRSILVQCAILSVPLPPQVIEAVKIAYKEICNEAEENNVPVAVRSSAAGEDSRKKAFAGLQDTYLNMVGEDAVVLAYHWDCASAYNLRSMIYRREAILDALTKSESTGDEQFAIQAKQEWAIENTSLSVCIMRMINPVVSGTAFSADTATGCRGTTRNDLVSIDVSYGLGEAIVGGMVTPDKMYVYQKDDANEVIIRFMGNKTLKIIYDEKGGTKKIPVSERESIMWALSPTQAEQIAKGVRAISKAYKDIIMDTEFCIDTKGTIWFVQARPETRWNDELMLYPNTIFMHRCEVDPQAAATAKIVLEGNGASRGAGQGKVRFLNSALELNKIQKGDILAAERTDPDMVPGMRVASAILADVGGDTSHAAITSRELGIPAIIGIQNSAALKALDGLEVTVDGTRGHVYHGLLPLYQTGGEININELPKTKTKVGLVLADIGQSLFLSRLRNVPDFEVGLLRAEFMLGNVGVHPSALEAFDNGSLESIIQKKIDELEVHLRKTIQEHLCLGLVNLDLHLREHVGHISGYTEELERLHKRNDPHNPEAVIATYRQIKELEKRLDELTELAASSLDTLKVSSDLSEHVKIIMGYQKQLLSLNDESPQLKKRRIDLEKEIETYTADIAQNPIVQKTISQIEQLRKEVSERCGINKKIKELQSIPLAIGSLIRSCGHKTGREHYIQTLSQGLALFSMAFYGKPIIYRTTDFKTNEYRNLLGGILFEDFEDNPMLGYRGVARDIHDWEIDAFKAARSLYGAKNLQLMLPFVRTIEQARSMRSYLSEVHNLRSGEDNLQIFLMSELPSNAILARQFIQEFDGFSIGSNDMTQMVLATDRDNQSLSHIYDEEDPAVVWAILVTIFTGQKYGKKVGFCGQGVANSAILRGIVTISGITSASVVPDTYYQTKQEIADIEASNISLSELGQWLTKQHKNNLKKLLEEHGYNLFNTNPTNQDIQLWYNKNISTLCTQLQKNLTTSQAPKIAKTLKEFRTLFHKAVIYATWPWEETVNDALYQAGFRSFEEQKVALEQQRKHIMNTISYK

SEQ ID NO: 10271 - protein, 327 aa, Lawsonia intracellularis
MLKSINGTLRIVHIQSSKEKNNQNIIIHNPQLIPELLLRDNSPTFIHKNLHGLKNTSIPCMEASLSCPSLSSSKTIYLPEVVYLHTTCSSSLDIAYTLYKENLLPIWGSIIVTSQTAGRGQLGRTWCSPIGNVYATVRLPQCELFSKTKAAIIASTFFIHALNKIGFHVFLKWPNDIVVFANKQWCKVGGILLEERDDILLAGVGINMNKNSNEYTIREDASLQPSNLPPHPLFSGYGSILPLWLSLVSQVYLCYKEHRDVNQKTSWVKLAEQYLCLKNCSVVIKDGLNEHQHYKGIIAGIHDNGGLILSTSKQKKIFLSGSLYPLL

SEQ ID NO: 10272 - protein, 325 aa, Lawsonia intracellularis
MNKILAQDEVDALLRGLSGGEIESETDIPEDDSGIVPFDLANQDRIIRGRMPVLEIVNDRFARLCTNALSNAIRKRVELNPISIDMTKFGDFMRSLPVPTSINIFKMDPLRGNAIIVVDSRLVFALVENVFGGIGSQPKIEGREFTRIEQVIVDRIIKIALDNMEESWRPVHDVKLELIRSEINPQFAAIVPPSDVVIVINFEVELDSSIGSMTICIPYATIEPIRSKLHASFQTERLEIDHAWVGRLKERLLETPVELKVRMGNTQITGNQLLRLKIGDVLVLDTDVEDLLECTVAGVTKYWGIAGTVKSNKAYQIIKEEEPHC

SEQ ID NO: 10273 - protein, 162 aa, Lawsonia intracellularis
VHPQLTSFQHSLQIIIGQVLLIILCRLVFFFFYKVEDKEFFMLSKINILFFLLVISFLSIHTSSVAVESEKSTYSDQLTSENKVYNKQYSGNSSTKVYHNKECRYFDCTACTIGFDSKEEAEKAGYTPCRLCENKKPSQLSQETEKNHQESLDNTKKEQNSQ

SEQ ID NO: 10274 - protein, 500 aa, Lawsonia intracellularis
VDTIMLIRNSTELFTAMLDRKTIILGDEGELQTKEKTLGSRLKPQPARVAPELTAKQSEAVQLSMAKLVEYEARSSFGRANLPYPMPLGGKSYEETLHKARLTLGNKMIEFVAEKELKDEPKAIRQGVIPYLQALWQEEHPEGPIDIYEIQTIVKDILTELKKDPGKPLSQLAYGFILGPTELQEHMLYLEQKIGRAIELTWDDKHQHEFDENGIYDIFTRDAPRDRPYFQNVKLSYEKYSNEDALEKYKEMLIKEFPERSIAAVVGICMSQTIMADFSAMIMNVNTPFPLNPYCEKNSQDISRIMTLVTSNTDPLPEETLDEELDEDLKVQEIPLRGAEGGGQLQELPREEKPTAFTTSEQVELAEEAEESSSEEEPSTSSVTRKPLSLREQLIKTARTRTSRTMLFNQEGYVLIIRNFGISLRDTTTGFYQQVGSTSFMLQIPKDQFPLAVGAKPVVKVVDMQVERKTPFVGHHALQKGFIGQVIPGPVLMSEELKKK

SEQ ID NO: 10275 - protein, 390 aa, Lawsonia intracellularis
MLINNSKELFGYMDEGYSLVLDKEGELHTQTWAGYSYDLARAAIVASRFVQTSQDDLLLAMATLVEKDAISKHGPCNLREPLPFCGRSFEDLKTSARKIVGKAMIRHCVTNELHDQPRPVQDGVKIYLQSLWKNKHPEGDSCYPTIKTFVEEQIKTLKESPGHALGHLACNYHLTSDELGPHMKYIGENIQTAIKETCCEEHKNDFDNEGIYTVFNKDCVRETPFLGGWRFGHNEYDNETLVSLYQDKIKEEFPDISMRRVVCVMMSQTISPVITEVIRGMGTPYPLCPFIPSNSLEMPENFLMNVSNEPPSPDNPRRIVMQTPSNVLFKYSYDIQVTSTVTGESQKLGNLQLSVQLPKDQFPLPLGAKPKLQVTDINLQRKKGIEVRIS

SEQ ID NO: 10276 - protein, 152 aa, Lawsonia intracellularis
MLQNIILMLNTIAHDQGLNTVIAPGEYSGALTIGGFNINIGLLESRKIILFQAPIGIIPEKNQLKLFKKLLTANNLFIETSGATLGLDYNNGLITLQVAWPFENLTYSSLTDLIGNVILLTGEWIEKINKFNHEDNDCTSSKEFDVQKMLAV

SEQ ID NO: 10277 - protein, 438 aa, Lawsonia intracellularis
MIITNKDSLLQALEQGYTLTIDNSGNIKTENRLSSSFRKFADLFRSAKTIKVRQQCLQIAMANIVNSDSIVNAGPRNIQEPLHSTSRTLEEIAATSQEILCSAMITYILEKKFGTENPQVQKSISEYIQKEWAEDNSTVPISYPAVNSFISSRLVGIYVTKILYNKPEPIRKGVISFLTSSWEKENSGSQPKQESIEQYVTQEIDHWQRTDPLGQTIANLAYGYTIDSEALTEHMQFFKQGILEAIDETWKEDKLTNYSDDGIFNLFTVDAPRDRPSIQGERVFLQSDLPNAKDIYVKMIKEEFPEFSMAAIVTTIMTQKSLPNLSCMVSGIKTYCPLNPYIPNNKDDNDMVPDVVPLIENSDSIQPRMTLTHNNEEIIIHCNYGIKLCCPILDLQQTVGNVQVDIVIPKGQFPLPISNIPNIQVKNMQVNRPVGFVA

SEQ ID NO: 10278 - protein, 806 aa, Lawsonia intracellularis
LYNLFLPFILTNLIYYIIIPSLFIAFFPLQALSIINISEFAQPDINQSQTKWNLEADTLTTLSNNTIIEAKGNIILTKGQDVFKADFARYYQKTGWLFLKGHVTVKMDENEINADEAEFNLNTKTGWLNNGNIFISSSHVYFSGARITKHYGDYYTFNNVKVTTCDGPHPAWSISAKEAIVEVDGYAQLYDSTFKIKNIDVMYSPIFTIPAKQTRQSGFLNPNYGISQRRGIYYTQPYFLNIDQSSDLTFYAGLMTKIGPLGTVRYRSHKFTNQKTWFAASGIHDKNNIVTPGKDPVYPSSQLVRNNHQRYWVRGMADGFIGNSTWCYISNLDYVSDQDYLREFDQGITGFSHSRSEMFQMFGRDIQEDDQSRLNALLIRKDWQRIGVVGNIRYEQDPTLGHGNHPTSQSELTQRIPQIDMFLYQGKLFQPLSLEGAIHLQSAYMYRAKGTKGWRTELYPKVTLPIDLKYGSVITTVGLRETYYQTGIKSHTSPVAPHVPDTKTPRQTGQHRSLFNLQLESSTQAHRIWRLKDKKTINLHSQSIGKTFCTALKHTIQPRICYSFIPREGQEKNPFYTLSDRILPQNDLTYSIVNILTKKNVTISVDNNNNNNDNSVTPTLITSYYDLLYWNLSTGYDFEEERRKQYVEKYPKRPIKDIYSELELYILSWLTYSGKTFISPYNGNITRHDHNIIFKSDRFSWKTGLSFRDQYYNYREHLQYRDENNIIMSSRLRLLQNSFSIQLLPNVSVTLEDFRNLRELGTFGKTNSQLVEVTYLAQCYRIIGRYRYDGYDRSYTVLIEIPGLFE

SEQ ID NO: 10279 - protein, 380 aa, Lawsonia intracellularis
MYSSSVCIKIHLERLRYNLRILRSRYPNVMPVIKANAYGHGIRVVANVLRDEGVQHMAVGSITEGFLLRQEGHQAFLLALLGPFSEEDARIAVVHNITPVIHNIESLQSIVHYSRVHQGGTAVPVAIKIDTGMGRLGFSSNDYISLIDLLRHTPEVNPILLLSHLVAPEISSLDNVTHNQVEQFARAYKAIKEAFPTIKTSLTNSPGLLAWPNYIGDFSRPGIALYGGNPFYGTSRVSLGKGFLPVMEVEAPVVAINTVSAGSSIGYGCTYYAKEDIRVAVIGAGYADGYSRSFSNKGWVVIKGKRYRIVGRVCMQMLMVDITNSHSKISIGDKAFLLGGGGSLAIKPEELAEWWGTIPHEVCCSLGSSIGAQQKQLVII

SEQ ID NO: 10280 - protein, 150 aa, Lawsonia intracellularis
MSKKLPGIESILRSFSEHLLNKGLRNTHQRQQIIRTFLSTTGHLTTEEIYHIIKKEDPSLGQATVYRTMKLLCEANLAREVRFSDGIARYEHFNEHHDHLICDTCGINFEFIDPTIEKLQQKYAKQYGFILKSHQLYLYGICPTCQNVSL

SEQ ID NO: 10281 - protein, 349 aa, Lawsonia intracellularis
MDKNELYSTTIKSITKNWVVIRLSALGDVVLTTGVIHYWYTHFNWKFTIITQEGLTSIFENNPAVQNIIALTKEQLLPKHIISTARSLANHHKNYGLIDLHGTLKTRLISLLWRGPIYRYSKMSFERRLFLLTKNRLLKKRLNKWTVPQRYIYALNTLPPTPDQLTPIILLHKKEEDKVKNYFTFLESPEQKVVAIHPYATHINKAWNTNSWYNIIEHLTSEKIPWFIIGQGTPLKNIPPQHDFTNKTSIRETCALLKRAAVLVTGDSGPMHLATAIKTPVIALFGPTTKDWGFFPPEDANIILEANIPCRPCSLHGDKKCPIQRKCMEELTPIQVMNAIKKILARQPS

SEQ ID NO: 10282 - protein, 80 aa, Lawsonia intracellularis
MKKFHSTQFGVMLRTLRQQRGLSQQTLAEFADVERNYIYYLEKGLSDPTLGVLIGLANGLGLNFSEFAEKIETVISIRKL

SEQ ID NO: 10283 - protein, 169 aa, Lawsonia intracellularis
MLIIFRLTFRLFVLTIFSILIPFFLFLCIARAESFIKVIDGDSLSLYKTGNKKILRLYGIDSPELSQPFGLLAKRATEFLVEHGNIVVKNMGYDIYGRTLAIIYLEDGLTLQEHLLRKGLAWVYPKYCSDVMCNYWYELEEFSRKNKFGLWSKKRAIPPWKWRKLKLRY

SEQ ID NO: 10284 - protein, 157 aa, Lawsonia intracellularis
MVATDVIKDLGQELNIPGLEFDQNLVCSFSVHNGNLDMTIETNETGDLVYVCGYLGIMPDDNNAAAAVAILFAQANSTLSSMNRGVLALDYNGERLLFSKLYNVSHWEPNECIESILQLIEDAEEWKHRLYQPDFGLSELTKGGINKTENNNSFLKV

SEQ ID NO: 10285 - protein, 507 aa, Lawsonia intracellularis
FYLEAIFNIEHNGIIGENTMRVGSRPDPNVPTNVEQNSDIDSDDNTSSSTTCCVSTHSVNEGAQQHSDSTPLTDRASQGRKWDPSIDFNRLGAQLITSVQSFFTIIRDRVSSFITNMKDSGPWARSRGSYDFHRDDDTISTTSSDSYTTVSDINSSEDTASLNSFHSVSSHSSSEKTFPVYTQEQLQQFAQEGVTNLVHSRPYVSNGPSIKFPDQLGGHGDVGFLQGTNIVFKQNLTAQEAKTYKLLNDLKNWLQDPQPSSINIPESLKGISRSEMKQLLDNKDLLLSSLPFPLAMAEGEGSAAVAIKNVNMYQSEEGSFNKVSSKGVIDVKLGCKTMSLAELKAHYPNKTKGISLFRKIVTNGVLPMLRGTTSRGYEVIPQAKGMKRLFMAKQASDNLMQNLSARLTAQQAVNLAKQVTDLTRAMRILPITFVGSSMLIALPDASSTNSMPQVGLVDFGHPVFSTEVTVEGPITEQVYGELKDNYMEAIGKLQSQIEEISYQASRH

SEQ ID NO: 10286 - protein, 642 aa, Lawsonia intracellularis
MESNMKVGPSDPGINRVQIEEQPSTESISSSSSGSSSGIRTREQSSNLDQRRMTSSNLRMSLRLNPVVSDKVLKFFGLRSASGSYSPSTSSSSSSSSATRSSRYSSTDSLSSRSTIGSNITFSESDESYYSTIEEDSESIYESVSSSSSSDIYTYDSNSNSSSVSNSTQSQAPELPPRPNVLQSEAPEPPLRPTSTSSQHSIQSQDSVGSDDVFWSESEPESLYADKEQVGEGAYGPIRSSLEEPIVLESNYISFGSDGVVYSDFAPMPQVTSKSSQSDSVSTPPPVSPREQVAGSLGVGSRSKLSSTNNVASSLFDPNMQRIARQAIDKTIHGNFGSPNGPKVDFPYQVGGYSKTGYIAGTDLIIQQHVNPTEQEVYTFMSQVGEWLKDPQGGPENAPEVLSGLTYPQLSVIHSYRDRLLGSLPIPVAMGGTSDNSAVVLLNPNKQPDGSGGVMNLSGFESTDVKVGPILVSKSELSAHYSKQAGGLGWARKVVTGRIGPGMRGATIRGYDMKLGKNERGFSRLQTAVGNSDDAFPKRLGGLTSNQLKNLEKTMEGLQQAAHFLPVTFVGSTLQFVLPNPGDTTTMPRVMLGDIGHPIFKDEATGDGPISPRIYDKYKSNFTSGMDSIKETISNIVKSKIE

SEQ ID NO: 10287 - protein, 157 aa, Lawsonia intracellularis
MVSTDVIDALGHLLNIPGLSFNEDLLCLLSVNNDNVDVTIETNESGDLLYVCAHLGTMPDDDNAAAAIALLFAQANAVLTAMNKGVLVLDYNGQGLMLVKLYEMKHWELEDCLESILQLFNDAGEWKNRLYLPDFGLGGMDFDLDTSSSGSDQFMRV

SEQ ID NO: 10288 - protein, 900 aa, Lawsonia intracellularis
MTKVGGSNPFSTLASMVGFSKSSSSSSSSKVAELKSKFEALGTLTKASPRPANGTQDTNRLSDRLFRGHYTVPANTASRVGGHLQRVDDNKSSSSAANVAKRAAAHSSFASSNPGLQGASGSSSGGTGGSITDQVKSRGITARNFSDSNNNSIGSGSSSGSILDQVRSQGITARGSSISSGNASGTSNVNDGTSSRDYGANVRNTRERFEAGPGGAQGESPGVKDAKEATKGVSVSNLRGIFEGRGGADNNQVGRSSGGVSGASGSGGAQGTGGTSGLGGAQGTLGSGGLDGGGVSGAAGGTSGASGAGGARGTADGITSPGAREAQETIKNAGVSVRDLAGRFSGAQGTSGASGAAGASGASGAGGAAGAAGGGGLDRGGVSGSAGGTSGTSGAGGARGTADGITSPGAREAQETIKNAGVSVRDLAGRFSGAQGTSGASGASGAAGVAGMPAGSGDVVDGLRRGGEDTVDGFGRNQGSGPIPSSADFVDGPIGGIQGAGGASGAAGAAGASGAAGASGAAEPLPTNGTDQQIAEVVVRNAENGHFDGIDFSTQPGGVESNTGSIPGTDLIVQRDITPGEQGVYNNLSEMGSWMDSPNASPTNAPESLTDDHSVLTTLLNNKEGLQDTVPFPLAVGEGTVVTKTLDPDIDTSKIKIPLEIVFGSGSMYGSGIGGGSSTISSSMSDDGSSSIGSTTRKNRAGEIISRIAMNQSPGAGSGGQTVVGGLGSGSSNINISGGRGGIVYGPMPNVNVVAGDGLNRLQLGSGINPLALLQERMVNFSAAQLEHLHGQLTGMMAMMEAMPGVAFEGASVQMTLPEPGDTQTMPSIRLSGFGEPRLRENIGQPGQPPTQEAFDALRNGPLNGVSELMSQVQEMITVRSEGSISLSRSSSLSDLSSEI

SEQ ID NO: 10289 - protein, 636 aa, Lawsonia intracellularis
MKYIRCIYLGLLFFIYESINQIVRVVLLIHVGTSAIDSFYSIPLILSVGFINDVFPFILITLPLAICVLLTGSRVVGKITQQILFFVFSLYTAVFLFTGAAEYLFWDELHCRFNFIAIDYLIYTTEVVKNIIESYPIIPILIGILLCSLGVSWILLRPIAKKINNIPVPSVRWFFSVWIILASITTIYSPPTFSNNALSQELSKNGIWSLFSAFRNNQLDYRQFYPVIDKKLAFELLHHELIEPNSVFFNDNSMEWRRYIHSNSPEKHLNVITIVVESLGSVSLGDRTPHLNDLSKKCLYFTNMKATGTRTVRGLEAIILSLPPTPGASIVRRPNNHNLFNTGTLFRQRGYDTVFIYGGYGYFDNMNEFFSGNGFRIIDRSTIPDEYKTFTNAWGICDEDLFDAVIREADIAYTSNKPFYHVALTTSNHRPFTYPDGRVDVPSGTSRTGAIKYTDYAIHRFLKEAKKKPWFSDTIFIIVADHTAGSAGKTVLPPDNYDIPCFIYSPAHIKSQKIDTLCCQLDIAPTLFSLLNWNYSSSFFGKNILTLSKNDGRAWIGTYQLLGYLTEKELVILEPLKNPIIESFLSSYTTATNKSNSILIQQAIAVYQTAQELFTQGKLKENMLSTPDEIILSTSQ

SEQ ID NO: 10290 - protein, 879 aa, Lawsonia intracellularis
MVKLNNVINFNKKLAKVNVTSLSMLLFNFIAIFFLIQSDAYAVIFSNSQPRIFTDVNTPAETYFGGFDMRDPRSPINSGPTSMTFTTHNLAQNQILAASGGSMGTAARGSVVNGDATITMHNTVCNFLYGGGYSEGPDVVVTGTANISVYNSQLIDIFGGGFDNGGHNGHTSVGAVKILVDHSVVQNLTGSASSVGIESQGRYAVFGDVDIAVVNGSDVTTLTGTSTSSAHIKGNLSILVENSHITDLNCVDHALLDGNLFVRIGPGALVDRLFLSTENLPKGSSLFEIDGGRVDGLFVGPYAGTLNDAKVLMKNGYVLNLDPSPRTPAGVIKNLDIFMEGGTIAWLNLAPQQGVSHNVTLHLDGGTVENLRFGNFPGANFDGIISFAKAEVKGGTIENIEPLRRGVLNSSLIFIPGGLSRVHTVENGRGLGLSNVTVQEGARTVWGLPGNRFTIEADDFDLGGTIILPSTDSTIELVVNNHLIASGGMFEINDADRSRVTPLVVFTGNPGSSVNIIDPLSVNLDLPLSFLGTSGIVLAQATPNLADPKLFEPIIHKGLMWGDIVFDATSNTWFINNIRESKDYYGYLSVQGASNWLRQQHMITTQRRSANALLHKHDGLWVDIQAGHEKIGTNYGNSKMPWVMASAGYDYRKNINDNIAMLYGFALGIGDGHQKWTLVSKMKNRITMGLLDGYLGFSYNPIGLYGLVALQGSVSKIKTKSPGFFVNENWTEVVPTESLELGWHYAFNEFFTITPRAQMILEQTPKHSIEFCCRKNKEKIKLHRNTTVTTVAGILANYNIEWLDIHGSVDWIKGVAGTYKAHSELFNKTFKDKNNNSVLRASLGCDYIIRENMSIGITAFGDMINNKGIGGQANFSYKF

SEQ ID NO: 10291 - protein, 130 aa, Lawsonia intracellularis
VASNLDEVKCNQLYRYFVTQDSIIAILMDGIWYMFFPKDTEGKKMEEKAFMEVNLKEIDPTLLPELRKLCKGRFDLQKTLETVHELKFNLKIKLLLVNNLEEPQENFVIYITKEFGIKAQQKAIELYRLC

SEQ ID NO: 10292 - protein, 370 aa, Lawsonia intracellularis
VAMTIELFQRQTHINFVAKRHLAYIISIIFILIGIRTIIVNGGVRYGVDFAGGIAVQLQFSQPIEDEHIKEALTKLNLPGLTIQQFGEDNKAYLVRFSSSEFNSMTIKSDISTILHTYSPSNPVTIQRLEVVGPKVGADLRNSALEAIFYAILLITIYISGRFEHRWIIAAGITGVLAAAMYCMNLFDFSMVTKVVIALILTILLCWKLKLNFALGAIVGLLHDVLITVGLLTLMGKEFDLNVIAALLTLVGYSLNDTIIVYDRIRENLQEQKQKNYLPLSNIINLSINQTLGRTIMTSFTTFVTAFSLFILGGTVIHDFALTMIIGIIIGTFSSIFVASPILLIFGDTQQYIQHTTTPIYTRPGENGIV

SEQ ID NO: 10293 - protein, 527 aa, Lawsonia intracellularis
MKSLPWRITISLFILILSIIYVLPSIPFIDNSIIGKYLPDTKINLGLDLKGGIHLTLGVDVNTAVSNALVLTGQDLRSTASKNGLTILKTKITPDGQLEFLLPRKEQENDLEELIVKSYPQLVLSKPTTIDGSLKYYAHFTQQAKISIENMALEQAIRTIRNRIDQFGVSEPDIRKQDNFRIQIQLPGLTDSTRAIHLIGQTAHLTFHIVRDDLQQNTPLPSGVRLFPQVIFYPDGTSREILIPLEREPVMTGENISDARPNFDDKNNKAYVALSFNSQGAKMFERITAENIKKRMAIVLDGKIYSAPTIQERISGGKASISGNFTMAEAQDLSIILRAGSLPAPVTILEERSVGPSLGEESIEKGMLAAIVGGFAVLIIMPLYYGLSGLLADVMLLFTMTLLLAGLAAFGATLTLPGIAGIVLTIGMSVDANVLIFERIREELKKGLMPLKAVIAGFDRASISIMDSNVTTIIAAAILYQFGTGPVRGFAVTLSLGIIASMFTAIFVSYTCFLLWLRKSKKKTLSV

SEQ ID NO: 10294 - protein, 112 aa, Lawsonia intracellularis
MISIAHAFGTPDPSSGEPSNVFMQFIPLIIMLAIFYFLLIRPQQKRTKQHKAMLQALKKGDHILSTGGLIGRIVDIDGDTITTDLGHTTVQINRAYVVGLVDQKGSLTKEEK

SEQ ID NO: 10295 - protein, 1075 aa, Lawsonia intracellularis
MRSFLISIVTLFLLGIIVFFGITFYFIKQHPQYITNKILSTISKQLKDTSISANSIGFHIVPFPKLYLTNVILQTQKGDTIHIKECLITPKITNILSGNISIYSIEVIQPIASIILQNEQKKNSKTTGYAIPKQVSHLLQLITDSKLFIENGSITFQNNDYCFKIIGINGKIGVSKTLTSSLKLTADEIIWEIMNTVSNNSSTAQKSIEKVQLHIEDMPYKINTALLHDTSPLYDLFTNTKKTTFKVSGAIPTTNTANNITFDFTTKLEKDNSDKLTMHGQLHIEGTLPNGNTSIPILLSVPFTTTSSEDMTHFPPLLIKNSKLLFDKTHIDLHGTIKNYDTLSNLFFDGTMDVKNFSFPYWFTFARQLPNGIQHALNQLSGEIKFTLSPQQVNAQKIIIHSLDTTFQGNGTVNNFLSPTITLSLATKQFNLNTLLPELKGKKSSQLSYPKETFLTILSNLHNNNNNNNIKKTINYDITIQADHVTCWKFDGYQFICNIQPKPQGTQIHTNCKNFYDGSLSSSLLLSNRHTIQLAIENIQLSDITNIITKEYELKGKASGTSRVNGHGDTLASFLSSLKGTIDLYVTDGLVKKTASEAIPFSMLHLTCDSIGQPSKGNKSSTIPYKGKWSAEISSARWNGSITMDGLIQFSTTDWLSIKAENIPSKVVCSVSGVQAVAYGGISFDIDNSFLSFSNFQGEIHPKTALSGTIKTSSSTSNTRQWEGSLTVMTQNLRNLLSKLGYEPKNISPTMLQYCKLQGDIFISPATIRLTNIQGILDNTLIKFSLNGLQTNPPSWTGDIQLSSLNLDKYLLSINQNKLKKSQELWPIELLNKVNIQSTLTLAELIYRKVPYTNVVVPISLNQGTLSITPITASLCDGKTEASFKACPLSTNGNSAQIDFHYISKGVDMIKLSKKRQQEYLISGLGTFVINIQSIAKSSIDFLKNLQGKWRIFIQNGYFKRNTTTTQQNFSNIGATGNIINGIITNNNFAITGPGMVITGSGKIDLPEWNLDYLITIDMEGFPIAIPIKYTGSIDNPKRTINAAKLILSTIGSLGRDTIGLIQDIFSAPLKLLLP

SEQ ID NO: 10296 - protein, 1069 aa, Lawsonia intracellularis
MKKMNIQKSSYEEYFPLLRQIRASAGSGKTYELTYSFLSLLNKSINDNNTNSSYNKYEHSWTSILAITFTNRAAAEMQQRIITRLKQAALNTQPIPGLTSTQAAHWINIFLRNYSELNICTIDSLLHTIVHSTALELHLPPDFQPIFSTEEALTPLLDSILKKTQHNERLYIILKEACSDILFHTKHNNFMIGSTLREKVLSILPLLINGEQEITSPQEITAHLTIKIQSVKKIATELASCIKNEQLSIHSNFKKALEACQIGTQHTIPPKSTMLRKPNLTDCILKSSKNTPSHHTISLYNTLQSLITYLDTTGVLLKNSQKTIPYVKLAKELYNLLPEFFCKQRIILAELIPSLAQQAVSGHYGISEIFCKLGTNLQHILIDEFQDTSHEQWAVIQPFVVEALSYGGSLTWVGDVKQAIYGWRGGDTTLFEKVLSDPELQSIASYVQKESLPINWRSAYHIVNTNNTLFTKLSDHNIVQSIFSKILPNEIAPTIKNTILSEQVPLVTQSFADAEQSIAPNKKEGYVYIQRILNDEESDPDTVVHDRLINIIHDIQTRRSLGDIAILVRSNKRAMQVANWLMEKNIPVVTENSFLLIEHPIILQFIAILEFLDSPQNDLAFWRIINGGNLVQPLLNIPQQKLDEWICIRNRSQPLYLAFKADFPDAWEHWILPFYDDSGLLSAYDAIQESIDRLKIKKRFPKEMSFIRRFLEIIYIASTKGYDSISNFLEYWKQHGHKEKTPMPENIAAVRIMTIHKSKGLQFPIVIIPWHDFPLKPNDSLIQTCVDGFNIIVKQSPAMPKEYYSSLLKNVCESLNLLYVAWTRAEEELYALITSTKSKKISFAEAINPILDYLSWDNNIYQLGEKTYTSNHTAMLSSNKNSTEIPYIYLETKDESTSSWRPMHWLPQLRIFRNPVNELGITSKRRGTFIHHCLQYLCISKNPNIDISLAIDYAIKRFPLPLPSSQYNIIVKDVLSILQWYTSLPKTRYWIQFGLAEQTLLDKNNNIYRVDLLVNNGKEYSVIEYKTGETSLQHIQQLQKYLDIIKETTSLPVKGYIIYLDLKRIHTIE

SEQ ID NO: 10297 - protein, 455 aa, Lawsonia intracellularis
MTNTHYSSLSVTLLPIKTLGEAAIPSPLPYCDIKKNEYIHLCLNQEQIEDLGSSPTLSLELAGPRQDLYFEPQTTRCAIVTCGGLCPGLNDVIRAIVLEAHYAYSVASVIGIRYGLEGFIPKFNHTPIELTPDVVKNIHCFGGTILGSSRGPQQPEEIVASLVHHNINILFVIGGDGSMKAANSITKEIHQHNLRISVIGIPKTIDNDINFIPKSFGFDTAVEKATEAIGCAHVEASGAKNGIGIVKLMGRESGFIAAQSALALKEANFVLIPEVQFTLHGNGGLLPALEKRLSERSHAVIIVAEGAGQHLLDSQDETDPSGNPVLADISTLLKNSIKDYFSKKDIPIILKLIDPSYIIRSVPANANDRVYCGFLGQYAVHAAMAGKTNMVVANIMDNYVHIPLNMVIKKRRKLNTKSGLWRAVLESTGQGRLTGMLPHCNPLTNEENEHTKVII

SEQ ID NO: 10298 - protein, 110 aa, Lawsonia intracellularis
MSNTDNYIMIKKTNNLNKLLWSILLCFLLVWVVLTFGIGIPYYGVQPSNLLESLGYKKKVTKVNNNQQVLYTEDTLDQMTLEVMRKDKKSNLVSSSVQTPYFFIWLEITC

SEQ ID NO: 10299 - protein, 290 aa, Lawsonia intracellularis
MKEITNLKNKKQHNKKHRQLPYTKQLTKMQHPNFSEYSLDFLSTISILSGIKPVLDLIEKEPQKIDTIFLQKGLCSKEYQKVLDLCRQTNIRFIFTTSKVLNRFCLTNHQGIVARLFESGFIELEDLFDKVPDAPLPLIVVFDQIQDPGNAGTIIRTLYSLGGAGVIIPKHNGVFLGQDARRAAVGCLERLPISKAINLSRAIETANEKGFHIYGTSIEKDSKNVFEAELKFPALLILGSEKSGIRLQLKKRCHTILHIPMVRDVNSLNVAQAGGIIISCFARCQNNFTV

SEQ ID NO: 10300 - protein, 555 aa, Lawsonia intracellularis
VYQVITVIFILRSRAMRIKVSHYLMLLLLLLNFGILEGCGNKKLSGSDRFVSTRSYSRCKEEKTGTVYLPADDGTPLNKTEFNAFNSKGQFDRNIDSKDMRDILLHFKKYVRHERKTVEINVQRASRYLHHIIKTFRQEGLPDELAYLAFIESGYNPCARSCTGASGVWQFTCATGKYYGMSKNSWVDKRRDPYESTRAAAQYLKRLHQIFNDWHLAITAYNAGEGRVSRALAASGAKSFFELRRRNKCIPEKNRLSEEGKQYLPKFLAICKIIRNLKQLGFEPIELSKSQKMVELKAKPGTNLKTLSRHLGMSWDEFFAHNAAYLKHTTPPGVHSTIYVPHHKVRMAHAFLNKKSKSKTYMADRGKYRVVRGDTISSIAKKTGVSIADLKDANPHYGSLRVGTILTIPSSSKMVANYVEPEIYQEKTVQDTKNSQNTKVQFHTVKKGDTLFSIAKYYGITQDCLVTANNLSHTDISVGQQLYIPIEKISPMAMLKKDPEQVQPKRIVQYQVQQGDSLWSIARKFNVPPIDLLSLNNLSRQSKLRPGDYVQVAIN

SEQ ID NO: 10301 - protein, 252 aa, Lawsonia intracellularis
MKTTFKYLLAIVIIVVLWKIGSIIIGENILPNPTKVLIYFYNSLKTKLFLTHAGISILRISVAMALAWFTAFPFGLLLGTKHLVDTIFSPIIFLTYPIPKIVLLPIFLTLFGLGESPKILLITLTTGYQILIATRASALNIDKKYRDSFRSIGGTPSQELQHVIIPATLPNALVALKISSGTATAVLFMVESFATQSGLGFLIMDGWGRGNMLQMYTGILAMSLLGMGLHEFFNAIERYLCRWNHLHSGLAT

SEQ ID NO: 10302 - protein, 248 aa, Lawsonia intracellularis
MSFHGISVVNINKIYNNTLILHNLSFKIPAGETLSIIGPSGCGKTTLLYILSGLEKATSGDVSLYSKKIAFILQDYGLFPWKTVEENILLPLLLQSTPIKEQKKALKEILEELQLVGLEKRYPIQLSGGQRQRVAIGRALVTKPDILFMDEPFCSLDAITRERLQNTLFKIWQHRKITFVLVTHDIIEATFLGKYIMVLTPTPSPSMYWIENSTFNTRHCRTHETFFKITSKLQQLLIPIPSCDKENI

SEQ ID NO: 10303 - protein, 303 aa, Lawsonia intracellularis
MIIIRIFLFLLIMSYTQLAQSAINIGTLPAASSIILHVAIDEGLFADQGLEVNLVPFRSTVELSSAMRAGMLDGHFTDIVTVLLQNETGVPQQIVATVARSTTQHRNFGIAVSQKSSIQSPNDLKNTPIAISKATIIEFLASRLLQKAHLPPTSCPLTDINRIALRTQLLMSNKIEAALLVEPLLSLAESNGSKVILDDKGLNLVFAVIALRKEVLSDNIAQSFRNALLEAAKRINANPDTYRTLMVNKDLLPQDVVMTFAMPFFDIEKEPLPNSADIETFANWMISSKLLQTSPSYEEIVLQ

SEQ ID NO: 10304 - protein, 169 aa, Lawsonia intracellularis
VQTLIVVTYDTELKAEEVRLDFLKMQKEYLVALEDAVVVVRKPDGKIKLHQMYNLTAGGAVSGGFWGTLIGLIFLNPLLGLAVGASAGAIAGALSDVGISDDFMKNLAKQLTPGSSALFVLVNSNITDKVLDALHGTGGVIIQSSLSHADEAKLQEALNGMSSNDDSSN

SEQ ID NO: 10305 - protein, 256 aa, Lawsonia intracellularis
VIMINKTTKRHKALQEFLAARGYATIEDLARHFDVTPQTVRKDINRLASDGKVQRFHGGAGMPLGSENIVYDERKSICSEEKNRIARLLANHIPDGASLFINIGTTTEEAARALLEHKNLRILTNSLNVAAICARNSSFDVLVACGTVRHKDHGIVGASAERFMSEFRMDYGIIGISGIDESGNLLDYDYREVAVARTIIEYSRVVFLATDSSKFGRPAMVRVGGLSNVKAIFTDGPLEEKWRQLVESSGTELFIA

SEQ ID NO: 10306 - protein, 106 aa, Lawsonia intracellularis
MKIDNAPSVQSMLLGRSQKNTNSSTFSSQLKEQVDTSTNNITIQQTTPNIKGNISLPDVNIISREATPFLSKEEVDFFEKMMQKNINLQGGYKTYSTQQSSINIKT

SEQ ID NO: 10307 - protein, 230 aa, Lawsonia intracellularis
MKLSIMNQKLIGILGGTFNPVHSAHINIALAAIKYMHLEQIQFIPCMVPPHKTTKNVIPFQLRVDLLQAAIQGNPLLSINTIESILPQPSYTWNMLNYWKKLHTLHQPLFILSDEDFAMLDTWYNGLELPSITNFLIIPRSTNKKQSFSSTLKRFWNCTTIIQDRHNKMVSYASIFKNLYCFFLNTPIMDIRSSNIRSAWKGGVYLNHTMPTPVTKMLEYHQNILKKLWK

SEQ ID NO: 10308 - protein, 195 aa, Lawsonia intracellularis
LSFIIRHSKTIIAFFLILLSIVIIAGVWSWYSSREEIKAQAALGQILINSVSTEQFDTLIKFEKTAPTALQKGIILQLAFWAVQLEQYQKAAEEYGILYNKDPKGAIGILSGLNQADLLQRTGNWKEALNVLLSLEEVASNPILTGIYESQAICAEHIGEKNIAISAYKKLIDELNITGVDATYYENKLTILSNS

SEQ ID NO: 10309 - protein, 132 aa, Lawsonia intracellularis
MDDFLKEALDIVKAQASVRVMAEDEIISMVRRLSSGIKVVSEGDCIQEEQAPTELQMDPRKSVKEKSITCLECGRTFKILTRKHLRSHGLDANEYREKWGLKKDTPLVCKSLQRERRNKMKDMKLWEKRRKS

SEQ ID NO: 10310 - protein, 249 aa, Lawsonia intracellularis
LKNIINTIIFPKQRNKKMSQKFSMLQLILFFLTFIFYSYITDSYAESIPIVKELQQSYQSIKNFSATFTQELTHQESGSKETRIGKLFFKKPLLVRWETNTPHEELLLINTNAVWDYLPDENLVYKYSTDIVKDSTSIIQVITGQVRLDKNFSIIENNNNNNNELIFLKLYPKEPTTQMVEAFLWINKKSLLIHKVQSIDFYGNTNTITFINITPNTHIDNNIFQFTPPKDVTIENLQDSSTPERPLFN

SEQ ID NO: 10311 - protein, 895 aa, Lawsonia intracellularis
MIYSGKENKSTRNLSLQQSRPNNETPPEDNNQKLARELFGLFLIFWGLLVLLSLLSHDQRDPSLNHVVSNFSKAHNQAGIFGAYISGLLVDIFGFSAIVWPAIFIAWGAGCITTWLTIPWWRWLGFFILSFCLISFGAAWNFGIGDVRGGGIIGMTIYKQSSIIFGTIGSTLIWLFLFFISLEFAFGIAWLNILHRLQNIIKNKIEKYDISLKTICSICLNYNWLCFIQNYFPFKKQEEYIDIIPLYEIHNPTLQPAYPYDSSLLHNTLAHQYTGIATLSSYRSERIQYSHTSNNQLWNIPHSLQETLKKSHKKSIISTTYNEFTSPDITPLTLEDDTFEDTHIDIDKLENLDTIDITTHPLITSPTTNKYEEQIQHTSSNNLPKLLESFSETSSIPTSTALRQTTNLVKHKLPLPSLSLLHSSTENDILPSQLTLKEKSKKVMDCLSDFNIQGELVRVTPGPVITLFEIRPAPGVRVSRIANLSDDLARSLMAEAVRIQAPVPGSDTVGIEIPNENRSLVSFKTLIQSKAFKNSSSPLSMALGKDIEGKSTVKDLATMPHILVAGTTGAGKSVCLNTILLSFLYNATPTDLKLILIDPKRVELAMYTQLPHLIHPVVTEPALAKVALEWAVYEMDRRYNCLARLGVKHFNEFNKKLLSIGNNKPEEFADLTYLPYLVVIIDELADLMMTAGKEVEGSIVRLAQLARAAGIHLIVATQRPSVDVVTGLIKANFPSRIAFQVANKYDSRTILDATGAEQLLGKGDMLFKPNGGKIQRLHGAFVTDEEVTAVTEYWRKQQAPVYEVDFSNWNNPLNINNTTTSNTNTKTPFSSSDEESLYAEAITFVQEQGRMSISLLQRRFRIGFNKAARFVERMEEEGILPPTIRGNRSRTIRSN

SEQ ID NO: 10312 - protein, 185 aa, Lawsonia intracellularis
MYSTTDFRKGLKIEIDGVPYDIIDFQHFKPGKGGAMVRTKLRNILNGRVIDNTFRSGEKVERPNLESRDMQFLYHEGSELIFMDLTNYEQLHMSEDVTNGKSEFLKDGQQCRVLLYNEKPIDIDIPLTLILEVIETETAIKGDTVSNVTKPAKLETGVVIQVPIFINIGERIKVDTRTKEYIGRE

SEQ ID NO: 10313 - protein, 202 aa, Lawsonia intracellularis
MMTQYKLQLEATNFTKQQLQQQLDILEQNNILQIALAGRSNVGKSSLINALAGRKQLAKTSGTPGKTRSINFYAVYPNTFMLVDLPGYGYAQCSKIERQHWAMLIEYYLKNCSKLKAFVLLIDCRIPPQKLDYELAEFATSYCIPLIPVLTKIDKCKLVEQNKRQKEWRALLNNTQPLLVSSKNMKGVQQLWERIQYTIDSY

SEQ ID NO: 10314 - protein, 219 aa, Lawsonia intracellularis
MRIESDGSWRQVPPNNSSTSSVESSQGAQQTNQTEETSGRRSSSSFWGRLCSRCSSGLSRVGAAISSMFSSLVSSIRSLSQYITRDKTASGVSSGSLAPRVSSHGIGGQDGSTRHTTSNPRDSAPPDFSPPPPPINKRHGGPDSDPIYDVPHGVGSTSPSLLPHGKPDTDPIYDTPRNFGIVGAPIPMPQSGGNRSQEPIYDTPKKPGESSSSSSSSSS

SEQ ID NO: 10315 - protein, 141 aa, Lawsonia intracellularis
MKIYNEPTWYDGIKKENELIEKEKPLEDISSYWEFCNIELGIVARVIVGIFTLGLSEAVFKCMRMYKAKKSEIYGPPIVKGVSWYENGKKKRVWDDNQSHSEEAQSQPQRNRSRRNRQLGSRAPNRYGLMYRNGMPTRFWV

SEQ ID NO: 10316 - protein, 182 aa, Lawsonia intracellularis
VMRVDAGQRINQALMADTTQATSTNETSEAQNTEKTEGSKGSSKLCGMNCKKGLKLAGRIALAVLTLGISEGVRKGIEAYQARQVKSEGARMGKLWETGKPSFPEKSGIHNPSATDDNDKNLWTSSSQKNSGGVNSFGKESPSPSSGSSGSHFVFHDSPQKPSSGITAETTLKTNSGGATGE

SEQ ID NO: 10317 - protein, 152 aa, Lawsonia intracellularis
MPITITLNAPRPQDFEDNTSVNRDNRTENTRQTQETSSKSATSSSASSFLHGLCSNCRQLGGAMARVGSSVLASATLTVRNLGVRAVNSYAATQVRSGISRLADLISLRDSQSGPRGPEITVSYNKDQDKVTFHDPYNRGGFSSSGSSGVSG

SEQ ID NO: 10318 - protein, 158 aa, Lawsonia intracellularis
MPPIDPAIAAKISAAMNQGLYDYANRNSNDSSSASSTSSASSTSSLSSSSPLYTANCKQGLKMAARVGLAVISLGFSELIMKGISLYKSRQATQNPQPRVVNVFESQPPLEISRRSSTDSTSSSGSVSSRTQLIFEQSSHMPTSGITAEMSLTRGSND

SEQ ID NO: 10319 - protein, 140 aa, Lawsonia intracellularis
MEITMSYITILIPALLIVLIWLILQSKTLANIHDHLAITDNDELEILLTKVSAVTLIDVRSSQEFNVGHLTGAINIPLKFLKKSIDTLETTKPIILIGNNSKKLQKVAILLQKRRPDLTLQYIKGTLVHTLDNNIIIKWD

SEQ ID NO: 10320 - protein, 267 aa, Lawsonia intracellularis
MQSIIKFIHISDTHISAQGCLVYDNNPRVKLQTCIDEIKRDHLDAAFLILTGDVTNDGSMECFSFLQEVLSELPMPWYLVMGNHDLKQSLFTAIPEYPRDPNGFVQFTVDTPVGLCIILDTTIANQSSGILCAARLDWLANELKQATKPVLLFFHHPPFSLGIPSMDAIVHSLKNSEEFFAVLKPYKDKIRHMFVGHIHRPICGSWNGIPFSCAPSTAHQIALNFQSDKSVLGFKEPSGYSIVLVNNDQLIVHFQECNKTPNIIIKA

SEQ ID NO: 10321 - protein, 349 aa, Lawsonia intracellularis
LSAICLNNVCKYWDTSKAVDDINFKVESGNLLVLLGPSGCGKTTTLRLIAGLEKVTSGQIIIDDCDVTYLPPSKRHLSMVFQSYALFPHLTVQENILFGLKVRKVPKQEQKKRLDNAVAMLNLYGLLGRKPSMLSGGQQQRVALGRALVANASVCLMDEPLSNLDAQLRNDMRKEIREIQQALKMTMVYVTHDQVEAMSIADQVILMNKGVIVQHAVPEDMYIKPQTIFAASFIGTPPMNIINLSQKDGKLIISGSQDIFIPQVPEGATVIGVRPEHLQISSVGWPSIVLSNEYHGAVSLVTCKVGSEKIIFIQHGNVTCSPGEIVYLSCSPEHMHFFNGDTGNRITRH

SEQ ID NO: 10322 - protein, 431 aa, Lawsonia intracellularis
MVRQFIHKIYYIGFVLSFIIVVPTFAIALDKVHLTFCFPVAVSGPITKIIEDMTAEFMRTYPDIVIKPIYTGTYKDTITKVLTAMHGGEPPHVAVLLACDIYSLIDENAIIAYEDLPGGAELSHDYFPVFMKNSQAQGKTWGIPFQRSTIVMFWNKEAFTKAGLNPTAPPQTWQELIDISKKLVNRDSSGKVTQWGISIPTTGYAYWMFQALCIQNGLELANSEGTKVYFNDPRAVEALQFLVDLSYKYGVMEKGTIEWSTIPRDFLEGKTAMMWTTTGNLTNIQENTTFDYGVSMLPKHIRLGSPTGGGNFYILKKTTEAERDAALKFVKWMTDKERAAQWSIDTGYVLVRPDACQTENMKRYIKEFPYLDVALEQLKYGVAELSTHANQRVTKVLEDAIQSAVTGTKTPSLALEEAQKDAERILLRYSN

SEQ ID NO: 10323 - protein, 295 aa, Lawsonia intracellularis
MILLRHYIISQVNAWLLLLPAFIIIFVFSLLPITSTIINSFFMNGDGGAVSKFVGIDNYLYLLEDKVFRKALWNNFIFVMSVIPCSMILALIMALWVNTKLAGRSLLRLAYFVPTILPMIAVANIWLFFFTPQYGLIEQIRSFFGLSGINWLGSESTALFCVIVVGIWKDAGFFMIFYLAALQHIPPSLGEAAILEGASRFYYLRRIVVPLLMPTTLFILINATINAFRMIDHLFILTKGGPNNASMLLLYYIYEVSFQFWDTGYGSVLTVTLLIILGFIALFQFGILERKVHYQ

SEQ ID NO: 10324 - protein, 278 aa, Lawsonia intracellularis
MKNKYNPYEPQGITYFLELAGAWLLAVIWALPLVYAIWTAFHPMAYSTNFSLSAPITLENFKLAWQAAPFAQYFVNTLLLVTLVITSQLIFCTLAAFALVRFEFRGKEIFFWIILIQLMIMPDVLIVENYKTISSMGLLDTTLAIAFPYLATGFGIFLLRQAFKIVPKELDDAAAIEGANIFQILWYVYVPLAKPTYIAYALVSMSYQWNNFLWPLIVTNSVSSRTLTVGLQIFSSIEQGVNWSIIAAAVLITTIPLLLALLLFQKQFMQSFMRAGIK

SEQ ID NO: 10325 - protein, 509 aa, Lawsonia intracellularis
MILEYTMNTQYAINTSVVRSFASKCFTILSSLNIVSLLILFALQNILLLIKYVPYLLQYYDQIILKFGIATYSDSMIPLTPWLYLTAISPINLTSFLMITNMSLSAIVLIFTWLLAIITKQKKNVPFIAGLLLLSTMITLLMPYITPDSILFAAIVLLAIICLYKGWMKSSAPFWLTIGFLLTGCAGLTGGLVGFFIPLISSLIFLIWSGNLRRAGCYDGALAFGLMLVMLLGWGSIISSVENGRELLKFITTYQIINPTQTIFHIQTKDFLFSTAMICLIWLPWTLIIFLLPWSHFFSIPRKLIAYRLSFPGHSWIWINTLITVLCIIFISSSDLLSIISLYSLIAILTAQCIISLTEQKSLFLYLGISSYFLVIGLLFLFISLYPIIQTWLPRGFETDLPKIIESFFFDKLGIVITSTISILSFFILWKFTNKRSPTGSLIVVVLCTTLLAIILSYYTTPTSPNEMTLFMQLQHSSTPATTNRVPIDSLPDSTDSNEDTAEENYHDL

SEQ ID NO: 10326 - protein, 313 aa, Lawsonia intracellularis
MRVVVLGGSGFIGSSLIKTLEGRDHSIIVSTRDSSDISISPSSNVSYVVWNGIDREPCFKMFDGADVIINLIGENVASKRWSENWKEKIVTSRIQVGKTIVSVLEELKSFPSVFIQASAIGYYGYWKNFDTAPQCTESSLPGNGFLAQTVIQWEASTSALDTLGIRRCIIRTAPVLGMNGGILKKMLPGFYFGLGSIFGSGSQPFPWIHINDEIAAIMFLIDNKEACGVFNLVAPEQLNMKHFAQCLGKVLKRPVFIHIPELLLRLTLGEMAEELLLSGQRAYPEALLEKGFTFRHGLLLPALKDLLDNHLAM

SEQ ID NO: 10327 - protein, 364 aa, Lawsonia intracellularis
MDPLTHALTGATIVYTFPKESRPWWFLVWGMLVAMLPDIDILFVSSAIDYIKVHRGITHSLAGAWGLAFICTIPLVVLTALRPQPNELPPPKQISWTLIEAWFFTYAILILHIWLDVMNSYGTQIFLPFSEYRVRLNSLFIVDLLLILPLIIGLFFRRNNRFIMVLLLLWTIIYPLTNIVIRLGLETYLTHSYLAKNTFQTQKEITLPRHNTEEHIIAVHLIPDAFTPFHWKLILDKGEHWNVSGYNSFTSPPSKFTSFKKPPEVLWDMLKEKSSIFRTYEQFVVFPVLTESYETQTGKVYIFSDLRFGSTIPFINDLQVKREGEELAFRIMAHINHAGELSSVRFITGFGAGGDTGWVDPLPD

SEQ ID NO: 10328 - protein, 360 aa, Lawsonia intracellularis
LPILHLIKYIYKTVRKTMTAIHSYSKKYTESTQTSPEYLLKLAHEVLTIEMDGIETIRERLGNTFVEALLLLSSCKGRVIVTGVGKSGLVGRKIAATFSSTGTPAFFMHPVEGAHGDIGSLKSSDLILSISNSGETPELNAIVPTIKSFGTPMIALTSVLNSTLAKAANVVLHTEVPKEACPHGLAPTASTTAVLALGDAIAVCLMSLKSFTEKDFLRYHPGGMLGQRLTLSVTEVMRTDGLPTVHLGTSQCNALKTLDKGGLGVVLIIDKKNTVCGIITDGDVRRSICYNRLKQDAPVEQIMTPRPKCGKPQDTIAILLDIMEQKAITVLPIVDDNYKLLGIVHIHDLLGKGTIIFSDR

SEQ ID NO: 10329 - protein, 243 aa, Lawsonia intracellularis
MLFQSDIKKYFTNTAHRRKRIYDRLGNYKTYIKNPKELLWKYKARYRANYFISKPEILALQQKVQDLFHGQTYAKYSDFKRYFIINLRRIYRLGLHKSSPVRILDIGSGAGFFCWLCKQYGHDVYALDIPGVAIFDYLIPAFNIPRTYCSIQPNISIPKMDQSFHLIVAFAICFHELEGNQRWNRNNWLYFLNDIKKNFAHPGTKMHLFFNDHPHGDFEQVKSYVISSNYTIKVGHKTLEFNF

SEQ ID NO: 10330 - protein, 133 aa, Lawsonia intracellularis
MKKVKLSCQEVYTLEQKDIEYFRALLTTMLEEAQHKGDSTLEDLTDGNEIFADPADRASAESDRAFTLRIRDRERRLIRKIQSALQRIDDGTYGVCEDCGDDIGTPRLKARPVTKLCINCKSRQEEGESIRGE

SEQ ID NO: 10331 - protein, 167 aa, Lawsonia intracellularis
MLSDSIKNWQNYELGPIWNELMLWINQKVNSSLPDGIYTVAGCNINIFPMTSRMEGSCLYESHRTMCDLHIVLKGKEYFWNRPINNLELEGLFNIDKDIGFYKPTTNTDGLSRITLTTGIWVLVFPWEAHLPDMSIDEHSITLKKLVAKIPFTHLTISAKKVTHGYF

SEQ ID NO: 10332 - protein, 420 aa, Lawsonia intracellularis
LVLDIQEKTNSSKGKVFMQLSYNESIMLHEKKLLCHTYGRYPIHVVEAHGSIILDANGNKFIDLLSGLAVTSLGHCNEEIAEVIEKQARKLIHTSNLLYHDEQLELAERLLSMGHFTKVFFSNSGAEANETSFKLTRRYMQHIKKCNAFEIISLEGSFHGRTLTTVAATGQPSLKEGFAPMPNGFKQVPWNDLVALEEAITPSTAAVLIEIIQGEGGVRPMDSDYIIGIEKLCRKHDLLLIVDEIQTGLCRTGQYWAFQHFPIKPDILSCAKALANGLPISAILTTDEIAQAFVVGSHGTTFGGGPLISAVATKTIEIMQRDNLHKRAEKLGNIFIQRLKNIANRHPTKIQEVRGMGLMIGIVLPCPGKPLWEKLLQKGFLLNLTQNNILRLLPALTIDEHYLETFAQTLEDTLEKYIQE

SEQ ID NO: 10333 - protein, 160 aa, Lawsonia intracellularis
MSAFLHSEVSIRFMYLRDAKKIYTTSGIAYETPASVGLDLRACIEETSLTILPGERETIPCGIAIEPLEKNIAGFVYSRSGLGAIHGLTVAQGVGVIDPDYRGEIIVVLLNTAKNPVHVNRGDRIAQLVFQPAFQVSLVETQQLDNTSRGSFGFGHTGKN

SEQ ID NO: 10334 - protein, 169 aa, Lawsonia intracellularis
MTEITHSGDQTTHLKILGKGSIGHQGPPSSSLLETFGNLYPHRPYVITIAFPEYTSLCPVTGQPDFGTIVVEYIPHERCIESKSFKLYLIAFRNHQTFMETVTNTILEDMVTVLDPLWCRVKGLFEPRGATHLHVFAEHIKEVEEKEKQEALHTVIFNWKQQYLPHSWK

SEQ ID NO: 10335 - protein, 269 aa, Lawsonia intracellularis
MENYGLFIDVGNTSVKIGIGVIDRLLISYTLSTNNSLSGDTLGIQLLQCINHAEQVINKDITISSCMMSSVVPTMDTLLQYACERFLLCKPHIINQDFIIPLDNHYEEQCEVGADRLVAAYAARRLFPDSKSVVSVDYGTATTFDCVTDNTYLGGLICPGIKSSLQALYTNTAKLPSIILNTASKVPIIGKNTKTSLTHGFLFGFATMTEGIYSKLINVLDGPVTFVATGGFARDMANVVCCFDAVCPDLILDGLHLLWIDCLSKSYSL

SEQ ID NO: 10336 - protein, 433 aa, Lawsonia intracellularis
MTAIASIWAREILDSRGNPTVEVEVTLDSGYIGRAAVPSGASTGTREALELRDGDKQRYNGKGVLKVVEAVNGPISEAVIGIDALRQVQVDNTLIDLDGTDNKSKLGANAILGVSLATARAAAEAVGLPLYQYIGGTNAKVLPVPLMNVINGGAHAPNNLDIQEFMIMPVGAETFRDALRMGAEIFHTLKTILSADGHVTSVGDEGGFAPHLKSHDEAFQYLVKAIEEAGYNPGSEVMLAIDVAASEFYKDKRYFLTEYKTPLNSEEMIEWLKGFTSRYPLISIEDGLAENDWDGWRELTVELGNDIQLVGDDIFVTNPIMLSQGVEEGIGNSILIKVNQIGTLTETLDTIELAKQSAYTTIVSHRSGETEDSFIADLAVGINAGQIKTGSLSRSDRLAKYNQLLRIEEELEDSAIYYGPVFSESNHSCCDHT

SEQ ID NO: 10337 - protein, 347 aa, Lawsonia intracellularis
MNSLSSISPKKILVCQLRQLGDVILATPSIELLKRRYPNAELHLLTEKKCVPLLENNPFIDTVWSLDKKKLCSLFKEVQWYWKVTQTKFDLVIDFQQLPRCRWVVALSKAPIRISYTPPWYTKLLYTHSIKPLDGYSAMSKASILRLLGIEWNGEPPHIYLTQEEKTLAKQRLTTLGLKSKSHLITIDPTHKKNTRRWPITHYIELLKMLVNAKLNLYFLPLWGPGEYKEIQQLINTPELNNYILLPDNMLTLREMSACINEAILHIGNCSAPRHIAVAVDTPSFTILGSTSSAWTYPSDNHRHIQSNLHCQPCNKNTCNISTKCLKLVTPQKAAQAILPFIRQLLT

SEQ ID NO: 10338 - protein, 331 aa, Lawsonia intracellularis
MATNLFSIQKKFTLFLVLVTLISFMYISFTIAKDSSSSSKEKNVSNKLYKKEQLTRLDECYTGGGNGYYQWDFDLDNIPKWQLLEHGLWLGKFPGVTKAGDVFEVVMLKINPQYYDFSLHMASQTGKAFSLQDWSNTYELSAVINASMYLPDGVTSTGYLRNHDHINNAHVGKRLGAFFVASPYNSTLPNADLLDRTSDNWEILLPQYKIVVQNYRVISANRQCLWSTKKVIHSIAAVARDGKGYLFFIHTKYPISDLDFGNLLLSLPIDIRIVMYVEGGSQAGLLINTSNFKQLWMGKHPVSILSINNTSVPIPNVIGIKKRKGPIPSLK

SEQ ID NO: 10339 - protein, 408 aa, Lawsonia intracellularis
LTPMGNCTSKLYVIMVGLPARGKSTLAKRICSGLEQQGIQTAIFNNGELRRTLFGGESACPEFFNPQNKRTKRFRDQILYQSMAGARGWLEQGGDVAIIDATNGTFVQRMNIMMTLQDRPLLFVECVNEDPLLLSASIQRKTKLPEFTELSEDEALESFKKRLAYYESEYTPLSNEPCWMRVDAVDNRILAESPCNDLPYYAAIRDIVVSRWVHDLFLVRHGETEYNLEGRIGGDPPLTEKGQEQAKQLADHFMSIDIPYIFTSTKIRSIQTAELLLASHNKTVCMELTEFDEIDAGICEGMRYLDIRKHMPHEYEARSTNKYSYIYPQGESYAMLKERVAQGLRRALFLAGEGTLMIIGHQAINRTLLSLFLFHRPEDVPYTYIPQNQYYHITVTQQKKLFEMIQYA

SEQ ID NO: 10340 - protein, 426 aa, Lawsonia intracellularis
MKNLLNQLEDNIHVFLLARNEDVAVVDRRSLRSINVKSIQFMELGIKAASTLVSNYLNQLSMPDLILCHEQLKDITGKEFVELLQLHPVLKKIPLIMTITNISQEHAENMYYSILKRPYSSSDLLKSIQLAKEKTQSIQHTVTSNTIAFETALEYFIKTHQSTKELSSENSYTAGIKAIREKNWDEAITQLNYIVKHQPEHANALLALATAWKGKGSKRKYRDILDELLHIYVKNHQWEHAKTINQRLVQVNEGTSNPLYSEACEFLSKKNISDAAQALIAGRTPFQNELLYEQVARGCIANPNPQEIATTLQEYLKSIGEAPLAELLGKHLFQPVKKRILSLEHSAKKIISSSKNEEQFSFFLDSANTQDKKQHKTNTQQTKNINEPENLKDRFKAPSFLKSMPKLQDAISILKFTYHMFRDSKK

SEQ ID NO: 10341 - protein, 133 aa, Lawsonia intracellularis
MINYYKFKQVYEYAINGKHEEALKLLIELQQEFIEIHDENNKLRLHLQDVQDTLFFSKNLHFDRNSYWFHHTDGKKGPFCKHCYELRGILSYIDNHKELCSTCGASVKKNTDPTLIKKNNCKKIIPFPQNVTN

SEQ ID NO: 10342 - protein, 311 aa, Lawsonia intracellularis
MKKIRYSSKHSIHKKIPIYEKIQWYDIAGSKNDLITFLDNLSISPEISEIAIENQPFPEATVFSTCAILRLPIRSEWSIPDCEYVTFLIFPDRLVTLHQSQVSLLVQLRIQYQKNTMDEDVKSIPTLISYILDNLIDANIRCFTRARLTTEEFGEKVDLATVVIKEQDAVNVRRQVSQLLSQFEDQFYALTNLETQHTKKAFLNELYDTLKDSIEAQGHLVRSLTHLEMRLRDIQQFYQYLMERKTEQRLRQLTVLSTVYMPLTLITSIYGMNFENMPGIGWEYGYFVLLGLMVLISGILIYFFYRKGWFQ

SEQ ID NO: 10343 - protein, 165 aa, Lawsonia intracellularis
MADAIALGDHIESKCTRCHDVTGHIVILMIDDEITKVECRACGSIHKYYPPVNQKSSLKKIKESSPGSKKVQKETTTSVNVIPKASSKKTKSQKVNRELTEQQWQEAINTSYGIRKPYTMTINLALGDIVDHPKFGEGVVQELFPPDKAEILFREGIKLLKCSTN

SEQ ID NO: 10344 - protein, 353 aa, Lawsonia intracellularis
MGIQKIQAAIIGGTGYTGIELIRLLSLHPNIQPIFIISREQCGKKLYEVHPFLSGMPYAETIFSPLDHKAIGKTCDVAFLAVPHGTGMEIAPQLLEQGTKVIDLSADFRLNNPMTYSQWYHLEHNASHLLSEAVYGIPELNEEFIKRANIVANPGCYPTSIILGLYPAIKHGLIKFENIIIDSKSGTSGAGRNTSTSSLLFCEIQNSFKAYNIGIHRHTPEIEQELSYIAKQPITVTFSPHLLPTTRGILSTIYTQLALPISQDEVYRLYTNTWKDQPWIRIVPSSKLPETRNVCGTMFCDIGLVVDIRTQRLIIISAIDNLCRGASGQAIANANLMFNLPMTTGLIFCPLLP

SEQ ID NO: 10345 - protein, 116 aa, Lawsonia intracellularis
MYKPITTKEDEVHSTTKNINGTKNTQPSFTTTSNLLPKVTFSTFILSLASSALAQLGEVPHPESGEIIQDLPMAKHTIEILSMLQEKTKECLDSDESRLIEGLLYELRMKYVMKKN

SEQ ID NO: 10346 - protein, 121 aa, Lawsonia intracellularis
MSFCLIKFCHLIHATKYSLMGLIQAFKSEQSFRHEVIILGILFFLLWFQDKNALHCLITISGWLFVMIIELLNSAIEKIFDLITTDIKPIVKAGKDMASAAIFLAIVINIGLWIYLFTLPF

SEQ ID NO: 10347 - protein, 868 aa, Lawsonia intracellularis
MNIKEFFSEDPIYLMDGSAFIYRGFYANQSMQRSDGFPTSALFNIGRIFLKILREEQPKYFVFVLDGPGTNFRHTLFPLYKAQRSPAPEALIKQIEPIKRLVISLGLCLTVASNSEADDCLASIAHRYRDNYPIVLIASDKDLKQCLDKNVLMWDPASKAEKITTLKSFKEDEGLLPSQWPDVQAIIGDSSDNIPGIPGIGLKTAKKIFQDFPSLESIKDNFSSLPLPVQKKFDGHLDAMFLYRQLTTLSTTECIDLQIDTIKVGPINVQETLTILREFELVSLEREFMAVVHQKKLIDPKGIIESGTSSHGQLSLFGSSKPINKIYCSTASDLPSVKGKIVALLTDKHEVTLAVENTEYFYTGPLLPLTKALNQSRHVVTPDLKSLLRTNGIWRTIPNTHWIDLGLATYLLDPEERDYSWPKLVARWGSVFGLSAGNPGLIALKVWEQLRNKLKTAQLLELMDSLELPLIPVLADMEAVGVVLDDQNLKIFLVEVQNSLDHLTETIYHEAGGSFNIRSAQQLGDILFNQLELPAAKKTRGGQASTSQEVLEKLSGQHPIIDTILEYRKLEKLRSTYLEPLPRLIGKDGRVHTTFNQLATATGRLSSSNPNLQNIPIRGSLGQRMRSCFTASQGNLLISADYSQVELRVLAHYSKDPTLLTAFLEGADIHTRTASLLYEKSQEEVTADERRNAKTINFGLIYGMGPQKLAQELNTTLNEAKKFIQRYFEHLQAIKKFYDQVEHSAKEYGYVTTIAGRRRLLPDIHSENIQLQALARRQAINTIIQGSAADIIKIAMLTVHGDTTLAKMDAQLILQVHDELVVEAPEDNAKEVGKRIAMLMSNVTPGGKPLIVPLVTQWSIGYDWGSAH

SEQ ID NO: 10348 - protein, 424 aa, Lawsonia intracellularis
MGNPIGSRNNGLNKKNKDEHFEDESSGNAKLWLALIFIIISAGVILLFWFVRGSVFQKDEVTTEDTQNMIVNNPSEAYEAMKEKLMKDIESSQSKEKEPMLEEVIEESISPPPPASTFNNYEQGSKHIFRDKDETGASERGIFSTKSTHPVHTKRDKKDDTVVRIGFIDSLAAWMAKNYIPPSKSTMSGSINVTLQSLNMRYGVGMTGLSWKGEDPQAARSAILRYVFTPSMLDALYRLYVDRFMKALSEELSVRRHNKVLTIQQKQEFYRLYATQFRGIASTLQGIATIPNFVQKVDDIKLAAKRVVDTNTKYINLVSCTDKCKELGNKVELQQLTKKVTAASKAYQQAIITREKMIKALILSIKQHTTTRVLDDSNILFLANWVYRRVKSDPGNIDAVLQSSTLFLDLAKRFEMTSGIIRHE

SEQ ID NO: 10349 - protein, 213 aa, Lawsonia intracellularis
MKSWFVIFLGIILLLYYPFIGVGKQTPRNSLLKIQYAIDSHNFELFEEYVDINGLLNQGVEYFFCSLTTVKDTSKLPSLLYLLANTIQVPQYAAQVRSLFISELYLFIKYGISSGLFAGHELLDEPTGLLTPYISKISLGRKELLFSNSEKVLAKMYKQKRDIVVPIQIKDYGNGRQYPVLLGMSFCNGMWKVTTIKNLPELCKKFEEEYLHN

SEQ ID NO: 10350 - protein, 314 aa, Lawsonia intracellularis
MNSSIRLICYIVCCFFILSKLSMAAVNYSDLEILVQHRIVFQEGSDIALFGDKQILFTQDAQILCDDNAILDFECLLASYPGVITGIITDEEKRLWLIVNGHKVLYDDGKKRIYSEALLNSTVKDSMAQLYPLEPSRPIPDVGIAPGRVRSYALLEAIYGNSREEVEKQLVGIRFKKREKICFFSHSAKAAQSLKDVFTQLDTLLDKDPQVYEYIFPLSGGFAWRVIAGEKRLSPHSYGIAIDLHPKKGIYWRLVKDREKYLQIQKEYPSELVGIFEQRGFIWGGKWYEYDFMHFEYRPELIYKAKRSIHNNVM

SEQ ID NO: 10351 - protein, 554 aa, Lawsonia intracellularis
MDTNNIKTVSQLIIECLEAEGVKYIFGLPGEENLHLVLACANSSIKFILVRHEQGASFMADIYGRLTGKAGVCISTLGPGAINLLLGVADAQTDSTPLVAISAQVGLNRIYKESHQYVDLVSMFKPITKWADIILTPNSVPEMIRKAFELAQTERPGAVFIALPEDVEEMHIDTSLKPLLTRPQHTSYPDPKMLEQAKELIVNAKNPVILVGHGAVRNKASEALQRFAEQLQIPVATTFMAKGILSDRNPLLLGVIGFMKHDYENFAFDKADLIISIGYELQEFTPSKINPNNNKNIIHIHQIAEDEDIAYPITVAIQADISATLNMLCEQLPKNSHTPWKGIANIIQLHKEELEYGESADDYPLKPQRVISDIRKAMKDDDIVLVDTGAVKMWMARLYPTYLPLTCIISNGLSTMAFSLPGALAAKLACPDCKVLVVTGDGGFMMNSQEIETAIREKIPFVILIWEDKSYGLIKWKMDMEIGKHQFVDFTNPDFVTYAEAFGAKGYRITKAEDLLPILQKALNDSTVSVISCPVDYSENMKLIEKLGELDLKL

SEQ ID NO: 10352 - protein, 309 aa, Lawsonia intracellularis
MLDTIIGALLPIVITLLLGVLAGWHKDFNIEQATILNQMVMLYALPLTLFSSMVLIPKEQLVSDWGLFFLICIAMIGGFLGVFLISRIVFKQDLGSAALQALAISGPAVPFVGVPVLGYLFGIESAVAIAISSIIMNLFQVPVSLVLLSISTLSESNKNNFYKHILNALRQPVVWAPLLALVFIVFNIQFPTSINDSLTLLGKATGGVALFASGIVLFAQRVTLNFPVVISVISRNIIIPFIVWLLAMLLQLPHEQTMESVLSMAIPTASITVILAVQYHTAEREMASILFISTTLSIITMGLFIWLLK

SEQ ID NO: 10353 - protein, 328 aa, Lawsonia intracellularis
LKYNYFYYDIIIIIYSYIILLNNTIKEDIMEECTLYGVFAPVPTPFYASGEIAWDKFIENIKQFGKTTLDGILVLGSNGEAVSLSELEKIKLISLAREHFPLEKIVLAGVGCESEYSTLTLCKEASLAEVDGVVVINPTYYRNTVSNPEVMLDYFLRVADQSTSPVLLYNIPRNTALNIPAWVSISASRHDNIIGIKDSSGDIIQLSTIIHDSAPGFSVIAGSASFLLPTLYMGGCGGTMAYANIAPDYCKAIIKAFHEGEHNKAKKLQMDILELNAAITSGFGITGLKYALDCLGYYGGPCRSPLPSTLSDKDKSTMQQLMKKVGLL

SEQ ID NO: 10354 - protein, 247 aa, Lawsonia intracellularis
LYYMEVFMYRLYSIILCIVILCSGCSLWTRIKKAIKSNDTIQEEVLNEAEAGTIAEALSELDADREKESSTYLNKISDKKTNIDPESVEKNTQHVKSVDPSPSLDETIPKKKVQIDNNNNKLSQSQEQKMYKDALHLYELHKYNESITLFDQFMEKYPKSRLMPNALYWKGENLYAQQKFADAIFMFKSVTATYPKHQKASDALLKVGMSYRALGDQDNATLHFRALYEDYPKSTAVQRAQKLGIKP

SEQ ID NO: 10355 - protein, 421 aa, Lawsonia intracellularis
MEYFFGGVSLTKKLFHSSALGALDAVSRKEFWASLALKYTKGLGGRTYKKLLTSFGSAFEALQQVKKWKQLGIPSDKSLGILSDSWRAGAKKEWEAVRGCYGTILLWTDPRYPNLLKEISDPPLFLYCLGDISLLENPCIAIVGTRKCSIEGIRVTRAFAKGLATAGITVVSGMALGIDREAHLSSIDFPGKTIGVLGSGINISYPRQNSDVRELLVNKGLLISEYAPGTRPEPGFFPTRNRIISGLSLGVLIVEAALHSGSLITARLALEQNRSVYAIPGAIGSPFAEGCQDLIREGARPIFSVDDILHDLSESLKGFINQYNKQDIIYKEKKEGLEEQDIMLSLPASNDKTTVINKQSQYKTFGKIERQIIDIIRLEPKDIDQLCQLLQLPAEEISPILIILEIEGIIKRLPNTQYVLA

SEQ ID NO: 10356 - protein, 313 aa, Lawsonia intracellularis
MQLPAVTETFLSWLNLHKGFSLATQDAYRRDISQFEVYLRTIGLTLEHPEHINKKHIQQFSASLYYKKLTRTSIARKLAALRSLFRYLLKTHHIKDNPAVGVHNPKQHVKYPEILNVDQVFLLLKGANNILKTSHTGLELAIAHRNNALLELLYGSGLRISEALCLNVSDIRTEDGFVRVIGKGNKERLAPLSDTSIVALEEWLAIRHMVATLGEQALFVGVRGKRLHRRQTIRILEELCLQAGLPLTTAPHTLRHSFATHLLEGGANLRAVQELLGHARLSTTQRYTHITLDKLIQAYDKAHPFSGTLRLKN

SEQ ID NO: 10357 - protein, 313 aa, Lawsonia intracellularis
MFQKITVCICLLLTVTVLVLGWHKAYARIGGGRSFGGKSFMNRPYSKPIPSSPMMRQQSNISQQIQQGSVANTASRGFGGLGGIFGGLLAGTLIGSLLSGHGFSGGGFLDLILIAGLVYLAYRLFFKRKITSNEASVTNSLYATQQPLTSEMPIPRSTTLSGTGWESLKSQHTTYSADVSNQAITTNIPIDFNEEEFLKGAKAAYVRLNAAWDNRDLEDIQQFTTPGFLNELQQQITENPNPETTEIMLVNASVVDVKKIEDEELVSVYFNVLLKENQSQESPIEVREIWHFVRPASGEGSWKLDGIQQVEHA

SEQ ID NO: 10358 - protein, 453 aa, Lawsonia intracellularis
MLPKIALVGRPNVGKSTLFNRLIRKNRAITHDRPGVTRDRMEGLVQSIGHPSFILIDTGGVILDSHYSTINIIDELHGFEKDIFQQVQLAIEESQAICLIVNARDGLLPFDEHLALFLRKTGKPILLAVNKVDGIEKEDQIVAEFHILGLPMIAVSAEHGHNIRQLENELSLLLPNNENIKDQSTAQAALKLAIIGRPNAGKSSIINAIIGKNKLIVSNIAGTTRDSIDIPFIFNKTQYLFVDTAGIRRRTKITDPVERFSVNASIKSATKANITLYVIDATEGITAQDKRLLDLLDTRKIPFILLINKTDLIAKKQKTLLSKSFKEELQFCPHIPILMVSAVTSSGLDQIIAMAEQVYLECSTRINTGVLNRAMEEIITRHQPPVVRRIRPKFFYLTQAETSPPTFVFFVNDAEKISETYVRYLERSLRKIFNLHHAPIRIRLRSSHKKRNQ

SEQ ID NO: 10359 - protein, 424 aa, Lawsonia intracellularis
VLLDLKLLQKKPEIVSTALIHRGSPLNITSFEELDTKRRELLSEVETLKAKRNQASIQVAQMKRNGENTNTIIAELSELSSKIVVLDNMINQVKNELYDWMLAVPNIPHYSVPIGKDETDNKEIYRWGEIPIFDFQPKEHWELGSTLQGLDFERASKITGSRFTILWKWAARLERSLINFFLDFHLAQGRTEVLPPLIVNEKSMTNTGQLPKFADDLFKLEGTDYFLIPTAEVPLTNIHSDEIIDEYLLPLSYCAQTACFRSEAGSAGKDTKGLIRQHQFTKVEMVYFSHPDQSYDLLEQMRKSAETLLEQLELPYRTVVLCTGDLGFSSSKTYDIEVWLPGQNTYKEISSCSNCESFQARRANIRFRASSGEKTQFVHTLNGSGLPIGRTIVAILENGQQKDGSVKLPKKLVPYMGGIECIEP

SEQ ID NO: 10360 - protein, 192 aa, Lawsonia intracellularis
MGNSILQVVIKLSLFFFIILLGCGPSNKVNLIYPKGEIVLPKSGAPRVVVVLFHGSNKLHTIGTKTDGSHFMPTSPVTEWISRSLAEELSKQGLQVSYARDLAQAKMSNPNYIVTGTISEVWVVEENPATFTAAIGLKVSLSNNKGVIYTENFNSSQERQSIPIGSQVEVLLSTTLKSLLESIAKKIHSEIH

SEQ ID NO: 10361 - protein, 359 aa, Lawsonia intracellularis
MNEVSVGIEDGDSIACQKQWGYFSIITYILLFFLIFSPSITIAKEPILEVTYTIPYHAHLVTEPVIQIAEAATKLHALEQTRSNFTSNLAVKLELRTREQQLALASAIYFVSIHERTVLDGPKLSIKAHVYPSSEKILDDHIRQLLRQQDHLQLRLLAVNQLEQYINEGVELLNQAHLCSSADIRCKHDDSLVPKIKRTSNRIKALELFLVELNDFEHVWANPEKSVLTFSEATALDPDNSLLWLGVGECLVLLNRPYESIKAFQKVMIKNNIPARTLYMRGIAHLQMYLPGLAIKDISQALQLEPEHPSWWRALGTAKLVAGDTVAMCADFYQACAMGDCEGLAEVREQNFCLVSPEF

SEQ ID NO: 10362 - protein, 503 aa, Lawsonia intracellularis
MKVYLIGAGPGDPGLLTVKGKEILQQADVIMYDFLVNEILLNYAKPDAEIIYVGKKGNSSYTSPQDEITQLLITKAKEGKIIARLKGGDPYIFGRGAEEAEALVLAGIPFEEIPGITSTIAAPAYAGIPLTHRDYTSSVTFITGHEDPDKIDSAHNWSALAHSANTLVFVMGMKNLPEISKNLIQAGLSPDTPAALIFWGTTAKHKSLASTVKNLPEEAKKNGFTNPSIIVIGKVVTFHSTLNWFEQKPLLGKSIVVTRAREQASSLARLLTELGAEVIQFPTIDITPVTETATIDQYVHKIKEYDWIIFTSVNGVRFFWERLIAFKLDARVFAGVSIVAIGPATAEAIREKGIQPDFVPEEYIAESIADGLVKLGVKGKRILLPRAQEAREVLPNKLREAGATVDIVPVYETRLAIKLQDNILQLLEQGTLDCITFASSSTVENFFEHIPITVLKKYRLPKFATIGPVTSNTLKKYGFEYDIQPTKYTIPDLVNAIADTYKG

SEQ ID NO: 10363 - protein, 227 aa, Lawsonia intracellularis
MSLKIAVFGSGNGGNFQAIQDHITKGTLNAEIKLLVCDKSDAYIIERAKKENIPYFIVSYTKDKSREEIDKTILDAVQEADVDVLVLAGYMRLLSSVVIKVFHNRILNIHPSLLPAFPGVHGIHDAQTWGVKFTGCTVHFVDEMMDNGSIIIQACIPVVDGESLETLQQRIHEQEHRIYPQALQWMADNRLELCESSRMVKVKGDNHRGLAPLSYGVLINPPLEEGF

SEQ ID NO: 10364 - protein, 166 aa, Lawsonia intracellularis
MVSKQKMSKEDAYFAGGCFWGIEDVFQNTPGVIDAVSGYMGGSTKNPTYEQVCTGQTGHAETVHVHFDSMQVSYKDLVKLFFEIHDPTQYNRQGPDIGTQYRSVIFYANELQKDIAEQIIKQLKQTNLPIVTQLLPVSTFYPAEEYHQNFTEKTGRGGCHLRVKRF

SEQ ID NO: 10365 - protein, 135 aa, Lawsonia intracellularis
MKPLSDKEAWIILHKGTEPPFSGKYVNHKEEGTYICRQCGAVLFNSKDKFDSGCGWPSFDDTIPNAVKQLPDADGYRTEIVCSTCNGHLGHVFEGENFTQKNVRHCVNSLSLLFEPSIELSQNKNHTNGEQTENE

SEQ ID NO: 10366 - protein, 218 aa, Lawsonia intracellularis
MSLSYFIPNINLTDIHRREMTVRQSRFIISIAHTPTVETAKNFIEKLKYEFSNASHHCWAFIAGAPEKTIYTGYSDAGEPHGTAGRPMMNILIHKKIGEITAIITRYFGGIKLGKGGLMRAYQQTIQLGLEELPLKKMAISTTLEVVLSYEHISSFLHLLQQFHCIIINELFTSDVTYVISIQNEYIQSFQNELTNLTSGTVLITQLLGKDIIDYSHS

SEQ ID NO: 10367 - protein, 252 aa, Lawsonia intracellularis
MLGIFSMETTNWAAESLAVICGSAFLWGLGSSLLSPCHLGIVPILGSHAAGYSIFGSNTNPLRQVLLFTLGFFLTIPLIGLLIGFIGYGLHFGGHYWTIPSGFLLLWLGWDMTRGHSCSHLSYLLGRIRTRLGLGVSSGALVLGFAYGFLAGGCSAGFLVPIYALTLPSSICVYVVIAACFGLGHTLPMTIAGGSVSLAKRFLGDKRCCDQNSKCESKTNEPHSGEAKFRKFVGIITIIIGILFILHPFLES
